United States Patent Application Publication US 2011/0014706 A2 - sequence listing, part 52

SEQ ID NO: 163018 - DNA, 2035 bp, Arabidopsis thaliana landsberg
  unsure (1)..(2035): unsure at all n locations
atcctcaaatctttaaccggtttttaagctcaaattccatcaccaaaaaccgaatcctttccactttgatacctcttggagagttgtttttgatcactntgttgaagctcaccaccaaactctatggattcaagaagaaagagttcatctcgggctagaagatcctctattgataacgaagaggttacagcaattgatatgagtggtatgactgatcgccaaattcaccaagctcgccgtgctcaaaggtctatctcgattaaagggtgaagttcaagtcgttcaaccatgcagagagaagaagtagcaagaggcaagaggattgttgaggctgaggaagaacaccatgaagaggtagtctttcaagaagcggtttctaaggaagaggttgagatcattggggatgatacaccagcccctgttgggaaaagaaaccggccaagaaggaagagagagccaatcccaagcgagtactatcaatacttgaaggaattgaagtttgagggaattaactagataccctcataaggaaacaatacaagagctttgtattcgtggggaggtggaatacttaatggagttggccaatcttgcaacgttcatgagctgccaatttgggggatttaaagaggagatctgccaactccttgcaaccctcaaagtccattttcatgttgacgattcggagaaagaagaaagaggaggtctcggttacattacctttaaggttaagggtgtcgagtatgcgctggatataagccaccttgatactatttttgggtttccaagcggagagagaatccaccaagactatgaccaagacgagctactctctctttggacaacaatcgctggtccaatgccctactcgcctgccaagagcaagagtttttaattcaaagtcccgtgattagatacctctaccaatgcatcgccaacaccctttttccaaagaagactaccagatttgttgatgaaggagagctatgcatgattgatcaagctttgttcttcattctgagagagaccaaggatgagaggaagatggcgggtgatagaggagacacttcgttggctgttgttcttttggaccacctattgagctatagagagtatgctgcaaccatccatcgctcagggattcgcggaagtctttgtgttggtggtatcttaacaccaatacttacgagctgcggggatacacttgggaacccctgacgtgtaccccaagttcctcgaccttgaccatctcaagagaaagaattatcttgacaagacgactccggcggatcactacctcttcaagttcaaccatccggagctcttaccttctttgttacccataccttgggagaagcgaacttcagttaagacaaggtgtaacatcaacttcatgccttctccttctaccatgaacatcgacatcggaggagctagagaagatgaaccagaatatactcaagctgactatgagcaacaagagtattttactcaagctgattatgagcaacacgtcgaattcgagcaacatagtgaacagacggagcaagagaccaacaaattcgagcaagctcaccaagaagaagatgctgatcaaggaggagatgagataactgaagttcacaagaagctcactgtgcttgaagagcttgggaaccttcacagcaaaacgatgaagggtttcaagaagaagatgagaacaatgaagaaatcactaaagagtatggctaatcaaatcaaagacttccagagcaagccaaggccaccgtctcccacccccgaagtaagaagaagcggttccacaagctcagctgcaaggagggctgaaaggattgatcaaccccgagcttcatcactcgagcctcgggaagtgatctccgagttgagagagccaaggagtaggcagagacgaggttctacacgctcgaccaactactcgaccagacagaacgagcaaaatcctcccgcatcaacatcagcccttgtttatactcaagagagtatggacgattacatttccatctacttcacttga

SEQ ID NO: 163019 - DNA, 2145 bp, Arabidopsis thaliana landsberg
ctgatggcctcacgcagagagatttttagcttttctggtccccctccaattccctcttttgactggtaaatatgcagtttcattttatatcttcccttccaaaataatattgattatggattcttttttgccctttttttttttttaaacaaagagtagatgattacattgatcacgaattattactcaaatatcgcaaattcgatttagataccattattttttaacagaacaaaaatctgagagacaaaaataattaattgactgtacaaatatattgataccacttcatccgatggttttttattggttcttttttcttttgacttcgacatacttttgcatgtgtctttcaacattaaattcaagtaatatttcttaatgatgacacaaacaaaataatatacatatctactcgatgattctgtggtgtatatactgtaattggtttgtttttcaataggaacaatttgtaccaccgagcgtcattggtatcatgtttagtgcaaggagtgtacacaatggaacgagataggcaacaaaaccggtgtggttctgactcacgagccatgcccgggggggattttttcaacttctctttagtcgaaaccttgatcgacgactacgacagctccatatacggtgctgttttcgaatacaagctctccaacctttgccaaaatacctcacatgcgaaagcgcctccacgttatgtgattgcattccgcggcacgatcctagagtcagatacttggatgactgatgtgaaacataatctcaaatttagcttcaacaccctccatgaaggcggtaggtctttgcaggccatacgagcaatacgcagtatggtggacaaacacagtgaagcagctatctggcttgctggacactctttgggagccgccctagtgttgctggctggaaagaccatgaaaatttctggattcctcctcgagagttacatattcaacccacccatctcgtctattcctctagagcagctacctggtggcgatataattaaaggtttgtttcaaatcaccaagagtgtcgtcaaagccaccgtagccatggccttaaccgatctacaggtaaataaatagtcttaaattaaaattgtttgatctacttaagagtcaaaataacaagtttcattcacttgcgattacataaaaatatcaagtttcattcatttgagattccttgttggccactccaaactgagtactactatatacaagttgattttcttacaagaaactgtttgtcttaaattactacaggttccaaaagacgatccaaagacagcatcatggataccttatttatatgtgaatccagcagatccaatatgtgcaggatacatcgattacttcagacacaaaaccttcatgtctgagataggagcaagccacatcgagagaatcggtgctagaaaatcagttaggagtctattggtgggaagaagaggaaaactatcaccgtcggatttgtcatcggaacctcttcaccttcttccatcagcagatatgactgtaaacaagaacaaaccgactaagtctacgacagctcacggacttcaccaatggtgggagcgagactcgacactgagggaaaattgggaaactgcttgattaggcccgatcctgaagataaatcttgaagagtgcatcaaatgataaaattaataataagttttgttttgtttggttaaattgatatatgcctcttatcttatatatgttctggtgatcgttagtttgaaacactctatctacactttttcatggcactatggttcgtttccgtccatttcttgttttctgtcttttccatgtttaggaatcattaattgaacaaaaatggattgtggttggatttcaattttattatggccggttttggtgagatatccgacgtttaatggtgatatgttttgtagctctttcaatcattttgttgtcaattgcatttcttattatatagtttaaaataaaacaaaccatcatacttaaatttaaataaataaatatctcgggttaagaattttttcctaaattctattttacaatgtttttaaaaaaaaattgaagtcctttagttttggtgtaaacaaattatatataatctttattttacacagat

SEQ ID NO: 163020 - DNA, 920 bp, Arabidopsis thaliana landsberg
aggccatttaatgggtttggagaaaacaatgcattaccattgagaaagatgcatcaagaggagaagaagaagaaacataggggtggacactggacactttcagaggatctcaaactcaaagagcttgtggcggtttttggtcctcagaactggaaattcattggagagaagatggaaccaagaacaagtaaaatattgttttttttttctttcgtacttactctatttttggacatgaaagttgaatctttttttcttgtttttctatgtgtttgaaggtctaagttgtagacaaaggtggtttaaccagctcgatccgaagattaacaaaagaaatttcactgatgaggaagaagagaagctgcttagagctcacatattatatggtaacaaatggtctaagatcgctaagcttttcaatcgaagaacagaccatgctgttaagaatcattggcacagtctcatgaatagaatcattaggaagcaatcagcttctgacataagatctttcgataacatccagaattatcaaacctccaactttcttcctggtttgtgtctccttaatactaaacaatagatttaaaacaccacacagcaatatgggttcaattctgagttcttgatgtttattttttcttattgtgtggtttacaggtagtgtaagtcatgaaagtactaacctcaatgctcaatatctccaagaaaagaattattcttcatgcatgccattgcaacactcatgtcatcatcatcacttctctaccttccctgcaaattccttggccttattcacacctcatgtctccatctctcaaccatcatcatcatcgttactatcatcatcagaagcagaagatataatgactacaacaaccccgaggtatatagattttctcggggtaggagattcttgaaga

SEQ ID NO: 163021 - DNA, 3227 bp, Arabidopsis thaliana landsberg
atggctcgaacaaagaacgcaggtgtccgttggcggcggaggtagtttcacagacaatcaatgacgaagtagtagtagcgtcggctgctgaagtggattctgaagcaacaaattcaatctctaacgacgatagagcggtatgaactttaaactttacacaattagcagattatagtagaactttgccgattttgtaactttcaaaattctgaaactaaagaagtataactatgtatgaattaggtatatctttgttgagattgtaacttagaaattttaaaaagtatatctatgtataaattagtatatcaatgcataaattagtatatctattttgaatctaacttagaaaattttgaaactaaaaactagggatatctatgttcaaatataacttaaatattttagagactaaacaatctatctatgtataaattaggtatatctatgttgatttctacctttaaattatatgaaactaaaaagtatatctttatttaaactaggtatatctatgttcgaatataacttagatattttagagactaaacaatatatttatgtataaattaggtatatctatgttgattcctacctttaaattatatgaaactaaaaagtatatctttatttaaactaggtatatctatgttcgaatataacttagatattttagagactaaaaagtatatctatttttaaattaggtatatctatgctgatttctaccattaaattatacgaaactaaaatgtatatctatattgaaactaggtatatctaaacttgaatttaacttataaattttcaaaactaaaatgtatatctatgtataaactaggtatatctatattcgaatctaacttataaattttcaaaactaaaaggtatatctatgtataatctaggtatatctatcttgatttctaatttatctatgttgctttctaaggtatatctatgttgattgcaggattttgatgagaaaactgaagctcttcaacctcttaaaatgtactttggtccgagtgagtatacaaagccattcaagattacagcaaagtgttatcttcataaggcagtcggattattggagactcatcttaaagagtctgagttgaagtggttttttggagcacccacaattcaaacacttcttccacatgcataaggatccaaatcataaggtgatgggtatgtggctgttatttcttcgtacagcatgtttagataagaagaaggaagtatgatttattgtcaatggcgtaccgatccggtattctctcgaagaatttgcactcatgtcaggattatactgccataattatcccaaacccttggacagcttgggctgtaccacttttgctggcaagatgtttggacccggagcaacagttcagtatcttgatgtggagaataagttattgtctatgaaaaaaccttccgatgctcgtctgagggtagttgtgctatatttcttttgtagtgtaatcgttggaaaaggtaagacaggaccaaacgcaccaaatgtggagaagttcttccttagggctgtggctgatctagagttgtgcaaaacatttccgtggggaagatttgcatttgaagaaaatgtgaaagacattttctatttgatgaaaaagtgcaatggagtagttggtccacaaaaggtgtttcctagttttgttatgcctttggaggtatgtcatttcattatgcatttatgaattgttttaagaaagttaaactgtgtacaactgtgtttttattagcagttatacttattagtttttgaaaaatcttgtattgtttttatgtagtatctagcatttgaggcgatcccagttctcagggaaaatttctgcgaagatattgaatccgcagatcctcagtgtccccggatgtgtaaaatgaagtttaaatcaagcactatgaaagggtttccaatgtcagatgtgtatgacaaactcggtacaactaaggttagtgatgacatatttattagttatctatcatgtatcatgtatgttctatcatgtatgttatattaattactttcttatcatgcacaggacattcagagtatcttggctccaactcctgatgagaagctacttttggaaagaattatggataaagagtgtggagtgaatgatgtcgatgatctaatagctgatggttggaagaaacgtctagttgatgaggagaggactatatgttttgaaccgttgctcaatgaagatgtagcacaccggagctttgtggctaataaagctttgtctactgtggtaaaagctccaagaaaagccgcagtggaaaagaaaggcaagggaaaggctgctgcagctctgactagtccaagtgatgaaggtttgactgaggttgtaaacgaaatgaagaatttgatggagaatggatttaagtccatgaacaagaggatgaaagatttcagtaagaagtatgaagagcaagataaaagactgaaactgatggaagctgcaatcaaatcaattcaatcaggcattggaactgaagacgcttgtggttcaaaggagattgatgatatagaaaacgagctggaggaagggagtgatgcagagactgagatagacaaagaggtggctcaaggtgataaggagagagaggttggagaaacagagactgagatagacaaagaggtggctcaaggtgacagtgataaggaggtggctgaaagtgagaaggacaaagtggtggctgaaagtgagaaggagaaagaggtggctgaaagtgagaaggacaaagaggtgcctcaagatgatgagatggatggagagaaggagaaagaggtggctgagccaagtgagattggggtgcctgaaagtgagaaggacatagaggtggctgatagtgagaaggagaaagaggtgcctcaagatgatgagatggatggacagaaggagaaagaggtggctgagccaagtgagattggggtgcctgaaagtgagaaggacatagaagtggctgatagtgagaaggagaaagaggtgcctcaagatgctaaggtggctgagccaagtaagaagcgaggaaaggcacatgaggatggagatgatcctagtgaagagggagttaaaaagccaaaggtggtcaagaagctggcagagtcgaggacggatgctaagccggtgtatcggagtcctatacagacgaggtataggaggaaaaagacaaagaagaatgtttaa

SEQ ID NO: 163022 - DNA, 1380 bp, Arabidopsis thaliana landsberg
catagtacttaacaagaacatcatattgtggctaggttcagcaactccacgagcactccggttcatctatttttgtattctctttcccttcttcgtggtggttcgtcttttaatgcttctttgatttatcgttgttgttcttctgtgagcgatattgatctggctcaagactcggtggtgaagatcttctccttttcaagagagccaaatgttgttcaaccttggcaaacaactgagaaagaatactcaagctctggtattcataaacatttctctctttctctctctctcgtgtgatttctttattagatttccaaagttaagaaaaccgtatggtattatattgttcggctttggaatatctatcttaggatttgcaatctccgggaggaggattcttacaaacgctcatgttgtgggtgatcactcatacctgcaagtgagaaaacatggttcacccactaagtacaaagcagaagttaaagcgtttgggtagggatgtgacttagctatctgaggtattgatagtgaagagttttgggaggatatttggagctcggagatatacctttattggtgaaactatctacgctttaggttatcctcgtggtacgtcttggacaatgctttaaaattttcgtactgatcatatgtggtattgagaaaagaaagcaatcatgattcaattaaaaaaaaatgactaataattatagttatgttatgcgcaaatacagatggtgatatcatatctgtcacaaaaggtattgtaacgagagttgaacctcaaaagtatgctcacagctccattgaaatattagcgatacaaacagatgcgtgtattaacggtggaaagagtggtggtccagtggtcatgggcaacaaagttgctggtgtggtatttgaaaatgattctccttctgacaagtgagttaaactatatatatagtatgaatgtgtgccacattgaaattgaaaaaattatttagtacctaaaatcgtcacaataagcttaaatttgtggcaaactcaattacttttgcttatagcatatatttttcttgagattgcaaacaaaaggtttaactaatatcaatttttgttgttttgtgcgcaggtacataatcccaactccaattattaaacattttttagctggtgttgaagaaaccggtcaataccaattggtttatgttctctggatttgattctacattgatcatgcctatatatatatggtgtaaacaggtgaagaaagtgaacggagaggaagtagtgaatatggatcacctacgtagactcataaaaaaatgtcgcacggaggatttgaggtttgacttagaaaacggaaaggttatagtcttgaactataaatatgcaaga

SEQ ID NO: 163023 - DNA, 3363 bp, Arabidopsis thaliana landsberg
attccttccgccgtcggaatgtcaattcccgatcccaactcctccgcatctctaacggtgtctccgtctctatccaccgcatcggaaactccggtaacaccagtaaacactgttagaccaccgccgtctcagccacctcctgctccgccgccactaccgccgccgacttacagacccatagctccgcttcgccaccctaatccgttccaacaacaatctgcttatagtaataacctctacgcacattcgattccggtcagacgccaaattcaagatccgtcagctgttctttacccgtttgctctaccgggtcgagggttttcagcccgacctgttcgaggattcgtcgcagatccttccgtgacggctggtaatctgagtgggtaccctcctcgcccgagttttacttacgatcctggaccatatgagcagcgtcaaatggaatccttgttgcagcagtttataagggagagaaatcctcagatttcgtccattaccacgccttggattgggttctcctgttgggttgggtcccattagagcaagtcctcaatttctgcaaccgcgggtgaggtttcttagatgaagtcctcaatttctgcttgtcatgtttcatttgttaatgcttagattctagctaagtagtggaaagattagtggggaaaatgctcgagatgatccaaagtttcttgattggagtcttagtagaactgaatctgactgtaccgtgacttaagaatcatcttggttaatattggatccatttttgtcagagtgattctcattcgaactaatgcatgtagttctagaattttgatcgactagtctagttatacaacaatgtgagttgttggacgtgtctttcatggttttcttataaaccatgtgatagttagtaattggatctagttatctttctattttggttctttgtcctgctatgtgcctgctttactctggtcttgaaaattctcttttgtggaatgaggaagacttgaaaatgcttttatatcttagcaaatgttaagctgttcttctcttaatagatggtttgcacctacttacttttgattattgctcttgctccagtcacattttctcattttcgtaaattttggtacttaggttgccccgcccccaacttcaattctagacactagcaggaatagaaaggccaggtgaacatcaaatttctctactttgatattacctttcttttggtttcactgaaaatattattttaaaaaaaacttgttcaagagacttagttgccttgctgtttcttcttccttgttattagaagcaaggatggggctcttgccgttgttagagggagaaaggtaagcctactatcatatgtactgcttgtttgagaatttggaaaagacatctgttaagtttagattgtaatactattcaactgtttacaggtccgaatcactgaggggtcttcttctctttattcacttggtcgatcgtggttgaaaaatggtgctcacgttggaattcaggttcgcactttatatgctgctgttagagtaggatgttagtgtcattgacgactccgcttgataaaagattcatcggttgtattttcaagatattggtttgtggggttttgattcagaaaacctctcagaatgccaaatttactcgaatttggaaactaaattacttttgatcactcacctatttgcatccgtgctagttagaggattctttcttgatatagttatatttttagaagccaatcttagttaaatgatcttcaattgcatactcaaagcttgttatctgctttgcaatggaaatgtgcatctgcaatctcttgagcgtaaccatatatctgggactaatctaactttcagtttctctgttgacagccgcaaaggagtggtataatgaaacctttgccaaaaccgttacctgtggatttaacaacagagacaagtgtaccagatgatccagatgaagaatcagcggatgaagacaaagaggtttgtgttaagtcttcaagaaccattgattctatctgagcagaacagaagacattagtctgattctttcctgctgttgctaatttcagctcttgaatatttactacatgacgtttgattccactcttttctttgatgatctcaggacgaggaagctgtaaagcaattatctgagaaggatcttttgaaaagacacatcgagcgagctaagaaagtccgtgcacagtaagctccccactattctctctttttgctccttaggtcgtgtagtatttgaaagataaagctccccacaagattcatggattagttttcataatcatcaaagcaaatctagcagaatattttggtaacttgaaaaagcggatttctttctctttcagattacgagaagaacggtcgaggaggatcaggaggtacaaagaaagaataactcttattctggcacaatccgaagaccgatgatgcttgaagaacgactaaaaaagggtaaagttttgttaggaattagcttcatatgactgttgttgatttagcatactagtaccacgtaacaacatacgtgtagtaatagtataggtgtgttcttcttcgtcttctatagattagtaggactactcaatgaatagtgtttcattcttcctaaaactaaagaggaagataaaattgtttccttaaagtcagcttttactaatttgacaataaaaatttcttctcttacacatgtgtcaatcagcgaagtggtaataaataaactttactgtcattcgactaattgtaactttataaacaagatttgagaaaaattgagattttgtagtaaataggtggaagtctctaattggattagaggcttttcgagagagaatcgcatagggaagcggacagagaagataacaaacgctcatatttaaactctctttccgttacatttgccacgtaattacaacaaacacgtgtcatcgccgctaagaactaatttttgtcattgctccacacatgcaactactaaactaccgatgatctctctcgctcacgtttaatccgccatttctgtaaaatcctcttcccttttctgaagtaaactttttcccgcaatcaactcttgctttctatttttctcgattgtttacacttttcattttcagctctctgtttctttctttcacactaaccccaattctagtttcttactctccaagaaacaaagagcaccgatctcagttttctcgagaaacagaggacaaactcagaatggcggggaacgagtggataaatgggtatttggaggcgattcttgacagccaagctcaagggattgaagaaacgcagcagaaaccacaagcttctgtgaatctgagagaag

SEQ ID NO: 163024 - DNA, 982 bp, Arabidopsis thaliana landsberg
tcatattctttatccaaacgtcttgtttctatccctatcttggctatacaactccttctcatacgcagtgtctcgtcactgaaccttaccaatgactatcttaaccacaaatgcctcgtcagtcaagggaaatataggcctggagataagtacaaagacaacctcaactttctcacccgtgaagtcttatcctataattttccaaccggtttcatacacatctcttatggcgaagctcccagtttcgtcgccatcatattacagtgccgcggcgactcctacgacgccaagtgcctctcctgctatgccaccgccctttccggggtaatgtcacttcagcattattaattagccgtcgcatatcaaaagaaacacggaaaatgttttctattgggattttactcggtattatttaaaatattaaaacataaatcatcaaatctgttttaacatatataaacatgtatatcttttgcaaatcaagatatatctttgcattgattagttaaatcgttactcaaaaaatgaaacaacaaatttatgtatatggcagcttcgtaggagatgtcagaggaataaaggaagagtaatatggtacgaccaatgttttctcttcattaattccatcagatcatccccaaggaagaacgattacaggaatgttttctctatgcacaacccaaaaaacatgatcgaggaaacggaattgttcaacaagaaaacgagggatttcctctacgagctcatgctggaagccactacacccaacaggacattgatgctttacgcagcaggggagaagaagctagggacaaagaaattgtatgcaatggtgcagtgtgcgcaagacatattgcgatgtaagggttgtttggaatggagtatcaatgagctttccaagtgctgccacggtaaacaaggagcaagagttttggggacagagtgtactcttaggtatgagctatacccttttcttaggagt

SEQ ID NO: 163025 - DNA, 2265 bp, Arabidopsis thaliana landsberg
aaggagaccttctcttaagaagcagctgaagcatttaaagccgcttggattaggttcatagaatataagagagattgcccgcatcatggttttagtgaggttcaactgttaggtatcttcttcagaggagttgattggtgttatcagatggctttggatgcagttagtaatggtaatttcatgtcaagatatccagaggatgcaacaatgctcattgaaagcttagcttctagcattagtaccaaaagcgttgacattgcaaggaagatgcaggctaagagatctgataacaaccaggttgccttgttaagttccaaagttaattttcttcttggtaatcaacaagttcagtatgctgcacaggttgacagtttggccacttcagtgaagaccgatcaagggatacatgagctacattcacaaatctacatctaagacactgtttcagcaatctacaagctttatttcaacttatgcttcttaaccctagcccaccctccacacgagaccactaggaagattgaatctcttctcgaacagattctcaaaggtcaagagaagcaaacaacagattttgatcacaaactggttgcattatccgacgatatgaataggaagattcaaatattgaacaatcggatcaagcaattgactacaaacaaagaagatgttcgtgctattgagttaaggagtggaaaacagctaaatccagtgctgcaacgagaacttccttcaaccaaaatcgttaatttggaagaaaatgatgttgcagtttttgcagaccagacaccagtgtctactgacacagcagcgtgtcgatcgacaccagccatgacagacactacagaacgcgacagtgtcgaccgacaccaacagggtgtcgatcgacaccaaccctgcccaaacctgcgaattctccaaaacccgatttcagctgcggcaaaggtaaccaaacccaaggttccttttcccaagagtcctaggaattccatataggagcttgaggatgctagatgcaaagctatgatggataagttgattgtagagatgccactcatagatgctgtgaagtcttctcctatggtcagacagtttgtgaggaggatggttactaaggatttgctaattgagaaagctgtgatgaggatgtctacacaggttagcgacattattcagaacaagactccacataaacttccagattcaggtagctttgttctcaattgtggtaccttaacgagagttttgagcgatgcttgtgcgatcttggttctagtttcagcttgatgccacgatcagttgcactacgacttggtttgacagatttagagcctacgcaaatcactcttgttcttgttgatcgatttgtccgtagacccaatggtatcttatgcgatgtccctgtacaagtcggtactagctacattcctacagattttgtggttttatcttatgagaaagaacctaagtatcctctaatcatgggaaggcctttcttagcctcaaccgattccattattgatgtcaggaaggatagaataggcttgaatgtaggtgatcttacaatgtagtttgacatgaataaggtggttaagaagcctaccatcgatgggcagactttctatgtggatactatctcgtctctggttaacgatatctcatggagatgacacatgctgatcctttgaaacatgctctaatcccttcaatagacaatgttcccgacgggtatggtaagctgttggatagaactgagcatgtaatgcaattgattactcaagaggagttaattggcccatctacaaaagcagcaacggttggcgagtggagcccagaaaaagctcctaatattgatctaaaaccacttcctacaaggctaaggtacgcatttcttggtgaaaattctacttccatgtcattgttaatccttctttaaacaacacagagctcacttaattgctaagcaagctgcgcaagtatcgcaaagctcttggcttttctcttgatgatattacaggtatctctcccgacttgtgtatgcataggattcaccgtaaggattaatctaaaccctcagttgagcatcagagaagactaaacccaaatatcaaggatgttgtaaagaaggagatcatgaaattgtttgaagcaggaatcatctatcctatttcaaatagtgattgggttagtccactccatgtggttcctaagaaaggaggtgttacagatgttaagaatgctaagaatgagttgattcatactacg

SEQ ID NO: 163026 - DNA, 2602 bp, Arabidopsis thaliana landsberg
atggcgagatcaaatcagatccaagacttcagagcgtataataggcaatggtgaagttactccgattcaagtcgccttcctcgtcgatcgatacctctgcgataatcgcttttcaaaaaccagatcacttttcagatctgaagcttcttctctcatctctaattctccagttcgcgaagtaagcacctagagaaattcccaattttccaattccaaaattcgattcatctatttgtgagagtcttatagttttctgatttcgcaggttccgaatagtttgttacctttgaatgagattttaaacgaatacattcgtctcaagaaggagaagattgtgatggatcaggagaaatcgaaactggatcaagagaaaactcgagttcagaatctattgaatgggatgcaagatgtgatgaatgcttataacgctagcctcaccgctcctcctccggcttcagctccaacttctcaacagaaaaatcacagtatctcttcttcaggtttggagattttgttggttttaagctgttctaaattggaatgattaggttggttctccccattattaattgaagtagctctagctcttgtttgcttcatagatcttagtgcacatattaggcttattagaatccaaatctgtcacttgagaactaaaagagcagtgctcttatttttcaggcttatctcagtacaacacactaaatggtatgtcagtatcattgcttggtaacaaaagagtagattttggtaatttttccacaccttcgacgagtcagtctataactgggaaacgaaaaggtcctgaagtttctgtaacagctcctccggtatctaggaaatcaaggatcactagagcaactggtatgtttctgtgcctacatgtttattacatttgatgtagctcttaaactaatattgtgacttttttttttccttggaccagggactaataagttgccacaagctgataaagcagctaacaatttcacatctgaaacactagcagtggctaaaaactctgcaagtaatgaattgattggtaatgggtcaagtgtggtgaagtgtttgttcaataaggctgattcgtctgttcctactagttcaacatgctttaggacaccacaaaaacatgcttcttctgggagtgataagtccaacagttcccagaaagaagttactcctacaaatacaaactgcacaattgttacaaaggagagattcacaatcagccctctcaagcaaattacttcttattcagtggaaagaagccatcttatttctttttcttcaccggtcaagtctaacctgaagatgtcaaataagagagaccatgtgaaaggaaagctcaactttgatgacactgacacagaaacgtgcttagaggcacctgccactgcagatttagtttcaacttctccatctgggtctgagccagaagttgatttgtttgacatggacttttctaatctggatttctcggagctactagttgatttcgatattggttgtgaaggaagtgcaaatcattgcttgtcactgaccccaaatcaacccactcaaactgtttcagggtatgtactttagttttgtaggatcagtttttgtaaatagctattattacctcttgatgtctgatcatacgctatactaaatcacaggtcgtctcctgaatcaggggattgtaatctcgagtctgaccagccctttttggaatatacatcaaccgtgactgatgtgattcaagtgagtattttctgttctgcatttgattatagatatacattttcccctttcactcattctcattcttgatgcttcatttgtgtatcatattctagatttcaaaatgtattgatcctctctctaactcgagccattcttctcttaacacagacaagatttgaaagcaaagagtgacatgacagacaattgactgattttgaagactatgattgactccaagaccaccaatgcaagatcctctgttttttcctaactatgctgctagtgcttattcttgtaatgatctgtgaaatatgaaaaggctatcccataacgtagctcataattaactagtattacatgtaggtgtataaattaaacttggttttttggtctatagtcttaattaaacttggtttcttggtctatagttttaacagctgatttcttctctatattgatattgacaacaaaataggactttcaccattatgcatctatttgcatataccatgtagtcagaaactggcttacaatagaaattaaatgccttatgtttggtacatgagtcaagccaagtacttctccaacttctctacttcctctgtgcttccaatgtatagaggaaccctctgatgtatctgtgtcaagtattccaaacataagaattagtctgatgacaccaattttagatgtaaacttagcaggagacagtgaaactagtctaatttttagtttgagttacctcagtcggttggatatctagtactctcgaatgtccatcagaacctttccctccagcttgttcaacaatgaaactcattggtgcacactcatacaaaagcctaagctttccatttttgctctttgcgtcacg

SEQ ID NO: 163027 - DNA, 2837 bp, Arabidopsis thaliana landsberg
ccccccttcacccttattagatagcagactcgactccatgctagcgcagattcttacgggccaaacgaagctctcgaggataggtctgatagcaaatatgattgtctctacacagatctaaatagcacgattgacaatgtacgctctcatatatccgagctttcacctacatcaacctctatcaatgcactcacactacgcagcggaaagctgctcaacccaatacttcagcgcgaatgttcagctcagacttcatcttttccaatcgcagaaaaagactcaatgtcgatcgatacaccagggtgtttatcgacaccaattattcttgacgactttgttttgcctttgtcgagtggaatctacaacttcgcggaggaggaggaaattattcctgatggtgtcgatcgtcacccaacccctgtcgatcgacacccagatcgttcagataatgtgcaaattccaactgaaaccaagtcagcaaatcggcgaattcctttccccaagagtcctaaaaagtcaaggcaagccttagatgatgtcagatgcaaggctatgattgataagctgattgttgagatgcctctagttgaagctattcatctttctcccacaataagaaggtatgttaagacaatggtcactaaggatttgacgaaagaatgcattattatgatgatttcatagcaaggcagcgatatcattcaggaacgaattccaagaaagctaccagatcctggaacctttgtactgagtgtcaccatcaaccacgattcccttccagagctttatgcgatctcgtttctaatgtgaatctgatgcctcgttcagttgctatgcgtcttgggtattccagtcttgagcctacttttatcactcttgtgttggtagatcgttctactcgaattccatatgcaattcttattgatgttcccgtgatgattggaaagagcatgattcctacagactttgtagtcttgccttatgagaaggaacctaaggatccattaatctttgggagatccttcgttcacatagttggagcaatgatagatgttcgacaagggaggatagggctgaatgttggcgatcttactatgcagttcgatatgaacactttggtcaagaaaccgatcatagaagggaaaactttcttgatagtggaattagaagacccactagagcgagttttggtatcttccatagaagatagtgcagatttggacagtgaatcttctacatataccgaacatatgatgcaacttacagttaaagaagctcttccatctttgactccaacgccgactactaatcgagattgggatccagcaaaggctcctaaaatcgatttgaaaccacttccagcagagctaaggtacgcttttcttggtgaaaattctacttatcctgttatactgaatgcttcccttaatcccgcagagctcaccttattgctaagcaagctgcgcattcatcgtaaagctcttagctattctcttgatgacattaaaggtatatcttcggatgtatgcatgcataggatccaccttgaggatgagtctaagtcttcagttgaacatcagaggagactgaatccgaatctgaaagaagtggttaagaaagagattatgaagctgttggaagcagggaacatctatctgatttcagatagcagttgggttagtcgagttcatgtagttcctaagaaaggaggagtttctgtggtcaaaaacgagaaagacgagctgattcctactcggactatcacaagccataagatgtgcattgattatagaaagctgaatgctgccacaaggaaagaccacttccctttaccatttatcgattagatgctggagtggttagcaaatcataagtactattgctttttgatggataatcaagattctttcaaatcccgattcacccagatgactaggagaaaacgaatttcacctgcccctataatacatttgcttatcggagaatgcctttcgggctttgtaatgctcctacaacatttcagagaggaatgatgtctatcttcatagacatgattgaggatatcatggaggtcttcatggatgatttttcagtttatagatcatcgtttgaggattgcttagagaatttttgcttagtattagcgagaagcgaggagaaaaatctggttttgaattgggagaaagtgataagtgtgtattttgcatgttttgagcatccatttgtcatcactttagcatcagatcatcactgttttataccatttctcatcatttgtcatcactttgcatgtttaggatagttttgcatgcatgttgcatatttgtgttgatttcaggtgatttggagctgttgacgagctaactggaagaagcggacctaatcatgtcaaaccactcgaccccctggtcgagtagatgcttcacgacttcaacagaccactcgaccccttggtcgagtagaagacatcagcacttcacgtcaccactcgaccccttggtcgagtaccgccatctctatcactcgactacatactactgccagcttcagagtcttcttcattccgcactcaaccagacactcgagcacaaggaagaaaagaagactccagcttatcactcgacctctcactcgaccacctgtgtcgagtacagttcttaatccgtcccaatactacgtcgttttgagtattagggtttggaatattttgctatatgtagcatgtactttacattttcgagaacaagttttatctaagttttattttggagacattgtgttcttgacattttgtaatctggatttctctaatctattcagtattcagcattttattc

SEQ ID NO: 163028 - DNA, 3900 bp, Arabidopsis thaliana landsberg
cgaaaccaccgacctcgataaacctgacgatgacgctttctattaatgatcgacacgggaagctcagcggacgtattctattacgacgcctgtaaaagaatggggcacctgcagtttgagctgtatgggaagaaaacgtaacttaccggggtcgctggagatacgaccttttctctaggaaccatccagctcccgaccgtcgcacgaggagtgaggcgactcacaagtttcctcgtagtcgacaagaaagctcctttcaacgcaatactgggaagaccatggctacacaccatgaaagccgtcccatcaacctaccaccaatgcattaaattcccctcggacaagggaatagcagtcgtgcacggcagccaacgcagcttccgaaaatgctatatgggcagctacgaccttatcaaaaaggctgaccccatagtacttatgatagaagacaaactcgcggaaatgaaaacagtcagatcctttgatccttctcaacgcggacctcaaaagtcattgataacacaggtctgcatagacgaatcagatcccaaacgatgcgttgggataggtcaagacctcgacccagcgatacgagaggatgtcataacctttctcaaagaaaacaaagacagttttgcctggtcaagtgcgaacctccgaggaataagcctcgaggtaacctcacacaaactcaacgtcgatccgacctactgacctataaagcagaaacgtcgcaagctaggtccccagattgatcgattgctcaagattggatcgataagagaagtaaaataccctgacagctcgccaacccggtcgtcgttaaaaagaaaaacgggaagtggagagtatgcattgactttacggacctgaataaggcatgtcctaaaaacagtttcccactcccacagtctgagagactggttaaggtcactgcgggacacgaactattgtctttcatggatgcattctttgggtacaaccaaatacttatgcgcctagatgaccaagaaaaaacagcttttataactgaccgaggcacctactgttataaagtaatgccctttggtttaaaaaatgctggagctacctactaacgattggtgaacagaatgttcgtcgaccagctaggtaaaacgatggaggtctacatcgacgacatgctggtcaagtcagctcatgaaaaagaccacgtcccgcagctaagagaaatcttcaaaatcctaaacaaaatcgaaatgaagctaaacctcgagaaatgctctttcggagttccatcaggagaattcctcggatacctagtaaccgaaagaggcatcgaggccaatcctaagcagagtgcagcctttattcaaatgccatcaccaaaaacggcacgggaggtccaacgactgactgaccgtatcgccgccctcaacaggttcatatccaggtccactgacaaatgcgtccctttctatcagctccttcgaaaggagaaaaagttcgattggaacgaggactacgaacaagccttcaagcaattgaaagcatacctgtccgaaacacccatactcgcaaaacccgaagaaggagaaccagtgtacctatacacggcagtttcccaaaccgcgataaggggtgtcttggtgagagaagatcacgaaggacaaaaactgatctattacgttagtaaaacattgatagacgttgagacccgttatccagcaatggaaaaactggcactggccgtagtcatgtcagctcgaaaaccgagaccatattttcaatcacaccccatcgtagtgatgacgtctcaaccaatcagaaccattctacacagtccaactcaatctggttgacttgcaaaatgggccatataactaagcgagtacgatatagaatatcgcaccagaaccagcttgaaagcacaggtcctagccgactttgtaatcgagctcccgttagcggacctggatggaaccaactctaataagaagtggctcctccacgtcgatggctcctccaaccgacaggcatccagagtaggaatacaactcacctcccccaccgaggcagttatcgaataatcggtccgattcggattcaacgcatcaaacaacgagtctgagtacgaagacttcattgttggcattaagctagctcaaggaatggggatccgcgatatacacgcccatagcgactcccaactcgtcaccagccagtttcacggggaatacgaagctaaagacgagcacatggaagcgtacctcaaactggtcaaaaccttgaccttgacccaacagttcgaatcgttcgaattaactagtatccccagaggagaaaacacctctgtagacaccttggcagctctcgcttctacgtcagatcctttcgtcaaaagaattatcctggtcgaaggaatagaacatccgagcatcgacctaacggtcaaacatgctggaatggaaacctcgacaacttgcaacttcacgcgagtaatccgaagcaccaccgccgcagctagagctctcgcagcagttgcggaggcaagtgcatcggaggaagagccagagctcgaaacccccgaacaacctgccccgtacgaacctgaaccgtacaacgactagagaatcccaatcatcgattacatcgaacgagggatcacacctcccgacaagggggaggccaaaaaactcaaagcccacagtgcaaggtactgcatcatggaagggagacttatgaaacgcagcgtcgcaggaccctatatggtgtgtacctatgggcaacaaacaaaagacctcatgaaaagcatgcacgaaggacaatgtggtagccactgtagtggacgtaccctcgccctcagaatcaaaaagcaaggctacttctggccaacaatgctagccgattgcatagctcactcactcaggtgcgataagtgccaacggcacgcacctactctgcaccaacctcccggggaaatgtccttaatattttctcctcacccgttcatgaagtggtccatggacgtcgtaggtcccatgcaagcctccggtgggaagaaaagactaaaaaaaccttctggtcctcatcgactactcgaccaaatggattgaggcaaagccttccaacaggtaaccgagaaataagttgaggacttcctatgggaaaatattgtatgccgacatggcatacaatatgagatcgtcaccgataacagaactaacctcacctcgggaaaaatcaaagcattctgcgacaagtggaagatccgtcttaccacgtccaccccccgttacccacaaggtaacggacaggcagaagccgccaacaaagctatacttagcaacatcaagaaaagacttgattctaaaaaaatcaatgtggtccgacgtactacacggagttctcagggcctatcgaactacacctcgcaagtcaacgcaagaaacaccgttgtctctcgcctatcatttagaagcagtaatctctgtcgaaaccatagtaccaagcgtgagaaggaccgccagtcctgttaactcagacctgaacacgcaaatgttacagaacaacatggacttcatcgatgaacgcagagatcaggcaatgatccgagttcaaaactatcaacaagctgccgcccgctactataactccagtatcaaaattcggagattcgaagtgggagagctcgttctacgaaaagtgttcagcaacacaagagagctaaacgccggaaaacggggaactaactcgaaaggtccctatcgaatcaccgaggtggtacgcgacggcgtctataagctagaaaaagttatcaacggagtacctgagttacggccttggaatgccatgcatctcaagaaataccacgaataggtactcaaaagcaatcgaactacgataaggcttgatcccttg

SEQ ID NO: 163029 - DNA, 1598 bp, Arabidopsis thaliana landsberg
  unsure (1)..(1598): unsure at all n locations
atttatgtttcattagataaacataaccagatctaatctcaaaacttagaaaaacaatttgtctctttgtttttagggttttatcaaaaacggctgcatctcaaaagtcataatgcatcacttttataataggttcaagtaacctaatgcctataaagtcaatgggccaagcccaatccatgcaatgtcactttctctacgagaataaaccacatattcgtattagtgcacatatgtatatcttatatacatatataacattatttatttaagtgctcaaatacaaatataagtatatctatatatcatatatattatatacttttactttaatttatatattatatatatataaaataatcttttaatctaatattaggttaatcaaaattaaactcatagattataagcggtctctagcaaaacattataaccatctaatatgtcaaacctcgacattataactttaactagagtaaagtacaaacgattttaggatattcccaacattagttagatttgatgatgtgtacaatgtctggagttgtgtgtgtggattggtagattccctgatagtttttcccctttcctcttgatttatttgttttataggtgtcttctttgtatcgcacatgtacgtgctgatgggctgtagaatctatccaggcacggaaggaaaaatacgattaggaagttttacggtaagactaagaagcccttttgatgccattgtgttttttttttattagtgggttaatcttacaacatggctggctaagtgcaagtgttatattaccgttacttgagagacttcatatcaactttgttgacttattggatgaaagcttgtggtatccgaatccaaaagccatcacctaaaagcagtatgacattgaaggtagcagatttatgaatagcattgacttggaaagagaagacgaatgcgcgatttgcttagagccttgcaccaaaatggtgttgccaaacttttgtcatgccatgtgcatcaaatgttaccgtaactnnnnnnnnnnnnnnnnnnnnnnnnnnnnntgtcgtggcagcatcaagagagtgaactcagaggatctgtgggtgctaacttgcgatgaagatgtggtggatccagagacggtcaccaaagaggatcttcttcggttctacctccacatcaatagccttcctaaggattatccagaagcggccttcttagtctacaacgagtacttgatatgattttatcccgaaacataaatacgggtgtacagagggagagagtgatcccagacctttgattaagtgtacataagaatctggtgatccattaatgttccttcgttttcgattatgatttatgaagattgtcataatcttaatgtgtaccccttttattatcaaagatcaaatgagaaagatgatcttcatgtcttctttctcatttctaaagtaaaaccaattcctagagatgttcaatccggataaaccaatgcaaaccgaatcgaaccgaaccaaaccaattgattgtgcaattgtgctaactgtttcaatttataaatcctcaagtttctctctctctctcgcaggacagagagtggtga

SEQ ID NO: 163030 - DNA, 1655 bp, Arabidopsis thaliana landsberg
atgcacaacaaacgcatggccgaaaccgaaacgaaacacacaacacaaaccctgctcgggtacgtcgtcggaaaaatagaaagtcaagcaaaagcggcaggactcggcggagagatctctgaccagctgcaggtaagtcaatgggatcacttcgccgtagtacgagcaaccgcagccggaagaagggtacggcggtgaagatgaataggatgccttcatctctattgcctcctactccgccttgtagtgcaatcgtgggagggacggggaagtcaaagaagagaagaggaggagtctgtctatggacgaggtttgatcggactggattcatggaagtggctggatgtgacaagagcaccatcatcgaacgttcttctgtttcggctaaggatttaagaactgccttctcgcactcttctaaaattctaggtatacacacgtttgtgtcttttttgctgactagttttcacaacagacaataacaaatccatgtcttgctatgacgcagccagagagaaagctattgtcctgaatttagaggtcataaaggcggtaattacttcagaacaagttatgttgttggattctctccgtcctgaagttcttacactcactgaccgactaaagcatcactttcctcggaaggatggtcctgaaaatatattgcaagcttcttctcatggtcatcaagaaggtggagaagagggtttgaagagtaagcttccttttgaatttcgggtactagagattgcattcgaggtcttctgctcatttgttgatagcaatgtggtagaccttgagacacaagcttggtctattcttgatgaactaaccaagaaagtcagcaatgagaatcttaaagacctaagaagtttaaaaactagtctcacccacttgctagcccgtgtacaaaaggtaaaaggttattaccttttccaatgatactataatgttgtgtgttggacggaaacataaaagctatagtacattattcaggtgagagatgaaatcgaacatttcttagatgacaaggaagacatggaagacttatacttaacgaggaaatggattcaaaaccaacaaaccgaggcagcatcaaatagcattgtctcccaaccaaatcttcaacggcacacatcaaacagaataagcaccagtatggtgacggaggaagatgacattgatgatatggagatgttgcttgaggcatacttcatgcaactagagggaatgcggaacaaaattcttttggtaagtagtaaatgtacctaaataggtctaagaaaaccatataagttttagatgcaagctcgggttatgtttggttgttatgtgttaatgcccggtccttggtaatttaatatttttttgaattgcagatgaaggagcatattgacagcacagaagcctacgtgaagatactacagaatagtagacgtaacggactgatccacctaatgatgcttgtgaatataggcaattatgcaataactgcagggacagtggtggtcaacttgttcggtatgaatataccaattggattgtatagcacacctgacatctttggttacgttgtgtgggctgttgttgcgctttgcattgtgcttttcatagtcaccgttggttacgccaagtggaagaagctacttgactga

SEQ ID NO: 163031 - DNA, 3470 bp, Arabidopsis thaliana landsberg
gtctacgcacgtggtagctccgtccgggatctgcggagatcctcctggatatttggcaggttagttccgagatatcaggtccgctccgcgaatatctcttcgtcagttcctaggtcattattcgcttatctccctgcatcaagtgactgggcttatctagcccaaatacccattcgcgtatgtgggctcgtcagctgcgtaggtcctctacttagtgggcttagtggacttttgtgggctggcttggtattttcgcaggtggattcctggagggaaatccagctccaacatttgccccctagcccaccgagtgagtaggtgagctcgatgagcagagatctgtgtcaggtaagattgcgaaaatgttattggtaatgtgataaacacaataggattcatcggttttgaggataagctcaataaaacggttaggatttggatttcctaaaccaaatgatttcgagcagatacgcgaggaaaattgttgctaacgtgtacagtcaagatgacgcgcctcttgattatgcctcatccgacggttcagatttgaggtgggaagagatctctacgatctcgaaaatcgtggtgatgctggctctttaaataactctccacgtcccaactccttttcacataaactcatgcgactcccaaggtaacttttctctcccccactatttttattgtagagatataaattttatctttcttcccccatctccttcgtatttcctctacagctcctcttttctcgatctgcttttctcttctttccttcacgacaggaaccagaagacgtcggaaccctaggcggagcaggccgaatccgaaggccatcgtctaaggtcgatcgacctaaaaagaagaaagctcccaagaagaagcaaagcttgccgatgacagccaacgacttggtcgaccttcggaggaggtaccgagttccggcgggggtaactatgatactcccgagttcgctgctctcacccgagaatgtcctggaaggatggtgttgcgcctacgccaacttctttgggaagtacaggctgttcttccagattctggcgtgtatcctcgagatgctctactgtctcggcctcgcctttccccatatgtgctcgaatttcgtcctctatgtgctggcgttattcacccgggctcgggaagtaaatagagaattcagctgccatgacctgctccatctctgccaggtcaagaccaatgctaggagcgaccatgggacgtactacatcagcgctcgtcccggatctctggtcctaggcggtttgaaggcttgtcgagacacaaattggcgatccaagtacttcttcttcagagtagatcgtcattcaatcggcagttttgatcccgcgaggatgacgagtctcttgatttttgtttttctttgttgtttgtgttgaatccctgactgcttttgctaaacgttagtattgatactaatgttatttttcttttgatggtttgcagcaaggaccaaggaagttactctttcagagacagaactccagctgttaacccttctacgacgtggtcagactgactgggccacttttagcagagatcctatcatagctgctctcgccgtagctcaagcagttcccacaatcgtccctccagcagcatagccagatccgatcgaagaggtcccgcggattgaaccgaaccccgaggcagacctgcctataggtacgagttccattatcatgccttttaatgtacaagtcactgtgatagccgtacgattcgagttgctaactaacaaatgttatgctttgtttgttaagttcctcctgactccagctccacttcagaactcccgctcatcagaagaagaatgaggcgaccaagccttcgtgttcaacaagccaatactgaggcttctgctcgtgttgttgatctgtcggccgcggctcgaaacactctagctgtctccagcacatctgcctcaccctctcatccatcgcttcctgaaatcaataccgaacctctgctgcagcaggtctgtcttataacaaacaggtcgctcaggtatctgggccatctgcagttgttcgttctgctggtgccccgtcttctccgaagagagctcggaccctgccagaggtgcacccggcggctgagttagtcatgagcgaccagggggtcgcctctcctatagaggagagggcggaacctgcggctgctaacctggaggcagctaggtccccggataggcagtccttgggtaggtcccaaggcggaagacgaggatgcagaggtgggggcaggtcgttgaatcggtctcaggaagtgaggcagacgtccaactctagtggaggatatgcaggaagcaggcctttctactggtcttacactcacgatcgtgatcacccgatcgttgaggacgaggctgggtttgcgaacctgcttcgccacatcaaagggagaaactgccaggttcccagagtgaagaacatggccaaggcggcggcttatgctgacatgatggcgaaggaggtccaggtaataatcgataactgcctccttttatttccatccttttgctagttgtaacttctgttttgccttcggcaggcgatagctgcaacgaacaagctggttgctctctatgagcagcgtctgagccaggtcccctcgccgagcgagctcgaagaaggaaagaccctcatctaggagctgacttcgagtgtgaaggctagtcaggagcgcgaggtttcgttccaggtatacctcggttctgacttgtttgtatatattttatcgatgatacgatgattctgacctgattgtgatttcaggcggagatcgagaggttggaaatgaagctgtccacttcgaaagacctcgagaaaggtcatgctgagaagatcgggctcatggagatggaggtcgggggattgcaagctgactagcagacgtcgagaaaccatattcatcgcttgcagcagaggagggaagagctctccaaaagggtgatggaccttacttcgactgcgcaaggagcgaagaaggtggttcacgatgctaaggttgaactggccactgcgtattcgaggttgctggatgggatcaaggaaaagtggatcgccaagaaggagtacacagtgctggaaggtcaagcggccgaggtggagtcaaacctgactttgatcgaccagatcacgaaggctgctatcgatttgaccgtggaaagacctcgattaaaagccgagctggatgacctggaggcgcagtgcaaatcgaaggaggtataagacttcactctgagcaagttggatatcctccaggtttcggagatgtcggtggtacgtctgatggacgtcgacaaacaagggacacgaatcggattggatgagtttgggagcaacaaagatgcgtttcctttaggtctcgcggagggttccggtactgtctttgccacgccagctggggagctgaaggagtgatcgctt

SEQ ID NO: 163032 - DNA, 1491 bp, Arabidopsis thaliana landsberg
gatttacctccgagccctccgtctcttcccatcatcggtcatctgcaccttcttctctctgttctactccacagatctttacaaaaactctccaccaagtacggatctattctctatctccgagtctttaggttccctgtagtcctcatctcgtcagcctcaattgcatatgagatcttcagggcacacgacctgaacatctcgtatcgtggtttcactccaaccgatgattcactttttgccggatctttcagctttatctctgctccctatggagattattggaagttcatgaagaaggtccttgttacaaacgtttttgggccccaagcacacgagcagtcacgaggtgtccgtgcagatgtgctagagcggttttatgggaatctgttcgataaagcgatgaagaagcagagcgtggagatatgtgctgaagcgttgaagttatctaactccagcatctgcaagatgatcatggggaggagttgttcagaggggagattcagggatatggctaccgagttagatgttttgacaaagaagctcttctttgcaaacatgttgcgagcatggtttaagaagcttgttgtctctctgtttaaaaaagaaactacagttatttcctacagattcgatgagctgctcgaaagcattcttgtggaacacgaaaagaaactggacgtgcatcatcaacgtacggacttgatggacgcattgttggcagcttatcgagacaaaacgcaagagtataagatcactaggagtcatatcaagtcgttttttgtggtaaattttcctcattttgccgatttcgtttgagtatccatatgaaaattacttaaaaatgttccatgtcttcgcctgcaggaccttttcgttgggggcactgatacctcggtccaaacaacacaatggactatggctgagatcattaataaccctaacattcttcagacactgagaaaagaaatcgattcagttgtagggaaatcaaggttgattcacgaaacggatataccaaaccttccttatttgcaagcagtggttaaggaaggactaagattgcatcctccagggcccctcttgataaggacttttcaagaaagatgtgagatgaaagggttctacataccggagaagacaacactcgttatcaacgcttatgctgtgatgagagatcccgactcttgggaagatcctgacgagtttaagccagagaggtttctaagttattcaagatcagggcaagaagacgagaaagagcaaacacttaagtacctttcttttggtggcggaaggagaggctgtcctggaataaatctagcttacattcttgttggaaccgcgattggagtgatggtacagtgctttgactggaaaatcaaaggaaataaggttaacatggaagaagctcgtggatcactggtattaaccatggctcatccacttaagtgcattccggttgctcgaacccagattcccagttgctaa

SEQ ID NO: 163033 - DNA, 4848 bp, Arabidopsis thaliana landsberg
atggaagcaacaagaacgagttttggtcttcataacgcccctctctgccccacaacaaacctctctctttttcctcggcgttggcttcacaagcacactctttccttgaaaccggcaaaacaacaccacttggtctgcgttagggctactgagagtaatgataatcttgaaagtagtcgtcccttggcacacttttctcccactctttggggagatcacttcctttctgttcccctccatgtcgctgtaagtagatagatataagaagcacaagatgaccccaataattgttggttcagacaacatgaacgattttttttataaattgcgttgtatatttaataattgtaggaatttgatgatttctcaagagagattgaagtgacgatgaagccaaaagtgagagacatgctcaagtcttccaaaaacagcgacaatgagaggatccgtctcatccatttgctaatgaacctcggaatcgcatatcatttcgagattgagattgatgagattcctggccaagcttttggcaatttggacgatataatagccaaggaaaatgatttggaaacaatctccaccatgtttgaggttttcagactacgcggttactatatgccttgcggtaagagtattggtgaccttgattcacatatatgtatacacatatataatttggctttcgacttcactgtagatgcattcaatagattcaaaggtgaagatgggaggttcaaggaaagtctagctgaggatattagaggaatgctacagttgtacgaagcagcacatctagggacaccatctgaagatattatggacgaagcattgagtttcgcccagaatcacttggagtcttgaatagctggtaacgtatccggtgcaactccccatctcttgaagcatatacaaaactcattatacatgcctcgatactgtaacatagaagtactagtggcaagagaatatatatcttactacgaacaagaagaaggttacgacgagatcctgctaaagtttgcaaagcttaacttcaacctttgccagtttcgttacatccaagaactcaaaactctgaccaagtgacttactcatcttcaatctttttgttgatgacattagctagtctcggtttcaatttccccaattctttcacttttatggttgcagatggtggaaggacctagatcttgcatctaagttaccttacatcagggatagacttgtagagagccatctcgggggtttgggaccgtacttcgagccacactattctcttgggaggatcatagtggctaaaatcatcatgaccatggttgttgtggatgacacttatgatgcacatgcaactgtacccgaagttgcggtgcttacggaatgtttgcagaggtgcttgctatatttatgtgtttattcataaatatatgcctctttgttcttcttttatatttgttcaattgtgtgaaaatcttggcatgaccaggttgaatattggtgccgatgataaactaccaggctatttgagaatcgtcctcgaaagtgtgtttaaagttatgggagagattgaacaagaaatgtcaccgaaaggaagatcatacagcgtgaaacaagtgttggaaagggtaatgtataagctgaacatgaaactaaccaatgtacatgtatagttagtggactctaattagttctttgattccaaacatcagttcaagatcattgcgaaggcgtacaaacagttgacagagtgggcacggaaaggccacgtaccaacctttgatgagtacatgaaggttggattggtgacagctgggatgggtgattatgcaggatattgctttataggaatggaagatatcaatgagaaggaagcttttgagtggctcaattccaatcccctaatcatccaagcgctaaatgtaatgttcccgttagcaaatgacgtaggaacctacgaggtacacggcacattaaatatagggatgtctttggttttcttgtgatttttgttttttagttctcatgaataaattatatttgtagaccgagataaacagaggagaggtggctaatgggctcaactgttacatgaaacaatatggagtcaccaaagaagaagcatcccaagagttgcgtaaaatatacagcaacaacaaaaaagtggttatggaggagttcatgaactcacatgaccatgtgccacgccaggttctgctgcgatgcctcaactttgcacgcctcttcgatgtgatgtacacggagggtgatggatacagtgaacccaaaggcaaaatcgaacactttatgacctccttgtacgtccacccaatacccctttcataatgacgtgcaacacacaccaattctaagaagaaatttatgactctgttacctgcctcaagactgaatatctaaaatattcttaatttttaatttaatataaagtcattttgttgcatggttaactcgtaaaacttctaaccatgttgaatttgttcattcttaagctagctcacgttaagagtgtgcctctctatcttaagaccaatctccgtatctacacaggcctataccagatcagttgacccgatgtggttcttgttacaggacatgatcgtaaagacggttatgtcgtaactttgagggaatactcaatttaatgcacttaagacattgaacaggtcaggtgactgtggatgtcggaatccgcaattagaatcttgtggttgtttttacggggatctttggtcttgttaaacgaacaactatcgaatcgaaaagagaagaaagtgcttttgaattttgtgtatagtattagtgttttcttttatcgtccactttacaaatgtcatcgactcatatttatactcaatacatcgaatcaaacgtattaaaatacttgccgacttcacgccgcggatctcgcgttattaacgtcgtacgtcacgaatcttcaactcgggactttaatgcgcggtttaagtcgtaacgtcgtattaatgtcgtacgttattaacgtcgtacgttacgtttctgtattaatgtcagatcgttctttaaacggccaggctcacgctgggctgggaattgggcccaattcaccttgaagcccattgaatgcggattgggccgaagtggaccgaatccgacatccacaatttgccccccaagtcctcgaagtgatccagttcggggacttaagaaaatccgaatcgtattatcccaagaatcacggatcgtcacctcgagaacgaaaattcttgatcaactcctagacgagctgaatcgcgcgattaccgagctaaagagcttgaggacgagctgaccaactcctagacgagctgagcttgaggacgagctgaagagcttgaagagcttaaactgaagagcttaacgaagaagagcgagctaacaagctacttgagaagctcgtcctacttgagttttgcagtcgagagatgagccgatagctagatgaggagttggacgagctgactagctgacagctaggcgaggagatggtcgctgagtgatgggaagagcttaaaggcgagcttaagagcttgacgaagaggagcgaacgaacgagctacgtgagacagacgagctacgtgagacagacgagctactcgagacggacgaactgacgagcttcgtgagacgactcccgcccttcgcctcgctcatctcgtccccgacttgaggagaagaatactggtgcgggaaaaataaagaagacccgaaagaggttcctccaagcctcgttctttcgtctcgggaatctgaagctcgcaggtcggaacctcgcagctcccccagaacgtatttttattccgaattgacatgacggtatactatggcatctcacattgttatccttttgccgtagctaccccgtcttcctttgccgacatcatgaggactctcgtggcccccggttctgccatcgcccccttcgacgaaatgagggaggtgaacaaggataactaccttcgcttcgctgggaaactcggcaaggtaaaaagcctcatttgattcaccaggaaacccgacgcaaaactgagactaaagtcacctttgattttgcagctaattttggaattcaactccgtcttctgcagccacgaagatcagctttctgacaaggatagcgaacttgacagctttaggcgaaatgaagacgagaacgctcacacggtggagagggccagcagggtgctcaagcggatgaaagacgccgagctgcgggtccaggaactcgaggtgagcaatattgacctcatggcaaaattggaagtaggtaaaaatgcctatcttgctgcggtcgacaacgagaaccaggcccgagctgaactcaaggtttgcgaggagaagctaaggaaactcgaagaggagcaggccgcaaaaattgacgtcgccaggaaggaagagaggaagaaggttaaagctcggtttcacgagttctcgtcgaagtatgggaacttcttccgggaatccgaagaagttgaaacgctgaaggtccgggtagcagagaccagggcaaaccgggaattgctcgaagagattcaaaagggtgaaattcccgacatcgctatggagcttgagtcggttcgcgctgacgaagcaaagttcgtgcaacgagctaccgaaccgaagactccccgacctgaccctgttgagcttacctcgctcctagctgacactcccccggagacgattgcggaaagcgctcctcaagatgaagcgatggtgatcaatgaaaggggctccaacaagggctcgaccttggaggctggaatcgcggctatgtttcctgttggtattgaaaaggaatccgagagggcaaaataa

SEQ ID NO: 163034 - DNA, 1374 bp, Arabidopsis thaliana landsberg
atgtttgaagaaattgggtgttttgatccaaatgctccggcagaaatgactgctgagagcagtttctctccgtccgagccaccaccgacgatcacggtcatcggtagcaacagtaacagcaactgcagtctagaagatttctctgcattccacctcagcccacaagactcttctctacctgcctcagcttatgctcatcagcttcacattaatgctactcctaattgtgatcatcaattccagagttcaatgcaccaaaccctccaagatccatcgtatgcgcaacagtcgaatcattgggacaatggttaccaagattttgtgaatttgggtcctaatcataccactcctgacctactcagtctcttgcaattgccaagatcctcacttccacctttcgcaaaccctagcattcaagacattatcatgacaacatcttcctctgtcgccacctatgacccgctcttccatctgaattttcctctgcagcctcctaatgggagtttcatgggagtggatcaagatcaaactgagactaaccaaggagtgaacttgatgtatgatgaagaaaacaacaacctcgacgatggtcttaaccgtaaaggcagaggatcgaaaaagcgtaaaattttccctacagaacgcgagagaagagttcacttcaaagaccggtttggtgacttaaagaatctaattccaaatcccaccaaggtttacacttacttaaatactaacttcttcttcaagtaagaaatcttcagaaactaattaaacccttttttcttatatctctagaatgatagagcatcaatcgtcggagaagcgatagattacatcaaagagttgctaaggacgatcgatgagttcaagctgctagtggaaaagaagagagtgaaacagaggaacagagaaggagatgatgttgttgatgagaacttcaaggctcaaagcgaagtagtagaacaatgtttgatcaataagaagaacaatgccttgagatgctcatggctcaagaggaaatcgaaattcactgatgtcgatgtacgtatcatagacgatgaagtaaccatcaagatcgtgcagaagaagaaaatcaattgtttgttgttcgtatccaaagtcgttgaccaacttgagcttgatcttcaccatgtagctggtgcacaaatcggagagcaccacagtttcttgttcaacgccaaggtttgtcataaaatctcaatttaatccatagtcagacactattagactaactaacgaattgtgatataacagattagtgaaggatctagtgtttatgcaagtgccatagcagatagagtaatgtaagtgttggagaaacaatacatggaagctctttcggcgaataatggt

SEQ ID NO: 163035 - DNA, 2779 bp, Arabidopsis thaliana landsberg
  unsure (1)..(2779): unsure at all n locations
attcactgccttaggattgtgcaccgctactagctgatcttggttacaattctgggttttttactcgcgccagaaacacgctgttgactcaaagaagctgaatctgtataaagcatgtgagtctgattcactgccttacgattaggaactgctagctactaacttatattcttttcaataaaagggttttgaactagagccagatcctacagttctaacctgaatctccgccgtatggtactgctctaactattagatttatttttcacgttcnnnnnnnnnnnnnnnnnnnnnnnnnnnnnnnnnnnnnacagtgcagcttcgtgatcatcttcaacagatgattcattggttggatgaagctattattggagatatgctgcctctatatgaacgtcgtaatgacatgcgtcaggttttagatagagatagaagactgaggtgtttatttaaaagattctatgatgaagnnnnnnnnnnnnnnnnnnnnnnnnnnnnnnnnnnnnnnnnnnnnnnnnnnggtcatcgatcacaatctgaacaaatttatggcttctccagagtacgaccagctgtatgggtgcgatgtagaattaaaaatcaagtgaagatgggagttttgattgagtttctagagtcaagtgttacagttcagtcattaggtactgtatatagtgaactacctgacgatgtaggagcggaggacattcacaaaatagttgtgctagatatcagatttggtaacatagataggaacttaggaaatcttttggtccaagcagaacctcgtaatgggtcagcagctcacctagttccaattgatcacgaactgtcattcttcaatgatgcacatccctacatcacttgtggcgcttgttggatcaagtggttaaaaaagattgataaagatttttcttcgcagttggtaaattacgttgcagccctcgatcccgatagagatttagaatttcttcgacattgtggttgggaaccgaatcaaaggtatattgaaaacttcacggtctttgccacattcttgaagaaagctgtttctcaagggttgacagctctgcagatcggattgttggcgtcatataagtgggaggaagatttagattacaacttgcattgtattgttgctagtgttcaaagggaagacaacaattttgttgagagtgtgggaacacgaatagagcaacgcttgagggaatttcatgagaacctacatgggaacgcttgagggaatttcacatttgcttattattaggatggtattggcctattagggtttgcttttaattgtacttttggattttttagatttaattttcttgtttaatgttattgggcttataaatttatgaaatctgaaacattattttgttatgcaaccaggagacgatattttgtttttacaaataaattaaatgatgatgtttgaactttacggttttattaatttagtattaaagttatttagttttataatcgtggtgcaaataaaaaaatagtgatttgataaaataataaaatataaccctaatactaccaaaataatgatattacaaatttatattaatattgatctaaaattagttcctccgtattaccgtttagtaatattttaacttttatgagtttaaatatgatgacccgtgttatataagggattaaattttatttagtacaaaaagattttatattatatattataaaataaagtaatttttttttgttagtctctatatagaatattaaaatgaatatattattattacatggttaatatgataatttatttgtctcacaataatagaattatataaagatgagaagtgaaatataatggttaactttttagacagtaaaaggaaattcttctcaaagatcttcgatatggaggaaactcttaaaacttagagacttggcaaaggatttctatcaggttgaaataaaaagtggcagagggacatctttttgttatgatacatggtcctctttggggaacttatttgatacttttggagataagagggtgcattaatttgggtattacaaaagaagcctcagtgggtgacgttttgtcctctcacaaaggaagacggcatagagtggagactttaaataaagtggaagaggtcatcaggaaaacaagggtgaggaggaaggtcgaagaggaagatttgatacaatggagatggaagacatgttttaaacacttctcctcaaacgaaacttggaaaatgctgagagttgaaaaaccaatctgcagatgggcgaaagggatttagttctcggaagctacaccgaagttttctttcatcacttggcttgcaatgcatgatagactaacaacgggtgcgacaatgagaacgtggaacacacaagtggatactacctgcaaattctgtgctgaaccgatagagacaagaattcacctattctttcagtgctcttattcaacacaagtgtgggagaatctcacgataggcctacttcaaggccattacacttcttcttgggaccgcactgtttcgctcctcacatgttcctctcttgggaggaaacctcttatgctgctgagatatacacttcagatcatggtacacaccatatagagagaaaggaataatcgccgacacggagaggagaaccctatcacacctttgaccattggaaaaaacatcgacaaaaacatttgcaatcgaatcactcttcttcagaaacaagaagcccaaaatatgatgatttgtttgtattttggctttccactaggttt

SEQ ID NO: 163036 - DNA, 5341 bp, Arabidopsis thaliana landsberg
acaacagctatttgtgcagctacggatgatcttacagcgtcctcaggttcgcttcgattcgattttagagcaataaaagctgcaacaagtaattttcataagagtaacaagcttggtcatggtggatttggtgcagtttacaaggcatgatgttcttaaattttctcaactacttgattgtattataaactcagatgctaattctgatagtaaaggtcatgcgaatgagcagggtatgtttccgaatggaacagaagttgctgccaagagactatctaaaccatcagatcaaggtgagccagagttcaagaacgaggtgcttcttgtagcaagacttcagcataaaaatcttgttaggcttctcggtttttcgctacaaggagaagagaagttactcgtctatgagtttgtttcaaacaaaagcctcgattatttcctctttggtatgtaatatttaactaaaaacagtttcctctttggtatgtaagttttaactcatacatgtataagtatgcagatcctacgaagagaaatcagttggactggacaatgcgacgcaatatcatcggtggcattactcgagggattttatatcttcatcaagattcgcggctgaagatcatacatcgtgacctcaaagcgagtaacattctcttagatgcggatatgaatccgaaaatcgctgatttcggaatggcaaggatctttggagtggaccaaactgttgccaatacaggaagagtggttggaaccttgtaagtatcatcttaaaatggactttgatgatttttgatcattagtttaagagaccttttttgacttccagtttataacctctattttgcagtggttacatgtctcctgagtatgtgacacatggccaattctcaatgaaatcagacgtctatagttttggagtattgattcttgagatcattagtggcaaaaagaatagcagcttctatcagatggatggcttagttaacaatttagtcacatatgtgagtaattctaaactaataaagtttgattgattcttataaaacagtaatcatagttctaaacatatatattttacaggtctggaaactttgggagaacaaaacaatgcatgagctcatagatccctttattaaagaagattgtaaaagcgatgaagtcattagatacgttcatattgggctgttatgtgttcaagaaaatcctgcagatcgaccaacaatgtctacgattcaccaaatgctcacaaacagctcaatcactctgcctgtgcctctgcctcctggatttttctttaggaacggaccaggatcgaacccgggtcagtcgaacagcaagtcttttgcttgttctgtagatgaagcatcaatcacggacgttaatcctcgttgaaatatctagcatgttctgtttttgttttttgatgtttccatatagaaataagttttataggggtcacaataaaaaaaataaagggtttgaacataaatttgtaagtttaagggggttaaattaggagaaaaataaacaatattataaaatttaaagggctaaaacacaaatttagaaattttcacttggtgactgcgtgtagatgacgattcactttcagtgggaattatggttacgaccatcgtcatcgtcttgctgcttctttctctgcgttttctttttagcggaggagaaaatcgtaccgagaaattgatattcaatgtgagttttgttgttccatgtggttatgattcatcttccaaattaaagagtctttcattcataatcagggaaatttagggtttgataatgattgtaagggttttgagaacccttgttcacttttacagatagtccccacttgtcgtcaaacaatcttatgctcactagcaatatcctgaatttacacgttcctcaaccatcaagaacagatggcctcgagtcatagccaaatctaaggtcaggtccaaagcctttggagtacttgtgtcgtgtgtgagttactgaattctcttacactaatcttttactgaaattagacgaattttatatgaatgtaattcaaaaccgattgttttactaaaccggaaatttaagcttttgactgatggttccttctctcgttccgagtcacattttgaaaaatgctttgttttcgctcaactacgtttaggatattagagttaacattttgtttgctaattgctactttcgctgcgctgtaaccgggcagcttgctctgctttaccctaccaattgactacttttccatggaccattttccttttttgctatcttgtgtcatttagtctaaaatgttttggcttatctcatcgtccaaatgtgcattatctctgcctagaagatgctataatgtgttcttctggttctgggggtcacatggttcatcttataattgcaactataacattactttttgtctattctcacgtaccaatttgtttacacacttgactcaaccaaaaaaattgcaagataggcaatgacttggacttggataccaacgggtcaaggacgttaggacgcttgcaatgaaaatttagttgacacaaacgtgtttaatggacaaaaacatatgcatatattcatacatgcttacttacttgctctcctaaacccaaacaaaatctctatgatattcataatgaaactgaagaatctcttgccaatcttctggtttttccttgtaagcttctctatttcatctgcacaaaaatgcggaaaaactggtttatttaaacccaacgataagtatgatataaaccgtcacctcctcctttcttctctagcttctaatgtctcagctcgaggcggcttctacaatgcttcgattggacaaggacctgatcggttgtatgcttctgggacgtgtatccaaggttctgaaccagagctttgctcagcttgtatcgactctgcttttattagggtgataaagaaatgtcacaaccaaacagaagccctcgactggtcctcctttaacgaggagtatccttgtatgatacgttactccaaccgttcgttttttggattacttgagatgacaccatttttcaagaattacaatgctacagatttccaagtcaacttgacagagttttatcaaaaatgggaggctttgatgcttggtgtgatagctgatgctatctcgtcgccaaacccaaaattctatggtgccggcactggaaaaattgggattcaaaccgtttacgctttcgtgctatgcagtaaggatatatctccatggaactgttccagatgtttaagagggaatgtggataactataagttgtcctgcagtgggaaacctcgtggccatagtttcagcccgagctgttatatgcgatgggatctctatcaattctatggatttattgagtatagggcttctcccacgcttcctcgtgaaaaaggtagaatctcagaactatctgacggtactagctttttagtctcatattttcccttaagcgcaataatcgtaggtgatttggccttgttcagatggcggaaagatttctacaagaaatatcctcggaatcactgttgctcttgccttttttatcacggtactgcttgttctagggtatgctctttctaggaggagaaaagcctaccaagagtttgcaactgaaagtgagttttttttttttgttttaacaattatgagttcagggcataaacgtttttaaatatgtcaattcagttgtctctttctctgttcttcaacgatggttatatttctcttgcagggaggtcaatgaccacttatggtactgcaccgccagatgatggtaagagactatacagctatttgcattaaaactgttaatgtccctttggatacgtttccaccataacactatgtatatatgctttctgctgcagatgatattacaacttcaggttcacttcaattcgattttaaagcaattgaagctgcaacaaataattttcagaagagtaacaagcttggtcatggtggatttggtgaagtttttaaggcaaaatgttcttaaactttctcaactactagtttgtgttataaacttagttgccaaaaaaaaaagataagaaattctgatagtgagtgaagatcatatgaattgacagggaacttttccgaatggaacagaagttgctgtgaagaggctgtctaaaatttcaggtcaaggtgaagaagagtttaagaacgaggtgcttcttgtagcaaagcttcaacatagaaatctcgttagacttctggggtatgctgtcaaaggagacgaaaagatattagtctacgagtttttgcctaacaaaagtctcgaccacttcctttttggtaagaaaagaaacagatgatagggttatattctctgaaaccttagttcttgatctcatagtctaattgcttaatacatgggatttttgcagacccggtaaagaagggtcaactagattggacaagaagatacaacattattaatggaattactcgagggattgtgtatcttcatcaagattcacggcttacaatcatacaccgtgacctcaaagcgggtaacattctcttagatgccgatatgaacccgaaaatcgtggattttggtgtggctaggaattttagagtggaccaaactgaagctaccacagcaagagtagttggaacaatgtaagtaattttccattttagttatataatctgtttgtacttattgttgttgataaaagttgaaactggtatgcgttgtatttttcagcggttacatgccacccgaatatgtgacgaatgggcagttctcgacgaaatctgatgtgtatagctttggagtattgattctggagattattggtgggaaaaagaatagtagcatcaacgagacagacggctcaataagtaacttagtcacatatgttagtatatttccaatgccatctcaaacttttctacttctcttagcaaaatgatcatagctctcaacatttaaattagtttcttgataaatgacttgaataggtatggaggctttggaacaatgaaccattgttggaactggtagacgcacccatgggggagaattatgatagaaatgaagtcattagatgcattcacattggattgttatgtgttcaagaaaatcctgctgatcgtccaacgatgtctacagtctttcatatgctcacaaatacttcaattactctacatgtgcctcaaccaccaggatttgtctttagggtcagattcaagccaaatcccttagctgatagattgcagcgtggtccgtctactagcatgtctttttcttgttctgtatcggtcacgtgtgttagtcctcgttaaaagcga

SEQ ID NO: 163037 - DNA, 1548 bp, Arabidopsis thaliana landsberg
atgaagacattaggggcgaagattactctctcaatgttaaaagataggataatgacgaagcttggattagatgcaaataaggtaaaattgcatatgaggtacaatccacggtttttcggagtagaggaagagatgaacgtttgtgatgatgaggatgtctttgtttatgtaacatcctcaaaaaataaccggagaagtgttttggttgtggaggagatctctaaaccgcccgagcccgagcaattgcccgagcaattgtctacagttggtaaaagttctgttggtaagaactatacggagttgaactccagaggaggatgaaatgagagtggatgatggtgcactcatcgtcttattagaagaggaacaaggaactcaacatcaacttgaggcaatagtggaggatcacgggactcaagaagatgacacacgctatgatgagtctatggataattctgataggggggaacagtatgttgagtcgccacctgctatagctccgggtacgcccacaatatctatgctacagagcggaattctcgcagtattacagaacgcttcttaaatcctgagaatcaacgtatgagtaaatggatcttagagatgcataggatttggagactatatgatcgtgttcgtgggattgctttatctaaggatcgtttccagtttatcttcaatcatgaggcagatcttaatgaagtgttaaaaactggtgtttggacacaagatgattggtgtgtggtcatggagaaatggattgaggatcctccagctgattatttgaactttcttccagtttggattcgtctccgacacattcctgtcaatcattacactgaagctacaattgcgacaattgcttccagggttgggaagattatcgaatttccttttgaggatgctcaggctcagagtcgggattttgttagggttcgtgttctattggatgtttcgaaacctttaaaaaatttcaaagaggttcagacgccgaatggtttactggtaaagataggagttgactatgagaggattcgtaaacgatgtttccattgtcaaaggttaacacatgacaaatcaagatgtctattcatacctcctccggcttcctctgttgtgatagaagagacttctattcctggtactgtttcttgcccaagtaagctagtggaaccccctgttgaatcaaccactactctggctataggctttccaaaattaatgtcagatgcaattaaagcaaacattcttcagccatcattaccagttcagatgaatctcttatcagcagattcatcaagtattacttcatctactctcccttttgttttctcttctggatgttgtgatgccagctcctccggattaaatatggtgagcctagttccgtgtaaaaaaccaagatcttgggtgcgtaaatccaaagagaaaaaggcatctgtgaaaggagtagaagtgggatcttctgggggacctcttaatgatgggttaaaacggaaatctttggaaaaaggaaaagcagttgcaaaatataccaaacgaccctaa

SEQ ID NO: 163038 - DNA, 1170 bp, Arabidopsis thaliana landsberg
atggagtctcccaaatctaacgtcgacgatggctaccaaaacatcttcgtcatgcgtcacggtgatcgaatcgacaatttcgagccactctgggtttcaaccgccgagagaccttgggatccacctttggttcaagacggtatgattcgagcgtttcgaaccggtcaaaggatccgatctcagatcgggttcccgattcaccgtgtcttcgtctcccctttcctccgatgtcttcagacagcttccgaagtcgtcgcagctctatcagccgtcaatgtcgatcctaacgccatgtcttccaaaaacggcccttccattgataaatctaagctcaaggtctggtcatatctataatcttaaactcagatttaggaagaaatgtgtgtatgatgaaatcagctgagatgttcggctactttctcaggtttctattgaattaggtttgtgtgagatgttgaactcagtggctataaggcgtgagcttgctcctaaagatgggaaatttgacttcactgtttcagatattgaaactatgtttcctgagggaatggttgatcataatgtggatatggtttataaagaggtatgctttacactctacaggaccttttaaagtgttgatcgttttccttactttggtagacaacttgatccttttgttccttctgttcagttgcctaaatgggaagagtctgtggaaggttgcagagatcgatatgttaaagttgtaaaggctcttgctgataagtatcctgaagagaacttgctcttagtaacccacggtatgcaagtttctgactcttggtttcctattttgacttatgtgtatctgtaaaatgccctcctatcctttgtcatcttgatcaatctcaatcagatgtaaaccatgtcccttctctacattgaactatcctatccgtctctgatgacctttgtgcactttggatgttgttaccttctaaacctctttgatgaattttttcaggggaaggagttggaactacattttcgacattctataaagatacaacagtgtacgaagtagactactgtgcttatgttgaaatgagaagacaagtctcaagtgaagatgggtctgttaaagctggggactatgaggtggttttgagtcatggtcaagctgggatcaggtttagtcatgatcctgtc

SEQ ID NO: 163039 - DNA, 1773 bp, Arabidopsis thaliana landsberg
  unsure (1)..(1773): unsure at all n locations
atgcaaaaagaagaagtagctcggcgaaatagggtcgttgaggctgaagaagaacaccatgatcgagccatcctttgaaaaagtggttactgaggaagaggttgagatcatcggggatgatacaccagcccctgttgggagaagaaaccggccaaggaggaagagagagccaaccccgagcgagtactatcaatacttgaaggagttgaagtttgaggaaactagataccctcataaggaaacgatgcaagagcttggtatttgtggtgatgtggaatacttgatggaatttgccaatcttgcaacattcatgagctgccaatgtgggggatataaagaggagagctgccaactccttgcaaccctcaatgttgatttctatgttgacgattcagagaaagaagagagaggaggtcttggttacataactttcaaggttagggatgtcgagtatacacttcatattcgccatcttgataccattttcaggtttccaagtggagaaggaatccgctaagactatgatcaagaagagccgaaatctctttggaaaacaatcgccggtccgaagcccttctcgccaaccaagagcaagagttcttcaatccgaaatcccgtgattagatatcttcaccaatgcatcgccaacaccttctttccaaagaagaccaccggatttattggtgaagaggagctatgcatgatagaccaatctttggtcttcattttgagagagacaagagatggaaggaagatggcgggggatagagtagacacttcgttgagtgttgttctcttggatcacttattgagttacaaggagtatgctgcaaccatccatcgctcgggaattcgtgggagtctttgtgttgatagtctcttaacgccaatacttggagccgtgggtatggagcttggagcccctgacgtgttgcccaagttcattgacctcgactatctcaaggggaaggactttgttgagaaannnnnnnnnnnnnnnnnnnatctcttcaagttcaacaactcggagcttggaccttctcttctacccctaccatgcgagaaccggacttcggtgaagacaagacgcaacataaatttcatgccatctgcctttgccttgaacatcgatattggaggagctcgggaagatgaaccagaatatagtcaagctgactatgagcgacaggagtagtttactcaagctgactatgaggagcaaatacgagtttgagcagcatattgttcaatcggagtaagggaccagcgaacaagagcaagctcattatgaagaaggtcctgactaaggaggagatgagatagctgaagttcacaagaagctcgctgtgctagaggagctcgggaatcttcaaagcaaaacgatgaaaggtttcaagaagaatatgaaaaccatgaagaagtcgttgacgggtatggctgctcaaatcaaagacttccagagcaagccgaggctcccatctcccacccccaaagaaagaagaagcggttccacaagttcagctgcaaggagggccgacaggatcgctcaaccccgagcttcatcattcgagcctcgtgaagtgatcttcgagttgagagagccaaggagtaggcagagacgagcttccacacgctcgaccggacaaaacgagcaaaaccctcccgcctcaacttcagcccctgcctatactcaagagagtatggacgactatgtctccatctacttcacctgatcactgaggtaacaccacctcaaccattgtacataccatt

SEQ ID NO: 163040 - DNA, 2990 bp, Arabidopsis thaliana landsberg
atggttcatacacgttttcatgatgagtcgaaggagaagggaaaagaggtggaaggtttggatccgatggaggagaggatggcgaggctggaggcgatgatggaagctcatagcaaagcgacgatgaagaatctggctgatatgatgactgcgatgagcagatctacagctcagaaacagccggatgagcagtccagtggtgagcggagtctacctcgatcatcaacttcaacggatgatagagtggtttttcaggatgtccgatgagaaaatcgaccagagcaggatcaacgacgagacaatcgtcacgaacaggatcagcgaagggaaaatcgtcatgatcaggttcgatttgaaaacccaaacaattatggtaacttgacgcgtttgggtaagattgatttgcctcgttttgatggatctggaatcaaagaatggttgttcaaggtagaggagttctttggtattgattatacccatgcagatctgaaggtgaagatggctgctatccatttcgatggtcatgctgcaacatggcatcactcttttatgcagtcgggtgtaggtttgaaggtgttgtatgattggcctggttatgttcagtagttgagagagcggtttgatgatgactgtgatgatcccatggctgagttgaagaagctaaaggaaacagatggcattgttgattatcataagaagtttgagttgattaagattcgggttaacctttctgaagaatatttggtgagtgtttatttggcaggtttgcgaatggacactcagatgcatgtcaggatgtttcaaccacaaacggtgcgtcactgttttcgtttgggaaggctgtatgagaaggcacatcctaagcgtctttcttcaacaccttggcaacctaagacaagtggagcagctggtactttgaagtcacctagagaggcttctaatacacctgacaaatattacaacaaggagaatcaatacactaaacctgagtttaaaccaaataatgctaggaagctgtctcaacaggaaatgagtgagaggagaacgaagggcttatgttatttctgtgatgagaagttcagtcctgaacattatttggtgcacaaaaagcaacaactcttttgtatggaagtggatgaagagtttgaagatgcgttagaggaattgactggtgaagaagagaagaatatgcctcagatttcagtgaatgcggtttcaggtatctcaggatacaagactatgcgggtaaaaggagcttatgggaaaaagaccttgtttatattggttgattcaggttctactcataacttcattgattcgaaggtggcggctaagttgggttgtcagattcaggatgcagggttggctcgggtctcagtggctgatggtaggaagttgaaagtggatgggaagatagtggatttctcttggaagttacagactacacagtttcactcagatattttgctgattccattacaaggagtggatatggttttgggagttcagtggttggaaactttgggaagaatttcttgggactttaagcagttggatatgaagttcagatatggtaatcagaaagtgtggctgcatggtattaaggaagggtctgtgagagaggtcaaggcacaaaaactacataaacttcaagaagaagaggttcagttggctatgttatatgtaaggaagtggttgaatctgaagaagatgatgatacagaacatcaggttttgggttctattaatgccttaacaaaagatttgggagaggagtcattttgtgagaaggtttgtggcagcatttctagatatatttgaggaacctactgagttgccgtcgtttagagcacaacatgatcataaaattaagctactagaaggctataacccggtgacccatcgtccttatcgttatgcaatccactagaagaatgaaatagacaaaatggtagaggaaatgttgactaaaggtatcattcaaccaagttcaagtccctatgcttctccggtggtgttggttaaaaagaaagatggaacttggaggttgtgtgttgactacaggggtttaaatggagttaccataaaaataggtttcctattcctttgattgaagaccttatggacgagttaggtggtgcagtaatcttctccaagattgatcttcgtgcgggttatcaccaagtgaggatggatcctactgatatttgtaagacagcttttaaaacccactgtggacactttgagtatgtggtgatgccctttggcctcacaaatgcaccagcctcatttcagggattgatgaatataatgatgttttcaggaagtttttgcgcaagtttgttctcattttctttgatgacattctaatttacagttcctctatgaaagaacaccttcaacacttacgcttggtgttttagactatgagagaacacaatcgtttgccaaaggcagcaagtgtgaatttgctacagacaaggtggaatatttgggacattatattgcagctgatggggtttccacagatccaaataagatacaggcggttgcagattggcctattccacagacactgaagcagttgcgtggttttttgggtttagtaggatactacagacgttttgttaaaacatttggtacaatagctcgacccttaacgctattaacatagaaagatgcatttgaatggtcagatgacgcagctccagcttttcaactactgaagtctgctttatgtaacactccagttcttgctttacctctctttgataagccttttatagtggagacggatgcatgtacacaaggcattggtgttgtactaatgcaagaaggtcaccccctggcttatattagctgccatttgaagggaaaacaactcaacttatccatttatgaaaaagaacttctggctgttgtgtttgctgtgcagaaggggatgcattactttattgcctaatcatttattatcaacactgatcaacggag

SEQ ID NO: 163041 - DNA, 3339 bp, Arabidopsis thaliana landsberg
atggagcgtctcttcagcgcaccgcatctgacggtccagttcaggagcggggaacagatctctgcaatctcgaaaaacgtggtgatgatggcttctttaaataacctcccacatctccactcgttttcacatcaagtcacacgactctcaaggtaatttctctccaacttgactatttactgcgtttatttttcgtttttggagatagaaaaatttcatctttcttttgctatctccatcgtttcctttctctgctactctcttctctctcgatttgcccttttcgcttttcccatcatctctctcgtctttccccaccgaaatcaaagatgagcgacctagaggattcccagaacaagagcaatcatagttacggcgacgacgagagttcgtcagccacgaggtcggcggcgtcaccgccgcaagaacaaaggcgagtcctaaccctaggcggaatgggtccaattcgtatgtcgtcaaccagacccgacaagccgtataagaaaaaggctgccaagcaagggggaggcacgccgatgacaaacagtgacctggtcgacctccggaggagatgccaggttccggtggaggtacatatgatactcctatggccgccggtgcatcctgagaacgtgccggtcgggttgtgctgtgcttatgccaatttcttcgagaaatgtggcctatttttcccgattacggcgtgtattctcgagatgctctactgtctcggcctcgcctttccccagatgtgtccgaacttcgtctgccatgtgctggcgttattcacccatgctcggagagtaaacagagaattcagttgccatgacctgcttcagctctgccagggcaagaccaatgctaggagcgaccaagggacgttctacatcagcgctcgtcccggatctctagtcctaggcggtttaaaggcctgtcaggacaccaattggcgatccaagtacttcttctttagagtagatcgtcattcaatcggcaattttgatctcgcgaggatgaggaggacctggtctaccaacctgggtcagatggagacctgagtctcttgatttctatatttttagtttctttcgaatcgttgactgcttttgttgaacgttagtatcgatactaatgttatttttcttttgatggtttgcagaaagaaccaaggaggttactctctcagagacgaaattcgagctgttaacccttctctaacgtggtcagaccgactgggccacttttagcagagatcgtatcgtagctgctctcaccgcagctccagcagattccgcaatcgtccttccagcagtggacgattgaacccttggcttattgaaccatccatgtttccgatccggtcgtttactacgaccgcccacggtttactaaccgtttatccgtccggtctatggtggtcaataaagctttcggcttattgatccatccatacgatccgaactatatccttatcacacccaaggatccgtggattcatccatcggatcatcgtaggctagcccatgaaatccttcttccgtcggccttaggtttgctcacaggtccaacatccattttgtccatcggtttctaccgtggactttctcgttggttatccgtcgagtcaccctttggtcttaccgatctctgatcagtttcaccctttcgaaaggtcacatccgttccttgcatcctttcaaaatgtcacatccgttccttgcatctattgggtgatgctagctagttcatgctagcttgtcctggtttagctcacctagcttaggtagctagttcatgctagcttgtccagctcacctagctggttcagcttgaactttctcattcttccgactaagtattttagtctgttgctcgaccatggtctagttttcccctaaaacaaaccggcctctttatgaacgcgggacgcggtcgttacaagtctaccctccttaaactgaattcgtcctcgaattcggcgtgtgtaagatcttggttactccctaactcgggacacgggcgttacaaggtcgcccttccaagagaggagagggtagaacctgcggttgctaacccggaggaagccatgtccgcagacaggcagtcctcgggtatgtcccaaggcggaggccgaggatcaagaggtggggacaggtcctccttccaaggtccgactcggtctcaggaggtgagacagtcttccaattctggtgggggtctgcgggaagcaggcctttccactggtcttacactcaagaccgtgatcatccgatcgttgaggacgaggccgggttggcgaacctgcttcgccacatcaaagggaggaactgccaaatgagcggagtgaagaacatggccgaggcggcggcttatgctgacatgatggcgaaggagggccaggtaataattgataactgcctccttctaattccattcttatgtcagctctaacctttggcaagtgatagctgccacgaacaagctggtcgctctctatgagcagcgtctgagccaggttccctcggcgagtgagctcgaagaaggaaagaccctcatccgggagctgacgtcgagtgtgaaggctggtcaggatcgcgaagtctcgttccaggtacacctcggttttgacttgtttgtaaataatttgtcgatgattcgatgattctaacctgattgttatttcaggcggagatcgggaggctgaaaattgagttgtccacttcaaaagacctcgagaaaggttatgctgagaagatcgggttcatggaaatggagttcggggggttgcaagccgacaagcagacggcgaggagccagattcatcgcttggagcagaggagggaagagctctccgaaaaggtgatggacctgacttcgtctgcacaaggggcgaagaaggcggttcacgatgctaaggttgagctggctgctgcgtattcgatgctgctagatgggatcaaggagaagtgggtcaccaaaaaggagtacacggtgctggagagtcacgcggctgaggtggaattgaacttggctttgatcgactatatcacaaaggctgccatcgatttgaccgtggagagacctcggctgcaggcagggctggatgacctgaggcgcagtgcaaatcgaaggaggtatcagacatcactctaagcaagttggatctcccgcaagtttcagagatttcgatggtatgtctgatggacgtcgacgagcaagggacgccaattggcttggattagttcgggagcaacaaagatgcgtttctgggaggtctcgcagagggttccggaactgtctttgccacgccagccggggaactgagggagtgatcactta

SEQ ID NO: 163042 - DNA, 1138 bp, Arabidopsis thaliana landsberg
atggtgcatgagaccaaatcagccacaacagtccctatagagagtctcaagaaccgcataatcttccatgatcgccgtcttgtccaacgtccgaccccattaaacgccttaatcatttacctttggcttcctttcggcttcatgctctctgtcttccgcgtctacttcaacctccctttacccgaacgcttcgtccgctacacttacgagatcctcggcattcacctcacaatccgtggccaccgtcctccacctccttcccccggaaaacctggaaacctctacgttctcaaccaccgcaccgcccttgaccccattatcatcgccattgctctcggccgtaagatcacatgtgtcacttatagtgtctctcgcctctccctgatgctctcacccattcctgctgttgctctgacccgagaccgtgtcgctgacgcagcccgcatgaggcaactcctcgagaaaggtattttccatgctcaattatcgttatagaaaagcagagtatctctgtttttactctggttttctacacatttatttggtttcattattatcacattatctctgttctgaaaataaaagctatcacctgagttttgattttttatgtaacattaatattatagaatcatacacattccatctacagaaaacacaaatttttctgatctttatacacacataattcctatctttgtaactcttttttatttattttgcaacaggtgatttggtgatctgtcctgaaggcacaacgtgtagagaaccatatctactaaggttcagtgctctatttgcagagctgagcgaccggatcgtgcctgtggccatgaactgcaagcaagggatgttcaacgggacgacagttagaggtgtgaaattctgggatccgtacttcttcttcatgaacccccgacctagctacgaggccactttcttggaccgtttgcccgaagaaatgacggtaaacggtggtggcaagactccttttgaggtggctaattacgttcagaaggtgatcggtggagttttggggttcgaatgtactgaacttacaaggaaggataagtatctgttgcttggaggcaacgacggaaaggttgagtctatcaataagaccaagtccatggagtaa

SEQ ID NO: 163043 - DNA, 1175 bp, Arabidopsis thaliana landsberg
atggaggaggagaagctagaaatcgtcgggccgttggaggagccgttgatgggaaacatcgtaccagaggagatcaatggcttggattcgcttatgtcgtcggattctgatagcgagaaaccagattcccctgttcccataaatgctccgatcaaccggatgtttggaagagaacgaccaattcacatggttctcggcggaggtaaacgtatgaaacattctctacactcgttcccattttcatttctcacagattggttcggtctgatgatatatcgcacttagggtttggatgatgattagattgcgtgtgaaactgtagaaatagagattaatggggattgattgaatatgtgacctaatttgttgaagctgctgatgtgttgctatggagagacaagaaggtcacgttaggattactcagtgcagtgactgtgatttggcttttgtttggatttggtggttgtcgtcttctcacatctctttgtcgtggatccattctctttctgcttctatcattcctctggtccaatgccctcaacaagtaaagttctttttgttcgccacataaccctgaaatatgttttaagtaaaaactcaatccttgtttgctaatctatcatttatagatctccagagaacatgatggagatttacatacctgagaagccattactccaagctgcttctgcgatgacatttgagcttaactgtgcttttgcaaccttaaggagcattgctttagagagagacatcaagaactttgtaatggtacttgtttagtttctcaagtcttttttttagagaagcctctgatatgacaattgctttctttttgttctggaacataggcagtcataggactttggctagtatcggtcatcggaaactggttcagcttcttgtcattgctctacatttgtaagtacacactggttcttctcagactcttgttttttctttctatttagggataatgtcatgacctaattgaaaccaacaggttttgtactaattcacacggtgccaatgctttatgagaagtatgaagatgagattgatccaattgcagagaaggctgtgattgagatgaagaaacattaccaagtttttgaagctaagtttttaagtaagatccctcattagccaaaccactcaaaacatcgaaattgaat

SEQ ID NO: 163044 - DNA, 1217 bp, Arabidopsis thaliana landsberg
tgggagattgtgtgttaatgcgtccatcagatgctggtaaagctccttacgtggcacgtgttgagaagattgaagcagatgcaaggaacaatgtgaaggtgcattgtcgatggtactattgtcctgaagaatcacatgggggaaggagacagctccatggagctaaagagcttttcttgtctgatcacttcgatgttcaaagtgcacacaccattgaaggaaaatgtatcctttaaaaactacacgaggcttgaaaatgttggagtggaagattattactgtatatttgactataaagctgctactggcgcgtttactcctgatcgagttgctgcgtgagtggatacatagtaatgaaacatgcctttttctcctgtagtttacatagagttttgatttatcttcttttggattttgataaaggtactgcaaatgtgaaatgccgtataactcagatgaacagatggtgcaattaatgtgaagagtgaaaggactcgtaaatgctaattttcatcattctattttcatcttctttttatttcaagtattgttgcttaactagtaagatatctaatgctgaattctgatgattataaactcttagatatttgttattcctaatccggaacaacttgcttgtgtaaattttggatagaaatggtctcctctctgtttgaggtctaatcgaaatagttattgcataatatgttctttttattaaattgtaggagttactactatgtcattgtagggttcacctagcgtgtgtaggcgtgacgattgaagaagccaagaagctggaacactttgtatgtgttgaatgcagctctgacgaagatggagtcaaaagatatcagaacgggtttgcttcatcaacaaccaatgatcttaaggtatatgttttgtcttcttctttttattcaacttttgttattactttgatactgtcatagcaataacctctgccaccatcattggctctactttttaagtacttagtaaagtcacaaaaagcaaaatttcattggcttgatgtttgtggctaaaaaaataagatatgtgactcgtacattgttaatctcttctcttatcctgatcaaatccgattgtttttactgttttacctgaaacaacatgttcttgtgttaacaaaaaacttgtgtgttcaggtggaagccaagcgccgaaaagatgatcgatgtaagagcctcttatga

SEQ ID NO: 163045 - DNA, 2070 bp, Arabidopsis thaliana landsberg
atgaagctagcatcaagaagtcatatcatacatgatagagtaagctttgtttccctctacatagtatcaaaaagttatgaacaagtcttagtccaaaatttaatgagtctctcttgtgcagatggaatagaagatactagttatttgtttcaaaattactaaattaactagtgtgtgtaagatatattaaatcaaataacaacttactaggaaatgaataaattgttgtggcatgctggtaacacgtaagtttaaacacccatcgaacttggattcaagaccaactgactttagattttctacaaagaaaaaaacttattaggaatccatctatgttattttttctcaaaaaccaaaaagcattttttggtattcttaaaacaaaaatctaatagcaaaatttaaacgaaaatctacaatccaaaaactaaacatcaaatccaaactcttatttaaaagcgatgttaaaaaaagaagcaaaaatccttagtcataggaacacgtgtcaacaaaagagttcttgttcaatggcgacaacatcccgcgacttctttggaatcagttaagaacactctctcacatctctttataaaagaaaaatctctctccattatccacaattacgcaacaaggaaaaacaaaatgtcgacagatcacgcaagagcagattcgattgctacggtggctgagaaagcccctgtcacagcggagaggagagtccgtactgatctcgatgatcgtctccctaaaccatgttcatacactctctctctcttttcatcttggtctttttctaacagtttttgtatatgtttccaaatttagaatcatatttatgacttttgtccgaatctctctctctttcaagattttctcaaaattattaacttgattcacaagctatgaaatgtttttgtttggctactacacaaatacaaagttttgttgaaaacaatatccataatttctctttagtggtttgaaatggttttatcattttgttagtggtgcctttattgtgaacacaattgtaatttgtaaattgcattttttttttaattaaacgttgcgtttagttttgactaggttgtttggtgtttgatcaaaatagatgtgcctcgagcaatggttgcaccagacatggaaaacgttaacgggacaagaggacacaagcaccgggacatgtcggttcttcagcaacacattgctttctttgaccaggatggtgatggtatcatctacccatcagagacatttagaggtatctatgaaaatcatctttataacaattaattaatgaaaaataaaaaatgatgacttccttatatagtctcttttggattgctcaggatttagagcacttggtttcaacttggtttctagtatctttctaacaatcattgtgcatcttacaatgagttatgctacattgcctgtaagttcatttctcatgaacatctcaattatgatgttgtgttacgttagtgtcctttatatcttttggttctcctcaagatgtcttctttttttaaaactagacttggatgccttctcctaccttcccgatttacatcaagaacatccatagagccaaacatggaagcgacacttcaacttacgacacagaaggaaggtttgtctctcagttacgttaacatttctctatgatgatatttattgaatatgtggttataaatatcaaaattttcaggtacattcctgcaaatcttgagaacatgtttagtaagtatgcccgtacagtgcctgacaagctaactctgttacgagctgtggcaaatgacggaagctaaccgcaacgcattcgatttctttggctggtcaatcccctctttgtctctctttcgtatggcctttttttgtctctctcttaatggtgtgaaaataaaaacagggcagcgagtaaaatggagtggggagtactctacttccttgccaaagacgagaatggtcacttatcgaaagaagcggtcaggagatgctttgacgggagcttgttcgactactgcgccaaggcgagagcttcgactaaaaagactgaatgatggatga

SEQ ID NO: 163046 - DNA, 2234 bp, Arabidopsis thaliana landsberg
  unsure (1)..(2234): unsure at all n locations
atgcctaacgccggtcgtggaggatctcgaaagaggaagaccacaccaaacgtgactcaaagagccggaggttcaacgcctgctggaagaccctcttcgctaccgcagcagtacgatttcaccccggcggcggcgacggttcaagtttctgcatcgattccgcctcaagcgagccggcgctggcgcctcatcctctgccccccactaccgtaactacccaccaccgcagcaactcttccaacactccaccaatcaaccacagcgtgtagatccgttgccaccacaagagactgctcagcaagaccctcctctttcgccggatccagaaactgcatctcacagtcatccctcgtctcaaggcaacaacttccaagagggcattcctgcagtgttgccgtagctccaagaagactccgtggttgctctgaatgacattctctctgtgcctggcagagaagcgtggtgttgtgtgttgtctcccattccccggccaaaaaccgaatggtaagttcactttaaattccctgttttcttgttctgcatgctctgttgtgaatcaaaccgaaaatgtgaaccttgttggctgttgtgttgtgaaacattgttggctcttgtgttgctagtgttttcgggttaggcatttagtcaagtttagttctagactcattagtttatgtaataatgcctgttttattgttgtttgatgctctgttgtgaatcggtcaaacatagttgagtgttgtgttgtgattacattagttcttggtcattagtttagttcagttctaaactcgtgttatgttgttctatattacacaaatgatgatgctttgattgtgaatgatgctttattgttgagacagtactattgtggaacatagtttatagtcgtgtgtgacttgtatttcttttgggaaaataactttgttcacttttgtaacatgtttacttctttctttgttgcatgtgtttggaggtttactcgagacagaggatctcgcttggttaggaagatcactagaattttcttacaaaaattcgatgctcccttctataactggtcatgtgtgccagttgataaaagagaaagattatttttagagtttgcggtaagctgtcatgcatctctcttactttcttaactttccagcttaatcttttgaatttcactaactcaagctacaattttttgtagnnnnnnnnnnnnnnnnnncccttaataacagggactgtgcagtaccacttcaatgaggtctgtaaacggcgcttgaaagacatggttagcaccgcaaggagaactagagagcagcctccatggattggtgaaactctatnnnnnnnnnnnnnnnnnnnnnnnnnnnnnnnnnnnnnnnnnnnnnnnngtcggacctattccaaagctcgtctctctgaccgtaacggtctcggtcctcacatccacttctctgggccaaagtcttttcaggaaatccaagacgaattggtaagttcttctgttacctctttcagttacctcacatgtatgtttttgaatatttgagctgtgttggtttcattgcaggaggagaaattgggaagaatggtcactattggtgaggtgtttgtagatactcatactaagtcggatggtacgtatgttgatcggaaggcggagatgattgctcaaacttatgagcagaatgtgagagatagattgtcacagctagaggcggaagcttctgctgtgtctgatggcacttcacgacctcgggagctgacaaatgaggagtgcacaaccatcattctcgagataaaatgctgcagtctaaacctcttgactttgagtttatggttattctgtcactaatctcttctttatttcttttcagtccaccgaaagggattccagaggcaatctttatagacttggcagtctcaaagatacattaggctgttccaaccgcaatctccctggagaatcatcatcatccttcctagatttagaagaacggctgaaggaagcgcaacgcaagattgaggagcaggctgcctacaatgagaagcgagattctgagattgctgcgcgtgaagctgagacagcccgaatcacggttgagcaaaaggacaagctcgaacacttgtccttagtggagaagtatctccgacaaacagatccgcaattccttgacttcatggcctctcaatcttcgacaaccacagagcctctaccagctactccacagaatgatcaatag

SEQ ID NO: 163047 - DNA, 2792 bp, Arabidopsis thaliana landsberg
  unsure (1)..(2792): unsure at all n locations
atggtcaacaatcaaatccccggtaacacagttgatgcagaggggaacccaatccctccaatccagacagacgttcctgaagccgctgctcctgtgaccctagcggaactaagaagtatgatggctcaacttcagcagaaggtgaacgatcaagaacaggcaaatcgatccttggcacaacaactcgaagcagctacttcccaaggatagatcaggactactcgtttcggcgcgaggcatcttcaggatcgacgagcagcagcagatctcaaccccacacggctcgtgttccacacgcctggcaatactacaaggcccgtccgccgaaccgcaccggaaatcggaagagaccgaaccgagccagcgattttgggaaatcgggaaacaaagcgaacagaaagaaacgaaccgcagctccctcctccccgagcagaggttaccgaggccgatcgtatcggggtctcggacgatgaagattgagaagacaacattaggtgggctgaagaatacgctagagaacaggagataagcgccatcaagctctccctagccaaggcagagaacgagatgaagctcgtaagatcccaaatgcataacgcagtttcctcggcaccgaacatcgaccgcattctggaagaatcccacaacacgccgttcacacacaagatctccaatgcgataatctcggatccagggaaactaagaatcgagtatttcaatgggtcttccgatccgaaagggcatttaaagtcgtttatcatctctgtggcccgagccaaattcagaccagaagaaagagacgctggtctctgtcacctgttcgttgagtatttgaaagggccagccctggactggttctcgagactcgaaggaaattatgtggatagttttcaggagctatcgactcttttcctaaagcaatattcggtgctaatcgatcccggcacatcagacgccgatctatggtcactatctcagcagcctaatgagccacttcgagatttcctcgcaaaattctgatccaccctagccaaagtagaaggaatcaatgacgtcacgactctctctgctctgaagaaggcactgtggtacaagtccgaattccgaaaggagttgaatctgtccaaaccacaaacaatccaagacgccttgcaccaagcctcggattatgtttcccatgaggaagaaatggagctactatcaaaaaggcacgagccaccgaagcaaacacctcgtggcaaaaaatcccaacctggcgctccgaaccataaaaagggcacccaaggcgggacattcgtacatcatgaagggcgaaacttctccggagcccataattatcaagctgatacaccctggggtcgaggacgaggccgcgaccgaggtcgtggatgagaatcctatacttggacgaaggaccaacccgtaggaaacgagcatgaataatgagaattgcacaaaagctacggtcataatacttccaggtgtcgtagtctcagggcgaagttggcagctaaattcctagccggtgaaattggtggaggcctgaccatcgaagatttagaagcagagaaagccaaagccgagcaggtcaatgctgtagcaaaacccaagcaggcagcccccgcggcgaaccctgaagggcccaagagaggtagagagacgtagaggcaatcgcgaggcagatgaggatgaaccggaagatgctcggggaagaatcttcataattttaggagattcggctttttgtcaagacacaatggcatcaatcaaagcttatcagaggaaggtcgactcaaatagtaactggacacgaccattcaacggtccaaatgacgaagtcactttccatgagagcgacactaatggcttggatcgtcttcacaatgatcccttggtcattacactaactattggggatttcaatgtcgaactgacacagggagcacactagacatcatttttatgacgaccttgcgagaaatgaagatcgacacggcacaagtcgtaccggctccacgacctgtgctcagtttttctggagagacttccatgaccctcggtaccatcaaactaccagtcctagccaaagggataacaaaaatcattgatttctctgttacagatcagccgaccgtttataacacaattatcggcacgccatggttaaatcaatttcgagccgtctcctcaacgtatcatctctgcgtgaagtttctcacaagcaacaacgtgaagaccatctggggaaatcagaaaaacgcccgaatttgcttcatggcaacacacaagctcagaaaccccgtcaccgagtcaacaaccgacgcaaatcacaagaaggctaagctgggccaagcnnnnnnnnnnnnnnnnnnnnnnnnnnnnnnngagctaaagattgaggtggctcgagagtcaacataaccagtccctgacccagtaatctccatctgccttgatgacgaaaaacccgaacgatgcgtagaaattggcggagacctaggcgaagaattaacagccgagctaacttctttcctcagagaaaacgtcaatatattcgcgtggtccccggaagacttgcccgaagtaagcgtcaaaattgtagcacacgaactcaacgtccacccaacgtataaacctgttaagcagaagaggagaaaattatgttgggagcgagcagaagctgcgaaagccgaggtagaggaactgttaagcttcggctccatcaccgaggcaaattaccccgactgactcgcaaatctaatcgtagtaaaagagaaaaacggcaaatggag

SEQ ID NO: 163048 - DNA, 1279 bp, Arabidopsis thaliana landsberg
atgaatagaggagcaaactcagattccatccctatcgatctcattcttgagatactctcgagattgcctgcaaagtcaatcactaggtttcattgcgtctcaaagctatggggttccatgctttgccgtccatatttcaacgagttgttcttgaccatatcgtcagctcgtccacgtctcttatttgccttttcaaaacccggtgagtgaaggtttttcttgtcgcctcagcctcagaatccatatgggaagtcatcttttgtagcaattgcggattttcataagaagttctctcaaaacctaaacatttgtaactatacttctggtttggtatatttctctgctatgtggatcacaaaggcagatgtcatatgtaaccctagcacgggacattatgctatgttacctaaattgttgttgacgtatggagacacgagaagcttttttttgtttgatccggttggcaagcaattcaaggtattgctcatgaataagataaccaataatgaaacaaaggacattcatattttgacattgggaactagaaaagtgagatggaggaagatccaacaatgccccttgatccatattgtttctcatgaatggatatgcatcaatggggctttgtattacatagcttataacattgatgatttcttggggtatatagtttgctttgatgtcaggtccgagaaattcaaatgtctaaatctaaaccaagactgtttttctgaacgatctactaaattgatatactataaaggtaaattaggtgtggttaatttgaagtatgctcatggcggtggatttccccttaagttatgtatgtgggttctagaggatgtggagaaacaggaatggacaacatctgtgtacactttgaggcctgagaataaagtcgaggacaatgactatgtatatgttgttggggcaactgcttcaggtgaaattgttttgacgaaacagaatgcatataaaccgttttatgttttctactttagtcctgaaaggaacactctcctaagcgttgaaatccaaggtgttggagaagaatggttttatcataatgtttactactttgtagaccatgtcgaggatcttaggtttgatgttatgaagacaacatatgctggaacatctagaagcccaccaaaacagagcacatcaacatcatctagagaagatcatgaagtgaggacccttgctcaccagaaagaagatcgtcttacgtttgagagtgttaaccaatttgatggctctgcgtcttttagaagatgat

SEQ ID NO: 163049 - DNA, 1654 bp, Arabidopsis thaliana landsberg
caaacaaatatgtttacattgaatttggatatgaattatacttcttgttcatatctcttcttcacacttgtaaccatcttccttctccatagactcttcagctcctctagccgcagaggtcttcctccaggtcctcgaggacttcccgttcttggtcatatgcatctcctccggtctagcctaccacgatctcttcaagccttggctcatacttacggtcctctcatgaccatacgcatcggatcattacgagtcctcgttgtctcagattccgacacagctaagctaatcctcaagactcacgaccctgatttcgcttccaagtttgtgtttggtccgagacagttcaatgtttataaaggatcagagttctttaatgcaccttatggatcttactggaggttcatgaagaagctatgcatgactaagctattcgcgggttatcagcttgatcgatttgtcgacataagagaagaggaaacgttagctttactgagcacgctggttgagaggtcgcgaaacggagaggcttgcgatctcggtttggagttcactgctttgaccacaaagatcttatcaaagatggttatggggaaaaggtgccgccaaaactcgaatattcccaaagagatcaggaagatagtgagtgatattatggcttgcgccacaaggtttggattcatggagctatttggaccattgcgggatctggatttgtttgggaatggtaagaagcttagatcctctatttggcggtatgatgagttggttgagaagatactgaaggaatatgaaaacgataagagcaatgaggaagaagagaaagataaagatatcgtcgatatcttgttggacacgtataatgacccaaaagccgaactcagattgactatgaatcagatcaagttcttcattcttgtaagctatttgcattacttttctttagcttcgttaaattagccttaataagaatatttggtctctcgtttgcaggagttgttcatggcgagcttagacacgacttctgcagctttacaatggacaatgactgagctaatcaaccatccggatatcttcgcgaagatcagagacgagatcaaatcggttgtaggaacaacgaaccggttaatcaaagaatcagatttgcagaagctttcttacctacaagcagctatcaaggagacattgagacttcatccagtaggaccattactacgcagagaaagcaacacagacatgaagatcaacgggtacgatgtaaaatccgggacaaagatcttcatcaatgcttacgggataatgcgtgatccgaccacatacaaagaccctgacaagtttatgccagagaggtttcttgtggtggaacaagatacagagagaaagatgggttactaccagcaatatatgttggaattaaaaggccaagatgtgaattatcttgcgtttgggagcggaagacgaggatgtcttggagcttctcacgcttctctggtgttgagtctcacaattgggtcactcgtgcagtgttttaattttactttgaagggagatgaagacaaaatcaagatcaagttacctaccggcttttcggcttcatggactgctggaggaagcttactttttgtgtcttcctgaattttgttttgatccattt

SEQ ID NO: 163050 - DNA, 3254 bp, Arabidopsis thaliana landsberg
  unsure (1)..(3254): unsure at all n locations
atgactgcagcagaaaacccttttgtatctgacacctcttctctgcaaagccagcttaaaggttcttatttttctttctgtttattgttcatcaacccttatgagtaatttgcttgatgttgaggttgttctgctttcttttaattccactctgcagaaaaagagaaagagcttttggctgctaaagctgaagttgaggctttgagaacaaatgaagtgctcaaagacagagtctttaaggaggtaacatgcatgatgatcatcaactctgtttgtgattgttctacaaaaactttaagtcaatcttacctataagttttttttaatcaatgttttccatattcaaactgtcctttttgagcttcttgagctctattgatgctacttggtgttgtttcagcttagagaaaacgtgaggaagttggaggagaaacttggagccaccgagaatcaagttgaccaaaaggtgaggttttgctcaaatactatagaccatctttgtgaaggactcatgtcaaaacattagaaatgactagaataagttaagcttgtgacatgattgtaggagttggagaggaagaagctagaagaagagaaggaagatgcattggcggcacaggacgctgcagaagaagcactaaggagggtttacactcaccaacaggacgatgactctctacccctagaatccatcatagctcctcttgaatctcagatcaagattcacaagcatgaggttcttaagactatatgtatttcaaatttctttcttgtatcagtgtgaagtgccagattttcttgacatgctactgtttgacagatttctgcacttcaagaggacaagaaagcgttggaacgtctaacaaaatcaaaagaatcggcgcttcttgaagcagagagaatcttgagaagtgcccttgaacgtgctttgattgttgaagaggtccagaaccataactttgaacttcgacgacagattgagatatgccaggatgagaacaagtttcttgagaaaattaaccgccagaaagtgttggagattgagaagctctcccaaagcattgtagaactggaggaagcgatcttggcaggaggaacagccgccaatgcagttcgagactatcgccgccaaatctcccagctcaatgcaagtgttctgtttagtttcttgtacttcattctcacatttgttttaaaggaaaatcacatgattttttcatcgttaccaggatgagaagagaaccttagagagagagctagccagagtcaaagtgtcagcaagtagagtggcacttgcagttgctaacgagtggaaagatgagaacgatagagtcatgcctgtaaagcaatggcttgaagagagaaggattctccatgtactcactgcttttcacttacacatccagttaatacacactgactagcttatatgggaaacattagtgttgaactttgtgtctgtgtgcagggagaaatgcagaaattgaaagataaactcgctgtttccgagagaaccgctaaggctgagtcccagctaaaggtgattgcttatattgttaatattctgttggtaaaaagtgtagtttctaatgcaagtaaacattataggagaggttaaagcttaggctgaaaaccatagaagatggcttgaagggcccaaacacgtttttcgtctctccaactacaaagactgaaaaatctggcaagattttaggattcttgaccagtggtggtggctcaaagaaaaggtctagttctcagctaagaggctcagttacaggcagaatccatgctatgaatcagccaattaacagtgttagggaaaatgatgaaaaggagaattcaaagattactgcaaacggattaactgatcaacatgaagaagatggcgaaaggaaagcagaggaagatggaaatgtttattctgaagatatggtttcagggtttttatatgacaggcttcagaaggaagtgattgctttaaggaagctatgtgagagtaaagagggtactataaatgccaaaaatgaagaaatcaaggtaacttcatcatcttcttgtggttgtttaagatcctcaactatatgaaacctcttaagatacctctgtttttagatgttgttgaagaaggtggatgctctaacgaaagccattgaagttgagacaaagaaggcaaagagggaagccgcagcgagagaaaaggaaaacgcattggcaatgttgaatgaagagtcaaaacaatgtagaaaggcaaaactaccgagaaggtttggtcatcacatcctttgttgtttgtctttgtcttttgagaaaagtatacatagtcaaacatcaagacagttgatatttatatgtttatgctatgttgtgcagccgcatacccaatccacgttgcaagtagagnaagaagaagcttatgggattgaatactaaagaatatggtctaatgttaggttgtactgtacatattgagtattggatgatggattataagaaagtgaaaactaaagatcaagagatgtgtatgtgtgttatgtatatcggattgcaaaaccatgtttccagatgatgacacaaaactcctctctcttctcctaccaattagttgaatgttagcaattatcttggaaacctataagtaaatcagaatcagctaaacacaaaaacatgcatattctctcaaagtcatacataaccatatatgtcttctctcagattttttggtcttgccttggttgttaggctaacataacaagctttgcatctaatatatatatcataatcagttacaggatcgtatgatctctgtagtagcaagaagatccaagcttgaagaaaacataaattttattatgtacaagaagagcatgaagaacaagatttacaaagactatctctctttctcacaagaagtaagaaggaaccatatagaaataaagtcaggactgatctttcctagcaagattaatttacagtctcttttacatggtgctctcttgtaaggtgatgtttccagctgtatagacacgagagccgttggaagaggagaggagttgaatacctctgtgaatcttggaagagcatcgatacggtttagggacagagagtgttttaatgatacaagccttgtctaagtcaggaatcgcgtggaggtgagaaggaagatcgatgacgaattgccccaaatcatttgtcacagctttgatccatttagatctcctcctatgtccactatggcacttgatgccaacagt

SEQ ID NO: 163051 - DNA, 6957 bp, Arabidopsis thaliana landsberg
atggattcagagagtgaaatcctcacattacatgaacagatctataaagaaggtgacgaatcgattgcaatgggtatggttcagcaacattctgattggagtttggttaagaaagtggaggaagcgttagaggagagtctattcgagaaaattagaagttcttttctgggtcctttagttgaattgggaccgagaatgaaggcaaagaggggaatcaaattttctgggaaatttttttattaccttatgcagcagagagtgaagactaaaggatcaactctttgtttagagttgattctcaacctatccgtttctccttgagagagttctatctcacaacaggtaataaagttttacaatcgtttttaaagcttaattaactgtcgtagaatgatttacaaggcatttgcataactgtttgcgtagtttacaattgtttttaaaacattagtaagtgtcatagataatttacaagggattttaaaagcttttaaaacgggtttactttattaacaatcgtttaagaagcataagttagtggcagataatgatttacaagggatcctgtaaaagaaccatacttttgggctagtaaaggatcctatactcttggtgatctcgaagatcgattgtttttaaaacctaaggaaggtgaacctgctgttgaagatgaagaaaagttgtgtcttgctgcagtagtgttgactgaaggaattcttttgacaccatatggaaaagagaagatacctttgccaagattgcagcatgcttctgattttgagatgtacacagcccaaccgtggggtaaagaagcattcagtgttctatcaaattcaattctgagaatggacgagaaaatttcggcaaaagagaaatatgatttgagaggatttggactcgcgctaacaatatgggtgttgagcgcagttccagcatttggtgcaacatatggagttgaagataaagaattccaatctgaatctccattgatattgaagtggaaaatcactactactccagagtttttcaagatcgtaaaccttgtaaatgatgtttctaaggtaagcttttgtctatttacagaattctttaaatggtttttagatttgaagttctgctttctcaagatttgtaatgttattgtatcttcgcagatggaggtgaatacaattattggaaacccagaagaattcaagtctttagttcctgatttccacacagacgacatagaattccaacatattttgggacttgttaatatgggctacagattgaagaaaactgaatggaatacaagatgcattgatgtttgtgctgcccttgaagaagtaggtcaaaacaaaatcaataacaaaatatctgatagcgagaagcttgacaggattttgacaatccttgaagatcttaacaagagagtcgagctgattgagaggattttggacattagaatggaggaaaagaataatcagagatctgaggaagatgaagaaagaaaacaagaagatgaaggactagaaagacaaccagaggtaattgtaaatgtttctttaaaagctatttgaaaggaaaggttttacaatgtattttaaaggttaaatacgtagtaaacctttacaatgtactcttttttttcgcaggctgaagaagaaggaggactagaaagaaaagcagaggtaattgaaaatctttacaagctattttaaaggtctactaattatattaatgattgacttattgtttttattttgttgcagaatgacaatgaatcatttgaagattcaatcagagagccaaacacacagtatgggagctatccgggtgatgatgaaaacacccaacgtgatgttggtgatgaagtagctgaagaatcatcaaaagtacagtaatttatatctctaaaagtcttgcaaaaatgattagtatcctttttataattttacattctgttatcttttcaaggataagtctcctactccacgatcctctacaccaaatttcaatattttgtctgaagaaagtctggatgttcaaaaggataagaagagagctagcagaggaaaaaatgaggttagcattttaaaaaatttgtattatctaaccaaatgtttataatatttttttcaaatctttaaaagtttatctttcatgcaacttcagaacaagagagttaaaccaagtgttcatgctgaggataatcttaaaacaagaaaacaggttagtatttgcaacagtactgtttttaaaatttgtcaattgtcttgttatgatatttacaagggattttaaaagtacttttaattggtgttttttactattctaggtgccgagaaagaggcagaaacaagttgatagtgctgatgttgatgttccaacaaggaaagaggttagtatctaatttattatgattttgaaaattttgtttacaaggtattttaaacatctattttttttattatttttgataggcacagagtaagaaaaggaaaattattgccaatgatggtgataacgctgataatgatggccacaatgatgattttcagcccgctccgcaaagaaagagtaagcggggtacggttccttccattcatacccaagcacctttcacagctgagaagaagaagcatccaattttgcatccatttgcgaaagttgatgccacaagacttgagaaattggctgaatggaagaagtcaaggaaaaacaagtgagttttgttagtaagatagtgagttttttttaataatggaagaagcatcattgttgactgttttgttgttgtaggccactatcaatcgcgggaaataatgtagatacaaagtggtttacaatcctagagacgccagggaaagcaataacagcaacggtatgtctaaaaatccttgtaaaattggtaacccatgaattacatatagtttttaaagcatcattaagttatttacaaaagggattttaaaaagggttacatggtttataaacaattttaaaagattagaaagtggtaaagaatgatttacaaggtattttaaaaaagatttacatgacttgcaatcgtttttaacggattagaaagtggtaaggattgatttacaagggattttaaaagctattaaaaagggtttaattgattaacaatcgttttagaagcagaacttagtggcatagaatgatttacaagggattttaaaagcttttaaaagtgtttaacttgatttacaatcgttaaagaacataagtatgtggcgtagaatgatttacaaggtattttaaaaagggtttgcatattttacaatcgtttttaaaggggttttctaatatgataatttttatttttgttgtgtttagcatgttgatgcagctttggagttgatgaaaacgaggaaggaaagcaatccagaattattcaaaaacaaatcagttgtatttgttggatcgtctttcttaaatgtgattgatgagtcatacatggagtttttggataacaaagagggatttcagtttcagtctgaagaaatcagtaagctgataatagaggaagaaaccaagtgcatattggctcctttctgtatcaaaggaaaatgctgggttgccttggtcatccacttggaacagaagacagtttgtatatgggaatgtgcagcttcttatttaacagaagaagtcaagaaaaaatatgttgctgcctactctatagctatgccatacattgttcggaacatcctcaaaaaagaagacatggatgtctctccatttagcatcaaagtcctgaccacttttctcaagtaacttctttaaatatatcatagtcttagaaatgaatattccgtaagtcctgacttctataacttctttgcttaagtaattcttttggtttttggttgtatgctcctagaaatgaagagtctggtatctatatgctgaagtttatggaatgctacttaatgtataccatccattcaaaccttgaagggaacataattgaaaacgttatgaataaattggctgctgacatcttcaccgaattagggtcagtcactttgtttaagtagcagacttctaatcaaaaagtagtcgagtataagatagatttatcagcttttgttttttatttcataaaactttgtcatttgaatattttatgaacatctgtatggaacaagatttatgaagtttatttagttcaactcctgttttacaaaattactgtataatggttgtttgggttaacaggtgctttgatttgaatggaaaaggactttaaacatgcttttaaacagggtttttaaacgatttacaagctgctttataaggattttaaaagtgttgaaaaagctgcagtagcggttattatgaaaaaaatttacaatcgtttttaaaatgatttacaaccgtttttaaaagagatttacaaacgatttataagctgttttaaaagcgttttaaaagtgttgaaaaagctgcaatagctgttattatgaaaagatttacaaccgtttttaaaatgatttacaaccgtttttaaaagagaatttcaaccgttgaaaaagttacagtaatgttaaacactgtatctgttactaattgggcctaggcctgttatttagaaaaacaaactgttttagtaaaaaaacactaaaagcccaaaaaacactaaagcctaaaaattcactataacccaaaaacaaaaacggaagggaaccgtgaaaagacaacaaaaaagtaacaaaaaaaaaagaagaatagaaactgtcgtcttcgtcttcttcctttcaacaatctgaagaaaatccgattatccagcaaaaaggaagcaattgaaggtaattaatttacaaaactgaagtttaacatttgggtttgttcgatttttgccgaatctcttttttgttctagcatttctaggtttttcggttgaaaacgaaacaagtaaaataaattgatatttgggattttgaaggagtgttggaaattgttatataattttgatagatttatgttttaaagtttgatatttgggttccaaaaaccttcaaagaagatttcgaatgccgattaacttctctgttgtagcaatttcaaagttttttcgttttgaaactttaacagtaaatagattgatgtttgggaaaagcaagaggaagaaggaaaagaagaggaagaagaaaaggtatgtgtttttacaagggatttaaaaagcttataaatcgtgttttaaagatttttagccgtttttaaaagataggcagtgttagatatgtatttacaagggattttaaagacttcttaatggggttttaaagatttaaattcgttttaaaggataggcagtgtttgataagtatttacaacggattttaaaagctttttaaaagtgatttacatgactaataactgattggagttggtttggaaaagggttttttgtttctatttttagcggctgtgttctttgaaaaggattaaaattttgtttttggaatggtttcaaaacggtctttaaaaaggattatggagtaattactgtgttttacaagggtttttaaagtcattaaaacgatttgtaatgacttttaaaaatagttttacaagggtttttaaagtccttaaaacgacttgtaatgactatgtttatgtttcgaaaactacacatgcataataaatttaatgactgtgttaatgtatttaatcaggttttgagaaatatgagtacaaagaaattgttcttccctacaagactgttccaaccagacagcgaagtagataatattacaagggtatcaaagcattcatccaacaaaattgtctcgaatgtcagggaagctttagagccgatagagttcaacacattaatggacacattcttgggtcctatagtggaatttgctgaaatggacgtagccttttcaagccatatagttcatcatttactccagagaaggatactaacccacaatgacgaattgtggtttgtatttgctgatcaacctatacgattctccttgagagagtttatcataacaacaggacttccaatggatgatgcatcaggaagcagtccaaatgtgaagagaaagaagaaagaaaagtggtggataaaagataatcagactttgaagggaaagcagaaaaaagatgtgtggattaacaaggaaatgactttttttagatcttacatatgttttggaaaagcgttccaaaaaaatgcagccagaggagagactgagattggcgggtttgttactagtggagggcatattgctagctcgaaatccgactaccatgctgccaattgagaatctgaagagagctactgatttcgaaaagttctgtaagtatccatgggcgcagattgtgtactcatatttggtaactgaagtgaagagaatcggtaatgactatttgttaaggaaacaatatggtctatttggatttgttcaattaattcagatatgggcattatcatcagttcagaagttgggagaaaagtttggcactagagatgaatcatctagtggaaatattccattaattctccaatggagatcaacatcgtttccaagtgcaaaagctataacaatgatagcagatggtgacaaggtacattttcttagctgtggttttttttatgttttaaacactgtttataaataaagagtatgttttacaatagtttttacaatcaagttttaaggatttacaaagggttaaaagcaatttaaactatttacaacggattttaaaaggttaattaagaattgtgcattatttttacacagtttggaattttgtttatctttgcaggttgaagtgacaccaatagttggtgttcatactcatgaatacgaccacttggtttcacagaagaatcctgaaggcaaggatatgttggatgtttttgatcttatgatcaaaggatatagaatcagcaagaaagattggtgtcagggatggattcaa

SEQ ID NO: 163052 - DNA, 1506 bp, Arabidopsis thaliana landsberg
atggagaaaagggcagagaaaagaaggattgtgttagttccggttgctgcacaaggacatgtaaccccaatgatgccggttgggaaagcccttcaatcaaagggctttttaattactgctgctcacagacagttcaatcaaataggctcaacattgcaacactttcctgggtttgactttgccaccataccagaaagcttacctcaacttgaatctaaaaaactaggaccagctgagtatcttatgaatctcaacaaaacaagcgagacaagtttcaaggactgtatagctcatttgttgctgcaacaaggcaatgatattgcttgtatcatttacgacgagctcatgtacttctctgaagctacagctaaggatttaaggattcctagtgtcatattcaccactggtagtgctacaaatcatgtttgttcttgtattttaagcaaactcaacgccgagaagttcttgatcgacatggaaggtacaaaatgtaacttattacccattccgaaacagttctttcactcatgcataggtcttctactttacagatcctgaagtgcaaaacaaggtggtggaaaatttacatccactaaaatacaaagacttaccaacttcaggaatggggccgctagagcgatttttggagatttgtgccgaagttgtcaacaaaagaacagcttccgctgttataatcaatacgtcaagttgtctagagagctcgtctctgtcatggctggaacaaaaagtaggaatttctgtgtatccattaggccctcttcacattacaacttcaccaccttctagtttacttgaagaggacaggagctgcattgaatggctgaacaagcagaaaccaaggtcagtcatatacataagcatagggacacttggtcaattggaaaccaaggaagttttggagatggcttgggggttgtgtaatagcaaccaaccattcctatgggttatccgagcgggttctatccttggcactaacggaatagagtcattgccagaggatgtcaataaaatggtctctgagaggatacattgtgaaacgagcaccccagatagaagtacttggacatcctgcaatgggcggcttctggagccattgtggatggaactcaatactcgagagcattgaagaaggagttccaataatttgcagaccttttaacggtgagcagcagttaaacgcaatgtatatagaaagtgtttggagagtaggggttctgctgcaaggacaagtggagagagcaggtgtagagagagctgtgaataggttgattgtggatgatgaaggtgtaggaatgaggtagagagcccttgttctaatagagatgctcaatgcctctgttagaagtggaggctcttcatacaatgcattggatgagctcgtccatcacttggaggcagagtgatataaatgcttgtttgcacagataaatctgcaagcctttatgtagcatcaaggataaatctaatctatttatagttcaagct

SEQ ID NO: 163053 - DNA, 2048 bp, Arabidopsis thaliana landsberg
tgctagtattttcttttgtaaggctgataaagaacaatgcgaagtaatattcgggtttcttaaaacaatatgaagcggtttcgaggtaaatgataaatttttcaaaatcatcgatctggttcggtcataaagtagatgactcttcaaaggaataaattaaattcaccttgggtatacataatatcgacggtatgggttattatctcgggctaccggaaagtctaggaagttctaagataaaaaatattctcctttgttcgagatagattacagagtagaataaatggtggtcggtaaaattcttatctaaatgagggaaagaagtgatgattaaatcggtagctacgatattgccaacttatgtaatgtcttgttttagacttccgaaaacagtcacttccaaattaacaagtgcggtcgcaataatttttgtggaattcgaatggtgagtctagagctacacactggatagctttgaacaaattatgttgtagcaaattggaatgtagtttagatttttggagtacaaatgattttaattcagctctaccgtcgaaacagttatggcgtttgataacgtttcgagattctctttttgccaaagtctttaaagagagatattttcagaaatctaatctttgaaaaatataaaatcatactctccgtcttatggctggagaactatttgctgagctagatctctgggttgggaaggacttattaaaagtgtcggttcagaggcttccatctccgtttgggaggatctgtagatcctggctcaatacccgagaccagcaaatagtaatggtttaactattgacccatctttaaaagttcaaaatctgatagatagccggtcaaatttttggaacattgatctcttgaaagagctctttgacccggaagatgtccagataataagtgcattgcacttgggtgcgtcgacaagggaggattccccgggttggcatttcacaaaaactggaatctatacagttaaatccggctaccatacaacacagatggaaatcttgggaaataactcctctttcattggcccaaagatcaaagctctgaaaacccaagtgtggaaagtgcaatgcccgcctatgttccaccattttttatagcaaatattagcaggatgcgtgccagtaacagaaaatttacagaaaagatgaataaattgtgattcaggatgtgtcagatgtggcactatagaggaaacaataaaccatactctttttcagtgtcatccggcacgacaaatatgggctctttcaaagattcctacggtcccaggggttttcccacttattcaatttatgcaaatttagatcatttattctcaagaatcccttcagaagttgattcatccgcatatccatggataatttggtatatttggaaagcacgaaatgaaaaagtgtttgaaaatgtggataagaaaaagctaggcgtgttatgtctagcagaaaagaggctcatttatggcagttagctcaagtagagctcaatactgaaaaccaagtcacctatcgatcggaaaaccaactccgggtgagggatatctcacaagacattgtgtactgtggctttcgttgttttgtggacggttcatagaaagaaaacgacaagttttcaggtctaggttggttttgtacttcatttaatggaggtacgtcaacaatgggagctgctaagctacgtagaagtctttctcctctcaataccaaagtcgaagctctactctgggcaatgaagtgtatgattggtgccggcaaccaagaagtagcttttttaacaaagtgttcagacctggtgaagatggtgtcttccccaaccgaatggccagcattttcagcgtatttggaggagtttcagagcgacaaagaagagttcacttctttttctttatctttaatttctcgtaatgtaaatgttaaggcggacaatttggcacaaaaagtttgtgctgaaccgcttcatatcacgtatgtaaacaactttcctcaagattgactcgtttgagtcctaactaatatctg

SEQ ID NO: 163054 - DNA, 2242 bp, Arabidopsis thaliana landsberg
atggaggatgatgtagatcgtatgaatgagaatagagaaaaacgggtcgagggtgaaaacatgaaagaagatgagagagttgataagaaagttgatgagattatagttttttttatgataatgtggatatgactaatccagcaaattgggagaagattgaccaaaaaggagagattatttggttgagaaaggatcacctccaagaccacgagctgattaccgttttccaagagatgatattgatagatgtttcacttattcatcttaaataagaagactgagtaatggagagaaacaagttagagatggttaatttactcgaaagttaaagataaggtcttttgcttttgctgtaaattattcgattaagaaacaaatcctactttgttagcaagtagtgggtataatgactggagaaatgctgcgcaaaggctgaaaagacatgaaacaactcatcgtcatattattttcatgactcattggatggagatagaagtgagattgcaaaagagtaaaacaattgataaccatatggaagaggcaattaagaaggagaaaaatattggagagatgtattggtgagaataattgcagtggtaaagactctagctgaacaaactaaggagaaggttgatgatcctaatagtggaaatgttttggcatttattagaatgattggaggttttgatttggtaatgaaggaacaaccccccccggctaataaaggtgaaattcattgccattttctcagtcataagagtcagaatgaattgacagaattacttgctaatgagaccaagatgatgatcttaaagaagattaaagatgcgaagtatttttcagtcattcttgattccattctggatgttagtcgtaaagaacaaatgaccttcttaattcgatgtgtggatgtttcaacgtgttcacctaagattgaggagttcttcttgacgtttctacacatcaaagataagaggggtgaggggctttttaagactcttcaagatgcattgattgatcttaagttgaatattgatgatgtaagatgacaagcatacgacaactgacaaaatatgaagggaaaacataaaggagttcagaaaaggttgcttgatatccaagagcattttacactccatgtggatgtcatggtcttaaccttgcactttgtgatatggcttcatcatccaagaaagctgttttttttttttggaattgttcagcgaatacattgtctgtttgaagcttcaaccaacaattgggaagtgtttagcgaaacagtgaatggtattacacttaaaccgttgtctcaaacgcgttgggaaagccgcattgatagtcttaaaccaataagatatcaagcttcaaagatacagatacgagatgcacttttttatttggcagaatacacttataatccaggacaccggagtgatgttgagtctcttacagagagtgaaacacatggaattggagggtttgaatttttatttggaatggtaatttggtacgatttgctagctgctgtgaatatagtaagcaaatccttacattttgaggatatggatcttgaggttgctatttctcagttaggagggcttgttatttatttgaaaaactacagagaaacaggtttcgagaaagccaaagttgaagctacacaaattgccattgagatgaagattgcgccggtatttccaaaaaagccggtgaaaaaaaaaaagcaatttgttgaggatgttgagaagattgatgaaagtaagattgcagaggagagttttagaattgattacttcatcaatataatggatcaagctataatgtgtattgagataagattcgagcaattccaagtatatgaacaaatatttggatttttgtttggtgtaaagagattgaaggtagcagaagatgatgagttaaggacatcgtgtatgaagcttgaagcttctttgaagcatgatgttcattcagatgttgatggagaagatctatttatggagctgaaacttttaaaagatgtgttgccaaaagagattacaaagccggtcgaagtgttggattttttgaaaagaatggatggttgttatccaaacacatggatcacttatcgtatactactcaccattccggtttcaattgcttctgcggagagaacttttcaaaattaaagctcataaaaaattatctacgttcgactgtgcctcaagaacgattgaatggtttggcgctgatatctata

SEQ ID NO: 163055 - DNA, 4462 bp, Arabidopsis thaliana landsberg
  unsure (1)..(4462): unsure at all n locations
atgaagaacaagcacacattcatacaatttgaaaatgggtattatttagaagagcatgagtggatttcaaacaattctttaagcggtgtattgttgaggacgtcaaaggtaacatactctatgttagtagaaaagatatgcaagaagattgaaatagatgaaacctcaaggaaggtgaaattgagttatattctatgcacatctcagagagagacatctattgtagatgatgatgattttttaggttatctaatggtagtgaatgctaagggaattagaccagctttgaacgtggaggtagtaaataaagaatctgagagggtgaaacaaatttcaagggtagagggaagaagttcagttagtgttaattatgaggagttgaatgcatttgatgtggagaatggtggagtagtgacgatttttagaggagaaactgcaggaggtaattgtgtgaatgatgaaccgattattgaagaggctaatagtgtagaagaggctattgagaatgcggataaccgggtttttgaagaggctatggagaatgtagttattgaagatagagagcatgtggatagccggatggatgttgctgaagataatggtgttgatggtagaattgagtattatgagcttccatgtgttggtgaaggaagtcagagtagtgagaaaagtcagagtgttacggaatgggaagatggaacggggattgaattgcaccaagaatttgtttctaaggaggtcgtgcaagatttggttaacagagctgcaaataagtattgttttgcgaccgcaactatagcgtcagatccaaagcgactcatgttacgatgtcggtaatataaaacaacaggttgtcaatagtatttacgatgtgcaaaagtaaagagttcagattattttagtgttagagttcacaggaagatgaacacatgcaagcggtctaataagaactcaggcaattgtaaacataccggcacaccacgattaatcgcgtctattttgcatgaggattatccaggtgagtttcaaactccaccacctaaaagcataatgagtattgttcggggaagaatgggtttgcattgctcgtatgctaccgcatggagagggaaaagacaacacgttaatgatgtgcgtggtagtcctgaaaaaagctacaccgacttgtactcttatctgtacgtattaaaggaggtgaatcccgggacaatatcatatgtggaagtggatgcacaacaaaagttcaagtacttattcgttgctttgggtgcttgcattgaagggttcaaagttatgaggaaagttgttattgtggatgccacttttcttaagaccgtatacggcggtatgctagttttcgcaacagcccaagatcctaatcatcacaattatatcattgcgtctgctgtaattgatagggagaacgatgctagttggccgtggttctttaacaagctgaaaacagttataccagatgaaccaggtttggtttttgtgagtgatagacatcagagcatcatcaaatcaattatgcatgtgtttccaaacgcgagacatgaccattgtgtttggcatttgtctcaaaacgttaaagtacgagtggaactgagaaggaagaagcggcggctaacttcattgcatgcgcacatgtttatactcatgttgagatcacgagagagtatgctcgatttaggagaagatttcctaatgtcggtacgtatttggatcgattggctcctgtgaaaaattgggctaggtgctattttgaaggggataggtataacatagacacgagcaatgcgtgtgaatcattgaacattacgtttaagcgtgcaaggaaatacttccttttacctttgcttgatgcgataattgagaaaatttcagaatggtttaacaaacataggaagtagtctgttaaatattctgaaacaaggggtcttgtgccggttgtggagaacgaaatacactccttatgcccaattgcgaaaacgatgccggtgaccgagcttaacagctttgaacgtcaatacagcgtcattggcgaaggtggtatgtcttattctgttgacttgctaaggaaaacttgttcttgccgacgttttgatgttgacaagtacccgtgtgtacatgcgattgccgctgcccgaaactttgtggggaccgaatggatattagatggtctcgaaatggaagacctaacttcgcattattaccatatgaatacgtggatattggcataccacagaaccatttatccagtcccgcattcatcagtttggattattcctgatgagataagacaattgatagtcttaccgccagataccacaattaaaccggggagaaatcaagaaacccggtttccattaacaggagaacgtcgtcgaaagaggactaacaacaagtttcagcctggaattaatatcaacgcgtggttgcagcccgagaacgccgactcataattaaatgtgtattttgtgtgtgcttgtaatgtttgaaccgtgcacttgtgctgtctgtactattgcttcatgtattatgtcttcatttataagtactttggaattttcttgagtattgtgttcttatgtctggaccgtgtacttatgtcgtctgaattagtgcatcttttttaagtactttggaattttgttaagtgttattatgtatgtaccttgtacttgtcctgtatgtactagttctttcatgtttatctcttacaataaaattcctcctatatatataagaaagaaatataattttattattgttttttttacttacatttgcttcaatttaatttaatttaaatatttttatcatatcaaaatatgagtttttgtatgaaaaacatatggtttttgtatgaaaaatacacctctctctacttttaattaaaactataattatttctaatatattaaatgtaaatttttaagaagctgtatttttaatatatttttactatttatgagataaatacagtttatttattttatctactaaaatatgatattattaaaaatgaggtaattttaaaatttttctcataattataaagaaaaagtttcatacttggaaaatctttctatacattgttctggaacatttattaatcacttatactaattatcatacaatctaaaaaacaattgaacatattatactcatcaattcagaaaacacttcttacattatatggtatgcattgtatcatgttggatcatcttgatataaacatggcaaaacgcatatatttgaaaacttatataactaaatcatgatatcttattattaaacatattatatcatctgtccaactaaaagttaattcccttaatgaagtccaactctaaatactaaaacttccacaaagtacaaataacttgagtaccggacaactgaataacttatggcacaattatggctaatgcgcagtcttttgtctgggctcgcattccacttttattaccataataactcttgtgtgttcacactatgtgttcacactatgtatttcaannnnnnnnnnnnnnnnnnnnnnntttctcattaaattacatttctttctctctctttctttccttcttctcctttcttctctcgaaaagttatcttctctcattctctcttctctgccgattctcgaagaacagtgctgacgaacaacacgacgaacctccgccgacgccggccaccgaatcttnnnnnnnnnnnnnnnnnnnnnnnnnnnnnngtaagtttcgggttggattgaaatgaaattagggttttgattttcccccaatttcattgaattatggtttgcaaaggaattagagttgccatttatgatagtttgatatctaggggttggattttggattttgttaaagatctagggtttggatgttagggtttagattttggaatttatccccttttgattttcatgtgtttggctatgtaccaaagaatgccacttagttattcgtcaccttcttcctcagaggaacgatccgatgatccttccaagtacgatggtgattttggtgttccccaaatctgtttttgtggtaaacagcttgagcttgtagagcgtcttattggcgatcaaaagaagacatttctcaaatgtccgatgagtggtcaagatgataattattacgtagacaagggttgggatcttgcagttcacgagcagtgcttttgcatcgacaaacgatttggcgagcatagggaattgattcaaaacgcattcaaatttggaggtgatagtaatcgtgtccagattaaccaaatccgtgctgaaattgaggacctcgaagaccgcttggacaagaaagatgcagagatcgcaaggcttatggatgcacttggaaagaagtaaaatgatttaattgacattgtgattgtatttcctttttatgttgcaacaagtatgttaaagtttgaaactatgttgaattcctaagatttc

SEQ ID NO: 163056 - DNA, 3417 bp, Arabidopsis thaliana landsberg
gcaacggtcattttcttccttcacttctccgccgtcttcttctccagattctaccacacctccgccgtctcgtcagagactcaagcactcacatctttcaaactctctctccacgaccctctaggagctctcgagtcctggaatcaatcatctccatcagctccatgcgactggcacggtgtttcttgcttctccggccgtgtccgtgagcttagtcttcctcggctccacctcaccggccacctcaggcctcgactcggggagctgactcagctccgtaaactaagtgtgcacaccaacgacatgaacggcgccgttccttcgtgtctctctcgatgcgtcttgctcagagctctttatgtacactacaactccttctgcggcgattttccagcggagatactgaatctacgaaacctgcagggcctgaacgctgctcacaactcactcaccggaaatctatccgacgacacagactcgaagagcctacgtgacgtcgattggtctggcaacgcaatatccggaaagatcccggcgaatctctgagcggattcatctctccagctcatcaacctctcgttcaaccacttctccggtgagatcccgtctacattgggacaactacaagacctcgagtatctctggctagactcaaaccaattacaaggcacaataccatccgcattagccaactgttcatcgcttatacacttcagcgtaaccggaaatcacctcaccggtttaattccggttactttaggcacgattcgaagcctgcaggtgatttcattatcggagaattcatttaccggtacagttccggttagtcttctatgtggttattcaggttacaattcctccatgcgaatcattcaattgggagttaataacttcacgggaatagctaagccgtcaaatgcagcttgcgtgaaccctaatttggagattctcgacattcacgagaatcgcattaatggcgattttcccgcgtggttgactgatttgacctctttagtggttttggatatttctggaaacggtttctccggtggtgttccggctaaagttgggaacttgatggcgcttcaggagctgagagtagctaacaattcacttgttggagaaattccgacgagtatccgtaattgcaaatcgttaagagtcgttgatttcgaaggaaacaagttctcgggtcagattccgggttttctaagtcagttacggagcctgacaacgatatctcttggaagaaacgggttctcgggtcggattccatcggatcttctcagcttgtacggactcgagacattgaatctcaatgaaaatcatctcaccggagcaataccgtcggagataacaaagctagctaatcttaccatccttaatctcagtttcaacagattctccggcgaagttccgtccaatgtgggtgatctgaaaagcttgagtgttctcaacataagtggatgcgggttaacgggtcggataccggttagcattagcggattaatgaagcttcaggttttggatataagtaaacagagaatctctggtcagttaccagtcgaactatttggtttaccggatcttcaagtggttgctcttggaaacaacttgctcggcggcgtcgtaccggaaggtttcagcagcttggttagtcttaagtacttaaatctcagttccaacttattctccggacatatcccaaagaactatggatttctcaagtcattacaagtgctttcgttgtctcacaatcgaatatccggtacaatcccgccggagattgggaattgttccagtcttgaggttcttgagcttggttctaatagtttaaagggtcacattccggtttacgtttccaagttgtctcttttgaagaagcttgatttgagtcacaacagtttaacagggagtattccggatcagatttctaaggattcttctctagaatctctcctgcttaattcgaattctctatcgggtcgaataccggaatctttatcaagattgacgaatctaaccgcgttggatctttcgtcgaacagattgaattccactataccatcaagtctctctcggcttcgtttcttgaactatttcaacttatcaagaaacagtttggaaggggagattccagaagctctagctgcgcgtttcactaacccgaccgtctttgtcaagaacccgggactctgcggtaaaccgcttggtatagaatgtccaaacgttcgaaggagaagaagaagaaagctaattctactagtgacactagcagtggctggagctttgttgctgttactctgttgttgtggttatgtgttcagtttatggaaatggcggaacaaactaagattgggcttgagtcgggacaagaaagggaccccctcacgtacatctagagcgagttctggtgggacaagaggagaagacatcaatggtggacctaaacttgtgatgttcaacaacaagatcacgttagctgaaaccttagaagccacaagacaatttgacgaagagaacgtattgagcagaggaaggtatgggttggtcttcaaggcgacgtttagagatgggatggttctatcggttcgtagactaatggatggtgcttcgataaccgatgcaacgttccgtaaccaagctgaggctttaggtagagtgaagcacaagaacatcacggtcttgagaggttattactgcggaccacctgatctaagacttcttgtttacgactacatgcccaacggaaacctcgctacgcttttgcaagaagcctctcaccaagacggacatgtcttgaactggccaatgcgtcatctcattgctcttggaatcgctagaggactgtccttcttgcattctttatcaatcattcacggcgatcttaaaccgcaaaacgtactcttcgacgctgactttgaagcgcatttgtcagaattcgggttagatagattgacagcgttgactccagctgaagaaccatccacttcatccactcccgtcgggtctttaggctacattgcaccggaagcgggtttaacgggtgaaacaagtaaagagagcgacgtgtacagcttcgggatcgtgttgttagagatcttaacggggaaaaaggcagtgatgtttacagaggatgaagatatagtgaaatgggtgaagagacagttacaaaaaggtcagatcgttgagttgcttgaaccgggtttgttggagcttgacccggaaagttcggagtgggaagagttcttgttagggatcaaagttgggttgttgtgtactggaggagacgtcgttgatcgtccgtctatggctgatgttgttttcatgctcgaagggtgtagagtcggtccggcgatttccttgtccgccgatcctacttcacctacttctcccgccgcaaccgccgtttcttga

SEQ ID NO: 163057 - DNA, 2331 bp, Arabidopsis thaliana landsberg
atgtctacgacggtggacctcttttggcacgaacatcctttacatgaacaatttgctgaatgtccatttgattgccaaaactgccatacggtgaaagatgtaaattttaatgaaatatatgaatgcttgacttgcaatatggaatggcatatctcttgcgttccaaagtcaccggagaatattgaccatccctgccacccgaaccatcccctggagcttctcctccaagggccacctaattactctgacggaaagtgcaactactgtcaacggaaactctcaaactttatttaccattgtaagttatgcaatatcagcgtagatttagaatgcggaagggaccgacctccaccccacaaagtggatcatccaaagtgccacgagcatgcactcaccatcatggggagggaagtatccttcacatgcaacgcttgtggtatgcaaggtgaacgaaacccttttgtatgccttccatgctctctcatgttccattatgattgcattgatcttccactcgtcatcaacataaatcgtcatgatcatcgcatatcgcatgcatatcctctcatctcgtgggaattgggtatgtgacatatgtcgacaagatgtcaactcgacgtatgtaggctatgcatgcaactaatgtccagactatttcgttcattcgagatgtgcagctagacaagacgtgtaggatgggattgaactcgcatacattcgtgagaaagatctatatagtatgccagccaaagtgatcgccgaaggggtcataagtcgttgatccctcgacggtcataacttattgctaatcaaggacgctatcacagatggtggtaatgaagacatagattgtgaagcttgcgcccgtccaatatcttcggagaagcactataagtgtatggaatgcgattttattcttcacgaagagtgtgctaatctccctcttaaaaaacggcatgggctttccacatgtatactttctcttctcttagggaaggatattggcgaacaacttttcaagtgtgatgtttgtcatagacttggaagtggttttagctactatgatggcaaggatgtagtactatgttcggtgtgcgtctctctctttctccaggcaccaaaaacttcatcctcacacgttatttctaaccacagtagatcgcgatacttgcatagcttgcggtgagaagaaactcagtgtgctgcattgcgttgaatgtgagcattctttggattacaaatgcgctactttaccattagtgataaagcacaggtgtgatgcacattatttattgttgagctctggggagtaggcgcctggtaaatattggtgtgaaatttgtgaagccgaaaccaatcctgaaaaatggttctttacctgcaatgattgtggggtcgtgactcgtgtgccatattggatacgtaatgggagacttttcgaacttaaaaccaggagtaatcatgggcgaggggtttaagtttgaagtatttctcaacgatcacgattctagaccaagatgtaccatgtgtgactctcgttgtaggttccctatgtatctcaagtatacttcagaaagtcttgagcaatacatttgctcaaaatcttgtttaaaatattcaggcacctaattatgctggagagaaggcgaaaggaaggtattgggttttaccgatggaagctgtgtaaaattttcaattattttcttgttttatatattggatttattattgttgggtttactgtttaaactatatatgattattgtactttgttcaatagaaagaaaaaaaaatgtttgaaatcttatcttcttttgtataatggaagattaattttatcccaagctatgaattctttgtaggagctaaaattaacaacactacataaattataattgagcacaaacgttaaaggaaaaatatgagaggggtcgagttgataaactttttccttaatcctttaaatcatatgtaatgtgacagtttttatgtaattcaaggatctcttgatacaatctctttaaactggtttcacaatactcgaaaactaagatctaacgaaccaaatcattatgatattttcgaaattactttctaacaaagaaagattgctggagaattttgtttgtgtgtaaaacgatgaagttcttaatctggtaagaagaagacttcaagagtgtattatataaaggtttgagattggtttgattttcaagatcgatcaaccacaaccaacacaattttaggagaggttggtgatatgtcgggacaacgatctcacaacgaaaccgagtctcaaggaaacgtgaaacgaaggagaccgattttcac

SEQ ID NO: 163058 - DNA, 1015 bp, Arabidopsis thaliana landsberg
atgggttacgacggcctccgcgacttgaatccttgcataacttgctggacgatttgtgttatggttcttaggaagtacgtcttgtttatcacagataactcattcgaactacgggtcgtctttgtagatgagtgggtaatgggatcttcactcgtgatacaaggcatacttaaccttctgcttgtcttattccctatataactcaccctccaattttgttttcatagggtatccaaattgaagctataatcggaagtcggttttctcaacgttactacgacatgcttgaagagaatcagtggaaagaaatcagaacttttggtgttatcgaaaactggggttttgtccgatcaacaacccacaaatacatgattgagttcatgaatgcaattgaggtaaatcattccgacccaagggaaactgtattatttaacagattcacaccttttgactacattattgaagacaccgctcatactgaaaatttggtcggtaagtaatacgtatctaatacaaatttcatactttcacaaatcacatgcctgtttttaatctttatttcatactccctgatttggttggtgcactcgtcgatgtcggatgtctgagaaatattacagaagatggttgggagatggacggattcagacttaccttcaagattatggacaaatagtataatttcttttgtttctttacttctaaatttctttcttttcatcatgtatttttcttgagaggggtataattgtaacactgttttatatgtttcagtaaggagaggttgaaatgtgaggcttttggcgaattggcggttgacttgcataggaaatttcgatctttttgcaatgacagtattgttattgacaatatatttgttgcactcacatggtggaagatctttaggtgtcatactggccccaaacacgtgaagttccaaaattatgccgggatatcagatgtgactgtcgaccccaatatcgaagaagtgcaagagttaaaaatggtcctcgag

SEQ ID NO: 163059 - DNA, 3511 bp, Arabidopsis thaliana landsberg
atggggaagacaattcaagtgtttggattccctaatggtgtgagcgcagaagaagttaagaagtttcttgaaagactcactggttcaggcactgtttacgcaatcaaagttagacaaccaaagaaaggtggtccaagagtctatgccattgttcaattcacatctgagagacatacgaggctgatcatcactgcggcagcagaacgtctttactatggaagatcttatctcaaggcttttgaagttgaacaagacattgttccaaagccaagagcttcattacacaccatctctggtttaaagatgttctttggatgtcaagtctcgactaaaaagtttttaactctatggagtgctcaagatgttgtgtcttgtttggaattgggatgagggaaactgcatttttcagttttcttggtatcaaaaggattatcgtcttgagctttcgtatgagaatatatggcagattgatttgcattctccgcaaggacgatcatcgaagtttcttgtgattcaggtgattggtgctcctaaaatatttgagaaagaggatcaacctatcaatcttttgtttggaataatggatttttacagtgatgggtctgatgagcaatggattagaactacagatttcacttcatcttcttgtattggtcaatcaacagcgttttgtttagagcttcctgttcatcttaatgttcctgatttcagagagaattttgccaactatgcagagcacagagccagctcttttctcattgaatctggttctagctattcatctaatgctaacacacttgttcctgttgttgatcctcctccagggtttagtttgccttttgagatcttgtttaaacttaacacattggtgcagaacgcgtgtctctccgggccagctcttgatcttgacttttatcggttgcttaatcagaaaaaatatgatagagctctcatagatcactgtcttgaaaaactctttcaccttggagaatgttgctatgagcctgctcattggcttcgcgatgagtacaagaagtggatatcgaaaggaaagcttccactgtctcctacaatatctcttgatgatggacttgtttatatgtatcgcgttcaagttacaccagcaagagtctatttctctggaccggaggtgaatgtttctaatcgtgtgcttcgacattactccaagtatatcaacaacttcctcagggtctcatttgttgatgaagatcttgaaaaggttcgttccatggatctatctccacgctcttctactcaaagaagaaccaagttatacgacaggatatattctgttcttcgcgatgggattgtcataggcgataagaagtttgagtttctcgccttttcttccagccagttgcgggagaactctgcttggatgtttgcaccaatagatcggattacagcagcacatatcagagcttggatgggtgattttgaccatataagaaatgtagctaaatatgctgcaaggcttggtcaatcttttagctcttcaagagagacacttaatgttaggagtgatgagattgaagtgattcaagatgttgagaatatatctttagggacacgctatgtgttttccgatggaataggaaagatatcagctgaatttgctagtaaggtagcgagacaatgtggtcgtcagagtgtctctccatctgcttttcaaatccgttatgccggttataaaccagtggtggctgttgatccaatctcatcaaagacactgtctttgagtaagagtatgatgcaaattcgaatcggagaacacccagcttaatgttctggcgtggagcaagtaccaaccttgttatatgagcagacaactgattacacttttgtctactcttggagttacggacagtgtgtttgagaagaaacaaagggaagttgtggatcgtctcgacgcaatcttgactcatcctttggaagctcacgaggctcttggtttaatggctccaggggaaaacacaaatattctcaaggcattgatcttgtgtggctataaacctgacgctgaacctttcctttcaatgatgcttcagaatttcagggcatctaagttgttggaactacggacaaaaacaaggattttcatttctggtggaagatctatgatgggatgcctagacgagaccagaacactggagtatggtcaggtagtagtgcagtattcagatcccatgaggccgggaaggcgattcatcatcaccggacctgttgttgttgccaaaaacccatgcctgcatcctggtgacgtgcgtgttcttcaagctgtcaatgtcccagctttaaatcatatggtggactgcgttgtgttcccgcaaaagggcttgaggtaaacatttttctatgcttgattcgtgtttttttcgagcttttattgttttaagtctcgaacttttcattggaatcttgtgttcttttgtgcataggccacacccaaatgaatgttctgggagtgatttagatggagatatttactttgtatgttgggatcaagaattggttccgccaagaacgtctgaaccaatggactacactcctgaaccaactcaaatcttggatcatgatgtcacaattgaggttataataaaatttgatcactttggttatatttttgtttttttggcgttaggagattgattggctaccttggtttccaggaagttgaagagtactttgcgaactacattgtgaatgatagtttagggatcatcgcgaatgctcataccgcctttgcggataaggaaccactcaaggcgtttagtgacccatgcattgagcttgcaaagaagttttcaactgcggtagatttcccaaaaactggtgttgcagctgtgataccgcaacatctttacgtgaaagagtatcctgatttcatggagaaaccggataagccaacatatgagtcgaagaacgtgattggtaagctttttagagaggtaaaagagcgagctccaccgttgatctcgatcaaatcattcacgcttgatgtggcctcaaagtcttatgataaagacatggaagttgacggatttgaggagtatgttgatgaagctttctaccagaaggcgaattatgatttcaagttaggtaatttgatggattactatgggattaagactgaggctgagattcttagtggtggtataatgaggatgtcaaagtcattcaccaagagacgagatgcagaatcgattggaagagcggttcgggcgttgaggaaagaaactttgtcgttgttttttgcttctgaagaagaagagagggagtcatgagaggcttcggcttggtatcatgtaacgtaccactcaagttactggggactttataatgagggtttgaatcgtgaccatttcttaagttttgcgtggtgcgtttatgataagcttgtgaggatcaagaagaccaatcttgggaggcgtcagcggcaggagacgctcgagcggttagaccatgttctgcgtttcggttgatttttttt

SEQ ID NO: 163060 - DNA, 4133 bp, Arabidopsis thaliana landsberg
  unsure (1)..(4133): unsure at all n locations
acggttttacaataaatgcatcggtaagtcaagaacggattagaatacataatcgaaagaagtggaaactagcgacaataagtgctgatccaatatcgcagcccgacctcgaagtcgggtgaaccggaagtaaccaaggtacacaaccaattccgcatattcttatcaataagcttggcgagtttaggagcatgtataggtgactctccatgccgtctcccattgcgttcatctttaacaattttactaatggtgcttcaattttatgttcacaagcttgtgtctgtttttccttgatttgctttggctgttcttttttttttcttttgttaatgcttcatggaatatgagattgaatctggtgagtttcttatttaatcgtgttaccatcttggcaaaaaaaaaaagctctccttcctagatatgtcattactcaagctttcctttgtgatggaaatgaggaatattgataagttgacactttagcctattgggatcatcgatatatcagttttttttcttctatttagactaaggggatttcaattttgataagatgacactttagccttcgtgcatttttaaactattggtcaaatttattaaagtgtttgttttattcgtattgcattaaactcttttgtttatattcgggtttgatatttatactttgtgatttagttttttcaagaaaataaaaaaagttgaaaagcacactacatacacatgttagacattttgattggccacaaattttgatttggttcgtttagatatgtcggggcttttacaggacaaggcacatttgaggcccaaaatttgcaaaaggcacatttgatatgggcttatgggaatgggcacatttaagagcatgaattgaccattttacccttttgcgagttgaagcttagtttgggcgggattaggcgtaattcgaaatttctgacacccaaatctactaccgccgatcattgtgcaccgttcagtggcctcaaaattggcagggttgttcacgcatgcgtgtgcatgatgggggtaggttatattgacagggaatttggttatataagagttgtttatgttgtcaaattggtaaggagagatttttccaaaaaacctcaaaatctggctacacaacttgatgctagagagggaattgcttaatcctgcaagaggaatcgctagacgactctcctggggagatatgcaccgagagataagtaaaatcgttgagtaaattgtaataaattgtaaggtattgaacctgtctctaacaaacaatagcttagtctctgtaagtaagtaattgtttagtaaattggcatgacgagttgtctgtaacaaacaatggcttggtctgtaaaaaagaattgcttagtatgaggagtagtttgtttagttgtgtgaagagtataaagtagttcaacttaatgtgtaagctattgaagctgtctgtaacacaatccaatggttttaattaagtaattagactcatatgttaatgtaagttgtctactgtttcggtttttgtgaatgtaattacactcacctgttaatgtaaattgcatttcaggctcatattctttgatttaaagttctatgtttccgtgacagggggatgacgtagctgtgtgcgttatagcttgttcctgggaatgttcagacaaaggtgtatgggaatttgtggttgcaaaggattgttatgccaggacgatatgtatgaacccgaagatgacttatgcagagctgcaaaaacatgttagttcagagtttgaacttgatggaaacaactggaaacccaaaattagctattggctacccgcatagctctctgtctttgtagtcaatacaaggccgcctgttactgttgcaaccaacatgggtgtagccaactttcttagggtaagggagagtaaccctcagctcaatttattgctatcgcttgaagctcgaccttacttggttgatggtgtaattgtggatttgttggctgtctgtggtaaggagaagagccaagaggacgagatgtttcagtccaagggtccgcaatcttctaagtgtagagctgagtttcaatctgcaggctcctatttagcagaaagttggatgaggaacatcattcatggaaatgggagcaacagtttggttagcacagaaaccccagtacatgcacctatgcagattgtagaaggtgacacaggtggttcagttgcagaggtgaatgagaacggtggtgaactggtcctatgtaccaatgttagtggtataataaatcttgctgatgcagccacaccatcattgtctaactgctcagatgagattgaaaactttacagatgatgccacanatgaagatgaggcagatgagccttcatctgaggatatgaggatgttactagaggtagaagaattggagagactggagctagctaagcagaagaagaaggggaagagtaaagtgtttgacagtgatgatgagggtcatgatacttcatacacaaatgggtttagtgaaggaactccagatgaagatgaggattgggagtatgagggatggaaccacctcatggcgcatgatattccacctgggagtagcactcctgctgctgtagttcaaccagaagtggctaaaattgaagacacagctactgcaacaagagacatcagcgaagctgttctgggataccatagggatcatgtagaaagaactgatgtcgagggcaacagttctgaagagaatgatagtgtattaggtttctctgatggtgagccagtctttgatgattgctacaatctgatggttctgttccagcgtctagtgaagaggatgctatctacataggacggatgttcaaagacaagaaccatctgcaaacgactttagcaatttattctataaagagacttttccatttcaagcagacaaggtctgacccggggaggcctatatttgaatgtgttgacaagaagtgcccgtggagggtatatgcagtttcagcaggaaaagagtcaaagaactttaaagtccgaacactgactttaacacacacctgcacaattgcatcaagagcacactatgggaagcaagcaacatctaaagttatagcgaaggtgttggagggtaagtatgctaacggtatgcccggtccacgagctgtagatatacgagatatcgtattgagtgagctaaaggtttcagtttccgacatgaagtcttggtatgccaaagaagccgcaataatgagcactagaggaagtgatgaaaacaactacaaactcttgtctggatatatgcatttgctgcaagctcaaaacccagggactaagtataagttacagtatactgaggggttagatggaaagaagcagttcaaatatttattcttcgctcttggcgcgtccattgcagggattcagtacatgaggaaagtggtgctggttgacggtacatctatcaagcataagtttaaaggagttctgttaacagctagcatgcaagatgctaacttcatggtgtttccaattgcgtttggcattgttgatagtgaaagtgaaccagcgtggacttggttttttaggcagctcagtgcgattatggtagatgctacagatttggtaatcgtttccgataggcatgcttcaatatatgctgggatagggcaagtctatcctaaagcttttcatggggcgtgtgcggttcacatagaaagaaacgttagagccaagtttccaaagaaaggagtctctaatcttgtcagtaaagcagctcgagcctttaatgaagctgatttcatgaccttcaatacagagataggaaggcgcatcagcgtctgtgcggattacttagctggaatatcaaaggaacactggacacaagcgtactgcgatgcaaagcagtacaatctcatgagcaacaacattgctgaggcattaaattctgctttggccaagattattgagctgcctattgtaacattggtggaaggaataagagctaaacttatgaaatggttttgtgtgcgtcgtgctaaagctgtgaaactcaaagatgggataacaccaaatgctcacaagctcatattgcgccatcatgcaggctcagctggtttggctgtgcatccagtctctccttga

SEQ ID NO: 163061 - DNA, 2074 bp, Arabidopsis thaliana landsberg
gttgctaaaaatcaggagaaaaagttagaaaattgctgtgatggtgagatttgctatgttaaggatgttccagagagaatggatattggtgttgacgaacttccaatggcggaggtaaaagctttaaggggaagaaagagaaactattctttgaaacaaaccttaattagcaagacagagagagagagagagagagagagagggaagagtggagccaaagaggatagagattttgcgacgaggaggaagaaacgagccaaaatcccggcggcagcgatttgaaatctccggtttcgttcgctggctgcgacaacgacgacgcacaaaccaggcaatggagattacgctttgggcgtttcgtcgttgagtctgaggcttgaggaaaaagaaggtggtgatggggaggaagaaaagctgtcatgtccataatgctccttccgatgacgatataatgttttctcaagatcataaacccaagagaatctaccaactctggcccggcaacaatgtatgccttttcttttgccaatgcaagtttttctcttgtttttgaattttacagacaaaaagaaagcgtttttgtaatgcgtgacataataacttgccttgcaaaccacgcatcatggcctgaattagatttgaacaattgaaagctgagattatgttctgcaatgtctgaactagcttgacttgttttgttcgttcagagattttattgtggagggagactagtctttggtccagatgcatcgtctctccttctgacaacagctatgattggaggtcctgctctcactttctgcatacgaatggtttttttgatcggaaaacgctatcctttgttccactctcttatattgttgggtgcacttttgctcactgtcctggtaaaaccctaaaaacatgtttctttctttctgagatttcgttgccctttctgcatcatattcatgcttcttccttacaggattttacatttctcttcttaacatcatcgagagaccccgggattatccctagaaacaaagaagcacctgaagcagaagggcttgatatgatcactcaatcctcagagtgggtaaacaacaaactcggtaatacaaagatacctcgaacgaaggatatattggtgaatggctacactgtcaaagttaaattttgtgatacatgtttgctttaccgtcctcctcgcgcctctcactgttcaatctgtaacaactgtgttcaaaggtttgatcatcattgtccatgggttggccaatgcatagccttagtaagtcttccaaaacgtttatttttgaatctcatgcaacaaaaactgtgattaacataatagctctttgcagcgaaactatccatacttcatctgtttcatatcaacttcaacactcctctgcttgtacgtctttgtcttctcatgggtcagtatgcttgaggtacacaacaacatgttgttaatggtcatcacaaacgacttaggacttgtcgttctcatcctttactgcttcgacgatgtctggcttgtcagtggactcactgtttttcatatctacctcatctgcaccaatcaggcaagatccttaacctttatttgactattgctgctctgttttgtgctataactttgcaaatttttgactcttttgttactattttgcagacaacttatgagaatttccggtatcggtatgacaagaaagaaaacccttatggaaagggtctcttcaagaacctatatgagttgttctttgccagaattccacctcccatgatcaacttcagagactgggctccagaggaacctgacgaggaggttggatccattgcatctgagctagaccgaacttttggaccccgaggagataaatatgatatggaaatggaaattggcggttgcaaaaacagtaaggtcggtttacaactccatacactggagtatgacaacaacaacagcagcgaagaaactgtcaagaagaaaggtgtaagcgaagaaaccgccgcgttttacatcccggggattcaagaacccgcgaatataacaagaaactcgagcattgatgtgagatcgaggtag

SEQ ID NO: 163062 - DNA, 2508 bp, Arabidopsis thaliana landsberg
gtaaccgagccgaccctgattaacgcctcggagatcttgtcgaagaaccatcctgagccgggcctcaaaacacctcggggatcatgtcaaggaaccatcccgaggcgacatcaagaacgcctcggagcatcaccacaaaggattccccgacccggtcttgaagcgcctcagatggcaacccggaaagtcatcccgaggtgggtcttaagacgcctcgggagcgcatcattcgactaacaaggtccgagccgctcaaccacaacatgagggtcaactcaacccggctcggaggaacatcgggtcgggacagaaccttcaagaaatgacttaaccaatatgagatcgaacataccatttccgaaaaacccggaagagatattagagaatctccaaggatatcaccaaatataggagttcccagaatcttcggaaaataaagacaaatctccttcgccagctctaagataaggagaaatcttccgagaatatcgcaagaagcgatctgataaagccctatataaagaacttctgaggacaaagaaaaagacacgcacaaaaacgctcttaacttcaggctatcaaaaacgctctgattttgaaggcaaaacacttattttgatatttctaaacacttgtacgatcgaatcctcattatttcaataatataaccaagaacaccgtccgcggtaatcaacaattttgttgttctttgagaaactcacaaagatccgttctttaaagaaacctttagtacaatttctcttgtgcgagtttcgactctcacaatgcgtagagcaaggtcaaacgttttcttgtatgaagagtcatgattgtcatgtattcatgcaacgattattgccatttgtgttaagagagttgctaccggcaaatattcatgatgcaattgcaggtaataaatatatttatatattctatttctattctttaactcagttattaattgacgactattaacttacattaattcgatatatgataggcattagatcatttttcagggacctatgtacaagaacattgacaactgatgtcatagaacaattagacaagaatatcccagtgttactttgtaacttggagaaattattccctcctgccttttttgacgtgatagtacaatttcccgattcatcttctacatgaaactgctcttggtgggccaatgcaattccgatggatgtatccttttgaacgattcatgaaatctcttaaagataaggcaaaaaatcttgcgagagttgaggggtcgatagtcgcaggaagtttaacagaggaaacgtcccacttcacatcgtattactttagtccaaacgttagaaccaaaaagactcatcctcgacgatatgacgatggaggtgttgcacctacatttaacattcctgatgttccagatacctttgcccaaataggtagacttgcagagaagtcgaaagaagtttggtgggatgaccatgcaatttctagagcagctcacaattacatactccgaaatgttgattacattcaaaaatttgagaggtacaaagccagacaaattttattcataattttttatatttaataattagtgtgatactaattaaggactaattaaagaagctaagcatctacattttaatttgtaggttatttgattcacaaatccgtgaagcatgtcctgaattagaagaaaaagagtatgaaacttacaaagatcgtgattttgctggatggttaaaatactatgtaagtataataatatttcgaatattcgattacttatttactttaaaaaaatgataaacttaatattttctatgtgtaggttacgaacggatgtggaaacgaaccattacaacttttgttgcatgagctcgttcaagaaccaagatctaagatcacaacagcttcgatgtacttcactcgcggctatactttccatacatatccatatggaagtcgaagggcaactgcaaattatggaatccatgtcgaaggtgaaactgagttttatgggattatacagcaaaatctataagtcgaatatccgagacttttgaatttgaaatgcgtccttttcaagtgtgattggtttgatcatgtgatccgtcgaggggtacgagtaaataacttaggcgtggtcgaagtcaatgcaaacaagacttattcaaagtttgaaccatttatcctagcatcaccagcagggcaagtatgctttctatcttacctgcgtgtgaggcctaggcgtgaactgtggtaatcggttattaaagttaatcccagaggccgtatagtcggtcttgttgatgatgttgtgatgcaacaagaaagtgtcagagaagtttccataccagacataacaacagaagatgttatccatatttacctacaaaacagagaattagaagacatcactcattacggtttcaaagaagaagaacatcagacgaattcggcgattctcatgtagacgttgagtctgaaaatgatggtagcaattcagaaaat

SEQ ID NO: 163063 - DNA, 2753 bp, Arabidopsis thaliana landsberg
gctcactatcatgcatatcgccggtcgaggtggctcccggaagcgtaagacgacgccgaacgtcactcagagagccggcgccggcggttcatgacctgcaaatcttcctccccaatacaacttcactccgacgccggcggttcaagttcctgcgacggagccggctcaacaacatggaccttcaacgtctgcaccccacgtccgcaactatccaccgcctctgcaactcttccagaactcaacgactcaaccacaacatcaagctcctccgcctctatctgaagaggtccactacactccgccaccaacagcgccacctcagcaaactccttgtcagtcgcgagattcagacgctccagcaaacagccacccgtcgtctcaagggaacaacttccaagaggaagttcctgggacgttgccggagctacaagaagactcggcgttggctctgcaatcgacactctctgtgccaaacagggagcagtggtgttgtgtcttatctccaattcccaaacctaaaaccgagtggtatgttttcttcctctattttattctagtgttcttagcctgtgtagtgtaactcgtgttatggtctgtagaatggcttgttagggtttgtgtaacatagtaaaatctgcctttgttggagttggatgtttgttagggtttgtgtaacatagtagaatctgcctttgttctaaactcgtgtgtgatcttgttaagttcttcactttgtctataatcttgttaggttatttattgtgttctgttgtgaatcatgaacataattgtggaacatttgttgattgttgaacttagcatgttttcggctttgacattgaggatctgtctttgttctatacttgtctataatcttgttaagttctttattgtgttctgttgtgaatcatgaacttaattgtggaacatttgttgattgtatcccattgcatgttttcggctttgacattgaggatctgtctttgttctatacttgtctataatcttgttaagttctttattgtgttctgttgtgaatcatgaacttaattgtggaacatttgttgattgtatcccattgcatgttttcggctttgacattgaggatctgtctttgttctatacttgtctataatcttgttatgttctttattgtgttctgttgtgaatcatgaacttaattgtggaacatttgttgattgttgaacttagcatgttttcggctttgacattgaggatctggctttgttctatacttgtctagaatcttgttaagttctttactgtgtgtgatcttgttatgttgactattgtgttctgtgtgtgatcttgtcggcttatacttgtctagaatcttgtagattgcctcttgttcagttatatagtctgctgtagttgtagtgttttggattttaaacatgtttacttctatctgtgttgcatgtgtttggaggtttactcgcgagagaggatctaaattggttagaaagatcacaaggatttttactcaaaagttcaatgctccctactataattggtcctgtgtgccattggataaaagagaaagattgtttttagagtttgcggtaagcttcttgtatttctccaactttctttagactttactatttaatctgtcaagtgttcactaacttcacactttttttgtagaaaactcaccactgggatccctgaataacagggacagtccaatactactttaatgagatcgttaagaggcgcttgaaggacatggttagcaccgataggagaactcgagagcagccttcatggattggagaaactctgtggggaacaatgtgtgcttactgtgacatagaagaagcaaaaaaaagtagtcagacctattctaaagctcggctctctgaccgtaacggtctcggtccacacatccactactctgggccaaagtcttatcaagaaatccaagatgaaatggtaagtgtttcagcatcctttcatgtcttttagagtcgttcaaatcataagttagagttttattgtctgtcttgttcagttcaagctgtcttcgacttgtgatattgatctgtgtttgcaggaagagaaactgggaagaacagtccatctaggtgaggtgttcatccagacacacactaagtcggatggcacttatgttgatcggaaggcggagaagattgctagaacttatgagcggaatgtgagatcaaagctgtttaaactggaggcttcagcttctgatgtctctgatggcacttcacgacctctggatctcacaatagatgagtatacagccatctttctcgaggtaagatgttgtagtctaaacctcttgactttgagtttatggttattctgtcactaatctcttctttatttcttttcagtccaccgaaagggattccagaggcaatctttatagacttggcagtctcaaagatacattaggctgttccaaccgcaatctccctggagaatcatcatcatccttcctagatttagaagaacggctgaaggaagcgcaacgcaagattgaggagcaggctgcctacaatgagaagcgagattctgagattgctgcgcgtgaagctgagacagcccgaatcacggttgagcaaaaggacaagctcgaacacttgtccttagtggagaagtatctccgacaaacagatccgccattccttgacttcatggcctctcaatcttcgacaaccacagagcctctaccagctactccacagaatgatcaatag

SEQ ID NO: 163064 - DNA, 1599 bp, Arabidopsis thaliana landsberg
ctaatgtctagaattgttccaattactgcagggatgaatctttctagtttggaagatattgtttggaaagaattcatgaataaagatttgacatttgggacccctaggtttagttatttgccgtctaatatcatggattacactacggggaagaagatacctccgatattgataactagtgaagtaggtttgaagttcttcatgagatgttgggaggaacaagggtttaaatttgtttgttaccttcagcgaaatgattgaaataggaaattctcgtcggaaaaatgttagagaagaagatgttgctggttcatctgtaatgaagagtaagaaaagagcaatttcatcatcatgtgaaggacttgcaagaagtgatgataacattggatgggaagcaccaactgctggttccaaaaccccaaagattccgacaactcaggatgatgacgctgttatagcggaagttgaagtactagaaaccatgtataacagaggcgatgaacaattacatagcagtggcagcgagaggaaaagtagaactagtgtcagtagtgatgaatatgaagatttatttgggaatagtgaggaagaggtcgaagatggagaaaatgtacatgaagttgttccgacaggttatgatacagaattttggggtcattttttggatgatgagttagctggttctaatgcacctgagatcatgtttagtccacgagtggctagaattcaagaagataaagattgcaatgatggcagaggtagtagtactgactccgaatccatgccaaatggaggatagagaaatcgagagacaaggaaacttgatgatagtgaagatgaggggtttgatattcctccgtttttttatgatactgaatatgaaagagacgaaatcccgaatcttgatattgaagatgatgagaaaggtatctacaaaggaagggtatatgcaagtaaacaagattaccaaataagcttagctatccgcgctataaaggagcaattttactttaagcagtctcgtaccaagcgacattactttttgataacttgtgttgatgaaactgtcagtggagaataatgtcccatgagatgaagacgtgtggttactactagataaggaagggtgatttagagcacacatgcaacattgaaacaaggagacagtacatgaagatggcgacttcaagagttatagcatcaatctataaagccaagttcagtaagttctctgaagggcctgtacctttggatttgcaacaaatggtacttgaggatttgagagtgacaacattgtatgggacatgttggagagcaaaagagaaggctgtggaagaggtgtttagtattgatgatgactcatacaagtccctagaagcgtatttgtatgttttaaaacttgcaaatcctggtacagttacaaatatcaaaacagagattcaagaaaatggatttcgcaggttcttgtatttatttttggcattcggtgcatctattgatgggtttcgatatcttcgtagggttattgtagttgatggtacacatttgactggtaaatacaaaggagtgttattgatagccactggacaagaagtttaa

SEQ ID NO: 163065 - DNA, 1319 bp, Arabidopsis thaliana landsberg
atgtcttgtttcttaagctgtgtccgtttcgaaacaaccaccgacaacatcaaacccacgagtacagaatctggttctgtctccggtgttacctgttatacttgggatgatgttgagtctctcacttccaatttctctagacttattggtactggtggctatagtagtatctacttagctcgtgtgtctggttctatcaacgcagctctcaaggttcatgtcagtagtcatcgtctttatcaagtgtttaggtctgagcttgagattttgcttcgtcttcaacatcctcacattgttaagcttcttggttactttgacgattcaggttcctatccttcctctcttaatccgtttttaaattcttgaaattccctaatcaagaactggtcctaggaattattaacatccatgaaaagtcaaatactttaaagaacagagctttattcttgtcttgtcctaattacaattcttttgtagattcgtttcacttttacactagttggttagcttttccttgttgcaaattgtttatcttttgagtggattcttagtgtgaatctaatgttgttgttgtttttgttgtgtatttttcagaagaaagtggagcactattactagagtaccttcctcaaggtaaccttcaagagaagcttaaccggaacagcaaacaagtgttaccatggagaaacagaaccgctattgcgtttcaggttgcgcaagcaattgaacatattcatgagaaatgtagtcctcagattgtgcacggtgacatcaaatcttccaacatacttcttgacaaacatttcaactccaagctttgtgatttcggatcagctaaagttggtttctcgtctatggttcagccttctaagacgacgtcaactatgtcaccacgatccaagcaagtgatgatgattggttctccagggtacacagatcctcattacttgagaactggtattgcttcgaagaagatggatatgtatgggtttggagtggtggttcttgagttggtttcgggtaaagaagcggttagttctgagagaggtgagatgttggtgcattcaacagcttcgttgatacatgagattcttgattcgaatggagatattggagaagagaaagtgagacagttcttggatccaaggttgtccagggatggtagtattgatttggaagaggttaagacaatgctacgtgtggctgctttctgtcttcgtagccctccatcgctgagaccctctgcttctcaagtagttcaaactcttaacaagaagataccgtctctatctttcctcggttgtggtaaaaaagagtga

SEQ ID NO: 163066 - DNA, 2599 bp, Arabidopsis thaliana landsberg
aagattcctcttcgttttcctcctaaatctcttcttcttcttcgatttcttcgatttgaacctctgtctcatctagatctctccttcacactatgtttgggcgaggaaaaaagaagcgaaccagtcctaaccttgctcagagagcctccacatccacggctggtcgacgacctcgttctcttccgtctcattacaattttacgccggcagcagaacggtctcctcagctacagacgcctgcaacagaagccgctgttcctcctttacagtcaacagcagctcatgtttggaactatccgccgcctctacagttgttccagcactctggcagtcgacaacctgaagtgcaaaggactgcctccgtagaagtgcagaacaaaccagcgactcaagccgcaactactcagcaggttcctctgactcctcaacaagaccctccgccttctcagcaagaccctccgccttctccagttcaagagtctcgggctcatagtcatccatcctctcaaggcaacaacttcaaagaatatccacctctgacaccagatctccaggaggacacacttcaatccctaaatgatctgcttatgttgtcggagagggataagttcgtcaccgtcctctctcccattcctcgaccaaatacgacatggtatgatcttcttcttctcttgtttgtgatcccatgttgtgttcaatgtcggtttagttgagtaatgagctttgtgagattgattagattgagaaaatgtctgaattgtttatttgttgtgtttcgtgttgtgttggtctaaaagtctgaaagtctttgatattatagttgttactttgcagccacaatctattttgttgtttaaagagtcttgttgtgttggtcttattttgttgtttgcgagaacaagtagtttaagttgtgttttgatcttagggtttagttgggtaatgagctttgtgagattgattagattgagaaaatgtctgaattgtttctcgttttagtctcgtgttgtgttggtctttggtattttgatgttctttgcagccacaatctattgcaatgtgtttgaagagtcttgttgtctaggtctctactctacttgttgtttgcgagaacaattgcttgtggctgcaaagtatcgtgtctgtcattgtgtaagtttagttctagatgatactttgcagccacaatctatgttctgctctatatgatctgtttgtatgatactttgcagccataatttatgttttgctagtctttggtctgatatttagatattttctcccatataataacaacttgtttttcttgtgtatggaggtttactcgggacacaaactcatgacttgttaggaatatcactagagtgtttacaaacaagtttgatggtctcttctacagctggacatgtgtgcctcaagagaggcaagagaaatacttcctcgagtttgctgttaagtgttctttcagcccttcttttatatagttgattacacttcttttttttactgacattaccttttctatttgtagaaaacacaccattgggatcctttgatcacagggactgttcagttttacttcaacgagatctgtttaaggtgaatgaaaggcatggttagcactgtaagaactagtcgaaagaaacctaaatggattgggaaaactctatggaaggaaatgactgcgtactgggacactgaagaagctcaggaaagaagtcaaatctattcaaatgcccgtatgtctgaccgtaacggtctaggtcctcacatacacttctcagggtctaagtcatatcatcaaatccgggacgaattggtaagtcttctctctgtttactcctttgcaactttaactcgatgtttcaatgtacttttctatgacttattttttttttcattacaggaagaccaattgggcaaaactgtcagtattggtgacgttttcatcaaaacacatacaaaacctgatgggacgtatgttgatcgaaaggcagagaagattgcagagttatatcagaagaatttgcagctgaggcagtctgagctcgaggctgaagcttctgctgtttcagatggcacttcgcgggtacgggagctcacagctgaggaatgtacaaccatatttcttcaggtaacgttttatgtttcccaatttagtgtttttgagttgtctttttcagtctctaatctcagcttttatcatactatgcagtccactgagagggattcgagaggcgttccttatggagtaggaagcctcaaagagtctcttgtcaatggcaagcggaagcaagcaggtgactcaacttcttttgtggctttgcaagaacaattacttgaagctcaacgcaagatagaagagcaggtctcttacaattagaggcgtgaatctaagattgctttgcgtgaagctgagaattcccgagctgcagatgagcagaagaagaagcttgagcacttgtccttagtggagaagtttttgcgcgaaaatgttcctcagttcctcaatttcctcgaatctcattcagctaaggagacaaccacagatcctatctcaccctctccagctgtctctccctcttcatctgcttcatag

SEQ ID NO: 163067 - DNA, 1775 bp, Arabidopsis thaliana landsberg
atggatgagagagagtcatcgtcttcaagggcagggggagaacaaagagaatatgatagtttcagaagaaaagctgagatagcccgtgggaagcgagtttatagatgaggatctggaagacgagtacatgcctgagcatgctcgcagagctaccaaacttctgcacaaacctgatgtattgcctgctgaggaatatattaggctcttcaaattgaatgagttttgtagcacaaggtatccatgctcgaccacgcttgcacaacttggattattggaggatgttcagcatctgtgccagagttgtcatctggacactctgatggcttatgcgtatgtagcatatgaagaagagacaattcaattcctctccacactgcaagtggagctctaccaaggtatgacctttgatgagttggattatgaaggattgggattcttgagattctctgtgtatggtcatgagtataggttatcaatcaagcgcttggaaggattgtttggtttccccagtggaacgagtactaagcccaagtatgacggagaagagttgaaagacttgtggatcaccattggaagctttacacgctgaattcttccaggccaaagagcaatcagatacgtagccctctcatcaggtacttccagcgttctatagccaatgtactctactcccgagagatcatagggactgttactaattctgatatggagatgatcgttatggctctcaaaggcactctccgccaaactaagaacaacatgtctctccaaggtgaaatcaatgacacacctctctctgtacttattctgatccacctgtgtggatacaagagttgggctgtcatcaataaccacaagagagcacgaggcgctctgtgcatagatggtgttgtgacaccgattctgatcgcttgtggagtcccaatcacatctgatggacttgagccacgggcaatggatatcgagcatctacatcactgagagttcctggagtttgcaatggttggcgacaggcaccgtttcaagtttgagcattctatagataagaaagccaacatccttcttcccagtcttgaggttacacgcataatagagggagataacattgattttaagcctgagcttgggaacctctactacgaggacgctcagccattggatgaggatgttcttatagaaaaagctacggaggatgggatggatgaagacagagaagtggagtttgaaactagcatgtatcattttagtgagctcacatgaacaacagcaagctgcagaagtggtgcaagaaacatgataagttactcgccaagtgcttcaagactatcaagtttctgacagataagctgagctgctcctcttccacaacagctatcccacagggacaacctcctctggacatgccatcgaggagatttgatgagccttagccaagtcagcacaggcctgagcttagtgagcaaaggatctcataagttccagcgaggcattcatcatacgagccttgggagtacgggaggaagaagaaagttgtgctcactcgatctagcagcaagaatacaagacttctccagactagaagtttacgcgacagcggtgctggccgcagcagaagacaagaggtcgagtatcttcgttgcggtgttggccgtaagagaggggatgaggtcaagtaccctcaaggacctggagctgaaacagaacagggcgactcttcaatggcctgagagcaatcacaggataccattgacgacaaactccgtttatttttcgac

SEQ ID NO: 163068 - DNA, 5652 bp, Arabidopsis thaliana landsberg
  unsure (1)..(5652): unsure at all n locations
atgggagacatagttgcagtaaaacctaaggagagcggttcatcatcaatcctgtgtcccatgctcaccgcaacaaactacacagcttgggtcatacggatgcactcaaatcttaaagtccataaggtttgggaaaccattgaaccaggaaacgacgatgaagacaagaacgacgtggcgagggctttaattcttcaatctataccagagaaacttcttcttcaagttgggaaacatgctactgcaaagaaggtttgggatgcaataaaatctcgacatgtaggagctgatagagttaaggatgctaggctgcaaactttgatggcagatttcgagaggatgaagatgaaggacacagaaaagattgatgattttgctggacgtttatcggagttatcaaccaaagctgaagaattgggaagtgatattgaagtgccaaaacttgttaagaaatttcttaacagtttgccaaggaaaagattcatacatattattgcttccttagaacaagttctagatcttaacaacacaagctttgaggatattgttggcagaatgaaggcatatgaggagagaatttgtgacgaagaagatcatcaagatgatcaaggaaagctcatgtttacaaattcggattcacagtcttatcaagacaattggaattcgagtagaggaagaggtcgttttaatggaagaggaagaggacgaggacggtttggttactctcaacgagacaagagcaaagtaatttgttatcgatgtgacaaacccggacattacgcagcagaatgtcccgataggttactcaaacttcaagaagctcaagaggacgatgaaaccaacaccaacactcaagaggctgaaaaacttatgatacacgaagtcgtatatctcaatgagaagaacataacaccaagcaaattcgagactcaatcggatggaagtaatgtttggtatttggacaatggagctagtaaccatatgtccggaaacagggcttacttttctaagattgatgagacaattggtggaaaagtgaggttcggagatgactcatgtattgatatcaaaggaaaagggtcggttcttttcattagtaagaacaaagagcgaaagatcttggctgatgtgtactttattccggggttaagaagtaacattataagcttaggtcaagcaaccgaatcgggatgtgacgttagaatgagagaagactatttgacaatacatgatcgggatggaaaattgttgttaaatgcaaaaagatcacaaaatcgtctctacaaggtttttatggaatttgagtcggacaagtgtctgcaatctatggtgttgagtgagtcaataaagtggcacgcaaggctaggacacgttggtatggagaacatgagaacgatgattaaagaaggaatggtcataggtttgccgtcaatgaccattacaaaagaaacgtgttcttcatgcttacttggaaaacaagtaagacaagtgttcccacaatcaacatcattcagagcatcacaaaaacttgaacttatacatggagacctttgtggacctattacaccagccacagctgcacacaaaaggtatatatttgttctaattgatgactattcaaggtatatgtggtctatattgttgaaggagaagggagaagcttttgagaaattcagattattcaaaaagacggtcgaacaagaaacaggattcactatcaaaacgtttcgaannnnnnnnnnnnnnnnnnnnnnnnnnnnagagtttcaaacgttttgtgatgattttggtattcaaagacacttgactgcaccttacacgcctcaacaaaatggagttgttgaaagacgaaataggacccttatggagatgaccagaagtatcttgaaacacatgagtgtaccaaactacttatggggagaagctgtgagacatgcaacctacttgattaacagagtgggaacaagagtattggctggaaaaactccctatgaagcgttcaaaggcagaaaaccgaatattgagcatttgagagtatttggatgcattggctacacaaaaacagagaacgctcaccttaagaagcttgacgatcgctcacgagtattggttcatctaggtactgaacctggttcaaaagcctaccgattattggatccaacaaaccgacgaataattgtgagtagagatgtcgtgtttgatgaaagaaaaagatggaggtggaataatgtgacaagtgaagacgagaacaacccgggcatgtttgaagttagtcttgaggaattcggaaataatggcttaagagaagtagaagttgctacagagaatgaggtcgttgaagaagaaacagaagaagataatggagagaatgataataatgatggtttcgaagaaggagagagctatccaagtaatgaaacagagaatatggtcgatcaagtgcaagaacaaactcagcccgttttaagagtttcacaacgacatgtttctaaaccaaagtacttagaagactatattctgctggcggatgttgaaagtgagtatctcttgttagctataaatgaagaaccttggaattacaatgaggcaaaagagtctaaagaatggagagatgcttgtgaagaagaaatctcttcaatcgagaagaataaaacttggaaccttgttgagcttcctatcggagttaaaccaattgggctgaagtgggtttttaaaattaaacgtaactctgatggaagtataaacaagttcaaggcaagacttgtagcaaagggatatgttcagaggcatggtgtagactttgatgaggtctttgccccagtagctcgcattgaaacgattagattcatcatagcattagcagcctcaaacggatgggaagtacatcacctcgatgtgaaaactgcgtttctacacggggaattaaaagagaccgtttatgtcactcagccggaaggattcacagtcaaaggaagtgaaaacaagatctacaagttgaataaagcactctatgggctaagacaagcaccacgagcttggaataacaaactaaacaaaattcttaaagagttggattttgttaagtgctcaaaagaaccttcattgtatcgaaagcaagaaggagtgcattttctacttgtagccgtttatgttgacgacttactcgtcacaggctctaatcttagaatgatactcgagttcaagaaagggatggcgaccaaatttgagatgagtgacctcgggctactaacgtattatcttggtattgaagtcttgcagcatagtgatggtatcatcttaaaacaagagagatatgccgggaaaattatagaagaaaccaagatgaatgaatgcaacgcagtgcatataccaatggattcgggtttaaaattatctaaggcgcaagaagagaaagatattgatgcaacagaatatcgaagaatcattggatgcctacgttacttgctccatacgcgaccggatctttcatactctgttggtgtactttgcaggtatatgcaagagcccaaagaatctcatggtgcagcactcaagcaagtcttaagatatctaaagggaacgcaaggtcttgggttgtcattcactcgtggaactgaagcagaacttgtgggctatagcgatagcagccacaacgttgacgaagatgatggaagaagcacaacagggcacatcttctatctacatgaatgcccgatcacttggtgtacacaaaagcaagacacggtagctttgtcgtcttgcgaagcggagttcatggcagcaaccgaaggagcaaaacaagcaatatggcttcaagatcttttcagtgaagtcaccggagatacatgtaagaaagtgactcttcgaatcgacaacaaatctgcaatagcattggcaaagaacccggtatttcacggacgaagcaaacacatcaagaagaggtaccattttattcgcgaatgtgttgagaatgaacaagtggaggtagagcatgttcccggaggagaacaaagggcagacatacttacaaaggcacttggtaggatcaagttcaaggagatgagagagcttgttggaattaaaaatgtgacaaagagtgatttcaagcttaagggggaaaatgttgagataagcttgaaataaaacttgagataagttatttagtttaaaaggattatgttaaatctttgggagatatccaaagatatattctaggagttatctagtattaatccttatgtgtttatgttttacaagtctctataaatatgagtcccaaaatgtggttgaccatatgagttgagagagattaagagtttgtaagatcttaggttttgagtaagtttcctaagaaataaaagaagagtcttttataatcttgcatctctaagttaaagtcttaattctataaaacacataaggattaatactagataactcctagaatatatctttggatatctcccaaagatttaacataatccttttaaactaaataacttatatctcaagttttatttcaagcttatctcaacactccattcaagttaatggggagttagcaggatatttccgaagcgctcgaggtcttcgacaaggatgctccctctctccatatttgtttgttataagtatggatgtcctgtcgagaatgcttgataaggcagcaggggcgagagaatttggataccacccccggtgcaaaactcttggattaactcatttatgttttgcagatgatctcatgattcttaccgatggtaaaattcgctcggttgatggtatagtcaaggtgctgaactagtttgcagcaaaatcagggttaaaaatttgcatggaaaagacaacattgtatttggctggtgtctccgatcattcacgtcagttgatgtcaagtaggtactcttttggggtaggaaagctcccggtccgatatcttggcctacctctagttacaaaacggcttacaacatcagattattctcccttaatagaccaaattcgtcggcggataggaacgtggacttcacgttacctttcttttgcaggtcgtttgagtttaataaattctgttttgtggagtatcacaaacttttggatgaatgcttttaggctgcccagagagtgtattaatgaaattaatagaatcagctcagcttttttgtggtctggaccggagctaaatccaaagaaagcgaaagtctcttgggatgagatttgtaaaccaaagaaggaaggaggccttgggttacgatcattgcgagaagcgaatgaggttagtagtctgaaactgatttggcgtttgctatcttgtcaagattctttgtgggtgaaatggactaggatgaacctactcaagaaagaatcattctggtccattggtacgcactcaacgttagggtcttggattcggagaaggttgctaaaacacagagaagttgcaaaaagtttctgcaagatagaagtgaacaatggagtcaacacatctttctggtttgataactggtcggagaaaggtcccttaataaacctgactggagcccgaggagcgattgagatgggaatttctcgccatatgacactagctgaagcatggagtcgaagaagacggaggagacatcgagttgagattctaaatgagtttgaggagat

SEQ ID NO: 163069 - DNA, 3965 bp, Arabidopsis thaliana landsberg
atgaattccaaaattgaaagacctgaatccccctcttttgacgacgccggctctagtaatgacctctgcatccggccgaatgacatcgccggtccccactatcaatccacatgcactctccaatctcttaatcgattgggagagctctaacggattccagccgaagtaatgagggatttccagatgtcggagcctaccgaatcaccggaggagcaccgacctgggttcttttgcgtgtacgagatttacttcaaagggtgtggcttgacttttcctctccccgaagccctcgtgcgttacctatcggccctcgaaatcgccttaccccagctaacccccaacctcctccggactattctaggaattatcattattgcggctgaggccggatacgtcatcggggttcccaaactgaacgaacttctcagtgtgaggagtgcttcgaagaaagtcgggtacttctcgacttatctgaacgccaatagaaatctcatctcgcaccttccgaataaagactagaactggcatcacccgtggttcctagttaaaaagagccctgcctcgatcgggaacctcccggacttgctcccctggaaatggaccactaagcccggtagttattaggtcattcatatgaaattcattttatttcttgtcttatctgaccaacttctatttttcacttcgcagctttcatcgcacctacccttcctactgctgaattcggcgaattcttcaagattatcatcgaaggaaaaattctttggaactccttcactctcgaccggttcatagaagccaaccacaagcttaggatgatcccccctggacatctcctccagctgccactgcccccttctttatccaaagggacttctgctcgggccaacacagctcgacgcaagacaatgtccaagtcgattgtggaggcttgcgaagtgaacaaatcattcttccaatccacagtcgacaaaaaggaatatagcagaaccttgctagtcgacgatggcaatgccgaagggcaagatctgccggtgcttacagacccactcctcaacgtaaaggtcacagcggccggtcatcccacaaggagcgatcacctcgccgtgactcacctcggcccacttcccgatctggactctgcagcgagccaattgctgacctgattcggaagaagagagacagaccatcctgcagcagctcctcccccaaaagagacaagacgagggcccgaactgaccgctctcctcgaccgtcgtcgtcaccccgatctatgggtcctccgtctcccgtcgctgtatctcccttgtccggattaggaggggaaaaggcggagcgaagtactatccctcggcgggatgaaactgaggtccgagatgccggagctaaagctgttttggttcctcagtccaagtcgctcacgggttagaaatttcttcccatttttttttgttatcacattttttgccatttctgcttattgattcagcgtccttcgaccggtatgatcccttttttttttaaacaccgatggaaacgtaggggaacgtctttcgatgtttcaaaacccgaaaagacaccatccttccaactttcgataggtggcgtcctgcaatccgcgagcgattcctactccatgcccatcattcatctcgggttagttccttcatcccacaatgaaccttttaatctttgcttctttactttgtcgctaaccccttctcgttagtatctgatccaggcgaacagcaaactcaacgacatgattgagtactatgaaaggctactgcttgacagggaaaaagatgttatggcttggaaggacaagtcttcatcccttgaatccgatctccacacttcaaaggatgccaggctgaaattggaggatcagttggacaacctctccactgaactcatgaagtccaacggcgagctgcaggagcagtgccaaaggtacgacaagatccaagaagaactctcaacttcccgggacagactttcggaatccgaatccagtcccgacgagttgtccaaccaactatctgaattgcagcttaagtacaaagcggtggacaactatcgggatgctgagttggcgaagtcggcgttaaaggccaggaaagaggtgaaaggccgcgggatagaattgatccaaggggcaattgtcttcatccagactaagaaggttagagaggagctggaatctgatgtcaaggagtacgagagtaatctcctccttttggaccaactcatgaagatgatttttccgaagaacgagagagggacgagttgaaagtcgtcctggaagaaaagcgaaatcgtttagctgcccttccttcctcttcgttcaacccccagcaattcgaggagttcttcaccgaatcgcctcctttgagtgaatccggtttagactgggctggtaaatcccaactcttctccctttttcttttaaaaatcgatccacagtgaactactcttatattaatccgagataattgcctcaggtgtcagcggtcccgtggaacccgaagtgcctattgtctcggcatcagttccagaggcgataatcgcccgcctgaaattctccatccacgaactcgggagacggtggttattgaggatgatgatggttcagactccatgattcttggtgagcagcccgctactgacgagccgagtgagatttagacagctgctgcagatcctgagtcagttcgaaccgaacccaagatacctgagaacccgcagtggctgtgtccatttaatggggattttcccttaaactcgaaattctttatcgttgtttttctttttgaattactttatctgcctaagtaggctttaaacaaatactttgcctgaggaggcttttaaaccttttctttaagattatgattccgagaggctttccttgtgctaattttgagtatgaatttgcaaattccatctctttaaatagagtttttgtttaaccatgtggtcaagttacaggatttgtaggttgatcagactttccctaaaaatgcagacttgaatccgcgaactccccaactcgggtttagttagttcgattatttttgtgggcgtcgagctttactatttactctgcatttaatggcccacttatcttaaattcaacagttgttctttttgtccttggaaatctggaaaagtgtcacgcttctaaggcaataattgacttttcctcgattcccaaaaatggataaactcattcggacacaccacaattattaactttgtggttttgagtgaaaccctaaatcactataaataagagcataaactttctcaactctcgaaaaacatgatcgcagaaatttacttgaacaacacctatagaatgaaacgcgaaagagcctgcaccgtctgccccctcgaccccgggagtcccttgtttctgtccggcgatggcttcgagcccgccggtgtcctctttccaaacgcttgtttccacttcccttcgaaagataaaaaggaggcgtacgactttatggacaaggtaaatcctctctcgttctctttttcggaacgagttttactcgttttttaaccagttcttgttctaggtagacgacaagcaacaccgcctatgcgatgagaggcagcgtttgggcctcaagaggcaaacgctcaaggcccgaattgcccgcatggaaaggaaggtgagggccatggacaatgaccccttccagtgggagtggaggaactttgactgtatggcgaacatcccgcacatgctccggatgtacctccgtgctcgaggtcaagtttctggtcccttaaatgctctggtcgaagtgatcccgtatgacagcgaagaggacgacgacgaggaggaggagagcaacccctggaagcgtgtgaagaatgaacccaaggttgacgtcaagaacgagacgttcacctcgatccctgaaccggcagtgaaggagcctgttccctag

SEQ ID NO: 163070 - DNA, 1965 bp, Arabidopsis thaliana landsberg
cggaacaaaaataatacttactctatatctctcgttcactcttcctctaaaaaggtaactataccatttcatttgatttctccataagttatcgtcgtttggttcattgtttctttatctcaaatcatgtaatatatggattaagtttgcagattctaacttttggaagtagagatgaagcttttggagttgttcatagcttcatcgaaaccagttgtggagactttgttgataacatcagttggattttatttggctctcgacacagtcaatcttcttggtcatgatgctcgcaaacatttgaacaacgtccgttttttaactctcttctttaacaaataatctaaaagagttaacttaaatttctcttttgtttgtgtatagattgtcttctatgtgtttagtccttcgcttattggaagccgcttagctgatagtgttacatatgaaagcttggtcaaaatgtaagtcaatatcaaattttgcatcatctttaagctcacttgttataatgaaaatgaggatttgcattgcaggtggtttatgccggttaatgttctgctcacattcatgattggttcgttactcggctggattgttattgtcataactaagcctccttcacagcttcgtggtctcatcattagttgttgtgcttctggtacaaaccttgacatgattttagaatctttttgtctttctttgtatcgtatgttttgcttatgaatgtgatgatgaatgaaaccaaaaacagggaatttggggactatgcctctcattataatcccagccatttgcaaggagaaaggaggtccctttggagattctgagagttgcgagaaatacggaatgggttatgttacactgtccatgactgttagttcttcctctcttgtctctcttcaaggctttttttatcagtgtgtataaacatgacactaattggtatgtatcaggcgggaacggtttactcatggacttatatataaatcttatgcgtgtgctatcaaactctcccgttgaaacacacacacactctattgaatccaactatgatgacagctgcaaagtccaactaatttcttccaaggaagaagaaaaagaagaagacaaccatcaggtctcattaatcaacaactcttcatcatcatcatcagtgttattcattttggcagtgactttgtgtgtgtttgacaggttgggaggtgggaagaagtcaagcaaagagttgtttctctgtcaaagaaagtcaaccttgggtcaatatttgctccagcaactattgctgcagtttgtgtttcagtggcaccttttttatatacattcaagacattcacactagtgtatatctttcttatctcttcttcttctgttttctcagattatcgcgcttgtgattgggcttattactcctttaaggaacctaataatcggcaccgtagctcctttccgtgtgattcaagactcattaaccctattggggtaattgtagaatagtctcattatcttagaagtagctcaacaaatgattcatctctttgaaaaactcactttttctgtgtcttgtttcttttggctaaagagatggggccattcctgctatgaccctgattcttggaggaaacttacttaaaggaatgaggaggtcggaagtgaggagttcagaaatgaaaaactcctgcattatcggcgtcttggtagctcgttacattttgctacctgtaagcggtgttttactcgtgagaggagcatacaagttggatttagtaacctcagaacccttgtaccaattcgttcttcttcttcagtatgctgtcccaccagccatgaatctaggtgcatggcttgaaaccaactccttaaaatacagttacttctttcagataagatacatcactagtttcccttacttttcaggtacaaagacccaattattcggcgctggggagagtgaatgctctgtga

SEQ ID NO: 163071 - DNA, 1478 bp, Arabidopsis thaliana landsberg
atggttggcagaaagaagaaacaaaaaatatgtgacaaagtgtcacatgaggaagttaggataagccagttaccggaacctttgatatctgaaatactatttcacctttgtactaaggatgctgtcaaaacaagtgttttgtccacaatatggagacatctttggcaatttgctcttgaattggacttagtccgttacacatcttctaaagatggagacatctttgttaaaaggtttcttaattcccacatagagtcatcgatacgcaaagtacggttaagtttttaccgtcaagatagatgtgatatctcgtcatggattaatgttgcggctaggcgtaggattcagcatcttgatgttgaatatttttgatgtggtgagataccctcgtgtttatatacctgtgagacactggtacacttatgactctgtgaggtcaccttgtgtaatgctgactttgtttccttaccttgtctaaagatcatgcatttacgatatattaggtaccccaacaagatcacgttgcagaaacttatctcaggctctccacttctgaaagatttaaccatcctcagatcttcgaatgatgataagacaaatgttttacaagtgcgctctcgtactctaaagagagtctacatcgatgagtctaaagttgtgatttatgcacctctactccagtgtttgagggctaatgtctctttaccaaagaactttcagatcatcaatttgggttcctctgccaaactagatattggtttctataatagccatgcgacatacaataacacgattcctgacattctcagcgacatatccagggttagggagctagttattagtaatgatatttggaaggtatacacctcaaattttgtgctgatatgtatatatatgaatattgttctacaaaagtttctcaccataacattccctttttacttgtttacttctaatcttttaatactcgaaatcagaaccggtgcatcagtttcgttacctatccagcttggatgctaaattttctggaactgatatgaaaatattgccaacccttcttgaaagctgcccaaaactagaatctctcatattgataatgaatgactttaagcctctaatttatgcatattgtttgtgaaaatcttttatgtatatttctctatgcaatttgttttcttctgtttttgcagaaattggttaagtagtattgcattcgtggtaagaagaagaaagaaccaaaggtgatgttttctaaagtgcctcaatgtttggtatcatcgcacaagtttgtggaatggacacgtgcgctctcagggtatgcaggagaaatggagctactaagatacttcttgaagaattcaaaatttttgaagaaatttaggcttcatacttactctaccaaaaaagccaagtgtgccttccttcaaaaagtccttacgatgccaatatgctctagcacatgtcaaatccattgttct

SEQ ID NO: 163072 - DNA, 1221 bp, Arabidopsis thaliana landsberg
atggatgaggtgttgacccgcgaaatgaatgtcgcgtcgaaatcaagactactcggattgaagaggccaaatgggccgaaaggtggagtcaagaaggcccgaagtggattcaaattcaaacgttcggataattaattcgaagactagaaacggacgtgtttaagatataatgattgcgattaaataagaattaaatgtgttctttggatatatattgtgagtcaaaggtcatgtaaagacacacgcatatttttggtgcaaattagctatacattttcttttacaatactcatagttttctctataatcatctacttactttctagtatatttgacctcaagaataatccttctcactaaacaaataaatacttgagtgtgaatccgacatccacactcacctccagcttgttcttaattgtttgcttgagggtaagcaaagactaagtttgggggagttgataagtgtgtattttgcatgttttgagcattcatttgtcatcactttagcatcatatcatcactgttttatatcatttctcatcatttgtcatcactttgcatgtttaggatagttttgcatgcatgttgcatatttgtgttgttttaaggtaattcggagttgttgacgagctaattggaagaagcggacctgatcatgccaaaccactcgactacaaggtcgagtagacgacttccccacttcacaacaccactcgaccccttggtcgagtagctgccttcaccacttcacctcatcactcgacccccttgccaagtacccccacgagagtcactcgatcacttcactcgacccccatgtcgagtgtcttcacctcaaccaccttaccatcactcgatcacaccactctacctggaagtcgagtatcaccatcaccaccactcgactacatacgcgatgtcgagcttcagaatcttctccattccgcactcaaccagatactcgagcacaaggatgaaaagaagattccagcttatcactcgacctctcactcgaccacctgggtcgagtacagttcttaatccgtcccaatactgcgtcgttttgagtattagggtttcagaatattttgctataagtagcatgtactttacattttcgagaacaagtttttctctagttttattccgcagacactgtgttctagaccttttgtaatccggatttctctttatctattaagtattcagtattcagta

SEQ ID NO: 163073 - DNA, 1975 bp, Arabidopsis thaliana landsberg
agggtttcactctttttagtaaagctatttcatttgatttatcaatggagcaatccaaagtgtaatggaaaacttcctccagggtcaatgggttatccgatcattggagaaactattgagttcatgaagcctcatgacgctcttcagttttcaacattcatcaagaagagagtcctcaggttctttttttttttttatgcattcatttgtcatgtatatcttaatcactacttacttaggttacgttgtcttttttattggttggtaaataaatatagacatggaccagtttttaggacaagcttatttggaggaaaagttataatttcgactgatattggattgaacatggagatagcaaagacaaatcatattcctggtatgccgaagagcttagcgcggctatttgggtcaaacaacttgttcgtgaataaggatactcataaacatgcccgcagcttgacaaaccagtttttaggttcgcaagctttgaaattaaggatgattcaagacatcgatttcttggctcgcacacatctgaaggaaggagctaggaaaggcagccttgacgtcaaggaaacgacaagcaaggtaaaacaaaaagtcatccattttgatagtttttgtagctcataacaagagaactttccacttaataaatcatcttatcaaatacatatataatcaaacgttacagattttaattgaatgccttgcaaagaaagtaatgggcgagatggaaccagaggcagcaaaagaactcacactctgttggacattttttcagagtggctggtttagattctttctcaaccttcctgggacaggtgtctataaaatgatgaaggtgtgggttttctataacctaaatatagtatcatttatataagagtaggctttttgtgcaatacactgaggctgatatttcgtggcaggcaagaaagaggatgctgaagttactaaggaagacagtgttgacaaagagagcatcaggagaggagttaggggagttcttcaacatcatatttggagaaatggaaggagaaggagaaacgatgagcgtagagaatgcggtcgagtacatatataccttctttctggttgctaatgaaacaacaccaaggattcttgcggctacagtaaagtttataagcgaccaccctaaagtcaagcaagagttacaaagagaacatgaaggaattgttcggggtaaggctgagaaggaaggcggcctaacatgggaagactacaaatcaatgcatttcactcagatggttagtatctaccaaaatgatacatataaacaaaaagagaactcattccttattataaatgttgacatatataggttttaatacaaatatggttcaggttatcaatgagtcgcttagaatcataagcacagcaccaacagttcttagagtacttgaacatgacttccaagttggtgattatacaattccggctggttggatctttatgggttatccttatgtgcatttcaatccagagaagtatgatgaccctttagcttttaatccatggcgctggaaggtgattttaatttgatgttcatcttttattttatttttacttacactaatcaaattcttaggaatttaagcatgcatatattaaactaaaatttcagggaaaagacttgagcacgatcgtctccaagacttaccttccctttggctctggtactagactatgtgtgggagctgaattcgttaagttgcaaatggccatttttatccatcatttgtttagatacaggttcgttttttctcatttaatgactctacgattcaagccaagtttaactgcactcaaagtttttttttacttacgtttattacctatggtgtgaaggtggtcaatgaaggcagagactactttacttcgaagatttatacttgtgcttccacgtggatctgatgttcaaatctcataagacaccaaacactcaaac

SEQ ID NO: 163074 - DNA, 2946 bp, Arabidopsis thaliana landsberg
  unsure (1)..(2946): unsure at all n locations
atgtcgtgtgtcccaaaagaagaagaaggagaagatacccaaatcaaaaccgaactccacgaccacgctgctgataatcctgttcgttacgcctctcttgagagcgtttactccgtttcctcttcctcgtcttcattgtgttgcaagaccgccgctggttcccacaagaaggtcaatgccctcaagctcccaatgagcgatagttttgagttgcagcctcatcggcgaccggagattgttcacgtctattgtcgccgtaagaggaggaggcggcggcggagggagtctttccttgagttagcaatacttcagaatgagggagtggagagagatgatcggattgtgaaaattgaaagtgcggagcttgatgatgagaaggaggaggagaataagaagaagaagcagaagaaaaggaggattggtaatggcgagctcatgaaactgggcgtggattcgactactttaagcgtctctgctaccccgcctttacggggatgtcgaattaaagctgtgtgtagcggaaataaacaagatggatcttcccggagtaagaggaatactgtcaagaatcaggagaaggtagttacagcttctgctacagctaagaaatgggtcaggttaggattcaccaaccattaattctgctctgtgatcttagatataagttatttggttgaaatgtatatgccctgttgtgttgcacttgttagttatggcgttcacaatatagacgttttggtgataactggcacgctatttgttagttttctcttgtatgatggacgagttttggcatggcaggttgagttatgatggagtcgatcctaaacatttcattgggctgcaatgcaaggtaggctttgagctatagagttgttttctttagctatttcattctctgtttatgagatgggcttgttaactgttgattgttgtctaattgttaggttttttggccattggatgctgtttggtatcctggttctatcgtcggatataatgtagagacaaagcatcacattgtaagttatttctgtctagtgtatctgtcacatgtctttaattttggttttttggtgactgttagtaaaatttactacaggttaaatatggagatggagatggagaggaattagctcttcgtcgtgaaaagatcaagtttttaatttctcgtgacgacatggagttgctaaacatgaagtttggtactaatgatgtggtcgttgatggtcaagattatgatgaactggttatattggctgcttcttttgaggagtgccaagattttgagcctagagacatcatatgggccaaactaactggtgaatgctttaaaccgaaccgatttctgtattcttgtacacgtattttcttagcttttgttgaaaatatttaggcatataacctacctttatggtgtaagaaacatgatgctgttaggaagtatattagtcaccttctttctctttaatacctaattactggaatctgctgtagaatttcgtggtgcttagtaagcatgtattgcctagccgaataattttctgaagaaaactaattatgcatcttgaaaaccatactgctgtgtgttaaactttttcggacaggtcatgctatgtggccagcaattatcgtggatgagtctgttattgtaaagcggaaaggtctaaacaacaagatctctggaggaagatcagtcctcgtacagttttttggcacccatgattttgctaggtgagcagatcttcttaaagtctgtagagatctagttatactaccgaactgttgaaattaatgttacaaatcataatttcgaagtggaattgactatatttcctttggtcatatagaatacaagtcaaacaagcggtctcatttctaaaagggcttctctcacggtcccccctgaagtnnnnnnnnnnnnnnnnnnnnnnnnnnnnggaggaggcaaaaatgcaagtttctcttgcttttcactgacattctactttttttttatttcctaatatagtgaagttgttaacaaacagaccatttccttatcttaatctgaacaaaaacataattcctgtgttaaattgctgtaacttacctcatccaggtacgtaaaagaatataagcttccaggaaggatggatcaacttcaaaaagttgctgatactgattgttcggaaaggattaatagtggagaagaggacagctcaaactcgggtgatgattacacaaaagatggagaagtctggttgcggccaacagaacttggagattgcttgcatagaataggcgatctgcaaataattaatcttggtaatgtttgaaactaattagtatgttggatcatccttagttggaatggactctgctcattatggataggcgtatatcacttgtctttgtctgccaggaaggatcgtgacagactcagaatttttcaaggatagtaagcatacttggcctgaagggtatacagctacaagaaaattcatatcactaaaaggtaaattatttaccagtttttgtgctttctatattaatcaggcagttttgtgtcatatatgcgcgatttcttgctatgactttaagcagatcctaatgcatctgccatgtacaagatggaagtgcttagagatgccgagtcaaagactcgccctgttttcagagtgacgaccaatagcggtgagcaggctaggtttctaggtggaaagcttgtgtggatagaaagaatgttatagccatgtgtaaatatgatacttgatctttggacagttcaaaggggacactccatctgcttgctggaataaaatatataataggataaacaagactcagactgcttctgataatcctgatgctttgggtgaaggacttcatgaatctggtacagaaatgttaggcttcttcaacccagaagtcgaaaaacttatctaggtttgtcttctttgacac

SEQ ID NO: 163075 - DNA, 672 bp, Arabidopsis thaliana landsberg
atgtttaggataggtttgcatgcatgttgcatatttgtgttgatttcaggtgatttggagctgttgacgagctaactggaagaagcggacctgatcatgacaaaccactcgacctagagggcgagtaggagcttcaagatctcaagagaccactcgacccccaggtcttgtagaagacatcaccacttcacctcaccactcggccacgaggtcgagtgtcctcatctccatcacctgaccatcactcgaccacatcactcgaccctgaggtcgagtgtctttaccaccattacctgatcatcactcgaccccatcactctacctggaagtcgagtatcaccatcaccaccactcgactacacactcgatggcaagcttcagagtcttcttcattccgcactcaaccagacactcgagcacaaggaagaaaagaagactccagctattcactcgatccccactcgaccacatgggtcgagtatagttcttaatctgtcccaatactgcatcgttttaagtattagggttttggaatatttggctataagtagcatgtacttcacattttcgcagagaggaagttttttatctaattttattccgcagaccttgtgtgctagactttttgtaatccggatttctctttatctattcagtattcagtattcagta

SEQ ID NO: 163076 - DNA, 976 bp, Arabidopsis thaliana landsberg
  unsure (1)..(976): unsure at all n locations
ttttagtttaaaaaataaataaaaataaatgattaattaatttgtgtgcaaaacatttaaacatctagtatcaaagacggaagaagtatttaagttggagttgataaaccttatagacttccaaataccactacaagaaaacaagcgatttgcgaggacaatttgcgatggaaacaatccctcgcaaattgctacagatttgcgagacatttgcgagggagagaagacacgtcgcttttccgtcgcaaattttgcgagggataattccctcgcaatattgcgtgaaatttgcgaggaacttgcgaggacgaaaaaattcctcgcaaagtcattgcaaattgcgagggacttgcaagtacaaatattgttctgtgggaatttttgcgacgaaacttacannnnnnnnnnnnnnnnnnnnnggttaaaattatatgtaagtaatatttggaaattttgatatcttaatgacttatgttgaaatgataaacttaattaaaatctactttatgtaggttactaacggatgtgaaaatgaacttttactactttggttgtatgagatcgttcaagaaccaagatctaagatcacaaccgcaaaatcattcgtggtcgatgtcaatgcaaacaagacttatgcaaagttcaaaccatttatcctagcatcacaagctttctatcttacccgcgtgtgaggtcacggcgtgaagtgtggttatcggttattaaagttaactccaggggccgtatagtcggcctagttgatgatgttgtgatgcaacaagaaagcattagagaactttccattccagacataacaacagaagatgttatccacattgacctacaaaacagagagttagaagacatcatcacagacggttccgaagaagaaaaacaagaagacgaattcggcgaatctgatgaaaacgttgagtcagaaaatgattataatgattcagaaaatgaatcagaataa

SEQ ID NO: 163077 - DNA, 3909 bp, Arabidopsis thaliana landsberg
atggcgggaaactacaattatggcggtagtggcggtttctatcgagattggatgtacaagagattcgatgaagtgacggggaatttgtcagccgaatacgtcgcaggagttgaggaattcatgacattcgctaatagtcagcctatagtacagagttgtcgaggtaaatttcattgtccttgtagtgtatgcaagaatgaaaaacacatcatctcgggtagaagagttagtagtcatttgtttagtcaaggatttatgcctgatttttatgtttggtataagcatggagaagaaatgaatatggatatcggaactagttacatggataggacgtattttagtgagaatcatgaagaagtgggtaatgttgtagaagatccatatgtggatatggtgaacgatgcatttaattttaacgtggggtatgatgataacgtgggtcatgatgataactatcatcatgatggtagttatcagaatgtggaagagccggtccgtaaccattcaaataagttctacgacttgttagaaggtgcaaataatccattgtacgatggttgtcgtgaagggcagtcgcagttatcattagcatctcgactcatgcacaacaaagcggagtataatatgagtgaaaagttggtggactccgtttgcgagatgtttacagattttttaccagaaggaaaccaggctaccacttcacattaccagaccgagaagttgatgcgcaatttaggacttccatatcatacgattgatgtttgcaaaaacaattgtatgctattttggaaagaagacgaaaaagaagatcaatgtcgattttgtggcgcacaaagatggaagcctaaggacgaccgtcgaagaaccaaagtaccatatagtcgtatgtggtatctacctattgaagaccgattgaagagaatgtatcagagccacaagacagctacggcaatgcgatggcatgctgagcaccaatcaaaggagggagaaatgaatcatccttcagatgcagcggagtggagatatttccaagagttacatccccggtttgccgaagaaccccgtaacgtttatctcgggttgtgtactgatgggttcaatccatttgggatgtctcgtaatcattcgttatggcctgtgatcttgactccatataatttaccccctggtatgtgcatgaatacagagtacttatttcttaccattctcaattatggatcaaaatcatcctcgaggtagtcttgatgtgttcctccaacctcttattgaggagttaaaagagttgtggtctacttgatttaatgcgtacgatgtttcattaagtcagaattttaatctaaaagcagtactactctggacgattagggactttccggcgtatagcatgttatcaggatggactactcatggtaagttgtcttgtccagtttccatggaaagtacaaagtctatttatctacccaatggacggaagacatgctggtttgattgtcaccgtagatttcttcctcatggtcatccatcccgtaggaatagaaaagactttttgaaaggaagagatgcttctagcgagtatccaccggagtctttaacaggggagcaagtttattacgagctgttggctagtgtaaatccaacaaaacgaagcacgttggtgggaacggtcatgaaaagaagatgccaggctatggaaaggaacataattggcacaaggaaagcatcttgtgggagttgtcttactggaatgacctcaatcttcgacataatattgatgtgatgcatactgagaagaattttcttgacgacagcatgaacactctcatgagtgttaagtaaaaatcaaaagataatatcatgtcaagattagatattgaaatttgttgttctcgatcagacttacatattgatagtcagggtaaagctccatttccagcgtatgcattaaccgaagaagccaaaaagagtttattgtcatgtgtgaaacatgaggttaaattcccagatggttattcttcagatttggctacttgtgtagacatggagaatgaaaagttttcaagcatgaagagtcatgattgtcatgtttttatggagagaatactgccatttatctttgctggactccttgaccggaatgtccaccttgcattatcaggtacaataaatgttgtttaagttgcaacacttttttaaacctctgatttaacttaaacatatatatatatatatatatatatatatattttaagaatttgagcatttttccgggacttatgttcgagaactttgcagaaaagtcgcgttcaaattcttaagcagaacattgttttgatcatatgcaacttagagaagatcttcccaccatcattttttgatgttatggagcacctgcctatacatctcccctacgaagcagaattgggcggtcctgtccaatataggtggatgtatccttttgcgaggtttttaaaaaagttgaaaggaaaagcaaaaaataaaatatatgcggccggatcaattgttgagtcatatatcaatgacaagatttcttatttctcagagcactactttgccgataatatacaaacaaaatcaaggtacgtaactaataataattaattaaacatctgcaccaagcaagttttctatgcgcaaaaataaccatgaattacctcttttggatcaggttaacaagattcaatgaaggtgaagttcctgtatatcatgtccctggagtacctaatatatttatgcacgtcggccgtccaagtggtgaaatgcatgtagattggctttcagagaaagactagcaaagcgcacatgcatatgttttaagaaattgtgactattttaaaccatttgagaggtatttttaatcactcgttgtttgtaaattttcactaagatcactttgataaatttttcctcgtttgtaaatgtagtatgttcgaagattatctttctgccaaatatccatgcttgcccgaaaaagaactctacgcgagaagagcggaagaatatcatctatgggttaaagaatatgtaagtctacatcaattttggttcattcgaaaggtgatcatttaatatatactaattgatattgtttatctattatgtaggtaacatactggaacactacttctccatttcctacttgggttcaagagattgtgcaaggacctttgaacaaggttaaaacttggccaatgtatttcacaagaggatatttgtttcatacgcaaaatcacggtgctggacgaaagacatgtaactatggggtctgtgttaaaggtgaaaattacgctgattcatcagatgaagcggatttctacggtaccttaactgatattatagaactcgagtctgagggtatcgtcaatttgaggatcacactttttaagtgtaagtggtatgacccaaagatcgggagaggcactcgacgaagccatagtggcgttgtagacattctatctacgaggaaatacaataaatacgagccatttattcttggtacgtaattattcttaagtccaaaatacgtttcttttttaattattaataatctatctttgatatatgtatacaggatctcaagcagatcaagtttgttatattccgtatccatatacgaagaaaccaaagaacatttggctcaatgttctaaaagtcaatccgaggggaaacatttctggagaatatgaaaacaatgatccaactcttttgcaaacagaaaatgatgatgatgttttgctcactacaattgaagatcttgttcttgaaaccccggtagccaacttaaacccaataatccttgattacgatgtcggggatgctgaaccagaagacgaattccgatgtaatttatcgtcctcggacgaagatgaagtagaagatgaagatgtataa

SEQ ID NO: 163078 - DNA, 3853 bp, Arabidopsis thaliana landsberg
atggctactcacgctgaagaaatcgttctcgtcaacaccaacatcctcaacgtgaacatgagtaacgttaccaaactcaccagcactaactacctcatgtggagccgccaggttcatgcgctcttcgatggctatgaactcgccggttttctcgatggctctacacccatgccgcctgcaaccattggcacagatgcggttcctcgtgtcaatcccgactacactcgctggagaagacaagacaagctcatctacagtgcaatccttggagccatctctatgtccgtacaacctgcggtgtctcgagccactacagcggctcagatctgggagacacttcgcaagatctatgcgaatccaagctatggtcatgtcactcaactccgtacgcagctgaagcaatggacgaagggtgccaaaaccatcgatgactatatgcaaggattcatcactagattcgatcaacttgcgcttcttggaaaacctatggaccatgacgagcaagtagaacgtgtgctggaaaatctgcctgatgattacaaaccagtgatagatcaaattgccgccaaagataccccaccgtctctcacagagatccatgagaggctgataaatcaagagagcaaacttcttgctttgaactcggcagaggtcgtaccaatcactgccaatgtcgttactcaccgcaacaccaacaccaaccgtaatcagaacaatcgtggagacaaccgcaactacaacaacaacaacaatcgctcaaactcttggcagccatcgtcttctggctctcgatccgataatcgccagcccaaaccctacttgggccgatgccaaatatgtagcgtgcaaggacacagtgccaaacgctgccctcaacttcatcaattccaatcaaccaccaatcaacagcaatcgacttctccgttcactccatggcagccccgcgccaatctcgctgtcaactctccatacaatgccaacaactggcttcttgacagcggagcaacccaccatatcacgtcggacttcaacaatctgtctttccatcaaccttacaccggtggtgatgatgttatgattgccgatggatccacaattcccataacacacactggttctgcctctctacctactagttctcgctcactagatcttaacaaagttctatatgttccaaatatacccaaaactttaatctctgtgaaccgattgtgtaatactaatggtgtgtcggtggaattctttcctgctcattttcaggtgaaggatctcagcacgggggtccagttactccaaggcaaaactaagaatgagctatatgagtggccggttaatcatcacgccatcaccgctttctccgcatcaccatcaccaaaaaccgacctctcatcttggcattatagacttgggcatcctactttatctactctcaaaaccattgtttccgagttttctttacctctttcaaattcgtttcacaaacaattgtcatgttccgattgtttgatcaataagagtcacaaattgccttttcacttaaacacaatcacttccactcaacctcttgaatatctctacacagacgtgtggacgtctccggttacgtctattgatcattttaaatattatttggtgattgttgatcatttcacgagatatacatggttgtatccattgaaacaaaaatctcaagtcaaagaggtgtttatagcgttcaaggcacttgtggaaaaccggttccagacccgcgtgcgcatcttatactctgacaatggtggcgaatttattgcattgcggtcttatttggcggtacatggcatctctcatctcaccacaccaccacatacaccggaacataatggtattgctgagaggaagcatcgtcatatcgttgagacgggactcactctccttactcatgcctctgtaccaaagtcatattggccatatgcgttcgctactgcggagtatttaatcaatcgaatgccaaccgagtcataaacggggtgtctccttatgccaaactatttaagcaatctccaaattacttgaagcttcgggtttttggatgtgtatgttttccatggctacgaccgtaccgggctaacaagttgcaagagcgatccacgccgtgtgtgttcgtcgggtattcactaacgcaaagtgcctacttgtgcttggaaatacagagtggtcggctctacacttctagacatgtgcaatttattgaaacgagttttccttttagctcgccggtgttgccgtcatccaccgttgttgctgaatcgccaacctcgcctggtcaacctccggtgaccgtgcccactcaaatagctcattcttctctgcctccgtgctcggttcttcaccctccgtcgccagctcaaccatcatcagtgtcacccaataacgcatcaccgtcgttgtcgccaatcgctccgtcgtcatcaccacacagctcgtcgtcgacgtctccacctgtgccacaattctcatctcctccaaattcagaacgggcctcattcaacaagggcccaacaacatcaactccaagcccaaacaaaagcccaagtcaaccttcctctacaaaccaaagcccaatccacacaagcccaaatccaaatatcacaccaactcaaacacgttcctcctcacacaacgacacgtcctcatcacaaactacaacctccggtgaatcacctcctccaccaatcattccaaacttacctccaccattacaaaatgaccatcccatgagaacaagagctaaaaaccaaatcacaaaacccaaaaccaaattgagtctatcagaattcagaattctcttgctgatacatcgttgtttatatacaagagcgctaatgcatttctttatgtgttagtctacgttgatgatatcataatcaccggtgatgcgtccttgataaagggattcaatgcttctcttgcagctcggttctctctcaaagaccttggcgaattgagttatttcctcggtatcgaagcaacacgcacaaagagagggttacacttgatgcaacgcaaatatatcatggatcttctcgccaagacgcacatgctcgatgctaagccaatttccacaccaatggctgcgacacccaagctttctctattctccgggacggctcttccggatgctaaagaatacagaatggtcattggcagtcttcagtatttatcttttactcggccggatattgcatttgcggtgaatcgtttgtctcaattcatgcacaaaccaacagatgaacattggcgcgctgctaagagagtattgcgatatcttcttggcacaacatcacatggtatctttcttcgggccgatgttccacttactgttcatgctttttcggatgcggattgggccggtgacataggtgattgcttatcgacgaatgcctatattgtttactttggtggcagcccgatatcttggacatccaaaaagcagaagagtgtttctcgttcctcaacagaagcagagtaccgtgcggttgctaacactgcctcggagttgaaatggatctgctcattgttgtccgaaatgggtattacgttatcacgggcacccgttatttactgcgataacatgggcgctacatatctctgtgccaacccggtattccactcgcgaatgaaacatgttgctctagactatcacttcgttcggggtcacatacagtccggcgcacttcgggttacacatgtctctaccaatgatcagttagcagatgctctcacaaaaccacttcatcgtccaaggtttcaagaaatcaattccaagattggagtcaaggaactgcctccatcttgagggggtgtgtaaaggaga

SEQ ID NO: 163079 - DNA, 7350 bp, Arabidopsis thaliana landsberg
  unsure (1)..(7350): unsure at all n locations
atggctgggaataaagctaacgacgaagtcccgaggaagcagcatggtccagggaaggagaagcgtgtattaagagtttccccgcggagaaaacgctctgcgacaaaggcaacggaggaactgggttagaatctctaatttaccgtttgttgtctttgggtgtatgagaattgtaaagcttgtttgattaaagtgttagaatttgtcggaatttagcatatctttaggatgaaaaattgagaagtagaattggaaatctctgtttccgccaaaaatatgattatgagttataatctggaaaatgtctgtgtacgtacactacttttgtttgctcaacagtatatgacttttaattgcaggtagtccaagtgttgctccgactgaagatcttacagttgaagatttaccaccaagactctttgctctagaccggtacccttccgannnnnnnnnnnnnnnnnnnnnnaaaccggagtacatttctgacatagcaaaagtactaaaggggaaaccagagatgcagtttcttctcgattctccatttgggaaactttttaaaatacccaaaaacaaggcatctttcaatgctaagcttgtccttggactaatatgccgtcagttagtgacaaagaaggtgaatgagatgtggattgtattcggcggtcatccaatcagatttggattaagagaatttagtatcttaactgggctggaatgtgggaagtatcccaagaagaaagacgttgatgatgttatcagtgtgaaacctgagtgtgagagtgtttggaagactctgtttgatgagaggtttggggacacggttccaacaattgctgatttggtgagctggctgcaggaggaggaaagcatggaggggtggaagcaactggcactatctcttattattttggttgacggtgtggtagcggcccacagtaaccccaacaggcctacttcgaagactgtcgagatgactaagaacctggagtttttctgcaaatacccatggggaagggtgtcctttacccgtactttggggaggatagcaaatttccaaactccttacgatgctcagaaactaataaggggtatacttgtagggtcttatgcactccatggtttcccattagctctccagcttttagctttcgaaacaatcccatcaattgctaagctaggacctgatgatgtacctaacaggacatttgctgagaggtctatccatcgtcttgcctctctgcgagcaatccggacatctcgcattttggagtgtgaggctgctgatgaggtgtgttaaattgtgtatgtacgtacataataagtaaatatacattatctatggttaacatacttatttgtgtaggttgaggtcaactatattgtgaaaccagctgataatgtttgtcctccatctctttcatgggatgatgaagttgatgatccaagggttgattacattgaggcactgttgatagatgggcaccagtggcaggaggatgaatgggttggaggctatgctagagtaccaaagcagtcgcgcccaccacaactagaagacacaggtaagtataagtataaatgtttttacaaatttttttggtattgcacctagaagaaaaccaattaatagcagcaactggtctattgtagatgttaagaggaaacgaaatgcaccgggcccgagccctaaagaacctgctatgaaaaaacagaaatctgaaatggactgtgataaagaagagactgctgaggattgttttggagagcctgtgcctgagaggtttattgttgaaatgaggaggtctttgaaggagctggaagaccaaatgtatcaaatgcatgaagatatgaaagactttgtccgtgaccagatacgtgctgcccttgatccaaaaggcaaaaggccagaacaaaccataccttcccatgattcgcgggaaccacctacttctatggataaggcaccggttactgcgaagaagccatcgagaaggatgtctacaaaaggaagcactggaacgagaaagtcttcaaggctgactcgtgtttctcatgatgtggacactcctgcactttctgttggctgtaattccaaagaggaagatttggatgtccctggagtacataccactgctttcggcggaagaagaaaaccttcaaagccgaagaaaaatgtttcttttgttgttgacactattgaggaacctgattccaataaggaagatatgcaaggattcattgatgaacaggtaagtcatgtacgtacattgctaaatattttataatccatatgtataactgtactgtctgcttcggtacaggatggcgttaataatgaaagtgattttactgcaaatgatggattgaattcttctgccgctgaagaagagatattagacactggatttttaatagttccttatgctggatccacacaatcccatatggtatgtcgtctactaatactcttaacaatctgtttaaatggtgtacgtacatattcgcttaagaagttagttaaactatgtttcaggatagaggaaatgttgttgttggtaagactgtcttcttaggttcaatgtctgggactgtctttgtaacacaggaagagaggcctgtggaagaagctactattgacaccgagatggaagaagttccatctaatgtgtctgcaagagtttcagaggtagatcttctggtaatcgttatatacagatttccatgactatatgcataactattacattaatttcttcacttatctaacgcttaactctatggtagcctatgtttcaggataatggaccaaaggatgttgctgaacctggcttagttggtacccatacaggggccgatgaaatagctgatgctgacatagagatggtagacaatccatcaggtttaccttcaacatctgcacaggtatgtgttagtcacttgttctttttccatatgtgtacgcccataagactttgcaaattatttttgtttcaggaagaagcaagagatgccagtgcatcgactgaagctaatggcagcgagtcagaagaaacttatgagccttctgatggagacacagctcacgtacctgccacaagtgtacgtacatttttgtcactatgttctgtgtacatatatattgtttcatacattactaaaaagtttctttccgatgctaaattctacaggttgaggcggcaggagaatccaaattagtgacagtgatggaagttgaaatacctgagaagacccacagtgatcccccgtcaccatttcaagtagttaacaatgtaagctaactcttgcaacaaataaaatgtactatttactgttcaaatgtataaaatttatattatgcaggtcatacgggagttggataccaaagccgttggtgatttagctgcagccactgatttggaggtaacaatttgtgtgtttcaattcctattttcggaatagcatacataggattatatgtgtacattatatatacttgtgtacgttaacttgcacaggtagtcatggaagagccgtgtattgtcgaggggtctgtagaaactgaggatcctaacccagggtcagatgaagcagacaagaccgatattcctaaaaataatgtatgtacctattttaaccatagaaaaacgtatgaaactgttgttgacaatcatatttgttaacaggatgaatcagacaatgctgctgctgtcgaagcaaaagaagaaaaaaaatcgtccccaaaggtcccaaagaaagtgaagaaacaacttgtctatgaacaggatgatgcccatcctcatggttttaaggcaaaaacagtattggtgcccgatgtaccagctcaacagatagaggttgttatcagggctggaaatgtctcatacaaccccctggacatggttgacctttcaaaagtagaggaattcagcaatatcattaaaggaccctctgtgtaagtacattatagtaaaatggattatttaatatctcaatcatcatttttaaggttgttatcaaatatttttctggattttacaggattcacactcttttcgggtttcgaaaagtgcccaacgacttttttgcgaaccttctaacacctggtgaatgggtcgaaagtacggtacgttgcatttatatacgtacattccttgttataaattgtacatagatgattaaatttttcgtggaagtgtacgtacactgatatattttttgaacatttcagcatttagaaatgatggcaatgttgatgtggcacaagaacggggaacagatgatagcaaacagatgtattgtattggacatgatgctgacgcatcttcttaccaagcgggtgggcgacttcaagaagtgtattaataagaacgggttcaaatggggtaaattactgtccgacattgctaatggagttcacataaaccgtgaacccaatatgaagtggatgaaggatgtcgatgttgtgtatgctccgatgaactggaagagtgaacattgggttgctttgggaatcaaccttaatgaacggctaataactgtgtatgacgctttaatatcgcacacgcgggagtcggctgtgaaggcgagaatgactcctatttgcgaaatgatgccgtacttagtcagagcgatgtgccaggatgtattgatttctccgtactcagttgaaccttttgagtatgtgcgttgtcctaccgttgctcaaaacccaactacaggagattgcgggccatacacgatgaagttcctggagttgcttgcgtttggacaccctttttcggatctgataaccattcgagaagcagatatggtcttctaccgtcagaaatactccattgacatctacgagcacggcaagcgggaggccggtactgtgcacttggtttaatcgtccaagaacaatattctggttctttgcaaccaattattatgaacaaacctgacttatatatatgattgcaactacatttaatttggagattgtcagaagttaatttattgtcctctatcatattttcgtacacatcgttcacttataattacataatgtaaatgtgtacgtacatatctatatgtctcgtacactgcatattaactttataacataactcaagtgataaattgatttgacagccaacgcttaccaacacaagtatgacattcatttcaaccgtaattgccccaaccaaattcacagtagtggttattaaagtgaagaaattactgacgacctctgactatctcatttcaaacatggttaacccgactcttcaagacgatttactctcgaagatagctaagaacctggctgaccaatgctggtccgaccttggtccattggtacgagccggcactcgtggaagagacattgtctaccgtccggatgtcctcaaagatgccaatattctcaccttgtgtgactcgcccgatgacttccaagctggagggggccacaatccctccggatccgctgatgaaggccgacatcgaacatttttcttaaggtgttttgcagctaataatcccacggccgtgtattacgaaggtattcgtgttctaacgcatgaacgaaacatcaatggagccatcaggctcttacagcgtcatgctccagtacgagcaaatgcaacacttgcatgcgccattgtattcatatgtgctgggtatgattatatgggcggcttgtttctacagctcttcacccgcaaccattatccattggactcggttgccactcgagttttgggtgatgagttcatcgaggaaataaagaagtttgaccctccatacagcaatacatatggtcctacgttctcttatcctaccagccatggtattaaaactccagattgcgccatgctttggtacattgtatctggaccgttcaagaacgtgtgtaactgttgttacctctagtggtgtgctaggcgagttagccaaatgctctggtcatataaatctactagttatttgaagttgttatttaatgttatcgtctaagttatgttcctagttcttctaatgccgttatgtttctatttcgttttatcctctatgcgtgaagttgttcaagtttttgtaatgcttctataaagttatgtttcaatttgtgcttaatctctggtttacaaggtttctcggtttaagggtttattcggatgtaagcaataaatttgaagtttcgtaatccatacttctttctgtacttacattataactttaaagttactataaatgtaggaataaatatgattggattgacgcaaaagacagtattgtgatagacgtgaccaggcataataaatacactccaattcggcgtataggttatatagacgtacacgtgttactaatgacgtacatgtaagtaatgagtcgacgagttatcttgggtttacattgaaaattacaaattttaatatagacttacacgtgtaaatctgaacgtacataaaccaataaactcgaaaattgtaatttgaagtttcggttttaatcggaaatagtttatagtttattattttcatgtaaacacgagttaatatccaatattaataccacctacaatatgtaagtgggacgtcaaacatttaattagttgtctcctcgccattaggtctatataacatgtactccgagacaagtcatcttctccacacttttcattgctcttactacgccatatataacctaaactcacaaataaatccctcagtctcggcaatggacgtccccacacccccaccggcggaaatttacctgaccattcagctacctaacccactcaacatcctcgtcaactacttacccgtttccgtaactcccattgaaacactcatagttctcgttagcacgctggagccgaccgctatcaacatggatgagtttataacgtggcctgatttcgtgttgccggaaacacctttccgaacatatttcaccctcctgcttgaacgtggagcaaggccggcgatttaccttgaaggggttcgtttagcttgcaatttcgttacagttgctcatggtttaaccatgttgagttctatctcgcccatcgacgcttacgcatgtttctctcatggtctgttcctaacggtaactggcaacggacgggagtttgaacccgtgaacgcgactttctgggatttagtgccatcatttgaagatgcaaacacagtgggggagttagttatgtatcacataagtcgattgtatgctcaaggacctcggatgtggaatctatcatggaggttcatgatttcaccagactgcttgggtcattgcagctacggagcttgctgccgcaattatttcttctactggtatgctagggagttgtgcatattttat

SEQ ID NO: 163080 - DNA, 4560 bp, Arabidopsis thaliana landsberg
atggtagacgtcggagtgaaggggcggccaccaggggagcctcctgatcgtcaggggacttgggctagtcgggtagcaggaagtagcttgggaggatttccaaacccggaggaaattttggacgatgcttttgtaagggagagggtgcatacagagtttcctgatggggaggatggagagcccgtcataacaataggtgctgaagtgttggaggtcatgaatggtttgtggaagaggtgtatgatcataaagttgctagggaggaatgtttcagttgcggtgatgaataagaagttgcgagagatgtggaaaccaatgggggcgatgtgtgttatggatcttccccgtcacttcttcttagttcgctttgaacgggaagaggagttcttggcggctttaactgggggaccttggagggtttttgggagttgtctcttgacgcagacctggtcaccggagttcgacccccttaaagatgaaatttcaactacaccagtctggatttgcttggcgaacttaccggtgacgttctatcacaagtcgctcttaatggcgataacagagagtttggggcgtccgttgaaggtagacttgacgacgacacagtgtgaacgggggaggtttgctcgcgtgtgcgttgaagtgaacttgaagaagcctttaaaaggcacattgttggtgaataggaaccggtactttgtatcttatgaggggttacaaatgatctgttcgaagtgtgggttgtatgggcattgggtacataattgtcctcagttagcccacgaaaaggcagttagtgtaacactgtcaagtgtgcctggggagcagagtgggcgggtgcagtcagaggacgggtttacacaggtgcggagagctggccggagaccaacgccggcgggaaatcacggtggatatcatggacctagggttggtgaagttcaggaaaggaatcttcgggagattctaatcaacaaggattgtgaaaatatccctgtcactaacaaatttggaagtttgggaatggaggatattttgcctgattcagtggaatcaacagatctgatggaggaaaataaggaaaatacgagtcaacctaatcacacaattaaggggaagagtgtggcgcaaagggtggaaaggaataatggagggattgctagtaaagatcgtgtgggctttaagggattcggtcaggagaaatcaattggggtttcgaaggcccacgacaagaatgggccgaaagttcatgggcctaaaatgaaaaataaacaatttaggcccgttagaggtttagtttttggccagaggatagaagatatggtgctgttagagtcgggtaagaggatgaggatggagagcgaaagcgttgggcgacctgctgggtttatttcgaatgcgggaaagaaaaatggagccgccgagacacttgtaccgagtcgggtggatggcggtgttcagatcaggccggagtcatcgtcggcggaggctccagagcagagggatatggttatgcggcatagttcaccggaaggagaggtggtgagcttagtcgaataacagaaggcccctgtagttttggtgtgcgttaccttaacaacaatatcaatggattgtttattctggaattgccggggggcgaataaacccaactttagaagatcaattagatacattttgatgaaatttcatacggctgtacttgcaatttttgagacccacgcgggtggagattgggccgaaagaatttgtcgtggtctgggttttgataattcatttcaggttgatgcggtgggtcagagtggagggctttggatgctgtggaggtcgggcgtcggagatgtgacgatagtggagtcgtcggatcagttcatccacgcaaaatttgtgaatgggctagagcgaattaatataattgctgtgtatgcagttccatcggctagcaggagaagtggtctttggagtcagctgtcatcagtaattaagaaagttgtagatagtgaggagccactgataatcggaggggattttaacaccattattcgtcttgacgagagaactggtgggaatgggagattgtctgtggattctcttgcttttggggattggattaatgagaattcactgattgatatggggttcaaaggcaataaatttacttggaagcgtggctgtgtggagagtaatttcattgcgaaaagactggaccgtatcttctgttgtgcacacgtgcgtttgaagtggcaagaggcaacggtctcccatctgccatttctctcatcggatcatgttcctttgtttgttcaacttagtcctgaggcgaagagggacccaagtaggagaccattcaggtttgaagcagcgttgcttaaacactctgggtttcgtgagctgttgtagaactcgtggaatcagaacaggtcgactcctgaagcgttgtatgggttgagactcaaactgaaaaaatggaacaaggaagtttttggtgtccttcaagtgcgtaaggagaagctagtgaatgacattaaagcaattcaggacttgctagacagaacgcagacggatgagctgttatctaaggaggctgctttgattaaagagtttgatgaggtactggaacaggaggagattatctggtttcagaagtcgcgtgagaaatggatagagttgggtgataggaatacaacgtactttcacacttcaacgattatccgcagaagaaggaatagaattgagatgctaaagaatggtgatgagatctgggtaactgattcgcaggagttggaaacaatggctgtggagtattataaaacattgtattctatgaaggatgtggagagctgtgtggacacgctagacccagtaggattcgctgtgttaactgccggggaactagcagacctgaataaaccattttcatcgatggaggtggagaactcaatacgcagcatgggtaagttcaaggccccaggaccagatggcttccaaccagtcttctatcaagagtgttgggatgtggtaggcgcctcggtgacccagtttgtgttgaattgctttgcttctggtcagctacccgccggtttaaatgatgcacttctggttctgattgctaaggtcaataaaccggagagaatgtcgcagtttcgtcccatcagcttatgtaacgtgttgtttaagacgcttacaaaaatcatggtgataaggttgaaaaatgttatgcctaaattgattggaccagcacaatctagtttcattccagggaggttaagtacagataacatcgtggttgtacaagaggctgttcattcgatgaaacggaaacaagggaagaagggttggatgctgttaaaattggatttagagaaggcatatgatcgcatccgatgggactttttggaggatacccttgtagcggcacgtttaccagcacaatgggttacatggattatgcagtgtgttacaagctcttcgatgaatctcttgtggaatggagagcttacataatcgtttaaaccgctgagaggcttgagacagggggatccgctatcaccttacctgtttgtgatgtgcctcgagagactatgtcaccaaattgatagagctgtgggagctaaaaagtggaaaccgattagcctgtcgtgtgggggacctaaattatcacatatttgttttgctgatgacttgatactctttgcagaagcatcagtggctcagatccgggtaattcgaggggtgttggagaacttttgtaaggcgtcggggcagagggtgagccttgaaaaatctaaaatctatttctctaagaatgttcaccgggatctagagaagcttataagtgttgagagtggtattaagtcaacaaaagatttggggaagtacctaggcatgccggtgctacagaatcggattaataaagatacctttggggaagtaattgaaagagtttcttcacgactcttgggatggaaggtacggattttgagtatggcgggcagactaacactcacaaaagctgtaatcttgtcgattcctgttcactctatgagcaccatatctttacctaagagtttgctagatgagctggacaaaatatcaaggtcgtttctatgggggagtactgtagaaaaaaagagacagcatttgctttcgtggaatagaatctgtcgtccaaagagtgaaggaggtttggggatccggtcagcaagggagatgaataaagcccttctggctaaattaggctggaggcttttgaaggataaatcaagtctttgggcccagcttcttcggagtaagtataaagttacagaggttgacgatcctagatgggctgtggtgaaaggtcattggtcatctacatggaggagtatctgtgtgggtatgagagaagttgtgatacccgctttaagttgggtgattggtgatggcaagaaaacaaagttctggaaggataagtggttaatgtctatggcgctgttaagagtgtgtgacagctcccttaccagcaggtgcagaagagttgcgggtttgtgatctttgggaaattggatttgggttgaggttgga

SEQ ID NO: 163081 - DNA, 1286 bp, Arabidopsis thaliana landsberg
atgtttttatctttcattgtttcatgtgtttggaggtttactcgcgacaggggatcaaagttggttagaaagatcactcggatttttacacaaaaatttaatgctccctactataactggtcatgtgtgccattggataaaagagagaggttatttttctagagtttgcggtaagctgtcatgcatctctcttactttcttaactttccggcttaatcttttgaatttcactaactcaagctacaatgttttgtagaaactcacagttggatcccttaataacaggcactgtgcagtattacttcaatgaggtctgtaaacggcgcttgaaagacatggttagcaccgcgaggagaactagagagcagcctccatggattggtgaaactctgtgggctgttatgtgcgcttactgggacaccgaaccaacacaaaaacagagtcggacctattccaaagctcgtctctctgaccgtaacggtctcggtcctcacatccacttctctgggccaaagtcttttcaggaaatccaagacgaattggtaagttcttctgttacctctttcagttacctcacatgtatgtttttgaatatttgagctgtgttggtttcattgcaggaggagaaattgggaagaatggtcactattggtgaggtgtttgtagatactcatactaagtcggatggtacgtatgttgatcggaaggcggagatgattgctcaaacttatgagcaaaatcgtgaaagataggttgtccgaactagaggcagctgcttctgctgtctctgatggcttttcacgatctcgggatctcacaatagaggagtatacagtcatctctctcgaggtaagatgttgcagtctaagtcctagtctttgagtttatatattctatcactaatatcttcttctctatttcttttcagtccatagaaagtgattcaagaggcaatcattatggacttggaagtctgaaagacactttaggcagtgccaaccgcaagcaccctggagactcacccatcctttcaagctgtagaacggctgcaggaagcgcaatgcaaaattgaagagcaggctgcatataatgagaagcgagatgctgagattgctgctcgtgaagctgagtaagcccgagttgcggctgagcaaaaggactagctcgagcacttgtctttagtcgagagatatctgcgagaaacagatccgcaattcctaaacttcatgaccactcactcttctacatcgacaaagcctctagcagaaactcctccacataatgat

SEQ ID NO: 163082 - DNA, 5026 bp, Arabidopsis thaliana landsberg
  unsure (1)..(5026): unsure at all n locations
tgaccagtttacgttcaagtattctggtgagaaattcctcgtgagagatcaagaggccgccagccatctttggcgcaacttgatgctccccgggacgaaggatttccctaatcctgacgatctggttctaaaagagggatatcagaagtttgccagatcatcacttgaggtacgcgctagttacatgtcttcctgtggcttagtatcctagtatttgggctttaaacatggctctttttccagaccgccgccctggctaacgatctgatcgcgacannnnnnnnnnnnnnnnnnnnnnagctcgccgacagagaggccttcgataatctgaagaagtgcgcagaccaggccaaagccatctatgccaaagacatgaaggaaatggcttcattgagagatgctgccgagattcataaagcggagatgagctcgttgaacgacgaggtcaagagtctcaatagtcgagaagctgatcttcagaaagagttcagcgatcttcaggtcgcattggttgctgtaaaagagcacggggagagggagtgcaacaggttgcggaatgaccgagctgctaaagtcgcccgtactacaaagaaagcccaagctcgtcttgatagagtgaaggcttatctcaaggagcaagaggacctcgtcgggccaaaggtggatgctgagaatcaagccagaggcgctgaggagatagtgggcatccttatgcagagaggtgcgaagattgcggcatctgaactcagcggccttaaggagttaaccaaaagggcgaccgacgaagttaatgccttgaacgttatcgagctcggggacgatgatctgaacatgtccccagatcagctcggtttttcgaggcaaacctcccaagttgctccagtggcggaccagcacggctcaaatgtcgacctcgttagcggaagtgatattcgacgtgtaagcgttgaagaaacgaaccagacgacctgaataggtcgtctttgtaatctattttgannnnnnnnnnnnnnnnncaattttcggggcgatctcagaactcttatttaaccgtggacccacttttggggcggtttttaattttaatctctattttcaatgatttccagtttttcttatttcattcgaaattgataagggaaaattgtcattttttctctgttttcaatttatgaactttgtcatttcttggaaaagaaaaataggaacgttcaacctgtgattaagtaaattcccattttcccagttttggaaaaatgaagtttttaccctttctcgggaaaggaaagcgagaatttccagatcacatttaagcaaattcccaatttgacttctgtgttcgaccctataaatacttctttagggattaccaattgtttcaacggtctttcttcttctttgattgcaagatggagagtgccggatcttccttttctgttagtaaaaataatccaaccttttcaaatgccgaggcgatagaacatgggatgccattcttcaacaaccttcgagttccctggactcttttgtttcaggcgagctcggaggcaagacgtgaagcagaggggtttctatcatgtgtcgagtcaaggcataaggagtaccgcgagatgctgagctattatgacaaacgaaagtccgacatcgcccaatagatggagttccatccacgccattggattaagaatggttttcaaatcttggctcccatgccggatgtcctattgtcatactgcaatgattgtgcccaagatgccgttgtcgcctcgaaggagaagaatcccacaattattgctgatggagacttcattcccagaccgcttcctttgttctatcttggatcggctgcttccgacgccgagaccaccgtgtgtcagaacttcattaaccaggtgagaacttcgcaagtttaattattttgcgtgcgatcttcgagatcggcttttgatgacttgttaaagatcttaaagcaaactccgtattgagaatgcaaactttaattttattaagtattatagttgcatccttgagaatgactgcctacgtacccggtgaagggatcaagccattcattgttcgtattacataaatgagattggaagggcgatctgcatatatatctatatatataaatatatattttttttttgttctaaatctagttgtagtacctcttaaagtggactgcgttccatggattttctacttcttccagcttcatggtcatcagcagatagactcccaagtgaagtatgataagtgtgtattttcaatgttttgagcatccatttgtcatcactttagcatcatatcatggctgttggggccatttctaatcatttttcatcactttgcatgtctaggatagttttgcatgcatgttgcatatttgtgttgttttcaggtgattcggagctggtgacgagctaattggaagaagcggacctgatcatgtcaaaccactcgacccctaggtcgagtagacgctttaggacctcaacagaccactcgacccccttgtcttcacctccaccacctgaccatcactcgatcacgccactctacctggaagtcgagtatcaccatcaccaccacttgactacatactcgatggcgagcttcagagtcttctccattccacacttaaccagacactcgagcacaaggaagaaaagaagactccagcttatcactcgacctctcactcaaccacctgggtcgagtacagttcttaatccgtcccaatactgcgtcattttgagtattaggattttggaatattttgcaataagtagcatgtactttacattttccagaacaagtttttatctaggttttattccgcaaacactgtgttctagaccttttgtaatccggatttctctttatctattcagtattcagtatttgttcttgattttcgtttcctgttgttcatccggttatcatcttgctattactctgttgctatcatgttttcattatgttcatcgtttatgttctctacaatgatgtcttagtagtgcataggtttctaaggataggttagagtaatttagaattcccagtatgctaggtgattgagtttgatttatagatcccttctagattagttgttcttaatgacaattgctttttctgatcaactggaatttgaaaaaaaacaaatctgcacccaaaagatgttcgatgaaatgtctgaaccactaattccttagattcatggccctgtaccaaggtattgattgcagggagcgttttggctttttaggataattgactaaaaacctattatcaccaacaacccggataatccggtctggtccattgaaccaaaattagtggtggtgtatttgagtattattacttcttatgtgcatattgtttacttctactaaaccagaagaatctgaaaaatgaattttgaaacttcaagatgcccaaaagactttaagggccacatagcggtaaactttctagctgaggatggtcgagcttggtgggatagtgttgtttcacgataccgcgaccagcctatcacatgggaaatgtttaagaaggagtttgagtccaagtattttctaccagaggcacgtgatcgtctggagttgcagtttatgagtttggaacaagcgcaaaagagtgtgtgggcgtaggagcgaatttttacaagactttggagatatttgtacaacagaagggatgatgaaggtatgatggtacaaaggctgtgacttataccgacgtgagtaaattgactgaaagggtcatgaatgttgaagaaggaattaagttaaaagaaggagagaagttacaggagaacgaaaagtatggtgttttgaggactaatcagtcgtaaggtcgaaaccagaataatgatcgtgggaagcttaaggttggtaaccaaggaggacgtgtaatgaccacttacgattcaagagcctgctatatgtgcggaaagccgggacattttgcacaagattgctcaacggtcgtaaagactaaattgccaaatctggcatttgttacttgttacacttgtggggagtcgggacatgtatcaaatgcatgcccgaataagaaagcgggactacagggtaaccgagtgggagcttgttccatttgtggagacccagggcattatgctaacgcatgcccagacatgcaaataaagcagtaaaaccaaatggttaaccacccaccgccagttcagaaagttaagggaccaccggtaaagaagcaagctactccaacaaatgtttatgccttagatgtagaacctaccaaaccttcaggacccgcaaaaggtcccataacaggttagtatgggttcttacttttcttatttatgtatgtttgagtgattgattgttgtatgcatagtttactagtttaaagattgcatacatcattttcatatgcattagggacattacttgttggtggtaaccccacgcatgtattgttcgattcgggagcgacaaatagttttgtaagttctgacgtggtcgataagtttggccacgggtatgagagaagggaagtgaatgttttggtacataccgagggaaaccagccacctttgcaaacccaaattgcgttagtaggagttgcagtagttatccaggatacaatcctaccggcaaaccttttggtgatgccaatggaaaggttcaaagttatccttgggatggattggttatgaggatatcatgcccatttggattgcgggcggagcagagtagtgttcgacgtaaggaatcgaccacaactcacttactgtggaatcaaaccaagtaagattgcttcgttcgtgtcaacattgaaggttgagagtttacgaagaaaaggagaagtctaccttgtcactttaaatgtcattggtggagaagttgaaagtgagttaaggatttatgatatcccggtagtgaacgaatttgaagatgggttggagcccttggaaggattacctccgccgaggaatcatccaattactattaatcttgaacctggggcaactccaatt

SEQ ID NO: 163083 - DNA, 3071 bp, Arabidopsis thaliana landsberg
tctctgtttttattatcttcttagttttccccatgtctttgtgtagactctttgtccgtcttgccattgagcttccagattttctgtgtaggttcttctgaggatgcttccagattaccatcatcatgtgaagacatatgagaacactctcattactaaattcttcggccttcacagaatcaaaccatcaagtggtcaaaaggtcctgaaccaaaatacctcaagattctgattttgatttttttattatcattagctttgaggttgccgacattgctgcctcgatgtagagtagaactctaacattagagcaacatttggaaatccaaactaacattagagaaacatttggaaatccaaatcaatcttaaaactaactatgtttgaaaattatcttgcattgcagttccgttttgtggtgatgggtaacatgttctttacagatctaagaatccatcggagatttgaccttaaaggttcgtccttgggacgctctgcagacaaagtcgagatagacgagaacacgatacttaaagatttagatctgaactacaactttttcttggagccttcttggcgggaaggtttactgaggtattactctctccaggaccttcttgtaagatatatacatgtattaatccatattccgcagtttaaaatttcttttcttgctgtgtaaacaggcaactagagatcgacagcaagttcttggaagcacagaacataatggattacagtcttttgctcggtgtgcatcatcgagctccacagcacttaagatcccaattggtccgttctcaaagtataacaactgatgctctagaaagtgtagctgaagacggtgagattctttttttttcatcacctctaaaatgattcatagtatttttcttcgactgatgatgatgatgatgaaagcagatacaatcgacgacgacatgttgtcttaccatgaaggattggttctcgttcctcggggaagtgaaaacattgtaactggccctcacatcagaggcagcagattacgagcatccgctgttggcgatgaagaagtcgatctccttcttcctggaacagccaggtaactctcaactcattgaaaattgaaaaacttagacttaacttaacatatgaggaacaatgatgctcaatttattatcgtaactccaaaactctgaagttatgttaaaactacaaactaaaagcgggaacctttatcatttggaggtttacacacttgtggtagatcatgatgaaattgaattcatccagataaaaccgatgctgacaagtaatgtagacttttaggtgtcgcttataaacttagtctagttgaatttatgaaaacaatctctataaaatgcaggctgcagatacagcaaggagtgaacatgccggcaagagcagagctgataccgggaagagaagataaagagaagcagattttacatgactgctgcgacgtcgtactctaccttggcattatagacatcttacaagagtacaacatgaccaagaagattgaacatgcttataaatctcttcactttgattctctttcgatctcagccgttgatcctacattctactcccaacgttttcttgagttcatcaagaaagtatttccacagaacaacaactcatagacagagaattgagtacagagttattttttttttttctgtagagataaaaaagaattctatgttgtaagtatgttgtatacagatcttgagagcttcactaaataaataaaaaactaattttccatttcttaattgcatgaagtattcggtttaattattaaaaagcaaaaatagaaataatcaaaagtcacagaaaaaccctaacgtgttgtcttcttcttcttcttcttttgaagagtaagaaatcaatgtcgtccctggaaaagaagaggaagaggaagactacgactaggacaaagaagaagaagctgtccccaaatcagtcaattccctatgatttgctattggacatcatcgcacgcgtcccaagattgtactatccgactctctcactcgtttccaagagctttcgatccctcctagcttcaccggagctttacaaggccagcaggtcattctgggtcacaccgagcgttgtctctatgtgtgcttacggtgctgtcctggttatcgctggttcaccctgtgtcggaagccagatcaaaccctatccaatgacaccactgaaaagaagtcaagtgggtatgttttggcaacagtccccattcctagttttcataaaccgcgcttttcgagtctcgtggtggttggttctgatatctactacatccacgggccctcctctaacgtctcgattctggattgccggtctcacacgtggcgccaggttcaaagctcgattctagattgtcggtctcacaggcggcgcaaggctccaatcttgccggtggaacattcgtcacttactgctagcgtccttggtgaaaagatatatgtagcaggatgttacagcgatatgcatttaggttcttctttctttgaggtgttcgacacgaaaacggaagtttgggttagtgagcccatcccttacagcgacagaaaatacaactttcttcaccccaaaagcatttgtattgatggaaagatccatgtagtgactgacagtgagggggttgttgcttacaatcccaaggaaggtatatggttggatttggatcagtatatgcgttcagattcttattgtgagatagatgatattttgtactctgtttatagcagaacggttatatggtatgacactgaggcaagcaggtggagatatttggagggcttaggacaacttacgtttcctcttggtgcttctgttagattggctgattatggtggaaagttagcggttttgtgggacgaggatttgctttatggtttgactagtttcgtctataagaagaagatttggtgtgcggagatttcgcttgaaagaagcaaaagttgcgaaatttttgggaagttgaatggtttgatcatgtgcttacagtgcctaaagaatgtgaattggtgaaagttcttgctgctactgtt

SEQ ID NO: 163084 - DNA, 5428 bp, Arabidopsis thaliana landsberg; identical to SEQ ID NO: 37971
  unsure (1)..(5428): unsure at all n locations

SEQ ID NO: 163085 - DNA, 2080 bp, Arabidopsis thaliana landsberg
  unsure (1)..(2080): unsure at all n locations
atggcgtcgttgatgttaaccgattgctccttctccacgacctcgcgtctcatcgatttgaaccgcctcaacggtgctttcctgccccgctggtgcgtcagccaactcaagctttcccaccactgcgcccggacgtggccgcatgcgctcctcttataccactgtgcccggacgtggccacattctctccattcgctcctcttgtatagactaaaccttttcatccaattgcttacgtattttcagatatccaactcttaagattttacttttctgttcagctgatgaggcgatggtatttgatcaaacggctgtggaactaagtatcatgcaggagatcagagtcgaaacttcaagaatggagaaactaatcagtcctggtttagcagtaatcctttttggggacagagagttctctgaagaatataaagaaatttaaactctagcatctttgctccaaaaacaaactctatagagtttaaatttctttcttcttttttacaaaagagggattatagtattatacaccataaaccccgtaaaattaaaagaaggtattcagttaccaaaatcggatttagtagcatttagtttttttgaattttaaatgtacaccataaaccccgtaaaattagtcaaaacaattaatgtgatttatgataattgtaattaagtaaaaaagatattactcgattagtaattactgattaactgaatcattgatctcattaaacaattaaaaaaagattactcgattagttagcatttagttttaatttttttaatatactaaaaataccaatcggaaattcagttaccaaaattagatttattaacatttactttttgaattttagatgtacaccataaaccccgtaaaattggtcaaagatttatgatacttgtaattaaggaaagaaccaaatgcaatatatggtttcggtgcaaaaccttaaaactgaccaacttctcaattttttatttaaaaaccctaccaaatttctctctcgtttctctccgatggccaagaacaagacnnnnnnnnnnnnnnnnnnggtgaagaagtcatctgacgtcgcatctacgtcaaagaaactgtcgggagtcgcatctccagcgaagaaaccgtcgggtgtcacatctccggtcaagaagccgttggaagccgtcgcatcaacttcatctgaggaggaggaggaagacgagccttccagcgattcagagtcgggatcggagagtgagtctgacactgaagctgagccgatgactcttgctgctgctgctccttcttcttcgaatgagaagagacaaagtgaaggagaaccagaggagaaacgagccaaaactgaaacagagacggggaagaagccactgttgtttcagagattgtggactgatgaagacgagatcgtctttcttcaaggaatgatcaaatttgctaaggatacaggtaagaatgtttccgaggacatgcatggcttttttgaaaaacttaaagattcgattagctttgaggtgaagactgatcagttcgttaacaaaatccggtctatgaagagaaagtatattgagaacaagaaaactactacagagcatgataagaagtgttacgaattggctgagataatttgggtaagtgatggtgatgctactgctcttgtgaagccaaagaggaagaagcttaagttgatgaagaaagtgattggttcgagaggtcgtttgttggtggtgcgtttaaggaattggattcgggggttgatgaagagacatggaagaagaattggagtttggtaccagtgaagaagaggaataggatagaagaaaaggtgaagtccgtgcaagctgatgagctcaaaacgatgtgggagaagattgacgttgtgcatgaagcgagatctttgatggctaaatatgtttagtctttatctatttagagatgcatttgcctatgtttttctttttggttttgtgttggaacctttatgactttcaggtttatcttcttttggaacggctaattagttagtatctattgcatctttttttgggtctaagtaacagcaaacaatctcatggctat

SEQ ID NO: 163086 - DNA, 3334 bp, Arabidopsis thaliana landsberg
aagcttatgaaagctctaaaatctataaggagagaactaagcttttccatgacaagaagatcatcactaaggatttccaggctggtgatcagatgctgctattcaactcgcgcttgaaactctttccgggaaagcttaagtccagatggtctggtcccttctgtatcactgaagtacgtccttatggagcagtcactctagctggtaagagtggagatttcacagtaaatggtcaaaggctcaagaaatacttagcagatcaaatccttccagaggtgacgtcggttcatctccaggaacttcttgatgattaaaagagtaagggagtcaagctaatgacttaaaacatgctcacttgggaggaagtcccatgcctttctctgtacatattttttattttctttgtgatttttgatgcgttttactagtgtttttcatgagatagctgccaatgtttcagtgcaatagatccaatctcagtgtttcactcgaccacatgctgtggagatcgagtgtctctgtgaaatcgagtataaacaaggtttcatttatcactcaatttcattggccacgtgctgatgaggatccatagtcgagtgaattgatgtttgagatcctttatattcaaccatatactcgactaacaatgacttacagaggatttcatgttctcctaattttttcagtcaacagggaactaagctcaaagacaaaacaacagggcaaggaccacacgcgttttcttcctgaagataagatggagagagaatcacagaatacacctccaccacaccttttgaattcgccctcactctacctataagtcaagtctactcgacccatctctatgcatctgttcaccaacactccaatttctctacttcaccataaatcgccatctctcactcgaccaaagaattactcgattcaacaccatttcactctatttaatcgccatactcgaccaattcactatgtcgttcaccgtcacttggttctcgccacaacactcgaccgcaaagagcaaagacacatgagcacaactcgtcgtactcgaccacctcttcgcccccgcagtcgagtttcccatctcggtcaccatcaaagcctcaagaactactcaattacatccacaggactcgaccgcctcacaaccgtaaccaagtgcaccatctactcgaccgtcgattcgtggttccgtccctgcaaattcctcaccgtcacttgacagtttactcgaccgcttgatttcacaagctgaactcgacctcaataaatatactcgaccgtagatttctgttctactcgattcaaaacgttaaagaagaactcgggaacagtttagtttactcgagtactagattacactcgaccaatttggtccatttcattgcctgttgataacgattttggtttcattgttttctttgagactaacctattgacatttgagttttgagttctcaatcttttgcaggagaatcatgagtaactatagtggcagttcttcaattgatcatgactataacatggatgagactgggtcatcgttttcaaggccagaaagagaatatgataacttcaagagaaaagctgaggtagctcgagggaagagagcaatgacatagaggtatgtgctgatagatgaggatctggaggacgagtatatgcctacgcatactcgcagagccacacaacttctgcacaaacctgatgtattgccagttgaggagtatatcaggctcttcaagctgaatgagttctactgcacaagatatccttgctcgactacgctggcacagcttggattactggaggatgttcagcacatgtaccagagttgtcacctggacactttgatggcttactcatatgtagcctatgaataataaacgattcagtttctttccacactacaagtggagctttaccaaggtatgacctctgatgatttggaaagtgaaggagtgagattcttgcaattctatgtgtatggtcagggttatatgctatcaatcaagcgcatggaaggattgttcagtttcccagtggaacgggatctaagcccaagtttgacagataagagttgaaagacttgtggatcaccattggcagctctgtaccgttgaatgcttccaggtcaaagagtaatcagatacgcagccctgtcatcaggtacttcgagcgttctgtagccaacgtactctactcccgagagattacaaggactgtcactaactctgatatggagatgatcgcaatggccctcaagggaactcttcgccaaactaagaatggtatgcccctccagggtgaaatcaatgacacacccctagctgtacttcttctgatccatttgtgtggatacaagagttgggctgtcaccaataaccgcaagagagcacgaggcgctctgtgcataggtggcgttgtgacaccgattctgatagcttgtggagtcccaatcatttctgctggactcgagccgcgagcaatggatatcgagcacctacgtcactgcgaattcctggagtttgcaatggttgacgatttccacaggttcaggtttgagcactctatagacaggagagctaacatccttctccctagccctgaggtcacacggataatagagggagataacattgattttaggcctgaggttggatgcctctactatgagaacgctccgccattggatgaggatgatcttcttgaagaagctgcttcggatgggatggatgaagatagggcagtggagttcgacactagcatgtatcactttgctgaacatgtacctccagcgaggtagagcaagagcttgactgaagctcataagaataacagtaaattgtagaagtggtgcaagaagcaggacaagctgatcgcaaagtgtttcaagcttctgacagataagctgagttgttcttcctccaccactgctattccacaggtacagcctcctctggagatgccatcgaggagatttaatgcacatgcgcacaggcctgagcttagcgagcagagagtcccacatgtccaggctaggcattcgtcattcgaatcccgggaacacaagagaagaaggaaggctacactcactcgatctagcagcagatcacgcctcattcactcgaggagatcactcgaccgtggtgctggccgcagcaaaaggagagaggtcgagtttcctcagagcggtgctggccgccacagagctgatgaggtcgagtacccacctgctggagctgatacagaacaaggcggttcgtctatggcctgggagcaatcgcaggcagccattgacgagcaactacgttcattcttcgatgag

SEQ ID NO: 163087 - DNA, 2649 bp, Arabidopsis thaliana landsberg
tttgatggctcgtgttagagacggtattgctggccctgtatatgattcgacggaaaagtcgttgtccgctgaagtttcgacatcagaacaagttacttcagaaattgagaacgacggagatgccgccgacttggttccgaccgaaccagcaggtccgacagaaccagcagcacgagatgttgcggcgaatgatactacaaaagaaagcgctgaaattgaaaaggctatggaggaacgcgtgatggtgatgaggcttctcctaaaggaaccgctgaaattgaaaaggctatggaggaaccgcgtgttggtgatgaggcttctcctaaaggaaccgccaaaattgaagaggatcagacagggacaactttgaaacctctaattgacgctgtcattcaacaattcgaagaagcgaaagacgggaatggggaggagttggaggaggaggaaatggtgaatacaatttcaaaagaaggggtagaaaacgttaatcgtcaggtatatacaattgaatctctatgacacacatttgttttgtttgagtattagttctcgtattagttagaaatgttcaactagttcatctgtgacacatgtttgatttaagtaatttgatggaactagttcaattggtacatatgaattgttagtttggtacatatgaattcttcaattggttaatgtttattgaatttgcaggatacttgtgaggccaaggatgatgaggtttctgttaaagagacagaggaagatgaggctggcaatgatggtttggaggatgatgatttagtttttcagccactgccgccacagaccatgcattttcctttttcagaatacgccaaagtgtgcaagataagcagtaggtgccaggtcacgcagacagttgaactgatagagagcaagtttaaagaagaagctgtatggttcaaaagacacgatcagtgagcctcaggagcctaaccaccagacgcaaggcatgtgggtgcttatgctgcgcacagtgaagacagatttgctcgaggaggcttggtttgtggtaaatggagtacctattaggtattccattaaagagcatgcgttgttaagtgggtttgattgccacagttacccaaaagaactaaatacaatggggaatattaactttgtgaagaggatattttaaaaagaatgtgggataaaggttgtagatgttcttgctaagtgctcgaagatgaagcatggttcagataggttgaagttagtgctgttgtacttcttggtcaaggtagtaaaagctggtgcaaagaatgatggaaacattgaagagtttctgttaaggattattggcgatttgaatgcgtgcgagacgtttccgtggggctgttacacctttttggaatgtatggcaggaataaggaaaatgatgaagaacatgaatggtttcgtgaaaccaaaagctcaaccttggtttagtggattcattgtgcctcttgaggtaagtaatttatgatcattatatgagaataaggtgtaatgtacatgttttatgatattaacattgttttgttatttgtagattctggcttatgaggctattccacagcttggactgaaatttagagtccctgtacgctccgctttgaatgactgtccaaggatttgcaagcataagtttaaagaatgtagcacgaaaggtgtcccgttggaagttatatataaagagcttgggaatagtaaggttagagtttctgtatttacttcattgtgtgtctagtctatcatgagattgattgattgctaaatgaatttcttttaacaggattttccacgcattttggtacctgcctatcatgagaaatatctgttgaaagatctcttaaacaatgatgttgatgatgactgcggtccaatagatattgttattgacagttggagagagcgactattagtagagaagaagaggatatggtggaaaggaatgtgtgagatggacatttcttctagatgtattgtaaatgatatttcggatgaggaagtccatgagattgagaatgaggtccccgagaaagatgtccctccgactgctgtccctcctcgattccctgatttagatacagttgtggcatctataacctcactgacgcagatgatgaccaaaggcttttatgaaccaaaagataagattgatgtcattgatgtgagagtgcagtctattgagttatttgtggcagatctgaaggaaagggaacatggtaagcaaacagaggaggcaagtcaacatgggcatgcaacagacgatgacgtgttatttgcttcgccagatggttatgtgaccaccggaaacgaggaacaacgggatatagtgatcagtgaacattctccagaggttgcagaaaacagtaagtataataattaatatctgttgggtataaaaatgtgaatatatgacttaggttttgttttaaaatgtgtgcaggtaataaggagacaaacacgacggagaaagaggtgaaaggaaaagcgaagaagaatggcgggggcaagaagaagcaggaggtgccacctgtaatagaaaccggaaagaagcgaacaaggggagcatcccgccttattacatcaccgtttgtggcggatgataagaagcgtaagagaatgcggaaggcagattga

SEQ ID NO: 163088 - DNA, 757 bp, Arabidopsis thaliana landsberg
aagaacaacaagaaaaggtgagtacaaggaaaaacaagtaaaaactatgccgatccgatctaaccccttcttcaatatggatagctcggccttgctctcgctcttgcggcacacgggtacctccatggactctaaaagctcgaagaaatcttctggaagcatcggtggcggggtgctcaaaatgttcaagctcataccaatgttatcatctggttgcaagatggtgaacttgttgagtcgagggcatcgaagacccttacttaaagactacgcaacaacgggaacaatattcgggtttcgcaaaggaagagtctttcttgctatacaagaagatcctcattgcctgccaatgttcatcatcgagctcccgatgctgacttcggcgctgcaaaaggagatggcctcggaaactgttaggattgctttggaaagcgagacaaagacgtcgaggaagaaggtgttggaggagtacgtgtgggggatttactgtaacggacggaaaatcgggtattcgataaggagaaagaacatgagtgaggaggagatgtatgtgattgatgcattgagaggtgtttccatgggggctggagttttaccatgtaagaaccaatatgatcaagagacagaaggagaaatgacttacatgagagctcgattcgatagagtgattggctctaaagactctgaagcattgtatatgatcaaccctgaaggtagtggtctgggcacagagcttagtatttactttctcaggtct

SEQ ID NO: 163089 - DNA, 2467 bp, Arabidopsis thaliana landsberg
  unsure (1)..(2467): unsure at all n locations
caagaagcaatgtcgacatccatcggcgataatgagactggagctatagtttcaaacgagaatgtcgagttttccgtcgatttccgaggcaatccatctatcagatcctcttccggtgcatggaaatcttctggcttcaccatgtgtaagtcttgactcttttttttccatttcctcaatttaccaccaaannnnnnnnnnnnnnnnnnnnnnnnnnnnnnnnnaagttgccgagaaattcgcctacttcggtatcgcctcgaatctgataacctacttcaccgaggcgttaggagagtcgacggctgttgcagcgtcaaacgttaacctctggcttgggacggcagctttcttgcctctcatatggggttctatcgccgactcttttcttggccgtttccgtacaatcctcttaacctcttctttctatatcatggtaataattcagctcaaagctttcatcttttgttaccttgtgttaccttcttgatttttctagtgcgatcattaccaattaggcatgagttggatcttaggctacacatccattttcctataccctagaaacaagataagaatttgaatcaaaaaaaaaaaaaaatgattaaaaatttaatgatatatgcgactaaacccccaatccaaatttaatgatatatgcgactattcatattattatataggttttaatttggatacttttttgtttctactacaaaaatcaaatgtgaatcaagatcttgaaaatctttgacctaataaaaaacgcgggatagttttggaaaaacctttaatataatttatgtgatgtgatcctgaattttagggacttgggctgcttacgttttcagcaacgattccttctctttgtaatgatcaagaaacacttgagtcgtgcgtctctcaggtcaaagtaataatcttcttttgtgctctctacctaattgctttgggagaaggaggcttcaaggtatgtcttcgagcctttggagcagatcagtttgatgaacaagacccaaatgagtccaaagccaagagttcttactttaactggttgtattttgctatatcaatcggcatattgaccactcgtctggtcacaaattatgtccaagagaatctgagctgggctttaggatatgcgattccatgtctttctatgatgcttgctctattcttgttcttacttggaatcaaaacttaccgcttcagcaccggaggagaaggaagacagggcaaaaaacatgataacccttttgttagaattggccgtgtttttgtggctgcagctagaaaccggcgacaaactccttctgatacttgccttcttctgcctaacgaaagcaccgagaaattcaggtattatatgttttgtttgtttggtcttttgttttcttttgtcttnacactgtgtttttgtttacaaacaaaatcattttttagtcaagtttcttatctgaacttaggtaattagtaattttacatatattttttaatagtcctccaatagttaaaaagttgtaaatacataaatgaaaatacaaaattcttgaatcatctaactaaaaaaaggttggaacgacttataatctatagaatttaaagcatgtgttagcttcgataatttacatgcatgcttttgttagatataaaattaagtatgcatgtaatttttggtaacgacagattcttggacagagcggtgatttcatgcgattcatatgaagttgaggaagcaaaagctgtgttgagtctcattccaatttggttgtgtagtttggtgtttggcattgtgtttgcgcaatctcctactttctttacaaagaaaggatctacaatggatagatcaatctcatcaacactccaagtccctgcagctacactccaatgcttcataagcctagcaatcctcgtcttcatcccaatctacgaccgtttattcgtcccaatcgcacgatcaatcactcgtaaaccagcaggaattacaacccttcagagaatttctaccggcattttcctctcaattatttcaatggtaatagctgctttggtcgagatgaaaagactcaagactgctcgagatcatggattagttgattcgcctaaagccacggtcccgatgagcgtttgctggctgattccacaatacattctctttggagtctctgacgttttcactatggttggtttgcaagagtttttctacggagaagtcccgccacagcttaggagcatgggactggctctatatctaagcataatcggcataggaaacttcttgagtagcttcatggtatcagtcatcgaggaagccacaagccagtccggtcaagtgagctggttctctaataacctgaaccaggcacatcttgattacttctactggctacttgcttgtctcagctccctcgcctttatttttactgtctattttgccaagtcctatgtctacaacagcccaaagtag

SEQ ID NO: 163090 - DNA, 681 bp, Arabidopsis thaliana landsberg
atgggaaacagcattactgtgaagagaaaaagagctaaagtaatgaagatcgacggcgaaactttccgaattaaaactccggtgacggcgagagaagtcaccgcggattatcccggttacgttttgttagattctcaagccgttaaacactttggagttcgctctaagccgcttgaaccgaaccaaaccttgaagccgaaaaagacttattttctcgtcgagcttcctaagcttccaccggagacgacggcggtggatacagaaaataagctaccgtaccggagagtgatgtctggtatccacgttggcgcaaaggagcggttagatatgttgatgttgtctcggagaacggtttctgacgtcacaatcggaagatctgacggtggagatgggtttgggcctgagcttgggcctggacatacgagtgtgaggttgaggttgcctcgttctcagatcacgaagcttatggaagagaataataatgatgcttcggccatagctgagaagattttaggtatctatatggagaggtctggcgagcttggcggcggtagaggtggtgttgacggccgccggaaacttggaagtggggagattaaagcgcgtgaggtaattcttgtttttttactttgagttttggtcaaatagtttcaccgcgttaaatttaatctttgacataaa

SEQ ID NO: 163091 - DNA, 2421 bp, Arabidopsis thaliana landsberg
atggatcaaaagcggccaaccatcgccggcgatgaagaaatggcggccgagaaaccgttacaaccggcactccaaaaaccacctggtttccgtgatcaacagaatcaaccatcagctccgccttctgggacggcaacgcttccacgtcgccgtccgaggcctatccatccggccgataagaaaaggcggtgtagtttctgccgcgttttctgctgctgcgtttgtatcttattcgccgtgattctcctcctcatcctcatcgccgtcgctgttttcttcctttggtacagcccgaaactacccgtcgtccgcctagcctcgttcaaaatcagcaacttcaacttttccgacggaaaatccgacgacggatggtcttttttgtcggcggatacaacgtcggtgctcgattttagaaaccctaacggaaagctaacgttttattacggagatactgacgtggctgtgattctcggagagaaagactttgagaccaacctagagtcaacgaaagtcaaaggctttattgagaagccagggaatcggacggctgtgattgtcccgacgacggtgaggaaacgacaggtggatgatccgacggcaaagaggctacaggtagagctgaagagtaagaagctgttggtgacagtgacagctaagacgaaggtaggattggctgtgggcagtcgtaagattgttactgtgggcgttagtctcagatgcggaggcgttatattacagacgcttgactcaaaaatggcccaatgcaccatcaaaatgctcaaatggtacgtagaaactacctggtcgaaattagatgatttggtcgatagtaaactaaataaatcatattacaaaaaggtatttatataaagcgtaaccgtcgtgtaattagcaaaatattaacgaagccatttgatttgattgcaggatcaaattgcggtcatgatgagcctcaaaggttcaaagacaaaccaaaaccatatagagctaagagctacgtacacgaggaatttgtaccttttttatttaacttgggatcagatattaatgcagccattgttctagttttcatccacacattatatactcctatatgttacacatacatgcgtgtgatcattgttagatggttttgtgttatgtgtctttggcatttaaaatatacaattcgtttttgcctttttcttcaaggataaagttccaaactgtacttcaatgtctagtgctcacagaaatttccaaaagatagcagaattatcaaattaatcaaataacaaaagttgttaattcagctactttaacaagaccatattatatgatctttgtaggtgggagaagcggtatcgaaaccagtagcgttaaacgcaacagcatttgtttcatgtacgatattaatgctactttggacgttgcgtcgtttgtgatttgtctcggagatgagaacgctatcatgcgcgtttgttataaaaaacaaacttcagtaaataaaacaaacaaaggctacaattgccaaatataacttattatccgtatgatgtgtccgtacatctcaagtagagaatttctttcacaaatccattcctgtgatacgatttcttatgagtacaataatttataatacaaattccgaaggccttgtgtacaattgaagaggtgtgaaatggatcaatttcgagagataggagaggtattaggaagcataagagcgttaatggtgttcaaggacagcattcaaatcaaccagcgtcaatgctctctattactcgacctcttcaccgcagcctacgagtcaatttctgtgtcgatgcgatccaatctacgcttcaaagagaagaacactaaatggaagatactagaacagcccttaacggagcttctatgggtggttagagaaggagaggcttatgttagaatgtctttagagcctaaacttgggttttgggctaaggctattgtgttgcatagcaatagagattgcacagagcttcacatacataacttgctctcttgtctaccgatcatcgtcgaggctattgagacagcgagtgaggtttcagggtgggatgaagaagagatgagcaagaagaggttggtgcattctaacaagtatatgaagcaatggaatgactctcagatgtttacctggaagtttgggagagagtatttggtgaccgaggatttctgcaaccggttcgagagtgcttggacagaggaccgttggattctgatcaaggagcttcaggagaaaaagcagtccggttcgagcaaacatgaacggaagatggctgatttccttttgaagcatttgggagatggaaatgagagccccaagctatttccttcttctcttctggataacacaaaagattaccaagtgaaaaaaagattagggaatggaagtcagtacaaggagattacctg

SEQ ID NO: 163092 - DNA, 1540 bp, Arabidopsis thaliana landsberg
atgagtaaccgaccgaaacagagcaccactgccggcatcttcctctgcatcaccatagtatctttattatccggcgacgtctccgccttgggagtaaactggggaacgatgtcaactcaccagctccctccaaagacggtggtacagatgttaaaagacaacaacgtcaaaaaagtgaagcttttcgatgcggacacaaacaccatggtagctcttgccggctctggtatcgaagttatggttgcaatccctaacgatcagctcaaagccatgggaagttataacagagctaaagattgggttcgaagaaacatcactcgtttcaatgacgatgttaaaatcaagtaaacaagttttgatctttcaccacaaatcgaaggttcttcaattttggagctaaatttagtttctttgcagatatgtcgccgttggaaatgagccgtttttgacagcttataatggatcattcataaacttaacttatccagcactcttcaacatccaaaaagcattaaacgaagctggagttggagatttcatcaaagccaccgtacctttaaacgctgacgtctataattctccgctggaaaatccagttccttctgccggaagtttccgtcaagacatctttgaagagatgaaactaatagtcaacttcttagctcataacaaagctcccttcactgtcaacatttaccctttcctaagtctttaccttagcagcgatttcccttttgactatgccttcttcaatggccaaaacactgtcagcgataacggcgttatctatacaaatgttttcgacgccaatttcgataccctcttggcttcacttaaagctttgggtcatggagacatgactgttatagttggagaagttggttggccaacggatggtgacaagaatgctaacatcccaaacgcagaacgcttctacacaggtttgcttccaaagctagcagccaacagaggaacacctatgcgtccgggttacattgaagtttatctctttggattcatcgatgaagatgcaaagagtatagctcctggtaactttgaacgtcactgggggatattcaaatacgatggccaaccgaaatttccagcggatttgtcaggagcaggtcagaagaagatcttaaccggagctcaaaatgttcagtacttgcgaaaccagtggtgtatgttcaaccctaatgccctcactttcagcaacaacactaaccagctcggggataacgtaaactacgcatgtaccttctccgactgcacagctttgggctatggttcctcttgtggtaatcttgatgaggtcgggaatgcctcgtatgcattcaacatgtattttcaggtacagaatcaaaaggcagaggcttgtgactttgagggccttgcaattatcactaccaggaatatttctcgagaacagtgtaattttcctattcaaatcggagatccgacatccggacatagtgatcataaccaccggtttatcagcttctctctggtgagtatgttgctactctttacagcactatga

SEQ ID NO: 163093 - DNA, 2880 bp, Arabidopsis thaliana landsberg
atggagtcggctaaatcaatcatcggtggccaccaaaatgtcatcctgatgcgtcatggtgatcgactcgacaatttcgagccactctggacttcaacagctgcgagaccgtgggatccaccgcttgctcaagacggtaaggatcgggcctttagaactggtcagagaatccggtctcaacttggggttccgattcaccgtgtcttcgtctcccctttcctccgctgcatccagaccgcttccgaagtcgttgccgccctctcagccgtcgatttcgatcccattgctatgtcatctaaagacgtgctttccatcgacaatactaagatcaaggtcagtcagaatatctctctatatattttttgagaccagggtttgtagtctagtggttttatgctagtgttggtccgtgtcatacatacgttataaaaaaaatacacatatattgtggactatggaaatttttaatgattctctaagcaaaattctgttatgttgttcttataaccatgctgatcattttgattgaagcatttgagatgttttatgcttatatatgtcttgtctcgtctgctttaggtggctattgaatttggattgtccgagataccgcacccaatctttattaagagtgaagttgctcccaaagatgggaaatttgatttcaagatttcagatcttgaagctatgtttcctgaaggaacagtggattctaatgtggatatggtttataaagaggtgctctatatgacttgttttgtcgtgtcttcgttcttaatgttttgttttgtgtgactatatctaaactttatttcgataattctcgattccttgtttgtactgtttaggtgccagaatggggagaatctgcacaagcctttgaggatcgatattataagacagtgaagattcttgcggagaagtatccttctgagaacttgctcttagtcactcattgtaagcaaaacagttatggcttttttagtttttaaccaaaattgatgttttcctaatcttgtagttcgtttttttttttgggatgggaaattgcagggggagcagtaagtgttgcattttacaactacttcaaagacgcaactaagtacgtggtagattattgtggtagtgttgaaatgagaaggcagattttgaatggtgatgggtttggtaaatttgaggtagttactagtcatggagtatcttataagtacaccaaaatcccagtccatgatcatgtagttgtaagccgccaatctcccctttaaccggtttatatgtgaatatctggtttaacgggttgcttcaataaaaaaaaaatataagaataatggttcagttattttccttttcttccacaaattttacaaaaatatgtaaagctaaagggttgtaatttttctaacacaaaattgttgttcaacaagaatttgtcagaacgtatttaaattaccattgctataagcaagagaacagtcttagcaaactgctgaaacgacaaaaaaaattgttctttagtattcaaaaaaaaactttgaactatacgtagtcttcctcatgtctgatgcctattgacgagtttattacaatagtaaaaaacaaatgaaaatacaataaaaagtcaatggtcttcttaattgcatgtaatatactatacttgcatcacgccatgaagcagcaagaaacagaggaaatgaagtctaaatcaaacatggatggccaccaacatgttttcatgatgcgccatggcgatcgcattgataagtttgagccacaatgggtctcgactgctgctcggccttgggatccaccgcttattcaaggcggcatgtttcgagcgtttcgaaccggtcagatgatccgatctcagatccattttcccattcaccgtgtctttgtctcccctttcctccgctgcatccaaaccgcttccgaagttatcgccgccctttctgaccccgacgcaaattcgtctgattccttcgacaaacctaagctcaaggtcaaatgaccatctacgtatatatgtgtttatgttaaactatggaagattttcagattttttcatagatcttaagaacagttagtcgtcgtgcatgttgtctctatgtcattgaaagtcctatgcatttgtttttcgttacaacgtgtttgaatgttctagttacattatgctaagagacttgttgtttgtagtgttatagtgtacgtactgtataaataaatttaagaagcttgatcgtgtgcttcaggtttctattgaatttggcttgagcgagatgctgaactcaatcgctattaagcctgaagttgctccaaaagatggcaaatttgatttcaagatttcagaacttgaagctatgtttcctgatggaatggtggatcataatgtagacccggtttacaaagaggttggtctctaagaaatctttgcgtgtattctttagtttgaacacaagtctataagtacaagaatttgacatgttctgtatatatacatacagatgccacaatgggaagagactttggaaagttgcaacaatcgatatgttaatttggtcaagactcttgctgataagtatccttgtgagaatctgttgttagtcactcacagtaagtgactctcacattctgttttttttttccttgttttatagtgtttttgagtatcatagtctttttaaaaaactcgtccatggaaatgtaggagaaggagtaagctttacatatgccacattctataaagaggcaacgcacaggttagatttttgtgcttgtgttgaactacaaagacagatctcctctagtgaagttggagattttgaaatcgttacaagtcatggtcaagatggtatcatgtaccctccctccaactccggttaa

SEQ ID NO: 163094 - DNA, 2745 bp, Arabidopsis thaliana landsberg
  unsure (1)..(2745): unsure at all n locations
ctgaagctaccgaggccgaccagatcgaagtctctgacggtgaggattcaaaacaaaacgttcgatgggccgaggaatacgctagggagcaagaaataaacgcgatcaagctctcccttgccaatgcagaaaccgagatgaacctcgtgagatctcagatgcataacgcagtctcctcggccccaaacatcgatcgcattctggaagagtcccacaacactcctttcaatcgcaagatatccagcgcgataatttcagacccaggaaagctaaaaatcgagtacttcaacggatcatctgacccgaaggagcatttgaaatctttcataatatttgtagcccgagccaagttcaggcctgaggaaagagacgccggtctctgtcatctgttcgttgagcatttgaaaggaccagccctagattggttctcaacaatattcggtgttaatcaatccgggcacatctgatgctgacttttggtcgctgtcccaataaccgaacgagccacttagagatttcgtcacaaagttttgatccaccctagccaaagtcgagggaatcaatgacgtcacgactctctctgctctgaagaaggcgctgtggtacaagtccgaattccgaaaggagttgaatctgtccaaaccactgacaatccgagacgccttgcaccgagcctcggattacgtatcccatgaggaagaaatagaactactagctaaaaggcacgaaccgaccaagcaaacgcctcgcatcgaaaaatcccacccaagcgctccaagccataaaaagggcgctcaaggcgggacattcgttcaccatgaagggcgaaacttctccggagcccataattaccaggccgatcgccccgaggcgaagccgcccgaggccgagggcgaggccgcggacgaggacgcggtcgggaatcctacacgtggacgaaggatcaacccgcaggaaacgagcaagaatattgcgagttgcataagagttacggccatcacacttccagatgtcgctgcctcggagcaagnnnnnnnnnnnnnnnnnnnnnnnnngaaattggtggaggtttgaccatcgatgatttaaaggcagaaaaaggtaaaaccgagcaggtcaacgctgtggccaatcctgagcagacagcccccgcggcaaaccccgaaggacgcaagagaggtaaaggcaaccacgaggcagatgacgacaaaccggaagctgctcggggaagaaccttcacaattttgggagattcagccttttgtcaagacaaaacggcatcaatcaaagcttatcacaggaaggccgactcaaatcggaactggacacgaccattcaacggaccaatgacgaagtcactttccatgagaacgacactaacggcttggatcatccgcacaacgaccccttggtcattactttgactatcagagatttcaacatcgaataaaatttagttgatacagggagtacgctgtacgtcattttccttgcaaccctacgagaaatgaaggttgatatggcgcaaatcataccgaccctgtgacctgtgctcggattttccgaagagaccaccatgactctcggcaccatcaatttgccagtccgaacccgaggagttacaaaaatcggatacttttccgtcactaaccagctaactgtctataacgcaataataggtactccatggtaaaatcagtttcgagccgttgccttaacttatcatctctgcttaaaatttcccacaagcaacggcgtgaagaacatctgaggaaatcagaagaatgctaggatgtgtttcatggcagcacacaaactcagaaacccgtcaccgaatcaacagccgacgcaaatcacaaaaaggctaaactaggccgagctgtagaaaaagccatctccgagcaattatagcaattaaagatcgaggaggctctggaataaacaagacctgttcccgatccagtaatcttcgtttgtcttgacgacgtgaaccccgagcggtgcgtagaaattggcggagatttgggcgaagaactgacagtcaagctaactactttcctcagggaaaacgtcaacaccttcgcctggtcgccggaagacttgcctggagtaagcgtcgaaattgtagcgcacgagctcaacatagacccagcatttaaacctgtgaagtagaagaggagaaagttaggtcgggagcgagcggaagctgtgaaagtcgaggtagagaaactgctaaggatcggctccatcaccgatgcgaaatatcccgactgactcgaaaatctggtcgtggtgaaaaagaaaaacggtaagtggagagtgtgcgtcgacttcaccgacctgaacaaagtctgcctaaaggacagtttcccactaccgcatatcgatcgcctcgtggattcaacttctaggaacaaattgctattattcagggacgctttcgctggatacaaccaaatcatgatgaaccccgaggaccaacagaaacccgccttctacatagagcaagtgattttttgttatcgcgtgatgccatttggactcaaaaacgccggggcgacttatcagcgtttcctcaacaagatctttgcattacagatcgggaaaacaatgggggtgtacatcgatgatatgttggtaaaatctatggaagaggaaaaacacatagcccacttgcgcgaatgtttccagcagcttaacctctacaatgtcaagcttatccggccaagtgccgcttcagagtga

SEQ ID NO: 163095 - DNA, 7330 bp, Arabidopsis thaliana landsberg
  unsure (1)..(7330): unsure at all n locations
atgacacaaatcattagaggacaaggtgaagatgcttggactgctgtagaggaaggatgggaacctccgttcgatctaacagaagatgggttcaaaatcactaaaccgaaggcgaacaggactgcagaagagaagcttcaatcaaagtttaatgcaagggctatgaatgcgtatcttcaatggtgttgatgaagatgagtttaaactcattcaagggtgcaagtcagcgaaacaagcgtgggatactctacaaaaatctcatgagggaacttcgagtgtaaagagaacaagactggatcacattgctactcagtttgagtatctcaagatggaacgagatgaaacaatagtgaagttcagttcaaagataagtgatcttgctaatgaggctgaggtcatgggaaagacctataaagatcaaaaattggttaagaagcttttacgttgtctgccaccaaagttggctgcccacaaaacagttatgagggttgcaggaaacactaataaaatatcatttgttgatcttgtggaaatgctcaagtctgaagaaatggaagttgatcaagaaaaagtcaatccttcgaagaatattgcatttaatgtagatcaaggctctgagcagtttcatgagattaaagatggaatggcactgctagcaaggaatattgggaaagcacagaaacgtgtggaaagaggtcagaatcgtgacagtacatcctggagtattaaagatggagagagatcacgtgcaagattctccaaatcaaagaatgatgactcagaaaagaaaaaggaaattcaatgctatgagtgtggtggttttggtcacattaaaccgaggtgtccaatcaccaagagaaaagaaatgaaatgtcttgaatgcaaaggtgtgggtcacactaagtttgaatgtcctaacaagagcanacttaaagagaaatctttgataagcttcagtgattcagaatctgatgatgaaggtgaagagctgttaaacttcgtggcgtttatggcaagttctgactcaagcaagtttatgagtgacacggattctgattgtgatgaggaattgaatcccaaggatgaatacagagtcctatatgacagctgggtgcaactaagtaaggacaagctaaagctggtaaaggaaaagctaactctagaagcaaaacttgctaatgtgagctcagaggataagcagaaactgagtggaatcactgttgatgggaattcacaggactactatcaaaagaaacttgactgccttcaggaagagtgtcacagggaaagagatagagctaaacttctggaaagagagttgaatgacaaacacaagcagatcaggatgctcaacaaagggtcagaaagtctagacaagatattggcaatgggcagaactaattctcaaccaaggggtttgggttatcaaggttatacaggaaagatcaacaaggaagaaggaagagtcatcaactttgtctgcccattcaaagcgaaaatcagaacactgtggaatttagcaaagtgctacattgagccatcaagattctgcactgtgtggattaagaagaaagatctgtatggtgatatggaagctgaaaggtacaattacaagttagaaagaatgtatgaagaagagaaaatgcattacgccagtgtctgcaatctggtcaacaaagaaatgcaagacgaggcaaatcttgtttgcaactggaatctttcagaattggaggactgcactccacaagccaaagtggcttatacttcagctgtttcttaagacaacagaacgtggtattttgacagtgggtgttctcgtcatatgaccggtgttcaatctgttctaaatgacttttctgtcatcaacaatgggaaggtcacttttggagatggtggaaaaggaagcattaaaggaaaagggaagattgagatatatgatcaaccgcatctgtcaaatgtgtactttgttgagggactcactgctaatttaataagcataagtcaactgtgtgatgatgacttaactgttacgtttacaaagactggatgtgttgcactcgatattgctggcaacaatgttctatcaggagttggttcaggcaacaactgctacatgtggaaagactctgaagtctgtttgtttgcaatcacatccaagcttgatttgtggcatcaacggcttggacacatgaatactcaaagcttggttaagattgtacatgctgatgttgtcagaggaattccaaaacttgaagcctgtacaagtgttgtctacaaagcttgcagccaaggcaaacaagttaaagtgcaacataagagggccacgcatattggaactactagtgttcttgaattggtgcacatggatcttatggggccagttcagacagaaagcttgagtggtaagaagtatattttggttctggttgatgactactctcggttcacatgggtgagatttctaaaagaaaaatctgaggcagctgaaagtttcaagattctggctttacaacttcagactaagaaagggaatcttgttcaaatcagaagtgatcatggtggagagtttcaaaatgaagaatttgagaaattctgcagaattcaaggaatcaggcatcaattctctgcacctagaacaccacaacagaatggtgttgttgagagaaagaacagaactttacaagaaatggctagagctatgattcatgggaacaatgtgtcaccaagattctgggctgaagttgtcaacactgcttgctacatcgtgaatagggtgtacgtaagaccttggacaagtacaactccttatgagatatggaaggggaggtcaccaaatctgtgctacttccatacttttggttgtgtgtgctatgttctgaacgataaggatcatcttggaaagtttgatgcaagaagtgatgaagggatatttcttggttatgccacaaacagtatgacgtacagagtctacaacaagagattgaagagagttaaagttgtgtttgatgacaagcatcctacaagactcttcacggtggaacaagatgatgatgagcaagtagaggaaacaagacattcaacatctcttgttgaatctggaacttcaaaagatgttgaacagactactgaaccacgtacatcatcatctagcctcacagtccccaaaagtcactcagaaactgacgttattggagagttggatggaaacagagttaccagggggataaaagatgaattacagagatatgattctgtttacctgttttatgtcaagcattgagcctaacaacattgaaactgccttagaagatgaattctggtaccaagcttgccatgaagaactaaatcagttcagtcgtcatgaagtatgggatttagttccaagaccggttcatgtcaatgtggttggtactaaatggatttttaagaataaaactgatgaagaaggcaatgtgacacgtaacagagctcgactggttgctcagggatactctcaggttgaaggaattgatattgatgagacttttgctccggtagctaggctggaatctattcgtcttcttcttggaatatcgtgcttgctgaaaatcaaactgtttcagatggatgtcaagagtgcttttctgaatggggttattcaagaagaagtgtttgtatctcaacctaaaggctttgaagattcaaactttccagatcatgtgtacaagcttaaaaaggctctttatgggttgaagcaagcacccagggcttggtatgagcgtctcaccttgttcctaatagaaaaaggtttcaaacgtggaagtgtggacaagaccttgttcattcttgttgatgaaaaggacattctcattgtgcaaatttatgtggatgatattgtgtttggaagcacaaaacagaaacttgtctctgactttgtggaatccatgaccaaagagtttgagatgagcatggttggagagatgaactacttcctgggtctacagattaaacagactgatgaaggagttcatatctctcagtctacgtatgccaaagggttgattcagagatttgggatgcagacagctaagacctcaaaaactcccatgagtgctactgctaaattgtctgcagatgaagctggtctgagtgttgatgagaagctgtatcgtggaatgattgggagccttctgtacttaacaacaagtagaccagatctgtgtttcagtgtgggtgtgtgtgcacgttatcaggcaaatccaaagcagtctcatctgaatgctgtgaaacgtattctcaaatatgttaaaggtacaaccgatgttggtctgttttactctaaacaaactaatcaaaatcttgttggattctgtgatgctgattgggcaggaaacctggatgatcgaagaagcacaacaggagggtgtttctttttgggaaacaacttagtttcatggcacagcaagaaacaaagctgtgtatccttatccactgcagaagctgagtacatttcactagggagctgctgtactcacttgctatggatgaaacagatgcttctggattacggtatgacctctaacaccctgcttgtatactatgataatatgagtgcaattaacatatcaaagaatcttgtgcaacattctcgaacaaagcatattgacatcagacaccatttcattcgtgagcttgttgaaaacaagattgttgaaaacaagattgttgagatctctcatgtctcctctgaaaaacagttagctgatatatttacaaaannnnnnnnnnnnnnnnnnnnnnnnnnnntgaaaaaatcgattgggctgagtgaatactaatgtgtcttggtgttaaagctattgcaataggttcctttgtacagagttgcattagctttatgttttcatccatatgtatatatatatctattgtgtttgtctttctggtacttcatttcaagaaaaatagctgctcttcatgctcttcctcaatgaagcttccaaaaaggatgtgtgtgttatgtgtaataataaaaaaaggcaaaaagaaaaaaaaaaaaggcctgaaggaatgaacaaatgaaagttcaaaaagaaaaaacaacaacaataaaggttgtgtgttggcaggaaagggattggtattctttcttctcttggggtatatatgtatctatgagtacccccacaaaacattgttcttcattacaggctctaccaatccccctcgtcgtgttacccacacacatcatgaggttgcttctttggagagtatgacgagtgtagactatcctgtcttgatcagtgtgtatggttcatctcactgggccagaaagctgctattttctccatactaaaagtaagttatgcacctctgtactttggaatctgtccttctcgcttggatgcatttcgcatgtgggttccttgcctagtaggagtctctttaagctatatagtatatatgtctatatcttaagattatgctacgttttatcattcagaggattatttgatgagatctcacattcagtttgaatcacagttcttgaatgacagtggctgttaatttcaagtgttgatttggttaaatttgtggttctatatggtttagtcctaccttatgttgcaatcatattatgtacatatgttggttgtctactacgtctctgggtttctgttgtgatttgtttttgggcctggtataaggccctgtctgttgtttaacggatctggtttagtgtattgcagcctgtcttggttttcgtgctgttttagggtttcccttgatgcgctcgtgcctcttaaacctagcagctctcacagaaggctcattctccttctctgctacttaaacctcaaaattcaaagggtttctttctctaaaacacaagtcactatcaatcaagaagcgacctcgttaactggagtctctggtgctggtcagccttccgttgcgactccttctgaccctccaccgcctccggttgctccaatgttcattcccaagactgaaccaggcatctgcatgtctaagaaaaccaagtccaaggtctctgctccgactcagcgcaagacacagtgtacggctgcatctgccaagtctagatctaaagcgcctgctcctgctctccgacatctgtcaagcaggaaatccaaccgatctgcctctactgctggacaatctgaaaaacttgtccgtgactcttcagatctgcaagatggtgatgtcaccgagattgctccgcctctctttctgtcttgtaaccgagagaaccgtcggtttcttgctgttcatgatcgtaagtatccagagctcaaattctcatcggagactccctacagtagctgttttctgactgaggaaggtcttgggcactacaaggtcatcgggaatcgctgcttcaacgacatgcgtttccttcctctggatggaaacaacactgcgagtactcagcaacttctctttaatggtggtttgcttcctactgtcaccgaaattgactcttatgtgcatgaggttgtcatggagttctatgcaaaccttcccgatggtgaagaaggtgataatcttgcctactcagttttcgtcagacgaaacatgtatgaattctccctggctatcatcaaccaaatgtttcagctccctaatccttcctatccgctgggtggtgtgtctgagattcaagttcctgagtccatggatgaagttgcgattgctctgtcaaacggcaaagccaactcctggaagatgctcacttctcggctgttatctcctgagctagctctgctcaacaagatctgctgtcacaattggagtcccactgtgaaccgttctgttctgaagccggagaggatgactctgctttacatggtggccaaagctctaccgttcaacttcggcaatctcatctttgatgaaaatttgggcgtgttcgaatgtagttgcgaacccctcctctactcttcgtcttgtccttccgaacctgattgatcaaatgctgcgctttcagcgcattgtccgctctgatgaaggagataccacttcgtctgcaccgatgaagttcaccatggaagtgaaacctgttcctttgctacagtctgacagtccaaccttggatgcagctctggagaccctcattgcatctctcacaatgatgcgtgttcgtctggcaggtaagcctctctcattcaacttacactctgttatcttttgagaatggttttttatatgagtgtgcactcaagcagggggagagtattctgatgtgtcgtactctgttccggatgatgtgggagatgagaatgtggaggaagaggacgatgatgatgagttagatgacagcacttaa

SEQ ID NO: 163096 - DNA, 7099 bp, Arabidopsis thaliana landsberg
  unsure (1)..(7099): unsure at all n locations
atggcgggaaactataattatccgagtagcggttttttaatcgagattggatgtacaagaggttcgatgaaatgacggtgaatttgtcattatattacgtcgcatgagtggaggagttcttgacatttgctaatagccagcctatagtacaaagttgtcgaggtaaattccactgtccttgtgctgtgtgcaagaataaaaaacatatcgtctggggtagaaaaggagtagtcatttgtttagtcaaggatttatgcctgattattatgtttggtataagcatggagaagatttcaacatgaatgtacgaacgagtaattatgttgatagaacgtatgtaagagagaattctgaaagtgtgggtaatgttgtagaagatccatatgtagatgtgggtaatgttgtagaagatccatatgtggatatggtgaacgatgcatttcgttataacgtggggtttgatgataactatcatcaagacggtacttatcagaaaatggaggaaccggtacgtaaccattctaaaaaaatttacgacttgatagaaggtgctcaaaatccattgtacgatggttgtcgtgaaagccagtctcaattatcgttagcagctcgagtcatgcacaacaaggcggatcataatatgagtcaaagatgtgcggattcggtatgtcaaatgttgacaaattttttaccagaaggaaaccaagctactgatttccattacaagacagaaaaatttatgcgcaatttaggccttccttattatacaatcgatgtttgtattaacaattgtatgcttttctagaaagaagacgaaaaggaagataaatgtcggttttgtagtgctcaaagatggaagcctatggatgactaccgtcgaagaagcaaagtgccatatagttgtatgtggtatctacccattggtgaccgattgaagagaatgtatcagagccacgagactacagctgcaatgcgttggcataccgaacaccaatcaaaagaagaagaaatgaatcatccttcaaatgcggtgaagtggagatatttccaagagctacatcccatgtttgccgaagaaccccgtaacgtttatctcggattatgtactgatggatttaatccatttggcatgtcgcgaaatcattctttgtggcatgtcatcctgactccatattatttaccaccgggtatgtgcatgaatacatagtacttgtttcttacaattctgaatcctgggccaaatcacccgcgaggtagtctcgatgtcttcctccaacctcttattgaggagctaaaagagttatggtctactggaatcgatgcatatgatgtgtctttgaatcaaaattttaatctaaaagcagtgttgctgtggacgataagcgactttccggcgtacagcatgttatcaggatggacaacccacggtaaactgtcttgtccaatttgcatggaaagtactaactctttttatctacctaatggaaggaagacgtgctggtttgattgtcaccgaagatttctttctcatggtcatccattacggaagaacaaaaaagacttccgaaaaggaaaagacgcttctaccgagtatccacctgagtctttaaccggtgagcaaatttattacgagcggttgtctggtgtaaatccaccaagaaccaaggatgttggtggcaacggtcacgaaaagaagatgccaggctatgggaaggaacataactggcacaaggaaagcatattatgggagcttccatattggaaggatctcaatctccgacattgtatcgatgtgatgcatacagagaagaattttttggataacataatgaatactcttatgagcgtgaagggtaaatcaaaggacaacataatgtcaagaatggatatagaacgattttgttctcggcctgacttacatattgatagtaagggaaaagctccatttccagcttatacattgacaaatgaagccaaaatgagtttattgcaatgtgttaaacatgcaatcaaattccctaatgtttattcgtctgatttgagtagttgtgttgatattgagaatgggaagttatcaggtatgaagagtcacgattgccatatttttatggagcagttactttcatttatctttgcagaactcctcgaccggaacgttcaccttgcattatcaggtaaaataagaatataatttactctttatatcatatatgcacttgagatgatgcattttttttccaggggttagtgcattttttagggacttatgtccgagaattttgcagaaaaggcgcattcaaattcttaagcagaacattgttttgatcatatgcaacttagagaagatcttcccaccatcattttttgatgatatggagcacctgcctatacatctcccctacgaagcagaaccgggcagtcctgtccaatataggtggatgtatcctttgagaggtttttcaaaaagttgaaaggaaaagcgaagaacaaaagatatgcggcaggatcaattgttgagtcttatatcaatgacgagattgcttatttctcagagcactactttgccgacagtatacaaacaaaatcaaggtaatcaaatatctatacttattaatttaagtttctatgaataaaaaatcatgacttttaatatagtttatttcgatcaggttaacaagattcaatgaaggtgaagcccctgtgtatcatgttcctggagtaccaaatatctttactcacgttggtcgtccaagtggggaaatgcatgaagtatggctttcnnnnnnnnnnnnnnnnnnnnnnnnnnnnnnnnnnntacgcaattgtgattattttcaaccaattgaaaggtatatgatatagtttaatttaaaaatttagcatatttgtgaaacttctcatatattttttggtttaatttgtatagtatgttcgaggatatgctttctataaaatatccaggaatgtctgaaaaagaactctctacgaaaagatctgaagaatatcatgtgtgggtgaaagaatatgtatgtttgtttacatttattaatgtatatatgaatgcatttatttatacttattaatttatataaatgatgttcgtttacatatatatatgcaggttacatattggagcgacaagttaacatttcctttttgggttaaagatttagttggtggacctttgcacaaggtcaaaacgtggccaatgtattttactagaggatatttgtttcatacacaaaatcatggcgcaagacgtagacgtgtaactatggtgtatgtgtgaaaggtgaaaattacacaaatgcatctgataccgcagatttctatggatacttaaccgatatcatagaacttgagtatgagggggtggtcagtttgaatataacactttttaaatgttcgtggtatgaccctaagctcgaaagaggtactcggaggagcaatagtggtgttgtcgacgttctttcatcaagaaaatactacaaatacgaaccctttattttaggtacgtatggtatatatatatggtcatttagtttttctagttaatatacaaatatctaattctccaaatatggtgcatttacaaacaacatctcaagcgtaacaagtgtgctttattccttatccatacatgaaaaaaccaaagcgggagtggctcaatattttaaaagtaaatccaaggggaaacatattaggagaatatgaaaataaagacccgagtttattgcaaacagaaaatgatgatgatgttttaataacaacaatagaagatcttgtactcgacaatttgacataagattgcaacccaataaatattgactacgatgtcggagacgtcgatccagaagatcgattcctatgtaatttatcgtcttctgatgatgaagaacatgaaggcgaagaacaatattagttttgtgtttatgatatgtaccttaagttatttctattaattatgatatgtacttaagttattttcaaaagttatgcaaacaattttaaattattttgaaaaactatattgactaagtatgttatgtttaattatatttatatatataattactatttttgaatatctaagacccgaaaaaacacaaggcccaaacccaattattaaaaattaaacaaagcgactaattgctgacattttcgcgactataaccattctattgggccaaaataactcgaggcccaactacggcgactaatttgtgataatttagcgactacaacaatattattgggccaaaaatttcgaggcccaaaattggtgactaatttgtgacaattaagcgactaatgtttaaacaaactgaaccttttaggctcaaaccctttaggcccaaaccattcacttgttatgcgaaaaccctaacaaaaatatctttctctcttcgaaacatccgcagtcttattcttcaatttctctcttcgatttcctcttcgatttcctcttcgaaccctaccaaatcaatctttcctctttgttttcctcttaatctcttcttcttcttcgatttctttgatttgaacctctgtctcatctagatctctccttcacacaatgtttgggcgaggaaaaaagaagcgaaccagtcctaaccttgctcagagagcctccacatccacggctggtcgacgacctcgttctcttccgtctcagtacgatttcacgccggcagcagaacagtctcctaagctagagacgcctacaacagaagcctccgttcctcctttacagtcaacggcagctcctgttcagaactatccgccgcctctacagttgtttcagcactctggcagtcgacaacctgaagtgcaaaggactgcctcagtagaagtgcagaacaatccagcgactcaagccgcgactactcagcaggttcctccgactcctcaacaagaccctccgccttctcagcaagaccctccgccttctctagttcaagagtctcgagctcacagtcacccatcctctcaaggcaacaacttcgaagaatatccacctctgtcaccggatctccaggaggacacacttcaatccctaaatgatctgcttatgttgccggagagggataagttcgtcaccgtcctctctcccattcctcgaccaaatacgacatggtatgatcttcttcttctcttgtttgtgatgccatgttgtgttcaatgtcggtttagttgagtaatgagctttgtgagattgattatattgagaaaatgtctgaattgtttctttgttgtgtttcgtgttgtgttggtgttaaagtctttgatattatagatgttatggatgtatctgacaatctattctgttgtttgaagagtcttgttgtgttggtcttattttgttgtttgcgagaacaagtagtttaagttgtgttttgatcttagggtttagttgggtaatgatctttgtgacgtgttgtgttggtctgaaagtctttgatattatagatgttactttgcagccacaatctattctgttgtttgaagagtgttgttgtgttggtcttattttgttgtttgcgagaacatgttttgttaagttgtgttttgatcttagggtttagttgagtaatgagctttgtgagattgattagattgagaaaatgtctgaattgattctttgttttagtctcgtgttgtgttggtctttggtctttgatattttgatgttctttgcagccacaatctattgcaatgtgtttgaagagccttgtcgtctaggtctctactctacttgttgtttgcgagaacaactgcttgtggctgcaaagtatcgtgtctgtcattgtgtaagtttagttctagatgatactttgcagccacaatctatgttctgctctatatgatctgtttgtatgatactttgcagccataatttatgttttgctagtctttggtctgatatttagatattttctcccatataataacaacttgtttttcttgtgtatggaggtttactcgggacacaaactcatgacttgttaggaatatcactagagtgtttacaaacaagtttgatggtctcttctacagctggacatgtgtgcctcaagagaggcaagagaaatacttcctcgagtttgctgttaagtgttctttcagcccttcttttatatagttgattacacttcttttttttactgacattaccttttctatttgtagaaaacacaccattgggatcctttgatcacagggactgttcagttttacttcaacgagatctgtttaaggcgaatgaaaggcatggttagcattgtaagaactagtcgaaagaaacctaaatggatcgggaaaactctatggaaggaaatgactgcgtactaggacactgaagaagctcaggaaagaagtcaaatctattcaaatgcccgtatgtctgaccgtaacggtctaggtcctcacatacacttctcagggtctaagtcatatcatcaaatccgagacgaattggtaagtcttctctctgtttactcctttgcaactttaatctgatgtttctctacttttctatgacttgttttttttttcattacaggaagagcaattgggcaaaactgtcagtattggtgacgttttcatcaaaacacatacaaaacctgatgggacgtatgttgatcgaaaggcggagaagattgcagagttatattagaagaatttgcaactgaggcagtctgagctcgaggctgaagcttctgctgtttcagatggcacttcgcgggcacgggagctcacagctgaggaatgtacaaccatatttatttaggtaacgttttatgtttcccaatttagtgttttcgagttgtctttttcattctctaatctcagcttttatcatactatgcagtccactgagagggattcgagaggcgttccttatggagtaggaagcctcaaagagtctcttgtcaatggcaagcggaagcaagcatgtgactcaacttcttttgtggctttgcaagaacaattacttgaagctcaacgcaagatagaagagcaggtctcttacaatcaaaggcgtgaatctgagattgcttggcgtgaagctgagaattcccgagctgcagatgagtag

SEQ ID NO: 163097 - DNA, 1069 bp, Arabidopsis thaliana landsberg
tttcaatatcttgttgggtttgtcttttgtgtgtaattgaagatactacattcttattattattgtctcttgcatcttatttgtataaacaaaagcgggcacttccttatgactttgtgagaagcttcacggacaaagagctttcctgtaagatgaagtaagaacgcaatggggacgctcttgggaagtaggaatctccaaaaacccgacattttactacatggagaagtctggatgggagaagtttgtgagggacaacactttgggaacccgtgagtttattaccttcactcacaaaggagagatgaactttactgtcaacatctttaagcaacccgtgagttgatgggaaggagatgatgcaacctccacaacctagagccttcttggcatcttcaagtaagatttgcttttctgattatgaaacaatgaacagatgataaagaaactgattcgtttttactattgatgatgaatcaggtcgtattagaagattcagaacagaacaaggggaagatgacaagaaggaagaggtggtgtctgagtcaagtaatcgtggccggacaaccgcagctgaatctgttggaaggaagctcaaacttgggaagaaggcagctgaggaatcccaagaatctaaaaggaccgagaaagtggttagagcccgaagagatgaggcaggtgcctcttcatctactgctgtagaattcacggccgtattccagccagcatatctctacaatctggtaagataaaaacactctaaacaaaatctctgtattgagcaatgattgtttttataaaaaaaactgatatgtgaatcaaactttttttgagtgtgtagaggatccgaagttctgttaaggatcaaatgccggttgagaaaacaatattcaaagtccatcatccaaatgggaagaaattttggaatgtggtgtatctggggagttatggagctttctctggtggatggcaatgtttggttaaagagtatccccttgttgttggggatacctgcaagtttacattcatcaaaccggaggagctgattctctttgtctccaaaccctaa

SEQ ID NO: 163098 - DNA, 2106 bp, Arabidopsis thaliana landsberg
  unsure (1)..(2106): unsure at all n locations
atgagttctacacaatctccgtcgaccccgagcgcttcttttgtcgattctagcgattcgaatcacccagatgatcttccccccatctacaaacgaagatcagtttggacgtcttccgaagattattctgtttcttcttcggatgcccccgagcagacgactcccttcacggctcgggaagataccaatgccgacatcgctcgggaattggatttacccgacgactctgagccgcctctcgttcggaggtcctttgctccgacggctgacgaagccgggacatccaattggcaagatttgcccgagcccttcatgccgacggttaagatcgaggattttctttactttagggcccgaaacgcagacagaagatatcttgcgtcttaacgagcataaggctttcgagaaagcctagaagaagaggaagaagaaaggcaacagggcgatagtgccggatccccctggcttgactttgtttaccaagcggtcgctttcggatctgagggcctgattcaatcttggtgaggtcaccgtgcgtgtgtcgatccctgatgnnnnnnnnnnnnnnnnnnnnnnnnnnnnnnnnnntctgtatgagggatttttctattattgcttcttgtggcttccggtcccgaggctggttttgcagtacgtgacatcgtaccagttcgccctctcgcagatcacgatgcggtccttgagacatctgctcgagattttgattcggagttatgaatccgaaactgacattgcgcttgctcatctgagaaatcttcttgagatccggcgggttcccaaatccgaggtggatcggtattacatctctcctgctaagggtaggaaagttattgatgggttcccgagcaaggatgagccgtataccgatcacttcttctttgtagcgctcgaagatgttgttcacgaagacctccttgggtcggtcctgacgagatggagaattttgggtagttgtagctaacaatttatttgtgcctgttgcggttttatagtttctttttcttactgtagttttcctttgttgcagaacgcaccctaaagttcctcgagccgattccagatgatttcctttcggcttttcacgcgttatcggctcggaagtgccattggttgaagaagaagaagaagaagactatagccttcgagcgataaagcggcgggtaaacgcgttcggatggatgacgaatcgtacaagaagaaaaagaagaagaagaagacttcgggtgccgaggcggagaaagtgctcccgatctttgaagatcgtattgcttcggctaatctcctcgggggatgtgtagacgcaagtttgccgagacggcatctcacttcttacgggtatgtgtttcattattcataggttatcttcggttccaatattgtaaccctatccttttcttgttcaggtcgttgcctcgatgaaccggatggtgcattcgtacgactcatctatgcggaataatatggaagcggttagcaagttagccgaggcggagtcccggattcaagccgccgagcgagagaagcaaccgcgacgaatctggcaagggaggaggctgagcgggcggcctttataaacaaagagaacgccatcaagatggccaagcagattctgagatcgttcgtctaaagcggatgtttgccgaggcgagaggacttcgtgatagtgagctggcttgggccattcaaatgacgaggcgagaggtttctgaaacctttatcgccaagttgaaagctgccaagcacaaagtgtcgctccttgatgaggtcaatgaccaattcatgtacctgtcccaggcgcgagccaatgcgcagctaatcaaggtgctcgaagaaggcggggttctggataaagagaacgatcaagtcgatgagtggttaaaggattttgccgacaccgaggctaacctcaaccgctttatcgccgagctgaaagaggatcttaaagctccatctcccgagcccgctcctctgagtctgggtggtcataggtcggttgagactcttgccgacgatgcgggggttaccgaccaatccggatcgctccttcctgccgagagtaaccgcccgtccgaagagctcgactag

SEQ ID NO: 163099 - DNA, 2740 bp, Arabidopsis thaliana landsberg
atggaggctaccgaacatacaccttcaaattcaacctttccatatcggagaatggatgttttcgtgaaagctttcactataacatctgagaaagtgaagcatattgattgatcaaaacaggttagtcatcagctttccccttatacagtatcacatttttaaaacatgtgaaaatgtttgttttattttaatagttattaactaataagacaaaaagtatatacacttttttgcacttttaggggttggatttgtgtccacgtaaaaatatccgtttttaattttaaatgtttctatattcatattctttaagtttttttttctttgttttgtaagaatttttgaatttgatatatcatatattctataaccatcgtttcataaatcttttcttgactaaatatccactgcaaaaaaaagtttcacgaaataaaaagataaatatattatttaagataaatctaaataattttttttttggcaaaaatagaatcgagaaataactaaaatttcaaagtcgccattgacactctagattaagttgaaatgaaatttactcatattttgtactattcattgatatcatcatatcaaaaatacaacatatgtactaaataacttctaactgaaaaattaaatgcactatacctaacttaactatcaggtagattgactcaatcatatatacaaacgaaccggtccacatccatctaagctgatccgcatctatttaagatggtatgtgtctatctaagctggtccacatatatttggattggtgtaagatgaacattatttttctgaaccacgataggctagcctgctagaattgtggacaaaacacgtatgatcggaccctcccctctaagtccatcatgataatgggccgacaatgggacttaagttttatatttttaaaagatggtgaaaataaaatagggtcaatgaaatatatgtatttgaagagcgacatatttaagaaagtatacatgtaaagttcatatttagctgacataaaacacgcaaaatacaaatgactattctaaccctactcgcctgacaaactgaactaagatatcgaatatctcgcattaaatgcggggacaaactctgcaatattccgccaacgttacctgctaaaacagagacacgtaatgatgagcaatgatattagtggggttgcgtgctccactattaattactcctctatcaacgttgcttcctcaacaaatttagaaacccataaccgtaaagaaaacagcattaacttctgcgacagagataacaagatcgaagtacttggagacagaggtaagcaattaatgttcatgaatccttgttctgcctaggtatagtgtaataaatgttgtcgttatcaacatagtactttatctccaatctaacttgtacgctaacgttaaagttatgactgattatcaacaggattcatggctctggtggttaggctggtaaggggagagtggaaacgagatgagtccggatgttatgagcacgtagccgagttggatgggttatgcttggcggtgaagctccgggagcgagacacgttggccaaggtgattgagactattaaggaaagactgaatctacggacggaagatgaggtggaactatcgtatcaatggccgcaatggatgatgggtccagattggcagcgtgcaaaccctatctatattgtcgatgacgaagacatgacgttgtttatggccattcgggccgatctagatgaggttcacttgaaggtcaaatccatacgcagggatagagggacaacgacagtgaattcatacagaagcgtcttagacataggaggtatgactccgcaagcgatatccgataagtattggaatagcagtgaaacaagagcagcgtgggattcggcagtaacaagaatgttatacggtaacggctcaaattatgttccagcgggagttaccgggcagaacaacaacggtgtcagtgctcccttcggcaggcgtgggggaataactatttgagaaaatacgggagaaacgggagtgggaagcgtcaacccgttaaacctaactcaagcccaaccaagtgcaacagcaaaagggaaggagcgtgtcttggacgatgagacccttaaagacttgcagtttgcgctatggaggaaaacaaaacaggatgaaatgttaagagagatggaggaaagggagattcgtctagctaggtcgatggggggaccactgaatagtactacggctaatgtccaggataacatggttatcgagcaatcaagctcccgacaggaggagtcaatacgcctaactcttggaagcgcagaaccagcacgtgttgatgtatcagtggtggcggtgtcttcgacagtggcgatgtcttcaaccgactcaacttttaagacagctacgaaaagtgtgagcttctctactgatgagctgatggaggaggatgatttatctagtaacaattgtcttgccaggataggtatgctattcagtaacagtgcgattatcagatattataaaaattgttgcataactttaacagacactaactggtaccagtcctctccgccttatgttcaggtcaagacgaggtggcacactactactcagacccagtcggaccgctctatatggcaccaataaatactccaagaatgagtagagttaacaacattgtaaggggggagatcattgcaactcaagaacaagttatggcattaaatacccag

SEQ ID NO: 163100 - DNA, 1021 bp, Arabidopsis thaliana landsberg
aaaacacaccattgggatcctttgataacatgtacagttcaatggcattttgaagaaatctgtaaacgaaggatgaaagacatggttagcacgataaggactagtcaagagtgccctaaatggatcatcgattctcatatctggaaagcgatgtgtgagtattgggatactgaagaagcaatagcgaggagtaagatatattccaaggctcgcttgtctgaccataatgggctcggtcctcacatccatttgtcagggccaaagtcatatcaaaacatcaaacatgaactggttattaacttctatctctgtttttttttaatgtgtctctgtcttaagttcagatgttgtattaagccttgtttatttttaacatcacaggaaaaagagttaggaaggacgatgagtgttggtgaggttatcatcaagactcataccaaaccagatggtacttatgtagataaaaaggcacagtagattgttaaaaattatgagaagaagctgcaagagaagttgtctgaaatggaggcaaagacttcaaatgtttcagacggggaatcaagacctcgagagctcacaatagaggatcatactgtcatctttctagaggtaaagtttacattttcacttgcatattgtctgcattttctcaagctctttattaatggtttggctatttttttcataggccacagagacagattcaagagggaactattatggagttggaagcctcaaagataatcttccggatctagtcactggaaagggcaaacatgcagcagactctacctcctttgtgtcattgcaagagcaactgaaagaagctcaacagaagatcgaagagcaggctgctcataatgctagacgtgaggaagagcaagtccgagctgtggctgaacagaaagacaagccagagcacttggccttggtggaaaagtatttgcgccaaactgatccagcctttctcaactttatggctactcaatcttctgaagcaaccataaccgatcctatctaa

SEQ ID NO: 163101 - DNA, 1145 bp, Arabidopsis thaliana landsberg
atggaatcgtttcatcctcttacactgttgaaaccgcctattacaggatggtgtattcgtgtgagagttgtgaggacattcttagttccgctggttccatcttcaaaggttatgggtttgattctcgtcgaccaacatataagttttgactattttgtaatgaaaattttaggtttgcatgttttagagttttgattagtatatttgatccgtagggtatgactattgaagctactattggagacaagatgtcggatcactataaagattttattaatgaaggagaatgggtaaccataacaagttttggaattgttgagaactcgggtcctgtcaggccaacaactcataccttcaaaattggatttgttgttgacactgttgtcagattaacaagtccggtacccgctattcctcactatcgtctagcatccttctcttcgattatcgatgatgaaatcgataaatgtgttttagttggtgagattcttatgaatttgttgtgtgcattattttatatcattcatcttagtatttcattagttttgtcattttcaatatcaattgtatatatttgactctgatttattttaattaatttctgtaattttttggaaacttggtgggagcgatctatgatgttggagaaatgataaacataagacctaagcaaaaccacgtcgatgattgacgctaactttcaaaataagtgacaatgagtaagttttctactttgatagtttaatttgaattacctaaattaaactgttctaatactatttttgattatctgtttagaaatcgtgttttgaaatgtctagctactgaagctcttgactttgatcataattatcgtcgatatggtggtggagttattgtcgctgttcttggatgggggaagattgaccattattttgatggtccaaagaacgtacgtgtttgcaccgcatgcccgaaatcatccgtctttccggatcctgatttccccgagtctaacgagatccatgagatgtaagttttgatatatttttttattattacatttcgttattagtaaacggaatgtaatattattattgataattgcctgccacatttgtttgttttgtaggttccgtgatgaaggtgcaaggaatggcggttga

SEQ ID NO: 163102 - DNA, 979 bp, Arabidopsis thaliana landsberg
cgggcaccggaaagagtgcgagtttttctttggctagttgttcatcaggttattatgactaacactgagagacagagaagacacttatgtgatacaactatttgccaaatttgcaagagtggagatgaaactattctccatattctcagggattgtccggcgatgatagggatatggaaccgtattgttccacctactcttcagagacctttttacactcaaacattactagagtggatttatggaaacgtgggaagtcaggtggttagagaggggataccgtgggggacagtgttcagtatggcaatgtgatgggcgtggaagtggagatgcgggaacgtttttggtgagaataggaagtgccgtgatcgtacccagtttgtgaaagagatatcaaaagatgtgtatcaagcacattgtcttgcaaatggaggtcagattaagagggttagagtggagcgtcagattgcttggtcaagaccggatgaaggatggttcaaacttaacacggatggagcctcaagaggtaacccgggtttagccacggctggtggggtcattagagatgcggtggggaactgggtccaaggttttgcttttaatataggggtatgtacggctcctttagcagaactttgggggttctactatgggctttattatgcatgggagaagaagattactcggttaaagttggaagttgattcggagatggttgcggggtttcttaagacgggattaggatactcatcctttgtcattcctagcacgcttgtgctatggcttcatattgagggactggatagtccgtatttcgcataagtatagggaagctaaccgtctagcggatgggttagcgaactatgcattctcgttacctccggggttccatgggcttggtgcttgcccgaagagtgttttagcggtctttggtgatgatgtcaatggggttgagacctcacggaatattttggtgtaa

SEQ ID NO: 163103 - DNA, 3807 bp, Arabidopsis thaliana landsberg
  unsure (1)..(3807): unsure at all n locations
atgaaagagaacgtgatcatatattttaaattccaaggtcgcatgtataatgtgatgatgaagacattaggggagaagattactctctcaatgttagaagataggataatgacgaagcttggattagatgcaaataaggtaaaattgcatatgaggtacaatacacggttgttcggagtagaggaagaaatgaacgtttgtgatgatgaggatgtctttgtttatgtaacatccgcaaaaaataaccggagaagtgttttggttgtggaagagatctctaaaccgcccgagcannnnnnnnnnnnnnnnnnnnnnnnnnnnnnnnntaaaagttctgttggtaagaactatacagagttgaattcagaggaggatgaaatgagagtggatgatggtgcactcatcgtcttattagaagaggaacaaggaactcaacatcaacttgaggcaatagtggaggatcacgggactcaagaagatgaaacacgctatgatgagtctatggataattctgataggggggaacagtatgttgagtcgccacctgctatagaaccgggtatgtttattaaagaatggaaagacggaattgggttgaccttacgtcaagaatttccaaacaaggcggcattgcacgaggtggtggatagagctgcatttgctaacagttttggttatgtgattaagaagtcggataaggagcgctatgtccttaagtgtgccaaagaaagttgttcgtggcgtttacgagcgtccaatatcagtaatactgatattttatggattagaaggtacaataagatgcatagttgcactcggctaagtaaaggtggcactaggctcaggaaatggaaaggcaacccacaattagtcgcagctctccttcatgatcattttccgggacagttggaaactccggttccaagaattatcatggagctagttcagacgaaattaggtgtgaaagtatcatactcgacagcgctaaggggaaaatatcatgcgatttatgatttaaaaggtagcccggaagaaagctacaaggatatcaattgttatttatacatgttgaagaaggtaaatgatggtacagttacttatctgaaattggatgagaatgataaatttcagtacgtattcgtagctttgggagctagcattgaaggttttagagtgatgaggaaagttttaattgtggatgcaacacatttgaagaaaggatatggcggagtgctagtgtttgcctcagctcaagatcctaaccgtcaccattacatcattgcgtttgccgtactcgacggtgagaatgatgctagttgggagtagtttttcgagaagctaaaaacggttgtacccgatacttcagaattggtcttcatgacggacagaaatgcaagcctcataaaggccatatggaacgtgtataccgcagctcatcacgggtattgtatttggcatttgtcccaaaatgtgaaaggtcatgctactcacaccaactgagacgtactcgcatggaagtttcaggagttaagtcgggtctacgtcgtggcggacttcaaccgagcgtatgacgggtttaagttgagatatcctaaggcgaccaagtatttggaggatacaaccgtgaaagaaaaatgggtaatgtgttgtttctccggagaaagatacaacttagacacaagcaattgtgttgaatctttgaacaatgtgtttcgcaacgcaaggcaatactcgttaataccaatgcttgatgccatcatcaaaaatatctctgtttggtttaatgaacatcggatggaagccgcgtctggatccttagaaaataagatggtgccttggtggagaattatttgtatgatttgtgggttgatgccgagaagttgacagtggtggagctaaactcattcgagcgtgaatatgtagtcacatgcgacaaaggaatagattatacagtgagcttgcttttgaaaacttgcagtttcaaggtgttcgatatccaaaaatatccttgtattcacgcattacccgctttcattagcattctggatgatgaagattggagaagaggtttggagttacatgatttggttacaaaatattattgggcggagttgtgggcattggtctattataggactatttattttgttccggataagtcgcaatgggaagtatcagatgaagtaaaagtgttgaagatagatccgctgtcttaaaaaccaaagaagggaaggaaaaaatgttaaggtttccatcaaccggagaaaattggccaaaacgacaaaggacccaaaacaaaaggcgtccaaggtaatcgtgtcaatggttattatttgggaatacgcctatctgaatattttactttgtttctgtagtgatttgttgttttgatggtatggacatactatgtaatattgtatttccccttctataatactatgtctgtttctagtgtttttttgtaataccggttataacaagtaatatcatgtctgtttctgtcgaatttgtggtcatattagtactactgttaatactaagttggtgttatggagttcgaatttgtttacctcaaaactcaatgaaaatgaatacagtgagttattaacagataaaaatgtattattaatcatttatatttaattaagttagaaattttaatattaaatcgttttaacttttctttagtagactcaatacttttaagctcacttttaacatttcccttatacttttaagcttacttttaatattatccacaacttagaatgaaaaattcatattgctacatatatttaatttataattgcacaaaacatttaaagctctatatttataaagttccatccagtttactactaaataaacaaattgtaaatataagaaatactgctaaatatgaaaaacatggaaagtaatactatttgagaaattggcactaccaaaaccttaggaaatatgctgtaaaaaggttgcgcacatgtcaaaaatctccaaaaaacggcacacacgtggggaattattttttttggttttcccccaaaatttttggcgcctaacaaattttgagattccctccaaaaccaaaaatttcacttttttctttttcctctttctttttcgatctcttcttacaactttctttcatctctcatctctcttctcccacatctctcatctctctcttcgactcgaattttctcacatctctcatttttctttcatctttctaccatggatagactgtgtgagagagacccctactacgatgatatgaaagtggcgaagagagccattgagcaaatggaaatggttgagatgatggaagggattcctaagttttgtccatgtggtggtagcattgtcgtcgctagaaaggataacaatagtaactaccaatgcgagaagtttaaggtatgttgatgtagagcacgagtttttcaagtttttgtagatctagatccagatctatttggtatttcaaagtatttcccgttttggtaatactgcttagaacaagtaatactgcacaagtttttctagtttttgtagatctagatctatatttgataaatatttggtactttgtaggatgatagaaatgatttgatgcacatccgtaaactttgggataaggctatggaagaagaggtgagtagcttaaaggagagtgttgattacaatcggaagaaagttctaagtcatgagtatctcatagaagaaatgcaaaaagaattgaaagcccaccgtgcaaagattgtgaacgtgagcaaagtggtattccgttctcctattgttctaaggaag

SEQ ID NO: 163104 - DNA, 3321 bp, Arabidopsis thaliana landsberg
gtaaaaagcgaatcttttagaggagtttatagttctaggaggttcaagttgtcacatttcttactagctatagcagggttttacttggttttcttagcttttaagttcccacatttcattgagatggttgctatgttgagtggtgatactggtttagatggggcattaagtgatactagtttagatgttagtttaagcggatcgttacgtaatgacatgttgaataggaagctagaagatgaagatcatcaaagtgggccttctactactcagaaggtgtcaccagaagagaagattaatggatctaaacagattcagccacttctgtttcggtatggtcgaatatcaggagaggtcatgagacgtaggaataggactattcatatgtcaccttttgaaagaatggcagatgaggcttggatacttggatccaaggcttgggaagatgttgataagtttgaggttgataagatcgacgagagtgcttctatattcgaaggaaaggtggagtcatgtccttctcagatctcaatgaatggagatgacttgaataaagccaataggatcatgttgcttccctgtggtcttgctgcaggatcttctattacaattcttggaactccacagtatgctaataaagaatctgttcctcagcgttcgagattgacagaagcgatggaatggttttggtttcacaatttatggttgagttgcaagggctgaagacaggggacggtgaatacccccctaagattcttcatttgaaccctaggatcaaaggtgattggaatcaccaaccagtcattgaacacaatacatgttataggatgcagtggggggttgctcaaagatgtgatggtactccatccaagaaggacgcagacgtgcttggtaagattttgagcatccatcataaactgttgttagttgccggaatgtagcaagtccatgctcagaagtctaagtttgaattaccttagcttcttttttattgctgtgtagttatgtttctttttgttttctcttcatctaagtaaatgtacttttccagttgacggattccgaagatgtgaaaagtggacgcagaatgacataattgacatggtggactcaaaggaatcaaaaacaacatcatggttcaaacggtttataggacgtgaacaaaaaccagaagtcacttggtcattcccttttgcggaaggcaaggtctttgtcctaactttgcgagctggaattgatggtttccatattaatgttggtggaagacatgtgtcttcattcccttatcgaccggtatgtgatatcagatgagcattctacttgtatatggctttggtctcagcactcaatagtatcatttgttcaaaccaagaggattcatctcgtccatgtctgataactttgtaaaatattttgtgatgtctggcctctcagggatttaccatagaagatgccacagggctggcagttacaggagatgttgatattcattctattcatgctacttctctttcaacatctcatccgagtttctcaccgcagaaagctatagagttttcttcagaatggaaagctcctccattacctggcactccttttcgccttttcatgggtgttctctctgcaactaaccatttttcagagcgcatggcagtgagaaagacatggatgcaacatccttctattaaatcttcagatgtagtagcccgattctttgttgcacttgtaagttcttacaatctttccttattttaaagcatgatctttaagaagtttaatactgcaggtcgatttaattgaaacattgagatggagatttgctgatttgaagttcttatgctttggaatactgagcagtttatgtgtttttgttgatttgttttgtgtagaatccaagaaaggaagttaatgcaatgctaaagaaggaggctgaatattttggagatattgtgattctgccctttatggatcgatatgagctagtggtccttaagacaattgccatttgtgaatttggggtattgatcatttctctcatgactccatatctgtttaagtctttgaacaatctctgataaggatcagtaaatgaacagtttccctcattgtagttactttacacaaatctaattatgagagtctgaatatcttccattcaggtccagaatgtgacagcgccatatataatgaagtgtgacgatgataccttcatcagagtggaatcaattttgaaacaaatcgatggagtctctccagaaaaatcactttatatggggaatctaaatcttagacatcgtcctcttagaactggcaagtgggcagttacatgggaggtacaatggcttctgttctttacctgcatatagtctgtatgattcagaaatcagaagcagcctcagatactaaattttctcttatactgtaacaggagtggccagaagctgtgtatcctccttatgccaatggacccggatacataatctcaagcaacattgctaaatatattgtttctcagaattcaagacataagcttagggtctgaccctttatcatcgtcttacgttcatctccatcttttactgtcatgaacataagagtctcctaacattttcaaactatttcgactttgttgtcacagctattcaagatggaagatgtgagcatgggattgtgggtggagcaattcaacgcctctatgcagcctgtcgaatactcacacagctggaaattttgccaatacggatgcacactgaactattacactgcacattatcaatctccgagtcaaatgatgtgcctgtgggataatttgttgaaaggtcgaccacaatgttgcaatttcagatgaccaaaacatagcactagccggaagatattacaggattacagatttggcaccaccttaacccattttgtaatttttcctctttggtgctagttgcttacatttacacattcaagataacaatctcttattgtacattgattaggattttgtctaagaaagagatttacactgatatctaaacaaattctttcaaaacgtctttgccataacactatggggctaccaagaaagagaagccaaggtcactgtattatacatttatactactctgctggtctttaagttcttgagtcatgttatcaagattttggctttcatcaagtcgcatttccttaatcatctgcatttcttgcgcttcactgaaagatttccagcttttgcaagatggggaaatggaagagggcatccacaagatccaggtagatgtcactgagttgttttcttcagtgtttgccataatcctcatccggtag

SEQ ID NO: 163105 - DNA, 6689 bp, Arabidopsis thaliana landsberg
atgtctggagaggatgctaccaacacttcgatagccaaaaccctcaagaccatgcaacaaacaatggttgatatggcgcaaaagttttcaaacgtggaaaaaaccgttgaaacactgcaaacaacccaggtatcgctcagccaaaatgttagtaccattcagtctcgtgtccgttctttaaatgcagggaattgtagagttcgaagaactatcttcggatccccatatgatcttccgcgaaatgcaacaagagaccatacgaccccggatggtacagacgcgtagaatcaaccagaagatggagaaacgcatcctgaagatgataaccagttgggtgaccaacacgatcaggaaaacttggaccaactcgaaaccatgaaggaagtaagtctggagttcaaagaaatgaggtcgaaattcctccaagctacaagctcggaaccggatatcaaccgggttatcgagaaagctaggcgaacaccattcactctgcaaattacaagtttgagaatcagagattctcgaaaactcaacttagaatcatacaatggtttggaagatccgaaaggttatctcgcagcctttctgatagccgctgggtgagttgacctaaacgaggccgatgaagacgtagggtattgcaaacttttctccgaaaatctgtgtgggcaagccctgatgtggttcactcagttggaaccaggatcgatcagtaatttcaacgaactatcggcagtatttttaaaacaatactcaattctgatggataagagcatttcggacaccgacctctggaatctatctcaagggccgaatgagacacttcgggctttcattaccaaattcaaatacgtgctttcaaagctctctagaatctcacaacaatcggctctgtcggctctgcgaaagggattatggtatgattcgaggtttaaggaagatctgatacttcataaacttgatactattcaagacgcactatttcgagcgaataattggatggaagtcgaagatgaaaaagaaagtttcgcaaaaagagataagcaagcaaaaccagcggtcactttttcgcccaaaaagttcgaacctcgggagaatcagggaccaaggaagtttggtttgctaccattcaataacaacgtcggaaagcagtttcaggggaaaggaaggtcgaatacctggatccgtgatgaaagctcgtattgcgatatacaccgagtcacgggacatctgaccaaagactgcagcatccttaagaggcatctcgcagaattataggccagtggagatctctcaaaattcgacatggagaacttcatcaaacaatatcatgaatcaagggataatccagagaatcaaaactctaaaagaccaaggccggcgagcgaagagggaccaagaacttcaaagggtaaaatcaacgtaattctcggaggatctaaactctgtcgtgattccatcagtgtaatcaagaaacatagccgtaacgttcatttgaaattaagcttaagtgaggaagtagattttcaaagcacttcgatattgttcgatgagaaggagacgcaacacctcgaaagatctcatgatgatgcgctcgtagttacgttggatgttgctaacttcgaagtgtcaaggatcctcattgatactggcagctcggtagacttaatttttcttagcactttggaaagaatggggataagcagagccgacgtggtaggacccccatcacccttagtggctttcacgagtgaatcagcaatgtctctcggaactatcaagccaccagttttggctggaaagatctcgaagattgcggattttgtcgtgttcgataaaccagcatcctataacatcatttttggaactccgtggatctatcaaatgaaagcggttccttctacctatcaccaatgtctctaattcccaactccgagcggagtggaaacaattcagacagatcaagaagcttcgagaacttgttatttagctagccaccgattaaaaatccaatagcaattaacgaaacccgcaaagaaaggagtaatcccaagatttcctagcgggcagaaagtggatgatgttgtgatcgaagtgattctagaatcgaagaaaactcggagtggagagagcaaaagcagtaaatgacgaagtggataaacttctgaaaattggatctataagggaggtacaatatccagattggttagcaaacaccgttgtagtaaaaaagaagaatggaaaggatagagtttgcatcgactttacagatctcaacaaagcttgtctgaaagatagcttcccactcccacacatagatcgtctcgtggagtcaaccgccgggaatgaattgttatcctttatggatgccttttcgggatataaccaaatcatgatgaatccggaagatcaagagaaaactttatttatcacggataggggtatctattgttacaaagttatgccattcgggttgaagaatgcaggaccaacttatcattgtttggttaacaagatgttcaacgagcatctcggaaaaacaatagaagtctacatcgatgatatgctggttaagtcgttgaaaaaggaagaccacgtaaagcatctggaagagtgtttcgcgattcttaaccaatatcaaatgaagttgaatccggcggagtgcacgtttggagtcccatccaaggaatttctcggctacattgtcacgaaaagaggaattgaggcaaacccaaaccaaatcaacgcttttctcaacataccgtctccgaagaatttcaaggaagtacaacgattaaccggtcggattgtagcattgaatcgttttattcaaggtcgaccgataaatctttactcttttatcaaatcttaaagggtaacaaagtatttctttgggatgagaagtgtgaggaagcgttcagacagctaaaggcgtatctgacttctccacccgtattgtccaaaccagaggtagacgaaaaactctatctatatgtctcagtttcggaccatgcggttagcggagtcttaatccgagaagaccggggagagcaaaaaccaatttactacataagtaaatctatgacggatcctgagataaggtatacgatgatggaaaaccttgcacttgcagtagtaacctcagctcggaagcttcgaccatattttcaatcccatccaatcgaagtattatcaaatcaaccacttcgaactattctccatagcccgaaccagtccggtagattggcgaaatgggcggtggaattaagtgagtatgatatagagtacaagagccgagttgccatgaaagctcaagtccttgccgattttttatcagagttaccggtactcggagggcaggagcaaccgccaaatcagacttggaagttgcatgttgatggatcgtcatcaaaaaatggatccgggttgggaatcaaattagaatctcccacttcggaaatccttgagcagtcatttcgattgttatttactgtatctaacaatgaggcagagtacgaagcattgattgctggacataggttggcacaaggagttggggccgatgagttggtcgcctactgtgactcgcaactagttgttaaccagttcaatggtgactatgaagcaaaagaatcacgaatggaggcatatcttgaggtggtcaaagacttggctaaaaactataagaagttcgaactcattcgcataccacggggagaaaacactactgcagatgcactagcagccctggcatcaacatctgatcccgaagtcaaaagaatcattccagtagagtgtatttcagaaaggagcattaaggacgaaaaggaggcattcgtcgtcacaaggtcccgacctgcagcccgagatcgcggcgaacctgttattgaattaccacctgtcaaaaggcgaaagtcaaaagagacaaccatacctaagcctactgtgcaagaagatagtggactcgaagaaaatgacgaaccaatagaagaaatcacctcggacaccacagtggaagctagatccgaaccgtgggttgatgaagacatactagcgccaaatgagcatcccgaaccagaagctcggatatttcacgaaatcgaccaaattccgactaaagattggggggactgaatggagggagccaataaagcattacattgttacaggagagctcccaaagaatagatggcaggcgaggaaaatgagaatcgttagcgcgtaattttgtctatcaaaagattctttgtatagacgaggtgtaagcgatccctatttactttgcatttttgggcccaaagtcgagatcgttatgagcgaagtgcacgaaggtttgtgtggcagtcattcttcaggtaggctatggctttcaagattaagaggatgggatactattggcctactctgatcacgtactgcgttaagtatgcccagcgatgcaaacgttgccaactccacgcacctcccatccatcaaccttcggagttattttctttgatctctgccccatacccgttcatgaggtggtcgatggacatcattggaccattgcacagatcaacccgaggtgtacaatatctcttggtcctaactgattactttttgaagtggattgaagccgaagcatatgtaaacatcaaagattcggcagtaaaaaccttcatttggaagaatatcatatgtaggcacggcgtcccatacgagatagttacggacaacggaccacaattcatctcacacgagttcaaagctttctgctcggattgggggatcaaagttagttattctactccatgttatccacaagggaacggtcaggctgaagccgcgaacaatacaattttaagcaatcttaagaaacgtctaagtcatttgaaaggaggatggtatgatgaacttcatctggttttatgggcatatcccacaactcctaggcgctcgaccggagaaaccccgttttcattggtgtacggaatggaggcagttgtcccagccgagctcaatgtaccaggacttcgtcgaacagaagctcctttaaacgaagaagagaattctgcgatgctagacgatttgctagataccatcaacgagaggcgagatcaggccttaatccgaattcaaaattttcaacaagcagtagctcgatattacaattcgaaaatcaaaagcagacctttctttatgggtgattatgttttgaagcgtgtgttcgataacaagaaagaggaaggagcaggcaagcttggcattaattgggaaggtccttatattgttatcaaggtggtctggaatggtgtttacagattaaaagatttataacacagacagtccaacgtccttggaatgtggtgaacttacaaaaattttatgtttaaaaacacacacgcattctttgtacatgagctacggtgtggcttgatctcgaaatgggtatgtaggcatctcggaagcgagttcagctattaataagatttgttttactcatgttgaagaatagttcgattatacgaatgaataaaaaaagggagttcgactatgcgaacatacaaagcaggaagcaaagctaaatttattcaaaacaaaaaacaaggaaaaaatgcagaagtcttagacacgcttcaaactaggaaatcctcctcgtcttgaagaacacctcgacaccttgactggcgatgtcgagaatgggcatcatacagtccgggatgcgggcaaattctgcgattccgagttcgatccagtctccggggtgagagttgagggtgtgtaactcccttgatatcacggtgactctctacagcatttggttgatcttctttcgaagtttcttcttttctgttgattgttttttgtgttgagccgctagagctttaataaaggacatcgcgatgtcctgatctctgctcaaaaggtccttgattaacgcacatggagctcggatttgggatctgaagttgcaaagtagggagcatcctctgtctggtatgttcggaatgtcctcatcgatcatctcgaccctcgaaaagtctggcatggattccgagcatcggacgttgaaggccataactgcgaaagaaaaacacggtattgttagtgaggaatgaaggaggacctagagaggaaatttataagaagttttcttagctttcaaagatttaattccatttagagccggagtgattcgcgaaagcattcacgtcgccttgttcgcccgacatttaaagaatatctccaaaacgaatatttcctgaatcaaggaaaattggaaagtttccttaaataaaatgggccgaagccgagtaggtaagtccatgcgaaaataaaaagttttgagtctcagaaaacatttagggaaggggctcaggaacaggctccttcatcgccggttcggggttcgaagtggacgcctcgtttttgacgtccacgtcgggttcattcttcacgcgcttccaggggttactgtcctcctcctcgtcgtcaccgtcctcactgtcagacgggatcacttgaaccggaacgtttacaggaccggagacttggcctcgagcacggaggtacatccggagcatgtgcgggatcttcgccacgcagtcgaagttcctccactcccactgaaaagggtcgctctccatggcccttatcttcctctcgatgcgagcaatttgggccttgagcgtttgcctcttgaggcc

SEQ ID NO: 163106 - DNA, 2397 bp, Arabidopsis thaliana landsberg
  unsure (1)..(2397): unsure at all n locations
attagttccagtcaacctctttcgaccccgagcgcttctctcgtcgattccagcgactcgaatcacccagacgacctacctccaatctataaacggagagcgttttggacgtcttctaaagatgaagctgtatcttctttgagtgcccccgagcagatgacctctttcatggctcgggaagataccaacatcgatattgctcgagaattggatctgctcgatgatcccgagccgcctctcgttcggagatgccttgctcctatggttgatgaagccgggacatccaactggcaaggcgcgcccgagcccttaatgccgcaaataaagatcgaggactttctttatttcggcccgaacgagatggaggatattatgcgtcttaacgagcagagggctttcgagaaagcctagaagaagaggaagaagacaggcaacagggcgatagtgccggatccccctggcttgactttgtttaccaagcggtcgctttcggatctgagggcctgattcaatcttggtgaggtcaccgtgcgtgtgtcgatccctgatgnnnnnnnnnnnnnnnnnnnnnnnnnnnnnnnnnntctgtatgagggatttttctattattgcttcttgtggcttccggtcccgaggctggttttgcagtacgtgacatcgtaccagttcgccctctcctagattacgacgcgatctttgagacatttgctcgggattttggtgcgaagttatgaatttaagaccgacatcacgctcgctcatttgagaaatctccttgatcgatattatatctctcctgccaaaggtaggaaggttattgacgggttcctgagcaaggacgagccgtataccgatcacttcttcttcgtggcccttgaagatgctgttcacgacttccttctcgggacggttctgacgagatggtgaacttcgggtagttgtagctaacaatttatttgtgtccgacgcggttttatagtttctttttcttacagtagtttttctttgttgcagaacgcaccctcaagttccttgagccgattcgagatgatttcctttcggcttttcacgcgttatcagctcagaagtgcgattggtcgaaacatttctctcgggatcaagtcgaacgagccctccgtcttcttcacggcgtttcctgtccttccaatttggaatcttcggaccatcgtactcaattcttcgtcgatatgcagtcaaccaaacttactttgagggaggtgtacgcgaagaagaaagtagataaagagagacgcttggcaaaggagaaacgccttacggatgcggggctgatttcgcctggggcggcctctctcgatgagactcaaaaccgggacattgttcccgatgttacggccccagttgatccgacgccttccgaggctcaagaggttgatcccactgctcgtgcgcctttgcccgaggcgattgtcgcactgccagcgagcgacaaggcggtgggtaagcgcgctcggacggacgatttaacgtccaagaagaagagtaagaagaagaaggctcgggcgccgaggcggaaatagagctcccaatttttgaagatcgggtagcctctgcaaacctcctcgggggatgcgccggtcctttgcttcctctccggatactcttctggagtcgcggaagtatgctgaaacggcttcccacttcttgcgggtaagtgcgtattcaattttttcatttttcatgtctggatctccgatctgtaattttctttctttgttctctaggttgtcgcctcgatgaaccgaatggtgcattcgtacgattcggccatgagaacaacatggaggcgccaacaggttggccgagatgatgctcggatccaagctgccgagcgagaaagagatgaggcgctctcccaagctgccgcggcaaaaatagcgaaggaggaggccgaaaaggaggctttcgtgaacaaggcgaacgccattaagatggccgagctgaacctgagggcggactccgaggttgttcgtctcaaacgcatgctgaccgaggcgagggggctccgcgatagcgaactggctcgggcttctcaaatggcaaggcgcgaggcctccgaggctttcatcgccaaacttaaggccgccgcagaaagtgtcgcttcttgacgggattaatgatcagtttatgtatttatcccaagcgcgggctaatgcgcaactgatcaaggcactctaggagggtggagtgctggcgaccgagaaggaccaggttgaggaatggctgaaagacttcgccaatgtcgaggttgactttgccaattttattgccgagctgaaagaggaactcaaggctcctactcccgaccccactcctttaagtccgggtggtcacagatcggtcgagactcttgccgac

SEQ ID NO: 163107 - DNA, 2523 bp, Arabidopsis thaliana landsberg
accaatgtgttcctggaactttcttcaccgtgtcgtctacattctctcaaaggacaaaacccaaagtatcaataatgcctggacgaaaccactataatgcgttcaggtatcaatacgttcgaggctttatatgttgttcttcatcagtatatgatttggttaccatatacaaccctaccacgaggcaatgtcttcctttacccaagatcgaatcaatggtactctcaccaaagagacacaaacactgttactttggatacgaccatgtcatgaatgaatacaaagtgttggccatggttaatgactcgcaagagttgacgcaaacttttcatgttttcacattgggtagagattgtcctcaatggagaaaaatccgaggcaatattgattacgaactcatttcagtcagccgggcgggggtatgcattgacggaattatttactacgtagcagttagaagaaaagataatgagaattatggtgaacttttaatgatgagtttcgacgtaaagtcggaaagattttatcatgtccgcactcctgaaacattgtggagtcccaagtgtactgagcgaggtctttttaaccaccaagggaagttaggatgcataagtagcaacgaaaacaatataagtatgtggattatggagaatgctgagaagcaagaatggtccaacattacttttggcttgcttgaataccctggaggtgatttcagaactttctcaggtatcactcctgctggtgagatatttagtatgtgttatcctttttataatatgccattgtgtgttcattattataacgtgaagcaaaaaagctatagaagagttgaaatcgaaagtactaggctaaagacaagaaaacaacctagagatattattcgcgtatttgccattcatgattttgtcgagaatacaatgtggttgtaagacttatttgtattattttaaaccttttaataaaaatcgttcctttattttttattttttcattgttaaacagctaggttatagttatctgatcaggaaaaagttactatggagtaaatcaaatatatatatattgtatacgttgaatatgattaagtcataaatgcaatgatgatgattcattatagcgccaggtctttatgtaaaatatatagtgtctctcttaatggtgttaatttgagtatttcctcgtaaatattgatgaaaatggtgagacttggatagtctgtctgtgtagtatatatttgaaataacgacccaattaagaactaaaaagatatttcaatatctactaccaaacacctaatgtcttatttgatttttatgtctatagtgttctattaaatggtaaaaagattgacacctaaacttgatttttccgaggattgagatttcattaattactttgctgatgttcaatttgggccatatttaaactatcaactatcaagtggaaaaattgttgatgttggggatgcgtcaatctttatatctttaaagtatctttatctataccaagttaccaacacatggctagtcttgtattttctgatacaaacgagaagttgttaagaattgtaaaacggcacgatgtctattcttttggtcggaaactgttgagattacttgtggttttgggaatatttctctaattgtttcaaatttatgtagagtatttaagaaattatttccttcttccaaagggattaggaggagttttctatggtgttagaccgagggagttctcttggaagttcttttactctattcttgttatatatgtaatcgttaattatttcggtttttaacaaagagactcctgagattacttgtggttttgggattctttaattttccctaagagtaacttactttttctttcttttaagaacaaaaccctaaagtcctaaactcggccgtcacgatatctacatctttcacaatccttgtgagtttccagttatgtttcctaggttaccgtcacgttttatttgtttacaaaagaaggagaaaaacagaggtcatgagaaaaggaaatgaagagaagaattaccgtgaagaagaatatttgcaactccctctggatctcattgtggagatactaaagaaactcccgttaaagtcacttgtgaggttccgatgcgtctcaaagcaattttcaacgattatctgcagcctaagagacttcatcgagtcggtggttactcgacatttagctcagccggggcagcagcttcccctgttggcggtcttccaccattgtgtgcctgaaactttcttcactgtctcgtctagtttctcccaaagcctcaaacccgcagtatcagtctatggacacgacaagtatttgtttgtatatcgatacatcagaggcttgatctcttgttcttcgatttttctaaattggttcagatatacaaccctaccacgaaacgatccgttggtttacctgagatcggacccccagtaacagggttccggaaatgtaactgtctttttggatacgatcctgtcatggatcaatacgaag

SEQ ID NO: 163108 - DNA, 956 bp, Arabidopsis thaliana landsberg
atggcttgcgaaaacaacctcgttgtgaagcaaatcatggacttatacaaccaaatctcaaacctcgagagcttaaaaccatccaagaatgtcgacactttgttcagacaacttgtgtccacgtgcttaccaacggacacgaacatcgatgtcacagagatacacgatgaaaaagtcaaagacatgagatctcatctcatcaagctttgtggtgaagccgaaggttatttagagcaacacttttcagcaatcttaggctcttttgaagacaaccctctaaaccatttacacatcttcccctattacaacaactatctcaaactaggcaaactcgaattcgatctcctatctcaacacacaacccatgtcccgaccaaagtcgcctttattggttccggtccgatgccacttacttccatcgtcttggccaagttccacctccccaacacaacgttccacaacttcgacatcgactcacacgcaaacacactcgcttcaaacctcgtctctcgcgacccggacctctcaaaacgcatgatcttccacacaacggacgtactaaacgctaaggaggggttgaccaatatgacgtcgttttcttagcggcgcttgtagggatggacaaagagtcaaaggtcaaagccatcgagcacttggagaaacacatggctcctggagctgttcttatgctaaggagtgctcatgctctcagagctttcttatatccaatcgttgactcgtctgatctcaaaggctttcaactcttgaccatctatcatccaaccgatgacgtggttaactcggttgtgatcgcacgtaagctcggtggtccgaccacgcccggggttaatggtactcgtggatgcatgtttatgccttgtaactgctccaagattcacgcgatcatgaacaaccgtggtaagaagaatatgatcgaggagtttagtgccatcgag

SEQ ID NO: 163109 - DNA, 1085 bp, Arabidopsis thaliana landsberg
atgaatatgaggttagacaaagctatttttgagatgtcgatcaagaatgatggtcctctagttttatcctatcaaccaaagctcagttcctatagattttaatagttgtagtattattcgacaatttctgaacccttctcaccaacgtatctctaattggatattagatatgcctcgaatatggcggatctactcccgggtttatggggttgctctatttcaagagagatttcagcttttcttcaagtcagaggatgatttgcttgaaatttttaaaacaggtgtttggactcaagatgagtggtgtgttgtaatggatcagtgggtagagaagccacctgaggagtacttgatgttccttccgatttggattcgtcttcgtaatatcccagttaattattacacaaaagagacaattaaggaagttgtcgaatgtctgggtgaagtgttaaaggttgaattagatttggataaatctcaagctcaagattatgtgcgagttcaagttctttttgatgttcgaaatccgttgcgaaattccaaggatgttcaggtgcctacaggtgaagtgtgttcagttacttttgattacaagcgtatttgaaagagatgttttctttgtcaacgtcttactcatgacagagcggactgccctagtcgtcttcaaggtagtggtcaaatcccggatgcagtctccaagaagttgtcttcagagaagatgacgagtgatcaaaatattcatcccacggagggatgaatggatgaatatttgtcaacgtcttactcatgacagagcggactgccccagtcgtcttcaaggtaatggtcaaatcccgtatgcagtctcaaagaagttggcttcagagaagatgacgagtgatcaaaatattcatccctctatgggatttgaggttaaagaagctctgttagacaaagagataaaggagttggtgaggtttaaagagaagcagaaaggtgttgatgatcaaggaacaattttccccctttctaaatctactatttctctcccgataaatgaggacaagattgatgatttacagatgcagcaatccaaaaagttgcag

SEQ ID NO: 163110 - DNA, 1904 bp, Arabidopsis thaliana landsberg
atgtcttcttatggcttttctaagacgaaactggtggatttcaacctgatttgcatatgtgatattttggagtgtggtagttgattctcgaaaccagtcggtagaacggtgtcagatcgtggaattaagtagttttattttaatcaaagtagtagttataagcatttgagattgggtttctatttctcatcactttgtattgccaagatcgtggaactattggactttacatattagtagaatttggttataaaaccgcggtggttacattcacgaattgaagaggaaaaacgaggaggatgatttagtttttttttttcgagagttaaggcatatgtgttttgttgatgagcgtttgtgctctgttttttaagctgtcatgttctggtttgtataatagagctcatatgagataagaaaaaagtgggttaagtgttggagttgagaaattacggagaagggtttcagtgttgggttttgcaaaaccctcttatcgaaataaagggttaggtgtaaaaagaatggaaattgactaagcataattgttagggtcagatttcacccacttaatgagatcgagccaaacgccaatggttatggatcacctcgggatcatacgaattacagtaggggatgccgagccaagtcaagcaaccgctcgacatcccctactgtaacaatcatgctgagccgttagatttagacgcatcaaactaaacggacgagcttggcaaccatcaagaactgcatccccaagcagaggttaatgcaatcaaacagattgaagtcactaacgatgaagaagctgaggaaaacatcaaatggaccgaggagtacgaaagggagcatgagatcgacgtgataaaagcctcgctagccaatgttgaggctgacatgaagctcgtgaattcgcagatgcatagcatgacctccttggcctccatattgaccgcatcccggaagaatcgtacaatacgccattcacacgcatgatcacttaggccatgatctctgacctgtgaaagctcaagatcgagtatttgaacgggtcatacgacccaaagggacatataaaagtctttcatgatagctgtttgatgaggcagattcaaactaggagagagagacgccagcttgtgtttgttgttcgtggacacctcaaaggaactgcacaagatttgttctccagtttggatcggaatttggttgagagtttccaagagccgttgacgctctttctcatgcagtactccatgctaatcgacccatggacatccgacgcatatctttggtcattatctcaacaacccaatgagccactaagggactttgtcgcaacgttcaagtcaaccctggctaaagtcgaatgaataagcgacgtcgctgccctctcggccctaaggaaggccatgtcgtacaaatctgaattctgaaaagagttaaatttgtctaagcctttgacaatccgagacgcccttgttcgcgccttgtattacgttcgccacaaaaaggacatggagctgctagcaaggacgcacgaaccgagaaagtacacacaaacttcctgacccaaaagaggggcattcagagcggaccattcgtccatcatgagagacgtaacttctctggagcacacgattaccaagtagatacagcccgaaaagagaccaaccttcaaacaacaagcaaaggtattggtaactccacaagacctttgggcattatacttctaagtgtcaaagcctgagagcaaaattagcagctaaatttctagccgcgaagctctaggaaacatcacccacaaggacctacaagcaagacatgtccggcccaagcaggctgactctgtggtagatcatgagccgagagacacggagactgatatgtctataatttgcatgatt

SEQ ID NO: 163111 - DNA, 1975 bp, Arabidopsis thaliana landsberg
atggcgagagtttgtcttccttgttctttccttcgtacctctactctctcgattctcttccgttcaccgattctctccacaaccgccgcaatttcattttgctcgtcgtcggagttcgccgactctgtagccaaggatgattcaaaacgcgtaaaaattcactcatctctgtttctggatcaaattcgattacggttttagggtttcttacaatttagctgctttcagggtcctctcaagcctgggctttacctcgtcggaactccaatcggaaacctcgaagatatcactttacggtactcttcaatatctaagcttctttgcattgtttgaaatgtgttctgatttctaatgcttagaatttgttagtgcgattcgtgtattgagatctgcggatgtgatactctctgaggatacaagacactctgggaagttgctacagtattacaatattaaagctcagcttgtaagttacttgtatatggaaagtagtagtagtagtctctttggtttttatcatgtgatggttttgaatttatgaggtttaggtttgtagcttagttatcacaagttcaacgaggctcagagagaacaagcggtgttgacacggttgaaacaaggagagattgttgcacttatcagcgatgctggcacaccgggaattagtgatcccggtactcaacttgtgagtgcatattatagcttctcctttgagcttttttccaggctagttttgtttataatcaacttacttactagtgtgttacacatagtctgaaaatgttctctagtcacttataagctgaagagtatgagaaacaagtgctatcatctttcctcaggctaaaatgtgtgcgaaagaaaatatagatgtgattccaatccctggggcttgtgctgtagttgctgctctttctgcatctggtttggagacagatgagttcacattcggtaacttcttctccgatttaccggtcaacctgatgcgaacctggctttatataaagtttataatttctgaactactttgtttttaatacagttggatttcttcctaagcattctggaacaaggaaggagaggctgattgtttcatcaaatgagacaagaacacagatcttttatgttccccctcataagttgtcacagtttcttgaagaaacaaccccttactttggtgaatcaaggtttgttgcaagtttcaagcaagttatgttaacatctgctggattgatatctatgcacatccactttcttttctctcttgttccttattgttgatatttgatgaattaagcctctctcaatgcgatatcttttatcttctagtgttacgacttagaagcagtcccatgcctggtcctgacatagatttatggtgcaggcaatgtgtaatagctcgagagattacaaagctgcatgaagaggtaacatcctttatcactttatatgtaacgtgtgttagtaatacatgaaactttatggtaaaccccccactgatgagagatgctcttctactatagttttggaggggttcgatagcggaagccaagcaagagtttctgatccgccaaccaaaaggagaaatcacgcttttgatagaaggaaaggaagaaaccaaagctgaaaatccaacagagtctcaacttgaagaagagttgagaggcctgatctctgatgggcatagcctttccacggtaaccattttgatttgagaacttactcttcttggaaactaagcttcaattaccatacgttacagatatagaattgaacttagactgttcagttcatagatattgatcgatatgtgacttaatgacttaatgattccggatttaacatcaaactttatcaggcggtgaaaacggttgcagaaagaacatcaatgagaaagaaagaagtatattctctggcattgaagaaattcgggaagcagattcgggtagaagaagaagatgaagctgatgagtaa

SEQ ID NO: 163112 - DNA, 1437 bp, Arabidopsis thaliana landsberg
cttaaactctgtctctatggattgcgtggtttcaatggattgtcttccagatgatctccttgtccaaatcttatatttacttcccacgaaagaggctgtttcaacctctgttctctccaagagatggaggactctgtttactcgcagtgataatcttgactttcacaatcccatctccgggcgccccgaagatatcctaaagagtttcaatgatttcgtggacagttcattagcttttcaaggtggtaaacatataaaaaagttctcacttcatactaaaactaatacatttgaatatgacgtacttgaccactggatttgtaatgccctggaacatggtgtctctgaacttcatctacacctaatgcatgaatcgtggccgtggttgttttctatcccatctaaagttttcaacagctcatcactggttaagctgtcattgggatcgagactatactgcccaagttttcctccggatacatctctcccagcactaaaggttctgctccttgattcaatcttgtttcgggatgatcaattatctaatgtgtttctcgctgcatgccctgcacttgaggacttaaccatacatcacacgtatcacccatgcgtcatatccagcaaaagcattaagaaactttcacttagcgttaacagtggttattatggtgctggttatattcttacacttgacacgccgagtgttgtcgacctctactactctgattcccctcggcataacgctccactttttcatttagattcacttgcgaaagttacattggaccttcatttcatagaagataacaatcgcgaggtgcaaaatgacgctgatgtgaaaaatctcattagggagatatgcaacgtcaagacccttcacttgacttgttctgctgtcgaggtaagttcttaatgtatcgtctctcatgattctttctgttaaaaagctgaacaaaggtggactaccaatgttcaacaaccttgttgagttagtgttttcgagtaaaaaagaaggttggagagtgcttctgcctcttctgctagagaattctccaaaccttgaaactctggttctctcggtatgaagaaaaccctgaacaaatcttcatttatatgtatgattgtgacatgtgattaaagtagtatcttctcttgatgcttcaggatctgcatcgttacacatttggacgaagacatcggtttgtagggattccaattcccccgaataaccaaataaaggtactgcgtatcatgcagtaccaaggaagtgcaactgtactgaaacacattagtcatttcttactgaatatggattgtcttgaagttatgaaagtcaacgttgcagctgcattggatgaccccaaaaagatgcagctcacagaggatctgttaaagcttcccacagcttcatgcaagctcaagattcaagtcctgtga

SEQ ID NO: 163113 - DNA, 4302 bp, Arabidopsis thaliana landsberg
ctccatacacaattcatctaacatacttctggaggtgtcaagtaatcattctccagagctttgtggcccaaacaggtcgtgacctctttctgttctcttgacaaagactatgcatacagatagtttcctcgcgcatatactcagcctggttcatcagggttcaacatttgacaatacaatgcaaggaaaagaaaggcttttatggctcacaagaagcaagattttcaaggtggtataaaagaaaaagaggttagtcttaacattgagtttgctaatgccatcaaactgaaaaaagatattgaagactctgaaagatctgaatgtgtacaaaagactgacattacggtggttcctcatgaaccaccgcagtatcagtaaggcatcattagttggaattgccaaggactgaagaatccttagacaattcgacatttgagggaaatgaaaaaggaacatttcccagatattatgttcctcatggagaccatgaattctgacctgtttatattgaaagtttttagttggttgggttatgattactttcatactattgaaccggaaggaaagagtggtgggttagcaattttttggaaacaacaccttcacatagattttctttttgaagacaaaatctgttggatttggagatatctcaaggtagtaagagatggtatatctcttgtgtctatggtaatccaaggcagaatctcagacacttgctcctggaaaaattaagcaacattggtgtgaatagaaaagcagcttggtgtatgataggggattttaatgaaatcatgtctaataaggagaagttaggtggcccctatagagtagaatcatcctttcacgatttcaagaatatgctatcatcttgtgatatgcatgaattgggtggtacaaggaatagttttacctcgggaggaacaagaaatgaagaatggattcaatgtaaattggatcgctgctttggaaattcacagtggttttctttgtttcctaattcacatcaatggtttttggagaaacttggatctgatcacagaccgattctggtgaaatttgttaatgattaggagattttccatggaactttccgctttgataaaaggtttgctgaagaccctctttgtcaagctgctattcacagagcctggataggtaaactttcttctcagtatccttcttgtatgctgcgtttggttgaatgtaattaatccattagtcaatggaaaaaaagaaaggattataatgcagagagttgaataaaggctttaaggttcgatttggatgaagaaaagagtgctcaatttccgtgttggactaagatgtttgttattcaagatcagttgggtattgcttttagagaggaggaatcattttggagattgaaaagcagagataaatggatggctggaggggataagaactctaaattttttcaggcttctgtgaaagctaatagagttaaaaattccttgagctttctagttgatgagaatggttttgagcagactctcaatagggagaaaggcaaaatagcaaaacaattttttgagaatctgtttacttcctcttatcctacaaatatggattcagttttagaaggttttccgaatcgagttacacaagatatgaattatgaactcacacaggaagttacagagcaggagatctataatgttgtcttttccattaatgctgagagtgcgtcaggtcctgatggttttactacggcttttttccagacacattggcttttggtcaaggatcaaataattgcagacattatgggtttctttatacaggcatccttcttgaagaatgtaatcatactcatttatgtctgattccaaaggttccaaatccagagcgaatgagtgacataagacctatcagtttatgttcggttctgtatatggcctttcttacaaggaattctaatggctttgggttttagtagccaatggataagttggataatgggatgtgtctcttctgtttcttattcagtactgataaatggacagccttatggtcatattttgccacaaagaggtatcagacagggtgatcccttatcaccatttttatttttcatctgcactgaagctctaactcatatcttaaaccaagcagaaagatttggaaaaatctctggaattcgatttaatgatgcaggactttcagttaatcatttgttatttgctgatgatactttgatcatctgtaaagcaacacaagaggaatgttctcagattatgcattgtttatcacaatatgggcatatttcagggcaaatgattaatgtggaaaaatcttcagtcacttttggaaacaaggttgaagcagaaacaaaagattggatcatgcatagatctggaattcatgttgaaggaggcaccgacaaatatttaggattaccagaatgtttcagtggatcgaaacaggttttgtttggttttcttaaggagaagttgtactctagatttactggttggtatgctaaaaccttatctcaaggtggaaaggaagtgttgttaaaatccattgctatggtgttccctgtttatgccatgtcttgttttaaacttccaaagagtctatgtacaaagctgattgctgtcatgatggatttctggtggaatatgttgccagagaagaaaaaaattcactggattggagctcaaaaattaatgctgcctaaaagtttgggaggctttgggtttaaagatcttcagtgttttaatcaggctcttttaactaaacaggcttggcgactccttaatgatgaagatagtctcctttctcaggtcttcaaaagcagatattatctaaattcagatttcctctctgcgacaaatggaaaatgtccatcctatgcatggtagagcatcctatatggtcgaggtttatggagtaaaggtctgaaaaaggtcataggaaatggggaaaaaactatgctttagatagataaatggctttttgagggtcagactagaagaccagagagtgttcaggtgatggtggatattaccttaaaagtcagtcaactgattgatccggtttcaacgaattagaatttgaatatgcttaaagacttatttccatggaaagatactcagttaatccgtgatcaaagaccaatggttttgaaagaggattcttttttttttttttttttttttttgaaagaggattcttattgttggtcgggaagtaatcatggtctatacacagttaaatcaggatatgatttgagtagtaggcagcttcctaaggagatgtttcacgaagcacaggaacaaccatctgtcaatcctattttccaaggtatttggagtctttacacagcaccaaatatcaaagtttttttatggaaagcagttaaaggtgcagtggcggtggaagacaggttaaggacaagaggaattctaatagaagatggatgttctatgtgtcctgaggagaatgagacaataaaccacattttgtttcaatgtcctttggcccgccaggtatgggctttatctctgttgcagtcaccattttctggttttgggaattcgagttttactaatatgaatcatgtgcttcacaactgtaagaatcaaagtatttctaggttcctgagatctgttagtccttggattatatggattttctggaaaaacataaataaagttctctttgaaggtgacggttctgtatcacacagcatagtacataaagcatatgaggattgcaaccattggctttctgctcaagatccaaattctcagactgaagaaacaaaaaagggaatgaaatggattcctccgccgcagaatgaactgaagtgcaacattggtgtggcttggtcaagaaaaactcaattggctggtgtttcgtgggtggtcagagatgatacaggaaaagtgctcttacacagtaggagatcttactcacaggtacattctcattttgatgctaaactgaaaagttgggaatgagctttagagagtatggatcaactacatttggacagagttacttttggagcttcatctcatgatattatcaaagcaatgaacaaaccaaaagaatggccagccttgaggggacatttggatgcattgatagctctcactttggacaaaccacattggtatatggcaatggaaataagacagtgtaacacaggagctaatgagatagcaaagagtgtgattactggaatgaggtggcaaagttatgttgctcgagggtctcctcattggctacattatatttttgactctgaattggttcagtagagatgacgat

SEQ ID NO: 163114 - DNA, 1830 bp, Arabidopsis thaliana landsberg
aaaccagaaaaaaagaaaagaaaagaaaacgaagagattagggatgggtttcttagagttgttggaggtggcttcaatgccaatcgttcaagttcttcttatcagcgtccttggcgctttcttggcaaccgattactgctctcttctctctgctgacacccgaagatccgtgaacaaggtcaacctccgtctctgcttttcttttttctgtttggtgtcaactatgcatgcattcatatatcatcactaacaaacattttccctcgcagctcgtcttcgtggtattcaccccctgcatcatgtttgccaaccttgccgagactgtcacattgcaggacattatttcatggtatgcactaccagtctcctatcatccctctgagaatacatacgtgtggctttgatttgaccaaaattagttttgtaggtggtttatgcccataaatgttggaatcacctttctagtaggaggcattcttggatggttggtggtcaagctactgaaccccaaacctcaacttcatggcctcataattgctacttgtgcctcaggtaacattaaaacctcaaaatttaatctcaaggaggagagatatatccctgaattctcacatgaatcatatttactgtcctgtctacgtaggcaatatggggaaccttatgcttatactggtccctgccatctgtgacgaggaaggcagtccttttgggaatcgtagtgtctgcagatccattgggctctcctacgcatctttctctatggccgtaagtcaaacatacatacatatgatcttctgatctctgctcagacttaattgttgagttgatcgtgtgattaatttttgtcaagggcagctcgggggtttctacatatggacgtacagttaccaactggtaagaagctctgctacacagtttagagctcttgaagccgccgggttggtcaagtctcccaacaaggacatcgactctgatccccacgctcttctcctcaagccgcaccaaaaccaagaccttgaaatccaaggcaaacaaaaagtgtctaccaggacatacatcaaggacttgctccatcagattcttgaggaactcttcgcaccacccaccattggtgccgtaagtcttttaaaaaaaagaagacatgattacgtttccaaccaacaactaataaatccactgctctgatgcgttgttatatgttccattcagattcttggcttcgtcttcggagcaaccaattggctaaggaatcttataatcggggagaatgccccgttgcgagtgatccaagactcagtaaagctacttgggtatgaactcatctttttttgaatatggaaattacaattacatcacgactttgcgcctaatagttgacttggcagggagggcacaattccttgcatcacactcatactggggggaaacctgattcagggtctgcgttcatcagctgtgaagaaatcagtgattgtgggagtgataattgtgcgctatatcctccttcccgtggtgggagtcggggtggttcaattagcaggaaatctaggctatcttcctccagaccctctctttcgatacgttctcatgcttcagttcgcactaccgcctgccatgaatattagtaattactcaagccatcccccttcacttcattgttagctagatacggatgattaatcatacactatatatatatggattgcaggcacaatggcacaactgttcgacgtggctcaagatgagtgctcggtcatcttcttgtggacctacctggttgcatctttagccctcaccgtctggtcaaccatcttcctctccatcctctcc

SEQ ID NO: 163115 - DNA, 2521 bp, Arabidopsis thaliana landsberg
atgaggagtgtagtgcttgttgctttagccgctgcgatagggaatatgttgcagggctgggacaatgccaccattgcaggtatctctctttctatatttctctttctttttcctttgcatactaacgaaatctcactatgatttgatgttgattcttggtggcaggagctgtaatttacattaagaaagaatttcatttggagaaagaaccaaagatagaaggactgatcgtggcaatgtctctcattggagccactttgatcacaactttctctggtcctgtctctgacaaagtaggaaggcgatcaatgcttatactctcctctgttctctattttctgagtagcattgttatgttttggtctcccaatgtctacgttctccttttcgcaaggcttcttgatggttttgggatcggtttagctgtcactctcgtcccaatctacatctctgagaccgcaccttctgagatcagaggattactcaacactttcccgcagttttgtggatccggtgggatgtttttgtcgtattgtcttgtgtttgggatgtcgcttcaagaatcaccaagctggaggctgatgcttggtgttttgtcaattccgtccattgcctactttgtacttgcggctttcttcttgcctgaatctccaaggtggcttgtcagcaaaggccgtatggatgaagctagacaggttctgcagagactccgtggcagagaagatgtttcaggtttgtcttgatgaacactaagacctctagattatcgatctttgaacttatactaactcggggtatgatttaggcgagcttgctctgctggttgaagggcttggggtgggaaaagacacgtcgatagaagaatatgtgattggaccagacaacgagggtggaaatgaactgccgaggaaagatcagataaaactatatggtccagaggatggacagtcatggatggctaagccagtgaaaggacagagttctctcgcattggcttcccgacaaggcagcatgttaccgcgtggcggatccctcatggacccacttgtcactctctttggtagcattcatgagaatctcccttccgagaacatgaacgcatcatcccgcagcatgctcttccccaatatgggaagtatactgggaatgatgggaaggcaggagtcccagtgggatccagagagaaacaatgaagatagttctgaccaagatgaaaacttaaacagtcctctgctttctccgcaaaccactgagccggatgactaccaccagcggaccgttggtaccatgcataggcgacagagcagcttgtttatggcaaacgtgggtgagacagcgacggctacaagcataggcggtggatggcaattggcgtggaagtataatgacaaggttggtgcagatggtaagagagtcaatggagggttacagagaatgtatattcacgaggaaaccgccaacaacaacaccaacaacattcctttttcgcgacgtggatcacttctctccttccacccagagggtgatggtcatgatcaggtgaatggatacgttcaggctgctgcacttgtgagccaagcttcgatgatgccaggaggtaaaggcgagaccgcaatgttgccaaaggaggttaaggatggtccaggctggagggagctgaaagaaccaggggttaagagagctttgatggttggagttgggcttcagatactgcaacaggtaatgtttttttcccagatctttgtctgtagtaaagagacaaaacaaataaggaagtaaataacggaaaagaagcatgtttgcagtttgcaggaataaatggagtgatgtattatacacctcaaatattggaagaaacaggtgtgtcaagtcttttgacaaaccttggaataagtgccgagtctgcatcgcttctcataagcgccttaaccacactcttgatgcttccctgcattcttgtctccatgaggttaatggatgtaactggcagaaggcgagttttctctgctttcccttctctttttttatagctgaatggtataatttgaaagagtaacaataccagaagcgtgattgcaggtctctgatgctttcgactatccccattctaatactgtcgctggtaacactggtgataggaagcttagtgaatcttggaggttcaataaacgcgttgatatcgacagcaagtgttacggtgtacctaagctgtttcgtgatgggttttggggcaattccaaacatcctctgctcagagatattccctacttctgtgcgcggtctctgcatcaccatatgtgccctcactttctggatctgtgacataatcgtcacttacactctcccagtcatgctcaaatccattggcatcgcaggagtctttggcatttatgcaatcgtctgtgctgtcgcgtgggtttttgtgtacctcaaggtaccagagacaaagggaatgccccttgaagttatctctgagttcttctccgtcggtgcaaaacagcaagacgctgcagcttcattt

SEQ ID NO: 163116 - DNA, 7267 bp, Arabidopsis thaliana landsberg
atgttgagactgattatcagacctgatgttgctggagtgttaccagacagagatggtcatgcatacaatgaagagggtcagaaaatagatgaacagggaagcctgataccagaaatcgctgatggtgtcgatctacaccagctgggtgtcgctcgacaccaagaagaaatcaaagcagatggtcgtcggatgactcttggtgactacaacagaccggatctcttctattccaatcgatctgcaatccgaccacctacctttgaaagaagcgattttgagataaaccctgcattatatactcttgtgagtatgcatcctttccatggtctttcacaagaacatcctatggatcatattgagcggtttgaagacttggttttgagcattaaggcagagggtgtttcttatgactatcttccccacaagctcttcccatattctcttgttggggaagcatcttcttggcttaagcagttgaagcctggatctttgacaacttggaaagaaataaatgttacttttctcaacaacttttttaatgatgcaaggtctgaggagctgagaatgaagatctctaccttctctcaagaagcaactgaagcatttaaagccgtttggatcagattcagaggatatcagagagattgcccgcatcatggtttcagtgaggttcagctgttaggtatcttcttcagaggagttgattggcattatcagatggctttggatgcagctagtaatgggaatttcatgtcaagatatccagaagatgcaacaatgttgattgatagcttagcttccagcattagtaccaaaagcgttgacattgcaaggaaaacgcaagttcagtatgttgcacaagttgaaagtttagctacttcagagaagatggatcaacagagatacatgagcttcaatcaacaatctatacatcagaaaccggttcagcaaactaaaaacttcattcagaatcatgcttcttcaacccaaattcaccctccacccgagaccactaggaagattgaatctcttctcgaacagattctcaaaggtcaagagaagcaaacaacagattttgatcacaaactggttgcattatccgacgatatgaataggaagattcaaatattgaacaatcggatcaagcaattgactacaaacaaagaagatgttcgtgctattgagttaaggagtggaaaacagctaaatccagtgctgcaacgagaacttccttcaaccaaaatcgttaatttggaagaaaatgatgttgcagtttttgcagaccagacaccagtgtctactgacacagcagcgtgtcgatcgacaccagccatgacagacactacagaacgcgacagtgtcgaccgacaccaacaaggtgtcgatcgacaccaaccctgcccaaacctgggaattcgccaaaacccgatttcagctgcagcaaaggtaaccaaacccaaggttccttttcccaagagtcctaggaagtccaaacatgagcttgaggatgctagatgcaaagatatgatggataagttgattgtagagatgccacttatagatgttgtgaagtcttctcctatgatcagacagtttgtgaagaggatggttactaaggatatgcttactgagaaagctgtcatgacgatgtctacacaggttaacgacattattcagaacaagattccacagaaacttccagatccaggtagctttgttctcaattgtagtatctttaacgagagttttgattaatgcttctgtgatcttggttctagtgtccatttgatgccgcgatccgttgcgttatcccttggtttgacagattgtgagccaacgcaaatcactattgttcttgctgatcgatctgtccatatacctgatggtatcctatgcaatgtccctgtacaagtcggtaatagcatgattcctacagattttgtggttttatcttatgagaaaaaacctaaagatcctctaatcttggtaagatctttcttagccacaagtggtgccattattgacataagaaagggtagaataggcttgaatgtacgtgatctaaaaatgcagtttgacacgaataaggtggttaagaagcctaccatcgatgggcagactttctatgttgacactatctcgtctctagatgaagaattcctgacgggcagacctactgatcgatgggcagacctgctgatcctttagagcatgctctaataccttaaatagacaaagtttcccacgggtatagtaagctgctagatagaaatgagcatgtaatacaattggttgttcaagaggagttaattagcacatctactaaagcagcaacagttggcgactggagcaaaataggcttctaaagttgatctaaagccacttcttgtcattgttaatgcttatttaaacaacgcagagcttactttattgctaagcaagctctcttgatgatattacaggtatctctcccgacttgtgtatgcatagaatccacctcaaggatgagtctaagcccttagtagagcatcagaggagactaaacctgaatctgaaggatgttgttaaaaaggagatcatgaaattgttggaagctgggatcatctatcctatttcacatagtgattgggttagtctagtgcatgtggttcctaagaaaggagttgttacaatggttaagaatgacatgaacgagttgattcctacaaggaccgttaccggccacaggatatgtattgactacaggaagctgaacgctgcaacaaggaaggataattttcctctaccatgcattgatcaaatgatggaaaggttagcaaatcataagtactattgcttccttgatggatactcaagattctttcagatcccgaatcatccaaatgaccaggagaaaacgactttcacctgcccctatggtacatttgcttatcagagaatgcccttcggtctttgtaatgctcctgcgacatttcagagaggtatgatgtctatcttcacagatatgatcgaggatatcatggaggttttcatggatggcttttcagtttatggatcatcatttgaggattgtttagagaatctctgcaaagtgttagcatgatgtgaggagaaacatctagttttgaattgggagaaatgtcacttcatggtacaggatggaatagttttaggacacaggatttctgagcatggtatagaagtatatagagctaagatcgaagttatgacaagtcttcaagcgccagataatgtttaagtagtgaggagtttccttggacatgctggtttctataggagattcatcaaagactttagcaaaatcgcaacaccactgactgctctactctgtaaagaagtcacattcgagtttacactagagtgtcatgatgcctttcagcagataaaacaagccttgataagcgcaccaattgttcaaccaccagactgggatctatcttttgaggtaaggtgtgatgctagtgattgtgcagttggggctgttctaggacagaggaaggataagaaacttcatgccatctactatgcaagtaggacacttgatgatgctcaaagaagttatacaactacataaaggagttgttaactgtggtttgctttcgagaaattcagatcttatctcgttggatccaaagttattgttcacacagatcatgctgccttgaagtatttgatgcaaaagaaagatgcgaagccaagactgttgagatggattttagttcttcaggaatttaaatcgaggttagaaataagaaaggagttgagaatggtgtagcagatcctttgtcacgcattaggatcgatgatgttgtccctattaacgatattcttgcctgaggagaacatatacatgattgatacagctggagaagatgactgcaaatgtgataagttgcagaatcgaactttagtgtcgatcgacactccttctatgtcgatcgacactcacaattcagaggaagttgatattcgtagttgcgcaatggtgtcgatcgacaccactgaaaatgtcgatcgacaccctcctgaatcgacaagaaattggtcaccaactgagaattgcgccaccacaggggtcgagaaggactacccatggtatgctgacattgttaattacctagctgcaaatgtggaaccggataatttcacagattacaacaagaagagattcctaagagagattaggcgatattattgggatgaaccttatctctataagcattgttctgatggagtttataggagatgcgttactgcaacagaggttcctgatatactatcgcattatcacagctctagctatggtggtcattttgcaactttcaaaacagtatccaaaattcttcaagcagacttttggtggcctacaatcttttgggatactcagaagttcatatcgcagtgtgatccttgtcagagaaggggaaagatcagcaatcgtaatgagatgcctcagaaatttatcctcgaagttgaagtcttcgattgttggggtatagatttcatgggaccattcccaccatcaaacaagaatctctacatccttgtcgcagtcgattatgtctccaagtgggtagaggctatagctagcccgaagaacgattcagcagtgtcatgaaactcttcaagtctatcatatttcctcgtttttgagtgccacgcatagtcatcacggacggaggtaagcatttcattaacaagattcttgcaaaattgctttttcagtatggagttcagcatcgggttgctactccctaccatccacaaacgagtggtcaagttgaagtttctaacaggcaaatcaaagagattcttgagaaaacagtgggtaaagcgaaaaaagagtggtcctacaagttagatgattcactgtgggcctacaggacaactttcaaaactccgcttggtaccacaccttttcatcttctatatggtaaagcttgtcatcttccagtggaattaaaggcacaaagcagtttggacagtcaagatgatgaatttcgacatcaaatcggctggagaaaagagacttattcagttgaatgagcttgataaaatacgaattcacgcctatgacaactcgaagctctacaaggaacgcacaaaagcttaccacgacaagaagatcctcactcagacctttgagcctaatgaccaggtacttctttatgattctagattgataatatttcctggaaaattgtcttctcgttggacaggtctctacacattccactcggttaggccatatggaacagtcattctcaaaaacaacaatggaaaaccattttctgtgaatggacagagaatcaaacactattggctgaagccgagattccagtagaaaagcctttggatcttctggactcacctgttgattaagcaagtgcagagtcaagctattgactataaacaagcgcttagtgggaggcaacccactagtaagtatttctctttttcatcatttcattcatttgatttttaacttaggattttttattttataggatttttattgattaaaagaaaaaaaaaccagtgttaaccaaaaacgcgatggtgtcgatcgacaaggtaagtcattttaacctaaacttcatcttcttcatttcagatttttttcaaaaccgccgaaatcacacttttccctctagattcttcgattcttcactgtttcttgtgatttcaggctctaaactcatcaaaatttcatcctctatcttcctcaaatgtcaattccatcgatctgcaagatgacagggcagaaaaagaaggcgaggaagagcgttggaccttcctcctcctccgccaccgatcaccaacgctggagcttctccaccgccgccggtctccgcccctcccaaccgcaaccacaaggcgtagctcctcaacctcctgcttatcaatttccatggccaaagctttcaaaagagagaattccttctgaaagtgtttggaagaaagatgtcaacagggaattcactaaaggtgactatatcaatcgccctttttctccagattgggatgattatgatattctgttctataatgcctggatgagtgtagaaattttgcctaatcggtttgtggatttcggtttgatgtagcgtttgcagatagagaaatctgttttaggacttctagatgacataggtttggaaaccgttgtaggttgtactttttgtattatgagctggttaaacaattcatggcttctgttagggtatcttatgtgaatgacaggaaacacaacgctcaggaaggagctcttatcttcttcattcgcagtgtcagatacagtttaccagtgcgagatttgtgtgacatctatgggtttgacaatgatctcactggagtttccctgcctggtcagtttaaggattctcagattttctggagctggtttggtaatggaatctatgattccaaagacgcagtacattcagagatccgtcaccctgttctgggatattttgttaggctgattagtagcacactgttgtgcaagatggagcctggcaagatgagactttctgagttattattgctctataacgctcttcatgacttctttctagacagccttggatttgagcaggttgaccgtaatgtcaactttggctctgtgttcgctcatcacttggtttctctcaataccaagccctttacaggtaaagagaaaaaatatgagagagtttgcagttttctcactcctatatttcatcactttcacatcaactttgagggagaggaggtcaacacaacgatattcactatggatgagaattatctaagaactctcactggctgaaaggcaacttactttggtgcttcagagatgatacatggcaccatatgattcagttaccttgccctgcgcttacagaattacaggcgagcatgaggagcttggttttcatcccgatccttcccttctgcattccgcgccacgcaccaggagacatagaggttcagcttcaggatccgcacctacacagactaagaatgagttcattgaactgctgggggtactcgaggtggctcttcctcttaagctctcccatatcagctgccttcccctcctcctatcccgatggagccacatgtctttcagcagtacatcgtcgacagcttcaagagcgtttggaacgccatagctactctctctcgatgcggttgtgttgctcccactcgtcgtcgtcgtcgctctctcgcacccacctccgactcagagcatgaggactag

SEQ ID NO: 163117 - DNA, 4688 bp, Arabidopsis thaliana landsberg
  unsure (1)..(4688): unsure at all n locations
atgaattcgagaaattactccagtagctattacccaagtgtgaaccatgggtcaaaccgcgtatcacatttctcaattgaccgctacacgcccgatgcatcccaaatgcatggtgagtctttgcagccttgcccgtctaatggaggagcttaccggaccgatcactactctaatgatcaccccgccgccttcattgagaattggccgcaagctaaccgcttggttagcccgttccaccactgcgtcccatctcccggagatcaacacgtgggagggcccaactcttctcatccttgtggagctgccagacatgaagctttcggctatgaccgaggatatttgcaagaggtgatgagtgtagatgttcatccgaacaactatacttaccaaaccaataagacataccaagccgccgaggcggaagataggatcattggtctcttccgaaacttcgttgatgaacatcaagaagacatgaggaagatcaacaacactctccttaaccatcgagacaatatccaagaccaaaacactagaatcgctgatattggcttcactgttgataccgttgagagctatctagattggaagattgaagagctagagaagaagctcactacttcaaatgagtctttgaaatggagaagcaatcaatctttccaagaagaagatgggtttcctaaggcccaagcccgttatgaggaggaaacgaaaaaggaaatcgaattcctagtggaaaaaggaaaagacctcatttccttttccgcagaaggagaacctgaccctataaaacccttagggattggacctctttcgtttctcctcaagaccaaatcgagcaggaggaagacttagaaaaagaaggagccgtctctcaagaagaagatccaatggccgatacctactctgatggcgagagctgcgagactcaagaagagcgtggggagttcgatggccctgagatcggactgaagatttcccaagaagtcataatgggctcagtgattcttcaagagaagaagccagtttcgcaagattcagggacaccttactcctgcatgactatcatgattcccgacaatgaagctctcgaagtctatggtttcagacaacccggaaccctagaagaaactattgttagaggaaactatgatgttaccccggcctaatacctccccaccctcgtgaagaggaaagagcacgggcagcaaaagccaaggaaggaaggacctgttcaccttgagccgatccgtttaacccttctgtcacccgattttgtctctacaagatcactctcacataccatggagacaaaagagtcgtgagcagagactggaaagacaggaaggtcgatggcattctctctggtatgatcgatgaactttccttgagttttaggagaatggatgtcaagctcacgaaagaggttaccgccttgaccaagaaggtccaaactctagaaaagagcagaggaaaggttctagagcataaccaaggaagtgctcaaaacatcggagcgttggccatccgaacagccgagggaaagaaaagccacgacttgacagtcaaagagctccttgacaagaatgcgatcttggaagaaagactaaaaaacttgaagagagagccaacaagaacgaagagaagctccatgaggaaatctttctccttcgtgagctagccgactgccaaagagaagccgaaaagaatcacatgtttgattttaaggttctctttagtaacaatatgagttcggcggctcagatgaagaagtacgaggacgaagctaaggcgaccatggtcaagattcataatctagaagatagctataaaattctagccgagacaatctgtttcgaattcgataagtccctcgacctgttgcatgggataaagtccaatcttggatatagggaaacgacgtttaacgaaacaatcgagagattggataagaagtacaactctttactccttcgtgctgccatctgcgagaaatgtatagaagaggactcaagaagagagtccaagaagggtcgagacgaagctaaaccacaagaccatgggcaagacccgaagccaattctcccttgtaaaactgcagtgtcgtggcctagcggatacttacaaaagggaggagagtatacctcgaaatcaaaagaagaagatcgcaacaccccgagttccgagaacgagcaagcttatcctgattcagaagaagaagcgatggaagctttggagatcaaagagatgatccgcaccactcagaaaacggtatgcgatgcacctttagagacttcgtaacagccatccgacttgatacttcgttcgaagaagcatgggagaagtttccggttaagagactcttcatggaaagctatatttctaagggacgagtttgagaggtgttcgaaaaaacgagaaggtcaatcttcaagaaaaagagagacaatccaaagaaacctccggaggaatccatacccaagaggacttgcctagggcaaaacaacccgtcttactacgcctagtaagacccaaccgtcaagccaacgacgttaaacaagcgcgctatgtgggagacaacccactaggtaaatattttctttaggatttaaactttacttttgcttttgatctttccagtatttgtttcaagactttttaaaagcaaaaaagaaaaataaaatatagaaaaacccaaaaaaaagagaaggaaggagggtcaccagaacccgtcactaggcacccttacaaccggcccggctactcgcccgagtaaccgacaccgcctagagaagccggcccggcagtgccaaaccttggttggagcccgcccatatgcgccatcctctggccaaagaccgtcgaactgtgccacaccttcaccgacttgccccacctggcggcccaaataacatcttgtccaccggtccggccaaacgcaaacgaagccggccaagacttggccaactacggccaacacgtgaataggtaagagaagttgcaccgacacggccgatcggttcgtcgatggattcgtttaacctgcgaccattccacccatcccaacgaccggtgaccccatccaacacctggtcgtttattaaccaacccactccacccttttggccaagcccgcaactgcccgccatccattcacaccactcgtcaccacgaatttgatcttattcgtttccgtattgacaacaacaagatcaaatctatcttaggtatctttttatttattttgttttgttaaagctattggttgttttaggtttttgtgtcaaggaagatgcgaatggagattaatatcatggaattcaaccatactaagccgagtatgagcgatgttaagcaaggagagagaccatccggttagtcatcacaaccaaggtgacattgttcttaacctatctttctcacaaattcatccctatgctcattctcacactggggacggtgtgacgtaagtatggggggttaatgaatccgttactactaatgctactcattattttgttgacttgagacctttatccactttttacactgatacgctctaacaaagcaaaaagcttttattttcagtttttatttcttttcaaggtaccattgggcaaggacaatgtagggaacaatgaacctactatatgattaataagaccattacaatgtgctaactcataccctaagtgacaagttttgcaggactcacaaggacggacaatacctagaaacccactaccgtatctatcccctgaattctcactacagagactctgtttgacctagacgttaactctattttatttggttgtatttaccttgccttcattctttctcttgaaggggtgttagagcggggttccgagcatatacattcatgtcttcttatccctttttactactctctgctgatcttgaatggccactcatttttagtggttcctacccttaaaccctatccttttttctagcctcatgcattctcttttcctttttcatttggcagatatgtgcaaaaacgtcggagagaaagaaacaacacagtttcccgccacatcgccagaagaaggaagcaaaagaagagattgcaacaaacggcctaagagtttattcttccgtggaaccaattcaaaaggtatgctcattagacttagtgtttagaagttttgtttccccttcaaaaaaaaacaaaaaaaaaaaagaagaaaagaaaaggaagaaaggaaacattacaaccaagagagtccggtggcatagttccaaggaaagacaagaaaacctaaagaagagatgagccaattacagaagagagccccctcggaaaaatctaagtctggggaacagaaagtaagaaagaagtaaaggagaaggaggtctttaaaagcaagacatggttggaaattatggacctcaaccgatctgttctctcttnnnnnnnnnnnnnnnnnnnnnnnttcgagactatacagtaacccgaaacactttaactccactacttaaacaccaaaagccactttcataccaagcgccgtctaccccgaatgacaccttctaatgagaaagtccacgccctaacatttaaagaatgtaaagagttgactgacgtgaattcagagttctgtaggatcaaagtggatggacaaggacgagaaaggtgtaggactattgagcggccattctaa

SEQ ID NO: 163118 - DNA, 1036 bp, Arabidopsis thaliana landsberg
  unsure (1)..(1036): unsure at all n locations
atgcagatcaaagatatggcatcgaaattctcaggttctcataaacaaagcaagccaactccgggctcttcgagcagcaacttgaggaagtttccggattttgacactgcatcagaaagtgttccatacccttatcctggtggaagcacgagctccactcctgcttgggacttaccaagatcctcctaccatcaatctggacggccagactcaagattcacatcaatgtatggcggtgaacgtgaatccatctctgctcagtcgtgtgatgtggtactagaagatgacgagccaaaggagtggatggctcaagtagagcctggtgttcatatcacatttgtctcactacccagtggaggaaatgatcttaaacggatacgtttcaggtatttgaaacccattctctccataacattttcaagaatatgtttcacttaaggacatagaatgattcaatgtgaaatgaagctaacatatacttgtatctttcttgaagccgggaggttttcgacaagtggcaggctcagaggtggtggggtgagacctatgatagaatagttgagctgtacaatgttcaaagatttagccgnnnnnnnnnnnnnnnnnnnnnnnnnnnnnnnnnnnnngtaaaacacatcactctttagatcacaacttaagagaaggtttatgagtaatcttatctttcaacttctgtttgtttcttctaacagtcgcagagagattcaacttacacaagaatcgattcagcaagagaaagcagagactggacacaaagagacacaatttcagacctccaggatctgtcccgcatcacttttatggcggctctagcaactatggaccaggaagttatcatggaggaccaccgatggatgcagcaagaaccacaacttcttccagagatgatccaccttccatgagcaatgctagtgaaatgcaagctgagtggattgaagaggacgagcctggtgtttacattaccatcagacaattatcagatgggactagagagctacgtcgagtcagattcagg

SEQ ID NO: 163119 - DNA, 3746 bp, Arabidopsis thaliana landsberg
atgtcggatatttatggggttgcgagatatcacttatacacgttggtgtatttattagcagtatactctcttccttgcatcaaaaaaaaaactatcagactaaagaccttagtctccgacaaaattaatgcgaaaggagctaaacacccagagaattcgagactgaaaggtaaaagtaaaatctctgagtcatacgtatattattgttaagttccgtaagagtgatttttactttagggtttcatataaattgaaacaaacggatactaacaagtttgttactgcggatattggccaagcaggtgtaaatggagttcgtggtcagactagtacctggggaatggaaaaaagatgagaacggctatttcaaaaacgtttcgcatgccgatggatttgcgttaggagtccgattgcgagagcaggatgggtttgctaaagttgttatggcggtaaaggaaaagttagcgctgggtgccgaagacgatatcgagttaacatatcaatggccacagtggatgatgggtcctgactggagacgcgctaacccgatcgatatattggacgataaggatatgacagtgtttatggcaatacgggcagatctagatgaagtgcatccacgggtgaagataatacgaggagggaatagtcgaaacgttaatagttatcggagtaacctggatataggcggtctgacttcggaagaaatttcggataagtactggaatagcgcggaaacaagagctgtttggggtaccgcgttaacaagaatgttgctgcgaaacatatcaggtgaaaaccaaaacctatgttgtttgctatattgtagtaaatttatctgttaatatataaatcggataactttgcttatatcagggttgatttacagatcatatacttagtccgataacttatttatttggtatcatatatcttatctaggtgacggtgatggactggcagccatgggaaaggacaacagcatgggcgtacagaagcccaatgaccaacgaaacgcttatggggggtttatcataagagacaacgtcgagattacagctgggacaagcggtgtgccactaatagacacacaaccagactccattccaatctctaaaggaaaagagaaagttactgatgatgatgagagagaacgagatcgtttgtttgagatgtggcgaactcaacaacaggaagaaatatggcgagagatgtgtgcaacacaaatgaccctaggagcaactcaaattgacgcaacaaacgtgggcgacactggtaaaactgctagagctcttaacttcggaagtggcgacatttccaagggcaatccacgttaggacttgcaactcactctagcaagagcataaacacaagaagtttgcacccaagtggtggcactgtcatcaagcaattcaacctttggaacgccaacctcgctttccacaagcgtatctttctctagcgatgacctaatggacgtcactgactcatccaacaacaacagctaatcgcgcataggttggttatctgatatttaatatgttatcgtcaacactaacataatactattaccattcgtttacggtttctgacttttgactgtaggtggcgaaacactgtcacacttttattctgaacctgatggcccactcattatggccccacagcccgtcggaataacggagaaaggaaaaggtatcatgatagacgaaggaataaccactaaggagataggtacgggttcagccaatacaagagtatcagaggtaatgaggaatgagttgatggtgaaagatacaccggttccgacggtgttgtacgatagagatgccccaccatattttgacgacccaggggaagaaggtaaagcatacctatatagcaattttgatataaaaaaaactagttagctctgtattatatatagctaatcatgttcgataagtaattgtttaactcgataactaaacatcttcgctaaaagtattaacagctatgttttctcttcctcgcagatgctcttcatcgtgccctaaaatatgctgataatgagggagatgatatctacattggtcggatttttaaaagcaaagaggactgcgccacgaaactagcaatccacgcaattcaccggaagttccatttcatctacacgaaatcaggaccgaacatcgtggcggttgtctgcgtcagcgacacatgtccatggcgggtttatgctactaagctgccagatagcgactggttcgaggtcaggagcaccacccaaacccatacatgtagcgtggatgcaagaggagacttccacaagcaggcgtcgacggtagttattggcaagttgatgcgtactaagtatattggagtaggacgggggcctcgcgccaatgagctgagaagaatgctacgccaagagttcagcctcaacgtttcctattggaaagcatggcgggcacgggaaattgccatggacaatgctttagggtcagccatgggaagttacgccctaatccaaccttacttcaagtgttttttagagacaaatccaaattctttggttgcaatggagaccgaaaaagataactctggcgttgagaggttcaaatacttgttctttgcgcttgatgcttgtgttcaagggtatgcttacatgaggaaagtcattgtaattgatgggactcacttacgaggacgatatggcggatacttagttgcagctagtgcacaagatgcaaatttccaggtcttccccattgcatttggaatagtaaacatcgagaacgatgaggcgtggaattggttcattataagctataccggatcatcctgagttggtgtttgtgtctgacagacactcctttatttatgccaacatctgcaaggtaatagagtaacataaactttaccacatacaaatgaacttaacggaaaatctttttatctgctaaattaaacagtaacgcctttggtcattgtgcagctttgctcaatgtcatctcatgttgcttgcatcgtccatctgaaaaggaacattgaggtttacttttaatctgatcacctaagtgccttggtatcaagtgcagcaagagctcatcgcctaagtgacttcaacatgatatttgctaaaatttaggctacacatggaccgtgcgctgaatacctagcaggtattggattcggacattggacgaggtcacattttgttgagaatagatataacttcatgacaagtaatattgcggaaccgctaaaaaaagtgctaaccatgacctgagattatccggtaatctcaatattagagtctatccgcacaactctcgtaacatggtttgcgcttcggaggcaagctgcccagcttgaggacaatatccttctgccaaaggtgcacgatattgtgatcaaaaattacgagaaggtaggaggatgtactgtaataaagattggggatgggctatatgaaattagggaaagaggaggtgcaacatttacggttaatctatgggagagaacatgtacatgtagggagtttcagctgctaacaatcctttgctctcatgccataggactccgagtggatacaatggttgggatccatcacaccacccctcagcttagattgtcttaccaagcactaatgataccggtaccggacacagagacgctgactccttcaccaaatgatattgagggtgggaaactggctccaccgtatgttcggcgaccgagaaaacgaagattattctcaataa

SEQ ID NO: 163120 - DNA, 1187 bp, Arabidopsis thaliana landsberg
  unsure (1)..(1187): unsure at all n locations
atggcagatgagttatgggatgcattacaacacttagagttaggaagggaggatcctgctctgtttattccgcatgctacttatgtaactgttgaatctcggaatagacttagcttgattgttaggcctcttaatcctcgatctcaaaatctcaatgttgtggttgctgctttgccaagggtttgggatctgacgtctagagttcatgggagagtgattaatgcaacgtttgttcagtttctctttcagtctgaagtggatctcttgtctgtgctaagaaggaaaccatggctctacaacagttggtttgtcacggctcatcgatgggaggtgaatattgattttgagtacttgtctaatattgatctgtgggtgcaaatgtttgggatccctctcctctatgtttgtgaagaaaatgtggtagaaatagctcatggtttaggggaaataatatcattggattttcatgatgctactacaactcaaatagcttatatnnnnnnnnnnnnnnnnnnnnnnnnnnnnnatcgcataagattcttccaacgaattacctttgattctggtgagactgcgctgataaggtttcaatagaaagactaaggcgaatgtgcagtagctgtttcaggctgactcatcatagaaattactgcccttatcgacaacctgagcctcgttctatcattcgtggtcctaccaacaatctcactaggtctagaagagaaggagtgtgtacccgggatgaatatcatcgttcttccctgaactcccaatcacagatgtctgagaacgcctttccagcacctattgaacctcctccaagagtggcagctcctcctttgaatcctgatgaatttagggctacttattttccacaaggcagagcaggttctttaccaaatataggaacattaaatcttaatcctccatctcgcaggcaagaggcgtcaagaaactctaatgtacaaccgtttacgggtcctgcatttggtgcaaatgttcctcgagtggttgaagtaggtgaatgttcatgacaaggagagtttggagcttcaaggactcaattggataagggaaactcaataaaaaggaagaatattggaaaacctgggagtgatgaagaaggaagaactcatagagttgaggagcataaggaaggaggtattctgaaacctcctaagaagcgt

SEQ ID NO: 163121 - DNA, 2023 bp, Arabidopsis thaliana landsberg
atgaacaggcgctcgcttttgtcaaggattcggaacaaagctctctccccatcgaagaggtaccaaacaccttcttcgcatgcagcagctcgaggaccttctgaactatcacccttggggtcgagcaggagagaacaagcaagtttcgagatcgatcatagtgaatcgagccaagaggaggaagtgatgcaagaagaggagaccttcagctctccagctggaaatactcgatcccgaaggtcgagtaagtcctctacaagggaattctcgaggaacaaggcatatatcactcgaggaaagaagcccgtggggaggaggttggaactggtagatgaagactccgaggaagaaatggcttcaccagaggaagatgatcaaacagagaaaggaggcaatgatgatttggaatcagagaagtgtgcaactcgaaacgagtactacaaactactgaagcgcaatgagtttttaggaactcgataccctcatcccgagaccatggagagactcggcatctatgatgatgtaaactatatatttaagcagtgcagcctgaatattcatatgtttcggccaatggaggggtatgaggaagagaccatccagtttctttcatccgtggaattgttcttatatggagagtcaaaggacgatgaaatcaggtcagacggaagtttgggatacttggagttctgtgtgtatgacgtagagtttcggcttccaattgagcacctcgagctgatgtatggatttctaagcggaaaagacacaagtcatcgttttgacaagagagagcttcagtcattctaggccacgcttgagtctaaacatgggttttcatcctctaggaccaagagcaacgagataaggagtccggtggtcagatactttcataggtctttagccagtgcactatttgcaagagagaggaatgggacctttgtcaatggagagctagaattaacggagacagcgctgcaggagctacttggtttagcatcagatggtacagttctagctagagatcagacagacgcttcaatctcattctacctaatcgaacatttgctgaattacagaggatgggctaagggacttaagaaaccaggaagaatggttgtgggaggagttttgaccccaattttgagagcatgcaatgtacctatgcattcaaaacggattcctccgagatggattgatatgcagcatcttatcaattccaagagtttttggtcgcagtagaagaatggcctatataaatataggttcggtcaccatacaacaggactatctattttcgtcctcccaaatgcagcttccacttcgatcagatattgtggcaacatttagttttgcccaccagtggagaacctctatacttcaggtgatgaagttgtgccgatggaaggagtgaatgatgatgaggctccaatccatcattcagataatgagacagaacctatggacgagtcttacgcaacacatcagttttactttgaggagtactccgcgccaaggcaaagtaaagactataaagaaatttacaagcgccttggttttctctaaaggatggagtaaacttcaagacaaggctctcgcggcactcaacaagaagtttaacaatctccaactcaagatcttttgctcttcatcaggtaaggcaatgccacagaacatgccgtttgggagaagcggatccactagtcacgaacctatgcattttggtccgccttcaccaccaagatagtcttcatatgagccgagggaacaccatgctgcaccttcaccaccaaggcaatcatccttcgaacctagagaaaaggaaaagaggagcaactttaaaacgcaaagaagaacaaggaaatcagatgctagagcaagccactctactgcaccacttgaggagccactggatcaataatccgagcaaagggtcccccccccagctaatccaagttcagcacaacccgtcttagagttacacaaagagagtatggacgatttcgtctcctcctacttcacctga

SEQ ID NO: 163122 - DNA, 1490 bp, Arabidopsis thaliana landsberg
aaaacacaccattgggatcctttgattacaggaacagttcaatactattttgaagatatatgtcaaagacggatgaaagatatgattagcactgtgaggactagtcgagagtgtcctaaatggatcatcgattcccatatctgcgaaacgatgtgtgcatactgggatactgaagaagcaattgcaaagagtctgacatattccaaggctcgcatgtttgactgtaatgggctcggtcctcacatccatttatcaagtccaacgtcgtacgtattaacaaatccaacaagaaatggttaataacttcttgtgatctatgttatttgtttttcatagtccattgcaagtttagatatttcctaatccttgttcatttttaacattgaaggaagaggagttaggaaaggacggtgagtcttggttaggttttcatcaagccccataccaaaccagatggtacttatgtcgataggaaggcggagaagattgttcaaaattatgagcagatattgcaacagaagttgtctgaaatggaggcagagacttcaaatgtttcagacggggaatcacgaccttgggagctcacaacaaatgaacttactgtcatctttctagaggtaaagattacattttcataattataggctgcatattctcatgctctttagtaattgtttgtctttcttttcatagttcacagagacagattcacgagaaaactattatggagtgggcagctttaatgatagtcttctggatctagtcactggaaaacgcaaactcttaggagactcttcttatttcgtggcattgcaagagcaactgaacgaagctcaacagaaaatcgaagagcaagctgcttataatgcaaaacgtgaggcagagcaaacaaaggctatggctgagcagaaggacaagctggagcacttttcctccactttatggcgactcattcacctgaatcaactacagaacctatctcatctccaactcattcttaagttacttctccccctttaaaactctcatgaacttgtcaaaacttgttatcttttcagaatttggtgcaatttgaatcttatatttggttacaatattaatgaatttggtgtgtgtttgaatcatgaatttggtgtgaggtttagtttggttttgaaattgttaagaatttggagaaaacattacaggaataggcaatataaatcaaaaaaataaaatgactttttattttgtctgaaatcgtagtcgttaattagtcacagagtagtatataaatggtcgcagagaaatcctacatatcgctgttcatatagtttagtcgtaacttagtcgtaacatataacgactattttacgattaatattacgactaatttggcgactaaaattacgactattaaatttagcgactatcgatttgcgacaacagtggttagtcgtaaaacagtcgtaacttatcactttacgactactctgcgactaatattctag

SEQ ID NO: 163123 - DNA, 1159 bp, Arabidopsis thaliana landsberg
tatttcctggagtttgcggtaaagtttttgtcctatatcacttgtgttgttttagtttcatgtacttatgttgtgactaactttgcccatattttctatcttttgaagtctacacacacatgggatcccttgataaaagggactgttcaatactattatgaggacatcatacaacgtcgtatgaaggacatggttagcaacgcgaggacgagtacagagcaaccatcatggatcaaggataccatctggaaagtaatggttgattactgggaaattgaagaagcaattcagaggagttgtacatattccaaatttcgtatgtctgatcgtggtggccttggtcctcacatccacttatctggtttgaagtcatatcaacaaatccaagatgaaatggttattaacttacattcactcttttctaattgctattttaaactctgtgataatcattgtgtattttgtaacattgtaggaagaggaactcggaagaccagtgtgtgttggtgaagtcttcattaagactcatacaaaaaaagatggtacctttgtcgatcgaaaaacagaaaagattgctcacacctatcaagataaagtgcaagaaaagttgacttagcttacagtagaagtctctactgtttcagatggtgcttcacaacctcgagagctcacagcagatgaatgtacaaccatctttcttcaggtacaaatatctttcttgttttttaacttctttgtagctatattatcttggattcttttctgactttaagaaatcctctaaacttattgtttttttcggatgtgttacagaccattgagaaggattcaagaggaagtctttatggagttgggagcatgaagggaattcttgtcaatggcaaacgcaatcaaccgggagattcttcttcatttatggcaatgcaagagcagctgaaggaagctcatcgtaaaattgaagaggaggcacaatacaatgcacagcgtgaagctgagctttccaaagaggctgctaagcaaaaaggcagactagagcacttgtccttggtggagaagtacctaagacaaactgatccggcctttcaaaacttcatggagagtcgttcaacttcaactaccacagagtctgtctccagtgatctccccccagtcgtttgaa

SEQ ID NO: 163124 - DNA, 3637 bp, Arabidopsis thaliana landsberg
  unsure (1)..(3637): unsure at all n locations
atgaaatttgacatcagcaaagcttcagggacatcaacaacaagaggtcggaattttgggatccaaggcatggatgttgatgaagaaacagaagctcgaatcccatcaagattcaactacacttctcaattcagcaagctaaagaaaaattttgaccacaagaagagagccatagaagggttagctcagactgaagacccttcagaggatgactggcaggagatgagaaaaaaaaaaaatggtgatgtagagggtgatgaagctgaaagatcaaatatgggtttttgaaaaagagttaataagtattcaatgggtattgatccagagaagatggaaactacactagctatcaaagagaaaaatgatttcacaacataatggtttgcaccagaagatcagaaaggagttcattcagaggaagaaagcttagaggatgacttgttgagtgaggaagaaatccctattccgacttattttccaagagtgcctaaaatgcctagtaaaccctcttctaaggaagaacacttgacacttgactctattactggagaacttctggaactcaggatagaatgcaaagctcaggaagataccattgggtagctaacctacaagatggaagaacgaaaccatgcaatcttggaacttcaagaaatggttaaaggctaccctagttttgaatttgaggatcggtcaaaagagcctggttcagaagaagaagactactctgatgatcagaaagaagcttattttgaagaacaatcaaatgattacttatcctaccatatctcaagagaggatgcaaagtatgattcaagcactgaaaattgaactactgaagatgaggacttctctgttcctctgttcaaccttttttctgactaagctctgtaagagtcaagcttagtgacttaaaacaagctcacttgggaggaagtcccatgtctatccatgtatataactttctatctttcttgttacttttgatgtttttgtttaagtgtttcaggtttgttttagtgaccctaagggagtcaacggtcgagtaatttcaaatcaagtcaagaaaaatctcaaccgttgatcgagtagaatgaggaggaatagttttagccattgatttgaatgaccaaatgagaggagcannnnnnnnnnnnnnnnnnnnnnctttttgaagtttattttggtccgtttgatcaagtaaacaagaatgagaagnnnnnnnnnnnnnnnnnnnnnnnnnnnncttcaagaggatgctcgatcctttactcgagctctcactatttgaagaccatggcataactttgtgaccccacttgctcccccacactcttttactcaatggacaaagcgattacccatgtccctcaccattttcaatcaacttttctatcccttcccaaagaaaccaaacaccattctcctcgacccattgatttcgataaaccctccttgaaactctctctttcatcatctcgttttcgcaaccccctcacaaagctttgaaagtcttcattccaaactcttcccctaaaatcgctccctatcactctttaagaatccgttcctcttcaccaatacttcaccaaagttagtcgatcacttcgaagttcatcctcaagctttcaatcggtttcaagctcaaaattttcatcacgaaagaaactgattcccttaccccttgataccccttagagagttgcttttaattgctttgatgaaactcaccaccatggattcaagaaggaagagtacgtctcgggcaagaagatcctctgttgatcatgaagaagttgaggcgtttgacatgagtggcatgactgaacaccaaattcaccaagctcgccgtgctcaaagatcaagcttgattcaagggggaagttcaagtcgctcagccatgcaaagagaagaagtagctaggggcaagagggttgttaaggctgaggaagaacaccatgaagaggcagtctttgaagaagcggtttctgaggaagaggttgagatcatcggggatgatacactagcccctgttgggagaagaaaccggccaaggaggaagagagagtcaaccccaagcgagtactatcaatacttgaaggagttgaagtttgagggaactagataccctcataaggaaacgatgcaagagcttggtatttgtggagatgtgcaatacttgatggaattggccaatcttgcaatgttcatgagctgccaatgtgggggatttaaagaggagagctgccaactctttgcaaccctcaaagttcacttttgtgttgatgatttagagaaataagaaagaggaggtcttggttacataactttcaaggttaggggtgtcaagtatgctcttgatattagcaccttgataccatttttgggtttccaagtagagaggaaatccgccaagattatgacaaagacgagctactctctctttgggcaaaaatcgtcagtccaaagccctactcgtccactaagagcaagagttctgcgattcgaagtcccgtgataaggtacctccaccaatgcatcgccaacacactttttccgaagaagactactggatttgttgatgaaggagagctatgcatgctcgatcaagctttggttttcattttgagagagaccaaggatggaaggaagatggcggttgacagagcagacacttcgctgaatgttgttcttttggaccacctaatgagctatagagagtatgctgcaaccatccatcgctcagggattcgcggaagtctttgtgttggtggtatcttaacacgaatcctaggagctgcggggatacacttgggaacccctgacgtgtaccccaagttcctcgaccttgactatctcaagagaaagaattatcttgacaagacgactccagcagatcactgcatcttcaagttcaaccatccggatcttggaccttctttgttatccctaccttgcgagaaccgaacttcacttaagacaaggcgcaacatcaacttcatgccatcttcctctgtcctgaacatcgacatcggaggagctagagaagatgaacaagaggatactcaagctgactatgagcaccaagagtattatcctgttgagtttgagcaacaagtcgaattcgagcaacatagcgaacaaccagagcaagagaccaatgaattcgagcaagctcactatgaagaagatgctgatcaaggaggagatgagatagatgaagttcacaagaatctcggtgtgcttgaagagcttgggaatcttcatagcaaaacaatgaaaggtttcaagaagaagatgagaaccatgaagaagtcgctgaagagtatggctgctcaaatcaaagacttccagagcaagccaagtccccgtctcccaccctcgaagtaagaagaagcgttccacaaattctgctgcaagaagagctaacacgatcgatcaaccccgagcttcatcatttgagtctcgggaaatgatctccgagttgagagagccgaggagtaggcagagaagagcatccacacgctcgaccaactactcgaccggacaggacgagcaaaatcatcccgcctcaacatcagttcctgcttatactcaagagagtatggacgattttgtctccgtctatttcacttga

SEQ ID NO: 163125 - DNA, 2354 bp, Arabidopsis thaliana landsberg
  unsure (1)..(2354): unsure at all n locations
atgtttggaagcggtggagaacatgatatatattcactccgacagtggatgtataatcatagagattcagttaccggtgatgtcacgaaggagtttaccgatggattgcgcgggttcatgtaccaagcaacaaatgaatcatttgctcgtgcaaatggttcaatattctgcccatgtcgtaagtgtctcaacgataaatatttggaatttaatctagtgaagaagcatctatataatagaggatttatgccgaactattatttatggttgcgtcatggggaaggttgtagagatagtgcgggcagtagtaatacaaattatggtgtcgagcaacctagtaattttaataatgatgcgaattatggtcaggaagtacctgatcaatttggttatgggcataaccaggaaaatagatttcatgatatggttacggatgcatttcatgaaactattgcttcatttcctgaaaatattagtgaagaacccaacctagatgctcaacatttttacgatatgttagatgctgtaaatcaaccactctacgagggatgtagagaaggactttctaagttatctttggcatctaggatgatgactattaaagctgataataacttaagtgaaaactctatggattcatgggcagaattaattaaggaatatgttgtgtctttgtgtttttggcctgattcagttgtgttgttggtctgaataatatcattgtattttcggcctaagagttttgcattatgtctatatgtttcgactttgctttgatcatgtttgcttgttttggttatgagtttgtgacatgttgctcctaagaagaaaggcaggatttatggggctgnnnnnnnnnnnnnnnnnnnnnnnnnggcgcatgcggacgcggtgcttcctcgagatgatccggttgttctatcggagaagcttgctgctgctgaagctcgtcttcaacttcaggctgagaagatcaatagtttcgatgcctattttgaatacctcgcagagaaggatccagtgtttgcaggcatgtaccgaagaccatctgaaccagcaaatgcagacgccacaagaccagctgagggcaaccagaccggaggtgatcagaccttcaccgatcagaccggaactgagacggagacaagaactggtaccataccaggctcctctacttcacaagctttttaatttctctctgttttaagacttggtatatagttgctaatatcaacttttgttttaagacttgggtttgctaatctcaacttttgtaatctcaacacttatgtttttgaatcatttagcagttaatatttttgaatgtctactgatttcatatatgtttttatatgtttactgaaaatcaaattaaaatcaccataaaaataaatcagcataaaatttgtaaatgaaaaaacaaaaaagactcgcagcagacttgcaaatttctagcaaatgttgttagggaagtgctacacttatgttttgcgagagattgtggtccccgcaaagtttgcaacgaaataggtatctcgcaaaatttgcgagggaattgcaagatattaaatttgcgagccgcgatttgcaaggaatgacgtggcgtagcaattctcttgctatacgcattttgcgacggatttacgaggaaactttccctcgtaaaatacgtgttttcttgtagtgctagagaagtgatagtggacaacgggattattagtgtcagtttctcgagtccccaaggacttataactggcatcaaatacaaaggagtcaataatgttctccatccacatcaacgagctcgagaatactttgtaccggagccatacaagaacacaatgaaccctttatatctaaaccacacggacaagtttaggcagtacggattatggcaacgatacacagagttatatccaaaccgtgacctcatctacacaattggagttagtaactatagcaaagactggttctactctcaagtcacaagaaaaatcggtgattcaacgtacacaccaactacatggcagactgtgtttcatcttccatatgtaaacatgcgaggtagctacacattgcagctagctttagcctcggctgcatgggctaatctacaagtacgtttcaataacgaatacacgaggccatttttctcaacgggatatattggaagagataatgctatagcaagacatggaatccatggactctatcggctttatagcatcaatgtacctggaaggttgctacgcacgggaaccaacacgatttatcttcgacaagctaaagcatcaagaccatttgaaggagttatgtatgattacattcgtctcgaagagccttctagagaatag

SEQ ID NO: 163126 - DNA, 1054 bp, Arabidopsis thaliana landsberg
atgagagctagacatcttctcctttgacgtccatggcagtttgatcgagctacatgtcacaatgggcgtaccaacaattactttttcacgtttaatgaccgtaagtacaaccttgcccctcttagtccctcagaagttcatgacttacaaattcacatgaacaaggaggacaaggtaataagttctagtctttatttaagctctaaagatgtttgtaaaaccatgagtgccaagggcaccgtgctactaatgcttttcaaagaatgtcttagtacatgaataagtgatcttgagctacccgctgaagtacaagctggactagatctgtacaaagacatattccccgaggagattcaacccggactgccacctattcatggcataaaacatcagatggattttgtaccagactctgctttacctaacaagcccgcctacaggatgaatccggagtctaaggagcttgagaagcaagtgcgtgacctaatggagaaagggtacatcatagagagcctcaacccgtgtgcagtatctgtcctattggtcccaaagaaggatggtacatggaggatgtgtgtagactgctgtgcaatcaacaatatcaccatcaagtaccgacaccccattccgagactagacgacatgttggatgagcttagtggtgccatcatattttctaaagttgacttgaggagtggctatcaccaggtccgaatgagagaaggagacgagtggaagacaaccttcaagaccaagcaaggtctctacgagtggcttgtcatgccgttcgggctaaccaacgcgccaagcaccttcatgcgcctaatgaaccaggtcctaaggtcttttattggtaaatttgttgttgtttactttgacgacatactacagtaagagttattctgatcacattcaacatttagagttaattctcaaaacacttcggaaggaaggcctttatgttaacctcaagaagtgcacattttgttttgacaagtttttttttccactatgtgtatatgatttctatgcgaatattttatttataataaat

SEQ ID NO: 163127 - DNA, 2983 bp, Arabidopsis thaliana landsberg
  unsure (1)..(2983): unsure at all n locations
atggcgggaaactacaattatggcggtactggcggtttctatcgagattggatgtacaagagatttgatgaagtgacggggaatttgtcagccgaatacgtcgcaggagttgagcaattcatgatattcgctaatagtcagccaatagtacagagtagtcgaggtaaatttcattgtccttgtagtgtatgcaagaatgaaaaacacatcatctcgggtagaagagttagtagtcatttgtttagtcattgatttattcctgattattatgtttggtataagcatggagaagaaatgaatatggatataggaacgagttacacgaataggacgtattttagtgagaatcatgaagaagtggataatattgtagaagatccatatgtggatatggtgaacgatgcatttaattttaacgtgggatatgatgataactatcgtcatgatgatagttatcagaatgtggaagaaccggttcgtaaccattcaaataagttctacgacttgttagaaggtgcaaataatcctttgtacgatggttgtcgtgaagggcagtcgcaattatccttagcatctcgactcatgtagaacaaggcggattataatatgagtgaaaagttggtggattccgtttgcgaaatgtttacagattttttaccagaaggaaaccaggctaccagttcacattaccaaaccgaaaagttgatgcgcaatttaggacttccatatcatacgattgatgtttgctcgaacaattgtatgcttttctggaaagaagacgaacaagaatatcattgtcgattttgtggcgcataaagatggaagcctaaagatgaccgtcgacgaaccaaagtaccatatagtcgtatgtggtatctacctattggagaccggttaaaaagaatgtatcagagccacaagacagctgcagcaatgcgatggcatgctgagcatcaatcaaaggagggagaaatgaatcatccttcagatgcggcagagtggagatattttaaaaagttacatccccggtttgcggaagaacctcgtaacgtttatctcgggttgtgtactgatgggttcaatccgtttggcatgtctcgtaatcattcgttgtggcctgtgatcctgactccatataatttaccccctagtatgtgcatgaatacaaagtacttatttcttacaattttgaattctggtccaaatcatcctcgagctagtcttgatgtcttcctccaacctcttattgaggagttaaaagagttgtggtctactggagtcgatgcgtacgatgtttcattgagtcagaattttaatctaaaagcagtactactgtggacgattagcgactttccggcgtatagcatgttatcaggatggactactcatggtaaattgtcttgtcctgtttgcatggaaagtacaaagtctttttatctacccaatggacggaagacatgctggtttgattgtcaccgtagatttcttcctcatggtcatccatcccgtaggaacaaaaaagactttctgaaaggaagagatgcttctagcgaatatccacctgagtctttgacaggggagcaagtttattacgagaggttggctagtgtaaatccaccaaaaacgaaggatgttggtgggaacggtcatgaaaagaagatgcgaggctatgggaaggaacataattggcacaaggaaagcatcttgtgggagttgtcttactggaaagacctcaatcttcgacataatattgatgtgatgcatacagagaagaattttcttgacaacatcatgaacactctcatgagtgttaagggtaaatcaaaagataatatcatgtcaagattggatattgagaaattttgttcacgcccaggcttacatattgatagtaatggcaaagctccatttccagcgtatacattgacagaagaagccaaacagagtttattacaatgtgtgaaacataatattagatttccagatggttattcttcagatttggctagttgtgtagatgtggataatggaaagttttcaggcatgaagagtcatgattgtcatgtatttatggagcgactacttccatttatctttgctgaactccttgaccggaatgtccaccttgcactatcaggtacaatacttactattttttattccaacatttttttaatttaatcatttaacttgcacatatattttaggaattggagcatttttccgagatctatgttcgagaactttacagacaagtcgcgttcaaattctcaaacagaacatagttttaatcatctgtaacttggaaaagatctttccaccatcattttttgatgttatggaacacttacctatccatctcccatacgaagctgaattgggtggcccagtccaatataggtggatgtacccattcgagaggtttttcaaaaagttgaaaggaaaagcaaagaacaaaagatatgctgcaggttcaattgttgagtcatatatcaatgacgagattgcttatttttcagagcactactttgccgatcatattcaaacaaaatcaaggtaaatatatttaattatttaacgattagatatttttcgatattaattcacttacatggatcagggttacaagattcaatgagggtgaagttcctgtatatcatgttcctggagtacctaatatatttagttctgttggtcgtccaagtggagaaatacgtgaagtggctatcagaggaagactnnnnnnnnnnnnnnnnnnatgttatacggaattgtgattattttcaagtaattgagaggtatataacaaaggtcatactcccattttaagttaattataaatgtttgttaactaacccttatatgttgtttttgtctttgtagtatgttcgaagattttctttctattaaatatccaggattgaacgaaaaagaactcttcgtgaaaaaaggcgaggaatatcatgtgtgggtgaaagattat

SEQ ID NO: 163128 - DNA, 1135 bp, Arabidopsis thaliana landsberg
atggtcgtactctctgaaattcccggcgatcctaatgaagataatcacaacgagaatcctcaagaagaagtagagaatcttccgattcttctacaacttccagaagaactcatcgaaagaatcatcgcacacttcccacaatgttattccccgtcgccaattctcgtctgcaaaacctttcgtcgagtaatcatttcggatcatttctactacgtaacgcgctcgctcctcagcttcaccaaaccggttctttatgccttaatcgcattccaagcgtatactcccccaagctggttctttcttcgtcagagcaacatcgctttacaattacacagaatccgttcatttcctataatgttatctggagcagctgtggtcacaatcggctacaagatgtatgtaatgggtggttacatcggattatcctgaatcgtcgagagtgattgtcatcgactgcagattccatacttggaagtctctcccggatatgcaaagggctcgttgccatgcagccgccggagtaattgacggaaggatttatgtgatcgggggacgcgagccacaagatgctgattgggttgaagtgtttgatgtgacgactgagagctgggaaactgtgcctactcaatgccctaacgaggctagtgagaatggactgcttgttcaatatgtggtgatacaggggaagattttcattttggatcttgactgttgttttgcttacgaaccagtacaaggtttatggcagtcatggggtgttgcaagtcagttgcgaagattttggcacccgttgtcgtcgttcactgtgattggacagttgttgtatacagttgatcttacgtgttctctggtacatccgatagtggtatataatccgaatgaatcggtttgcagacctgtgatgggttttcatttgcctattgtcagtcaatgttggtccaagatagcgaattttggtgggaagttggtgattttctgcacctgtcttgggacgtttaagcatattttgtgcatagtgattgcgttggaagcacgtcaaggaggtcatatttggggggtggttgaatcaaactcgcgcgtgtttagggacgatatgatgttgccttacattcggctttgtcaaactgttactttt

SEQ ID NO: 163129 - DNA, 1108 bp, Arabidopsis thaliana landsberg
ctatcgatgtcggaacttccagaggatatcgtggaggagatacgatctacttgcaaaacatggaaccatttattcaacgatacaagattcgcaaaaaagcacttcgataaagccgtaagacaatatctagctctcacgatcacaaaggaatttagggtttatttgttgaactttaatctctatggatgtaacaggtgaatttagcataatcaattctcattcttatttaaacttagctgatatagaggaagttttgcactacgatggcttattgttatgtaccattatgagaggttgccctagactcgtagtttggaacccgtgtactggtcaaaccaagtggattcaaatcaattcaagttgctactacggctatgctcttggatcttggcaagacaaggaatcaggaaataataatagctacaaaatattgagctataattattttgatattcacaagcaaaaaatcgcaatttgtgacatgaagtctaattcatggaggaatcttgacgtcactccggactgtcgcttagtgaatgctagtctttacagcgtatctttgaaaggaaggacttactggtttgttgctccattgacaacctatctttcggaagagacacacttcggcttagtcagttttgattataaaacagagagatttgaacgtatgtgtcttccgtcgtgtcacatagcaactatgttgggaactttggctctctccgttgttaaagaagaaaaacttattgtgttattacatggcgcaaatacatcaaagacagaaatatggctaacaaataagattgatgagaccaaagtggtgtcttggagcatgatcttagcaatggatcaccttgaatttgatatttggtctaacgtaaggcttatttttgacgaggagaagagattcggtgtgtgttgtaatcggaaacgtagggtcaagaatggcaagattcactgtgaatgcatagtacacataattgaggaggataataaagtgacaaaagtggattttgcagcatctaagttgtcatatctgccacttttgttcaattatgttccaagtttggttcaaatccagtgactttggagcttggaggcaacatataaa

SEQ ID NO: 163130 - DNA, 2309 bp, Arabidopsis thaliana landsberg
  unsure (1)..(2309): unsure at all n locations
atggttaccttatgtgccacgttactgatccttctctcaatctttcttgcaactccgtcgaatgttcgaggaaatgcagagctgaaggctttaatggagctgaaatcgtcgcttgaccctgaaaacaagcttctccgttcatggacgtttaacggcgatccatgcgacggatctttcgaaggaattgcatgtaaccagcatctaaaagtcgcaaacatatcattacaagggaaacgtttggtcggaaaattgtctccggcggttgcagagctcaaatgtttgtcaggtctttacttacattacaatagtctctctggagagatacctcaagagatcacaaatcttactgaattatcagatctttatctcaatgttaataacttctctggtgagattccggcagatatcggctccatggctggcttgcaaggttagcatcttataatgtttcacagatctttcacttgaatgtttactcgatcttccatttgaatgttttgtggtgtcttttgttgcagttatggatctttgttgcaacagtttaacagggaagataccaaagaacattggatccttgaagaaacttaatgtgttgtctctgcaacacaacaaactaaccggagaggttccttggactttaggaaacttgagtatgttnnnnnnnnnnnnnnnnnnnnnnnnnnnnnnnnnnnnnttaatcccaaaaaccctagccaacattcctcagttggacactcttgacttgcgcaacaatactctgtctggctttgttcctcctggcgagttaatgattcttgaaacgtctttgtagagcttatctttctgtttcttgactcggttttttcttcgttatgtttcttcaaaggtcttaagaagttgaatgggagcttccagtttgagaacaacaccgggttatgtggtatcgattttccttctttgagagcttgttctgctttcgataatgcgaataatatcgaacaatttaagcagcctcctggtgaaatagacactgataaatcagctcttcacaacattcccgagtctgtatatctccaaaagcattgcaaccaaacacattgcaagaaatcctcatcgaaactcccacaagttgctttgatttcaagcgtgattaccgtcactataacattgattggtgctggtatattgaccttctttcgctacagaagaaggaagcaaaagatcagtaacacacctgagttttccgagggaagactaagcacagatcaacaaaaagagttccgtgcatcgcctttagtgagtcttgcctacactaaagaatgggatccgctaggtgatagcagaaacggagctgagttttcacaagagcctcatctctttgttgtaaatagtagcttcaggtttaacttagaagacattgaatcagcaacccaatgcttctcagaagctaatctattgagcagaaacagcttcacctcagtgttcaaaggagtcctcagagatggttctccggtagctatcagaagcatcaacataagcagttgcaagaacgaagaagtcgaattcatgaacggtttaaagcttttatcttcgttgtcacacgaaaacttagtgaagctacgtggattctgctgttcttgaggcagaggagagtgtttcctcatctatgattttgcttcaaaaggaaagctttcaaattttcttgacttacaagaacgcgaaactaatctggtccttgcttggtctgcaagaatctccatcatcaaagggattgcaaaaggttaagtatttgaaatatcacttctttgagttcaaggaacaaaatgtatttaatacacaaatttcttgcaggtattgcttacttacatggaagtgatcaacagaagaagcctacaatagttcatcgaaacatctctgtcgaaaaaatcctacttgatgaacaatttaacccgttaatcgctgattcgggtcttcacaaccttctagcagacgatatggtcttctcagcactcaaaacaagtgcagcaatgggatatttagctccggaatacgtcacaaccggaaaattcaccgagaaaaccgatgtctacgctttcgggattcttgtgtttcagataatctccgggaaacagaaggttaggcatcttgttaagcttggaactgaagcttgtaggttcaatgattacatagatccaaatcttcaaggaagattctttgaatatgaagccacaaagctagctagaatcgcgtggctatgcactcatgaatctcccattgaaagaccatccgtggaagctgtagttcatgagctaggtaactgtagtagctgt

SEQ ID NO: 163131 - DNA, 4095 bp, Arabidopsis thaliana landsberg
  unsure (1)..(4095): unsure at all n locations
accgcttgttcgtcgaaagcaactgcctgctcttcgtcaacatcaggttcctcctcttcaagaacagcctgttgagactccaatcccggagcaacaattcataccattgcatcaaaaccctaactacgaagaggaagatgaggtggacgatggggaagaagttggtgacaaagttggtgattaagtcggggaagaagaggatgaggaagtcgaggaagaagaacaaaaccctaatgtcgattaccaagaactattggatcgattacttgccctgccaaggagacaatatctttcgattctgtctaaggagccaatcccaggagtcgagactctctggtaatatctccctttttctcgagtattgagacaggtaggattttttgactggtaattgagctgagttttttttgccttttggatatgtttttgtcattgatcatgtgtggctctaatgctgatttggtcttcagtctttgttttaggatcatgtgtggctctaaagccttatggtagctcattaattcatgttttatagccttatgttagtgtatttcgttcttgaactctctgttgagattctgtatttgatctagtgttgatatggtctttagtcaaactattttgtattcgacttgaagattaaaggcctatttcagctcattggttcttgtttcatgaatgctaatactctattggttgcatcagtttaagtcgattatgtttatatttgcaatggcttggtgtttaccattagctcaacttaatacttagttggatatttttacaggtttaaccggcacaatggaaagctgtctagagtgatttctggaatatttcggaggaagtttgatggaccttacatcagttggaaggttactccaatagccacgcaagagagatacttcagaaattttgcggtaatgtcaacgatcacacttatcattctgtaattgtttaatttggctgactcttagtatctttgctaacttagctgcttatttattatgtagcggaagtattattgggatcaaggcgttactgagctcgtcaaagaaggatcattggttattgccaagaaaaggatgaaaggaattgtcagtcaagcaaagaagagtggtgaacaaccaccgtggattggtgatacactttggaaacagatgtgggtgcattggaacactgaagatgctcagctgaagagtgagacaacttcaaactgtagaaactcagatcgtggaggtcttggagtgcacaaacacttagccgatcagaaatcgtttgtgcaagttcatcaagaaatggtaagagtctttgtctttccattcaaacagtcacttaacagctttctattataacctccacataagcttgtctttgtctgtctgatttgttttggcaggaggaacgttttaagcgtcatgtatcatatggggaagtgtttatgcaaacacatacaagggctgatggatcttttgtagatcagagatcttagaatgttggtgaggcttatgtgaagatgctggaagagaggatgtctcaaatggacgaggatggtcctcaagtgtctgacaattcctcgcaacattcaactcatcgtacgctcagcattgatgaaaagaatgagattttccttaaggtaattcatttctgtttttattttgcttacaatctgcttgtctttgtttgcttggaatataattgattatgagcaatggatagttagagtaattatgaatgtctttggtgattgtatttgtcttcttgtttcagtgtactcatacagatggcaaagggaacccttttggccttggatctcttgtggagacactgaacaaaagaagaaggaaagagagttatgcgagctcgtctacatcaactgttgcgcagcttcagagcagctgcagctcaagatatctgaacaagaggagcaaaatgcaaaacgtgatgaggagcatcgccaatcnnnnnnnnnnnnnnnnnnnnnnnnnnnnnncgtcctctttatgaatgacaaagatcctgagttggctacttatttgtcaactgattctactgaacttgaaccagccacacatccaaccaccacaactccatccacacttccaaccaccgcagccaccgcaccagccatcacagttgtaggcaccacacccttactctccacttcagctactatttctaacacttcttctaaccattaaacatgatcttttgttgttttggttgaaacttgtttaggatgatgtatgactatgattttctgaatagaattagtttatggatgatttgtatttgtcttctctctgtctttcaatgttatcaggatgattattggtttttgaatcgttattaatcaggttttacattccaaacaaagaccaatttgtgactaaaccaaaacaatacatgggactattttgtgaccaaacgaattatataactgtgaccactttgtgaccaaacttattcaaaatatgtgacaataatgtgaccgacccattacaaaacagtgaccaatttgtgactaaatcaaatcgaacaaaattattaaatagtcgcaaactcgttgctaaaacgatgctaatttgcgattacgttacatggcgtcgtaatttagtcacaacagggaaagactactgtgcgactatattgtaacgtatgtacctaagtgtacaacgttgcagtctagtcgcatatctgccacttgttaatgtcgtcgcaaagctgtcgcttatttacgaccattcttgtatgtccgaaatttctcgctaatatgcgaccaatttgggactgcaatattttgcgacggttttttagcgaccgtttaatatcgtcgttaagtagtcgtaaacacctagtttgcgaccattttgagaccaatatgggaattgcaaatggtaggttttcttgtagtatatcgccttagtgagtacttgataaaagaagtctataaaaatgaccctgttagtccatgcatctttataaaaagatttgagaaaggatttgttataattgcagtttatgttgatgatttaaatattatgggaactcctgcaaagatttccttcacaatagaatatttaaagaacaaattcgagatgaaagatcttggaaaaataaaattttgtttgggactacaaatcgaacacctaaagaatggaattctggtgcatcaagagacatatacagaaaagtttctcaaaagattctatatggatggagcacaccccttgagtagcccaatggttgtaagatcacttgatgtggataaagatccattccaccctcgggaaaacaatgaagaagttcttagtcctgaagtaccatacttaagtgcaataggagcactgatgtatcttgctagtcatacaagacctgatatatcatttgcggtgaatttattagcaaggtttagctcatgcccaactcgaaggcattggaatgaattaaacatatacttcgttaccttcaaggtacaaaagacatgggtctgttttttcctaaccaatccaaggaagatttaattggttttgcagatgcaggatacttatctgatccccataatggtagatcgcaaacaggatatgtcttcacatgcgggggtacagctatttcttggcgctctatgaagcaaactattgcagccacatcttccaatcatgcagagattttagcaattcatgaagctagccgcgagtgtgtatggctaagatctgtagttcaccatatacaagaagattgtggtatgtatgcagggaaaaagactccaacaattatgtacgaagacaatgcagcatgcatcgcacaactcaaagacggatacatcaaaggcgatagaacaaagcacatcctaccaaaattcttctacacacacgatctacaaaagagcggcgatgtacgagttctacagatccgttcgaatgataatctggctgacttattcaccaaggcgctatctactgctactttcaagaagttagtctatcgtagcggattacgctgtttcaaagatctcgacgaatatactcataagggggtgtaattgtgtgttgcactctttttcccataaccatggtttttcccattgggttttcctgg

SEQ ID NO: 163132 - DNA, 3633 bp, Arabidopsis thaliana landsberg
acaatctgcgagaaaaaaactgcatcacatcgaatcgaatcatgggctccgatgtggagatttttgccgaagaatggaaaaaatttcccaagaaaactacatcaccgacaaagaaaataacaaccatcatcataaaggtgaaaaagaataggatgaagtaaatatatttaagaagtatctgatataattgaaagtttcccatcataattattgaaaacagaagcaaactagactgattaaacaaactggaaccaccggcaaatgccggcagcccagaaaaagcaaagaagaaaaactgttttgacgatcgcctttcgtgtcgcaagagagagagaggaagttatcatcaaacgcggccaagatgattattgtttatatttttgaacacaaaacacagacactgagacaaatgttgattattttgggtgttatatatgtttggtgcaactaccttgttaggtctttcagaatcataactttttctctctccatattttatttgaaaaaagtgatgtactattttacaaaatttcttcaaactaaatccttcagaagctaaactcatatgtcatgaaacaaattacaaattttgtttgatagactttaaaatcaccgagataagtttgtatgaggcaccgtaagttcttttgtgagttgacttatcgagagtggtttatgagaccatctaaagcgctactgttctggctacagtaagtaatatctacagcgattggcgttggtaaaattagcaaagatcattaacttctagagatcatcatatgatcagaggctacggaatctaaagtccatttgctaatttgttttttgttttgttaaactacaagaaatatggagattctcacctagaaagttgtggtgacttgactaacaagataaaagaaacaaggtttcatggggttgctgtttacattgactgatcatgcagtccattaaatcttagtggagactccatttgatctctacctttctcgttaatcaaaccaaccactctaccatctggtgaagaaggtgacccaccattagagagcttgtgagttgtgaccgttaagcatagtagctcccattgaaccacctgtaaattcagatgaagatgtgttcttgttaattagttgttacttattcgctagaagaagataaaatagttttgttatatacacgtatggtgtttagacctccttttcatagttcgtatcaaaattttggaagcttttttacgtactgtatcttgttattcatccatatagaggaagatttaatgagcctgtaaagaacgcctaatagcaaaagtaaagccaaaaaaaaaaaaaaaaaaaaaatatacagtaactaatacgcttcttctctctgatcaattttgatcataagatatgaatgtatagtgggcaaagtgtactctctggccactattggtgaattagtggatactaaggaaaagtggtaggtctggcaaaatccttttctacttgtttattattacattcaccacgtgattttggaacacgacaatagttgatgagatatcagaattcggttaggtaatattatataattggactaaacaagatcattagcaaatcattgcataacataactactctgtacttgcttatatatacctatttagtgttatttatttctaaatgcatcataacacaaatcacagtggacgtaactcctctgtttcctgtgttttcctctgttctctgtcatggctactttagtctctggtgataaagaagctcaaagctctggcgatccaggcagcaagcgcggtggctggatcactttcccgttcatgctcggttagctagtgtttttgattgttttggttttatgttttcgaaaccaaaacgttgacaaatgttgggttctatgtcgtgtaactactttgttaggcctttccgtgacttcttatggatgggtactgaacttgattgtcttcttgatcgaggaatataacatcaagagtatagctgctgctcagatttcaaacattgtcaatggatgtctcagcatgttgcctgttgttactgccattctcgctgattctttctttggaaacatttccgtaatctcagcttctgctttcatttctctgcttgtaagttagtccaagaactccttgattctctactatctttatctacaaagctcacaagttttaaaacgtttttttcagggcatctttctcttgactctgatctcatctttcgaaaacttgagacctagaccgtgtgaaacaggctcaatcctatgccaatcgccatcaaaactccacctcggggtcttgtatgcagcgttagctctagtgactgctggaacttctgggacacgggtggctttggcatctgctggtgcaaaccagtatgataaacctagagacaaaggaagcttcttcaactggtacttcctcacggtaaatacaggcgcgattattagcgcgacagcaattgtatatacacaggagaatgctagctggagactcgggtttggactttgtgcagctgctaatttgatcagtttcatagttttcatttccgggaagagattctacaagcatgacaaaccaatgggaagtcccttcacaagccttatccgcgtcttagtcgctgctatactgaaaatcaaggtagtgacctcttccaaagaagaagattatcaccgggaagttgaaaaagaatccaagacttgtattggaatgccttccaagagcttcaggtgaatataaaaagcttgtgttgttgtgaattctaaaacatgaactaaacaagcttttatatgtacaggtttttgaaccgtgcagcattaaagagcgaaaaggacttaaatcaagaagatggcttatgtcataacccttggaggttatgttctgttgaggaagtagaagattttaaatctgttctcagagttcttcctctatggttagcaatcttattcgttggaacttccattggtgtccaagcaagcatgacggttctccaagctctggtaacagaccgaggactcgactctaaatttaaagtcccggccgggtctctacaagtaatagtactcatctcttcatgcgtctttctcgtgctcaataactggactatttatcccatctatcagaagataactcataaacagctgacaccactgcaacaagtcggtataggccaagttttcaacatccttagcatggcaatctccgccatcgtggaagcaaaaaggctgaaaacagttgaaaatgagcatcctatgtcagtgttatggctgttaccacctcttgtgatagttggaattggcgatgcctttcattatatggcgaatgttgcagtgttctatggagagttccctgagtctatgaggaacacagcaacctctgtgacctcggtggcgtttggaatctccttctatttaagtacagctctaataaacttgatacagaggaccaccgcgtggttaccagacgacattaaccacgggagagtggacaatgtgtactgggttttggtcattggaggtgtcttgaaccttggctatttctttgtctgctcttggtatttcacgtacagaaaaatccaagatgataacagacaagatcctaaagatgttacaaactaagacaca

SEQ ID NO: 163133 - DNA, 5252 bp, Arabidopsis thaliana landsberg
atggtgtcttggaagagcaagaagcagaacaacttggtcctatcaactgctgaagcagaactcagtgctttaaaaaagttcgagtgctcaactcatacgggtgaaacaactcacaaaggagtgtggtatgatttctgatgttctgttaatactttgcaataatcatagtgttataagttgtatcaaagaacctgttagaaagtctcgtactaagcacatagatcatcaacatagttatattcgcaaactggttgaggagaaattgatagctattgaaaatgtgggtactaaaaaccaactagctgaattgtttatcaaacctctgaattagagcaaatttcgtactttacgaatgttcattggaatgtttgatctgtaatctatttgtgagttgtgctgatctaaaacagggacacaaagcgagaacaggtcatggaaatccaaagatgaataaaggatcaacactttgtaaagccatgtggaaaatagctgcctgtcatgacgggtcaaatcagacgtaaaacattatcatctactaggaggtcatagagctgagaagatcaaccaactaaatggatttgacacacacacacacacacccaaaaaaaaaaaaaaaaaaaaaaaaaagtgtatcaagatcactaagtatgaatatcagcaattaagaagtcaagtgatattgctaatatgacaaaaataaggagcagttcaaaaacacatatcatcaagctcctgtttggtaaagctatcttcaaaggaaattccagctgcttgttacacattgccctgatcgtttagaactgaaggcatgacagtgtgaaagactagccactgaacattgagctgatctatcaacgatctgagtggttgtgacagtttctttctaagttctgaacaaccgataggcacaaagcactgaacagagtacaaggaagaggtatgctttgaaaatgtttggaaagctactaccggcatgtgtcaattgtctgtttgggtcactaaactggttcaggatataaatgtttatctgaatgttgcttgaaatttgatgctaacgaaaatcatttgtttgattgaggaatttcttggcaagaaagcacttatgagtttgttaagtgttttgagaataacaaaacagtttaagcccaaacccgtttcgaggttcagaagcccatgtgaattcaaggacgattgttcgcgtattggaaggaaaaagaggagttagggtttgaggagtcaaatcaactatctttggaagtcgagaaggcaacccactgtactcaaggcaaatccttcataagtcgagtgaaagagagcttgaaatcgattttctcggctgttcatcatcttgttcaacaacaatcagagtccgaatcatcttcagatctgtcagtctcaccgcccggtgactcgatgccagaaatttcacagcggagtgaaccaaaaatccaagaggtgatgttcgatgaagagctcactgtgccgaacccaaattggactatgctacctgtcagagatccaccaccgctggtaatcgaaattgaggacgagactccattgtcaactgatagagttcagaagtctgaaccaaagggtccagaggctgctccttctcagccatctgtggcatctcgattgcgtaagcgaaagcaatctactgcgggtcagagtggcaagcagatgaagcaggacaagggcaaggggatcgccgcttcatcttccttcgatggcatcctattcgtttcagcggaggctgaaaaaaggtatgcccacttctctcaccgcaatttcaaagaggaagtagaactatctaggaagacagatgaggcggctagggagtttattgagaaggcgggactgattcgttccaaccattcacggaggaactggtctttgagttctgggcaaatctgccaatggtgaaggttgacacgtataaggtcagtgtcctggtgcgaaattgggagtacgaggtctcgcctgagaagatcaacgctctgtatgggcttccttctgtcaatgcgagatagcactgcatggatatggctggattgttcgatgatcaagtagctgcttttctaactggtgggaaagtcagttctttgagcaagattcaggtgagtgccttcacacctcccagtcgagagttgtttaaactctgctgctccaattggtctcccgcatcaaatgatggatacgcgcagcctgaccgagccaagcttgtgtacatgattatgcaaaaaatgccatttgactttggaaggatggtttttgaccacattcttcagctggctctgaaaacggacacgaaactcttcctgccgttccccaatctgatctatcagttgatccagacgcaatgcccggttcagattcccgtcacccctcctgcctcctcagcgtcgaccaagcagaagaaggtgaagcagagtgcagcagcatatcgcaaggaatcagccaaccgaagggcaatgaggattgccatcgaaatcctgcaggctgctctcgatacaggtaagtgttctgtgcgatcttcttgctttatactacatatgtctgattgtttacatgatttttgactaagttatgtgctcaagcagggggagataaggccccttgggactccgatgatgctgggggagattaagttgtgggggagctgtgtttatgtttcgtttctcttgtaaagctcggttgtatttcagaccaaaacaacttctcttttgtttatgtttaaaccgatgattgtatcatcgtaaacatgggtctgtaatattttttccacacattgttcactttcagactaatcgctttatgatatttatactagatggtatttctacagtatgcctattagatgtgtggtgtgtctctcattagagtttaaggttatatcaatgaaggaatgcttgagtatcaaactcagtcaaaaagggggagattgaagatgcagagttcaatcaatcagctgatggcgatcacagcgttgatggatttcaggaagctgcatcgagttttatcaaacgcttgagttgcagacatggatgcgagagcacacgtggcaagctaaggcggatgatgtggagagccaaggatggaagctgacttggcgtggtgtcaaagacaagaatcaccgagaagatatggaagatatcgtctcgaacaattaggaaggaataagcttggagaaaacaaaaaagatttcttaaaacgagattctcggagatcctaggtttacggttctggagagtaggtataagtattctagagcttagtgtgaggcgctttgagcactctagaatactgtcatacgattgtaaacttcagagcattgcaaaagcttgaaggtgagtgtgtagttctctttgtcttcacgtaagagtgataagaaacagagaagagaattaggcttaggtattcttagtcgggtttgatcttttgggtagaatagatcaagtaatctccaagataacatttgtaatcagtttgttatcaataaaaatatagtcagagtggtatctcttcaacaggtgagatctggtgacagggtcatggagaattcacaacagtatgttacgatacaacagccattgaagctggatgctgagcattatggttactggaaggtgtctatcaagcaggctatccaaagcgatgaaatggatgtgtggttcgtagtggaagaaggatggacagctccggtggtcatggatgctaaggggttagaaataccaaagtccaagaaggattagaccacagaagagaagacaaccgctaagaacaattcgacggccttgtcaatcatcttcagatccctgccaatgagtcaattcactcgcgtgtaggggtgcacatcagcgaaggaagcttgggacattcaggagacaacctttgaaggaaccagtaacgtgaagtggactagattggatatcctagcatctaaatttgaaaacttgaagatggagaatgaagagtccattgaggagttcaacagtcggctaagttcaatttctcaggaggctgttgtcttgggaaaaaggtataaggacaagaagctggtcaagaagtttctcaaaagtctgcctgataagtttcaatctcacaagtcagaaatagatgtatcacttgattctgatactctaaagtttgagcaagtggtgggaatgatgcaagcgtatgaattgcaaatgaagaagaaggaacgctcatcatgaaagagtttgactctcaaggctgctgaatctcaactaagtgtaagtgaggatcaggttggtttgattgttaagaggttattcaggaaaaaggaacgaggacaacgcaagggtaattcatcagacagacgacctgatatgagtagagattcgaagagttcagaaaaaacagtgtgctgaatgtgagggatttggtcactacaagtctgagtgtcccacactgaagaaaaaagggataatgtgctatgggtgcaaaggttatggtcataccaaggctgaatgtgttggaaatgaagaaacaaagcagaagtcatacatcacttggagcgaaagtgatacggatgacagtgaaggaggagaaggagagattctcaatagtctggtagctgagcttggtgtgattgaaacaggcactgaagaaacagttgagaatggtacactagaggatgttaaccaggaatctgaatcagagtcagacactgatgaaccagatctatcatcgagaagttcagaattctgattaaagagttggtttaaaagaaaaaggacaatgaagtacttggtgttgaaaaagagacactggtaatgcaagtggcgaagcttgaaaatgaactttctgaggaaagaaccaagtctgaaggattggaaaagcagttggcagaacaaatgaggaatatcaagatgctgaataacgggaccaaggatctggacaaacttctaaccatgggcagaacatcaaatgttacgtggggacttggatacaatggaggaaacactaaaagggagactcagtttgtcaaaggatccacttcagaagataagtctcaagtcaaatcaacaaccactgttcggaatcagtttctctctaagcctaaacgagcatctcaagcttacaacttgagacaaacttacttcaaacctgagttcagaagcaagagaacaggatgctggtactgtggaggtatgagtcactacaaagcagactgctacaactacttgaaacatgttgttcagactaggaggaattatcaagtggggtga

SEQ ID NO: 163134 - DNA, 1005 bp, Arabidopsis thaliana landsberg
atcaagagcttgatcaatgtagggtttttaacaattatctcagtatcttactgctactgcttaccaccaagaatcaaatctggtgttcttcgattactctctatttttccggtctgtgttttgttagttgttcttcctctgttcttctccttttcaattttcacttccaccacagcgtttttcttatcagctattgccaattcaagactcatcctcttttcctttgatcaaggtcctctttttccactaccttcaaatctattcagatttacctgctttacttgcttcccaatccagcgtcaacaaaaccctaaatctcaagatcatttgtccacgtatgtttttcccgttaaaattgcaatctttgttgtgttgttatatgtgcataacgacatacaaaaccttcctcctacttttctattgtgtctccatccactgtatgtatatttgttacttgagattctcttaacgctccttagaattctaatgactatcattcttggttgtgacctagagccacattttcacgaaccatacttagccacatctcttcaagacttttggggtcgcaggtggaacctcatagtctcggcaagtcttcgggcaatcgtctacactcctgtgcggcgtgtctgccaacgagtaatgagctctgattatgcaatgttgattggtgtttttgcgacgtttgtaacctctggtgtggctcatgaagtggttttcttttatataacccgtgcgatgcctacaggggaagtcgctttattctttctctaacatggagtttgcacggtggcgaaagtggcagcgaagaggacggcgtttgtacggaggtggccggtgagaccagtcgtatcttggatgttcacgatagcgtttgtaaatgtgaccgctggttggctgttttttcctcagttgattcggaacaacctgggggagagatgctccaatgaaatctccttgctcattgatttcttcagaagcaagttattttattttccccag

SEQ ID NO: 163135 - DNA, 657 bp, Arabidopsis thaliana landsberg
atgtttaggataggtttgcatgcatgttgcatatttgtgttgatttcaggtgatttggagctgttgacgagctaactggaagaagcggacctgatcatgacaaaccactcgacccaaaggtcgggtaggagcttcaagatctcaagagatcactcgacccccaggtcgagtagatggcatcaccacttcacctcaccactcgaccacgaggtcgagcgtcttcatctccatcacctgaccatcactcgatcacatcactcgaccctgaggtcgagtgtcttcagcaccattacctgatcatcactcaaccatatcactctacctggaagtcgagtatcaccttcaccaccactcgactacaccctcgatagcaagcttcagagtcttcttcattccgcactcaaccagacactcgagcacaaggaagaaaagaagactccagctattcactcgacctcccactcgaccacctgggtcgagtacagttcttaatccgtcccaataaagtattagggtttcagaatatttggctataagtagcatgtacttcatattttcgcaaacaagtttttatctagttttattccgcagaccttgtgttctagaccttttgtaatccggatttctctttatctattcagtattcagtattcagtt

SEQ ID NO: 163136 - DNA, 3860 bp, Arabidopsis thaliana landsberg
atggtggaaaactacaattatggcggtagtggcggttttcatcgagattggatgtacaagagatttgatgaagtgacggggaatttgtcagccgaataggtcgcaggagttgagcaattcatgacattcgctaatagtcagccaatagtacagagtagtcgaggtaaatttcattgtccttgtagtgtatgcaagaatgaaaaacacatcatctcgggtagaagagttagtagtcatttgtttagtcatggatttatgcatgattattatgtttggtataagcatggagaagaaatgaatatggatttaggaacgagttacacgaataggacgtattttagtgagaatcatgaagaagtgggtaatattgtagaagatccatatgtggatatggtgaacgatgcatttaattttaacgtggggtatgatgataactatcgtcatgatgatagttatcagaatgtggaagaaccggtccgtaaccattcaaataagttctacgacttgttagaaggtgcaaataatcctttgtacgatggttgtcgtgaaggacagtcgcaattatccttagcatcgcgactcatgcacaacaaggcggagtataatatgagtgaaaagttggtggactccgtttgcgaaatgtttacagattttttaccagaaggaaaccaggcaaccacttcacattaccagaccgagaagttaatgcgcaatttaggacttccatatcatacgattgatgtttgtcagaacaattgtatgctattttggaaagaagacgaaaaagaagatcaatgttgattttgtggcgcgaaaagatggaagcctaaggacgaccgtcgaagaaccaaagtaccatatagtcgtatgtggtatctacctattggggaccggttgaagagaatgtatcagagccataagacagctgcggcaatgcgatggcatgctgagcaccaatcaaaggagggagaaatgaatcatccttcagatgcagcaaagtggagatatttccaagagttacatccccggtttgccgaagaaccccgtaacgtttatctcgggttgtgtactgatgggttcaatccgtttggcatgtctcgtaatcattcgttgtggcctgtgatcctgactccatataatttaccccctagtatgtgcatgaatacaaagtacttatttcttacaattttgaatgttgagccaaatcatcctcgagctagtcttgatgtcttcctccaacctcttattgaggagctaaaagagttgtggtctactggagtcgatgcgtacgatgtatcattgagtcagaattttaatctaataacagtgctactgtggacgataagcgattttccggcgtatagcatgttatcaggatggattactcatggtaaattgtcttgtccaatttgtatggaaagtacaaagtctttttatctacccaatggacggaagacatgctggtttgattgtcatcgtagatttcttcctcatggtcatccatcccgtaggaacaagaaagactttctgaagggaagagacgcttctagcgagtatccaccgagtctttgacaggggagcaagtttattacgagctgttggctagtgtaaatccacaaaacgaaggacgttggtgggaacggtcatgaaaagaagatgtgaggttatgggaaggaacataattggcacaaagaaagcatattgtgggagttgtcttactggaaggacctcaatcttcgacataatattgatgttatgcatatagagaaaaattttcttgacaacatcatgaacactctcttgggtgttaagggtaaatcaaaagacaatatcatgtcaagattggatattgagaaatattgttctcggccaggcttacatattgatagtacgggtaaagctccttttccaccgtataaattgacagaagaagccaaacagagtttatttcaatgtgtgaaacatgatgttagatttccagatggttattcttcagatttggctagttgtgtagatttggagaatggtaagttttcaggcatgaagagtcatgattgtcatgtttttatggagcgactacttctatttatctttgctgaacttcttgaccggaatgtctaccttgcattatcaggtacaattctaactattttttatggaggaattttttttatgtaattatttaacttccacatatattttaggaattggagcatttttccgggacctatgttcgagaactttatagaaatgtcgggtacaaattctcaaacagaacataggtttaataatctataacttggaaaagatctttccaccatcattttttgatgttatggaacacctacctatccatctcccatacgaagctgaattgggtggccctgtccaatatcggtggatgtacccatttgagaggtttttcaaaaagttgaaaggaaaagcaaagaacaaaagatatgcagcaagatcaattgttgagtcatatttcaatgacgagattgcatatttttcagaacactactttgacgatcatatacaaacaaaatcaaggtaaatataactatttattttacgattcgcaatctatacttcagaattaaaatcaattacatgaatcaggttaacaagattcgatgaaggagaagttcctgtatatcatgtccctggagtacctaacatatttatgcacgtcggccgtccaagtggtgaaatgcacgtagaatggcttacagagaaagacttccaaagcgcacatgcatatgttttaagaaatatgtgtctattttcaaccacttgaaaggtatttttaatcactccctaatttaaaatttccattatgataactttgataatatttatcattggttgtaaaaatagtatgttccgtgaatttctttctgtgaaatatccgaccttgtccgaatttgatctctgcgcgtaaatagctgaagaatattatcaatgggttaaagaatatgtaagtctacatcattttagtaatttttaaaagtgatcattaaaattatgttgatattgatattgtttatttattatgtaggtaacatattggaaccctacttctccatttcctacttgggttcaagagatcgtgcatgggcctttgaacaaggttaaaacttggccaatgtatttcacacgaggatatttgtttcatacgaaaaatcatggcgctggacgaaaaacatgtaactatggggtatgtgttaaaggaaaaaattacgcggattcatctaatgaaccggatttctacggtaccttaactgatatcatagaactcgagtatgaggggatcgtcaatttgaaaatcacactttttaagtgtaagttgtatgacccaaaggttggtagaggcacttggcgaagccatagtggtgttgtagacgttctatcatctaggaaatacaataaatacgagccatttattctaggtacgtaattaagaatacataaggttctctataaattattaaataattttatatatttattaatatgtataattagtgtatgcagcatcccaggcagatcaagtttgttatattgcgtatccatatacaaagaaaccaaaaagcatttggctaaatgttttaaaagttaatcctcgtgccaacatttctgaagaatatgaaaacaatgatccgactcttttgcaaacagaaaatgatgaagttgtattgctgactacaattgaagatctggtactagacaatccggtagaaagcttaaacccaatcatactcgattacgatgtcggagatgctgaaccagaggatgaattccgatgtaatttatcgtcttcagacgatgatgaaatcgaagatgatgaagagtactaa

SEQ ID NO: 163137 - DNA, 2129 bp, Arabidopsis thaliana landsberg
  unsure (1)..(2129): unsure at all n locations
tctttctctaggaatgattatacntggttcggtctcagcagcaacatcacaagcgtcctcgtagtgaaggaaacacatcgcgggttccgagtaatcgccatacattaccactgacgccaatcaattcaaaccactaagcagatggtacttctcctccacctttcaatcaatcccctcgcggttcttccaatcacattactcggctagctgtccgactcaatgatctgacaatagatgagctacttgctagtcctggtcgtgctggtttgcctagattagaccctaaccgtcctccaggaacactctggtaagccactaggctttggtctctttactaggactcgtctctttttagttttgtctgtctgatggattcttgttttgtaggtttgacgatgactcttcagttgcagccactgtccagagcatttttgaaagagatttcaaagaacctcatgcaaattggtaacagacatcagaagcagtggtcgatcgttggtttgaaacctttgatataagttaaataatttgtgttttgtttggtacaactattggtcttgtaatattaagtctaatttttgctgtcacttgtgtctgttttgtagcaaatgtataattgggataaaacaataaacaagagagttaagactgagtttgaagcaaagctgaaggagaggatgactgatcaagtttgtcggtggaagggaaagtggagagaaaagggagatgtagcaatgcctcgctggtttgatcctgtagtgtgggccggtcttattagtttttggcgagatcctaagtcagaactaaagagtatcaatagtaggaatgcaagattacatgatccggatggcctcgggattcataaacaccggtttggcgagacatcttaccaagcccgtgccaaaaaacatgtaagttattttacacccttacttagtcaacttttttacacaaacaactaacctgatttgtttatgttttagtgtgagatgaccggtgaaactactcaagattttcttttgctcttagatgagacacatagaaaatttgatggtagtttcaatgataaaaattccgaggagatctacaatgaagtgtcatctaggattcaagaggaggagtttcagctgtgttccgacaacacgacggagagcgcagcttcagggggtttatctgttcaggccaagaacaagatttatgctgctgtaaattctctctctctctctctctcttctatatagtttctgaattgcgacttgggattgtgttaagtgttttgtcttgatttttttgtgtgtgttgtggttccattaagtaatagtgacttggtattgtggcattgtgacttggctttttgttgtttgtttttgtctgactttgtttttgtgtgttgccaatgcattaagtaatagtgacttggcattgtggcattgtgacttggctttgtgttgttagattttgtctgactttgtatttgtgtgttgtcaacgcatttactaatagtgacttggcattgtggcattgtaacttgacattgtggcattgtaacgtggcattgtaacttggcattgtggcattgtaacgtggcattgtgttcagtgttttgtcatgacttggttcttgtgtgttttggttgcaattgtcttagcattgtggcattgtgacttagcttatcatggttgcattatgtaatagtttctcggcattgtcttgatttgtttttgtgtgttttggttgcattatgttatagtgacttggcatttgtttttggttttgagtttctcttaggtggctccaaagaagaaagggaggatatatggggctggttcattgcagctagaagcctcatcagctcacattggttcttctgttcctcgagaagattcgattgaactctctcaaaagctggctgccgcagaagctctaattgcaaaccaagcggagaagatcactagctttgatgtgtacttcgactaccttgcctagaaagatccagacttcaattcactgccctctttcgagccagatcctctaggactaaacctgtcagatccaacctgagacctgaggtgccaaatgccacaactgctacatctgctgggatcgcacatgtgactgtcgaagctgaa

SEQ ID NO: 163138 - DNA, 2266 bp, Arabidopsis thaliana landsberg
aggttagccggaggatggcagatatctatttgaaagaaacaccagtaccaaccatgttgtatgacgaggacgccccatcatatttcgacgatccgggagaagaaggtaaaacatgttaggacctaattcaaagtttgcaaactaaattttagtgtagccgctaattttaatgtgttcttatagaatacttatggatacattacagttatcaatcttgtagctgctaatatatatggcgatttagatgtctacctgtaatcaataagttatctaacaaaatggtaaactgcacattatttgcatcgcactctaaaggatgccgactacgaaggaaacaatatcttcattggcagattgttcaagaataaagaagactgcgcaacaaaacttgcaatacatgcgatacgacgaaagtttcatttcatttacgcgaagtcttaccctaacattctcctcgctgcgtgcgtaagccatacatgcccgtggcgtatttacgcaacaaaaatggaggatagtgaacgattcaagataaaatgtgcaagttaacatcacacctgcagtgtagacgtaaggggagactttcacaaacaagcatctacagctgtgactgggaaactgatgagaacaaagtattttggggttggtaggaggccaaggcctaacgagttgaggaagatgctccgagatgagttcagcctaaatgtctcgtactggaaggcatgaagggctcgagaaatagctatggataatgcgatagattcggtgatgggcagctacgctttgatccagccttatttcatgcttcttctgaaaacaaaccctaactctctagttgcccttgatacggagaaagataagaaaggtgtggagcaattcaggtaattgttttttgccctagatgcagctgtacaaggatattcttatatgagaaaggtaatagtgattgatggaacgcatgtgagggaccgatacggtgactgcttaattgtagcaagcgctcaagatgccaatttccaagtctttcccattgcttttgggatagtgaacatcgagaatgacgatgcgtggacatggttcatggagaggctcacggacgccatcccagatgatccggatttggtgttcgttttagacaggcactcatcgatttatgcaagcatacggaaggtaagttatataccgaaccccgataattatactattacatcgatatatatagttaatcccctaatttcgtggctatctcgtaaatgttactttaccttgagtaagtatgtatcataacactggtacattgtcgctaatgtacaggtttatccgatgtcttcacgcgcggtatgcgttgtccatctaaaagaggaacatagtctcaatattcaagtcggaagggttgagctttttggtcgccagtgcagcccgagcttactggccaagcgacttcaatcgcatctttgctgagataagagctatgcacccagaatgtactaattacctcgaagacattaggtttgagcattggacgcgctcgcagtttgtgggagataggtataatttcatgacaagcaacatagcagagtcgctaaacaatgtcttaaccatggcaagggattatccggtaatttctctcttaaagactatgcgaatcacacttgttacatggtttgccctcaggcgaaaagctgcacaacacgaggggaatcttttgcccctaaggtgaatgagatggtcattgaaaattttgaaaaagggcagggtatctcgtaattaaaataggagatgcattttatgaagtgcaagagagaaaagattcaacgtttgcggttaacctttgggaaaggacaggcacattcatagaattccagctgttaacgatttcgtgttctcatgccatagcagcagtgataaaagaaggaatctgtgtcgaaacaatggtaggcgtccaccacaccgtcccatatctgagattggtgtacaagggagtaatcatgcccgtccacgacatggatacactgactccttcccccagtaatgtcagaggcggaaaacttgcgccaccttacgttcgtaggccaccgggaatgccgcgtaagagaagactattctctagggaagagttcaaggtaacattgttattaacggatatatataacaataagatatagaggtaatgtggatgctatttatgtccagaaaaaatcatcaaaacgttgctccagatgcaggacaatgggacataatagggcaacgtgcaggagaccgataacgg

SEQ ID NO: 163139 - DNA, 1965 bp, Arabidopsis thaliana landsberg
aattccgaatgtttaggaaagcagagagcttctgtcctagcttcctacagaaatcacaacaattgcagagacagagaaaacaactgttgggtttgatcccaatttcatcaccagacagtctaaagacagtacttcaaacactgtccggtaaatggggagatgtagttgaagatctcgagtgtcttcaagtgaaacccatgaaaggtgcaatgactaacgaagtttttatggtgacttggcctataaaggataacagttttctccataggaagcttcttgttcgtgtttatggcagaggtgttggtgatctgttgttcaacagaaaagatgagattcgtacgttcgaggttgtctctcgttatggtcacggtcctaagcttcttggccggtttgctggcggtcgaatcgaggagtttattaatgcccgggtatgtttggttttgtttcttgtgtaataataaaattattaattaaccatacccatttgattcgattcattatgttgtgactacgaaatgatagtgttgggtctgaatttgactatgagaactgagaagatactacaacaacctttgatttgttttgtgattgatgttgaaccgggaattaccaatagagtgattaccggtttagttgtgtgtcaattgggtaacaaggaacatgtagatgtttttgttggacttcatcaccatgactttggggtgggtcttttatctcaataaggatctttgattgtggtttgtttaggatttttttttgttttgggttccgggaaataccattagagttatgcccggtttagttgtaaaccgattgagatgttcttgaatcttgatggacaatgttttcactttatttatcatcataaatcaagtgcattttatgacttttgatcagacgttatcggcagcagatctacgtgaaacagaagtatctgctcgtgttgcggctaagctaagagaatttcatggtataaacatccctggtgatagaaatgtgctcatttgggataggatgaggtgagtaatctttctatgttaacgtgaagcatcaagtggtttaatcaataacagaatcttgaaaacatatgaccaggaattggcttagacaagccaagagtctgtgtacacctgaagatttagcagagtttggtctagacaagattgaagctgagatatacttgctggaacatgagctgcaggataagtgtaagcagcaggagatagggttttgtcacaatgatttgcaatatggtaacattatgattgatgaagacaccaatgccattactatcattgtaagttttccattacccttaaggttaacatatcatcacacatggaccaatatgagattctctaaaacaggactacgagtacgctagttataacccagttgcatacgacattgcaaatcacttctgcgaaatggcagcaaattaccattctgacactccccatatcttggactatactctgtacccaggtactcacatccacaagtagaaaagtaacaaatacattcgtattttgactgattggtttgagagttgcaggagaagaggaacgaaggagattcatccataactacctcagctcttcaggtcagtttctcaaagaaacatagttccttcttcttctagccgtaacaacgtctcatggactaatatacgccttcttttgttaggcgaagaaccaaaagaacatgacataaaacagctcttgaaggatgctgagaagtacacattagcaagccatctgttttggggcttatggggaatcatctctgtaagactcttcctctctccaatccaaacataatctcatcaagaaagtatctgaaacatgaattgtgattgtgtaggaatatgtaaacaagatcgacttcgattacgccgagtactcaagacagagattcaaacaatactggcttttaaaacccgagctcttactcttctcccaaatg

SEQ ID NO: 163140 - DNA, 2510 bp, Arabidopsis thaliana landsberg
atgtttgggctaggaaaaaagaagcgaacgagtcctaaccttgctcagagagcctccacatccacggctggtcgacgacctcgttgtcttccgtctcaggacgatttcacgctggcagcagaacggtctcctcagctacagacgcctgcaacagaagccgctgttcctccattacaatcaacgacagctcatgtttggaactatccgctgccactacagttgttccagcactttgtcagtcgacaacctgaagtgcaaaggactgcctccgtagaagtgcagaacaatccagcgactcaagccgcgactactcagcaggttcctccgactcctcagcaagaccctccgccttctcagcaagaccctacgccttttccagttcaagagtctcgggctcacagccacccatcctttcaaggcaacaacttcgaagaatatccacctctgtcgccggatctctaggaggacacactttaatcactaaatgatctacttatgttgccgaagagggataagttcatcaccgtcctctctcccattcctcgactgaatacgacatggtatgatcttcttcttctcttgtttgtgatcccatgttgtgttcaatgtcggtttagttgagtaatgagctttgtgagattgattagattgagaaaatgtctgaattgtttctttgctgtgtttcgtgttgtgttggtctaaaagtctgaaagtctttgatattatagttgttactttgcatctgacaatctattttgttgtttaaagagtcttgttgtgttggtcttattttgttgtttgcgagaacaagtagtttaagttgtgttttgatcttagggtttagttgggtaatgagctttgtgagattgattagattgagaaaatgtctgaattgtttctcgttttagtctcgtgttgtgttggtctttggtctttgatatttagatgttactttgcagccacaatctattgcaatgtgtttgaagagtcgtgttgtctaggtctctacttgttgtttgcgagaacaactgcttgtggctgcaacgtatcgtgtctgtcattgtgtaagtttagttctagatgatactttgcagccacaatctatgttctgctctatatgatctgtttgtatgatactttgcagccacaatttatgttttgctagtctttggtctgatatttagatattttctcccatataataacaacttgtttttcttgtgtatggaggtttactcgggacacaaactcatgacttgttaggaatatcactagagtgtttacaaacaagtttgatggtctcttctacagctggacatgtgtgcctcaagagaggcaagagaaatacttcctcgagtttgctgttaagtgttctttcagcccttcttttatatagttgattacacttcttttttttactgacattaccttttctatttgtagaaaacacaccattgggatcctttgatcacagggactgttcagttttacttcaacgagatctgtttaaggcgaatgaaaggcatggttagcattgtaagaactagtcgaaagaaacctaaatggatcgggaaaactctatggaaggaaatgactgcgtactaggacactgaagaagctcaggaaagaagtcaaatctattcaaatgcccgtatgtctgaccgtaacggtctaggtcctcacatacacttctcagggtctaagtcatatcatcaaatccgtgacgaattggtaagtcttctctctgtttactcctttgcaactttaactcgatgtttcaatgtacttttctatgacttgtttttttttcattaggggaagagcaattgggcaaaactgtcagtattggtgacgttttcatcaaaacacatacaaaacctgatgggacgtatgttgatcgaaaggcagagaagattgcagagttatatcagaaaattttgcagctgaggcagtctgagctcgaggctgaagcttctgctgtttcagatggcacttcgcgggcacgggagctcacagctgaggaatgtacaaccatatttcttcaggtaacgttttatgtttcccaatttagtgtttttgagttgtctttttcattctctaatctcagcttttatcatactatgcagtccactgagaaggattcgataggcgttccttatggagtaggaagcctcaaagagtctcttgtcaatggcaagcggaagcaagcaggtgactcaacttcttttgtagctttgcaagaacaattacaggaagctcaacgcaagatagaagagcaggtctcttacaatcataggcgtgaatctaagatttctttgcgtgaagctgagaattcccgagctgcagatgagcagaagaagaagcttgagcacttgtccttagtggagaagtttttgcgcgaaaatgatccttggttcctcaatttcctcgaatctcattcagcaaaggagacaaccatagatcctatctcaccctctccagctgcctctccctcttcatctgcttcatag

SEQ ID NO: 163141 - DNA, 5179 bp, Arabidopsis thaliana landsberg
atgcctatcgccggtcgaggtggctcaaggaagcgtaagacgacgccgaacgtcactcagagagccggcgccggcggatcaagacctgcaaatcttcctccccaatacaacttcactccggcgctggcggttcaagttcctgcgacggagccggctcaacaacatggaccttcaacgtctgcaccccacgtccgcaactatctaccgtctctgcaactcttccagaactcaacgactcaaccacaacatcaagctcctccgcctctatctgaagaggtccactacactccgccgccaacagcgccacctcagcaaactcctcctcagtcgcgagattcagacgctccagcaaacagccacccgtcgtctcaagggaacaacttccaagaggaagttcctgggacgttgccggagctacaagaagactcggcattggctctgcaatcgacactctctgtgccaaacagggagcagtggtgttgtgtcttgtctccaattcccaaacctaaaaccgagtggtatgttctcttcctctattttattctagtgtgcttagcctgtgtagtgtaactcgtgttatggtctgtagaatggcttgttagggtttgtgtaacatagtagaatctgcctttgttggaattggatgtttgttagggtttgtgtaacatagtagaatctgcctttgttctaaactcgtgtgtgatcttgttaagttcttcactttgtctataatcttgttaggttatttattgtgttctgtggtgaatcatgaacataattgtggaacatttgttgattgttgaacttagcatgttttcggctttgacattgaggatctgtctttgttctatacttgtctataatcttgttaagttctttattgtgttctgttgtgaatcatgaacataattgtggaacatttgttgattattgaacttagcatgttttcggctttgacattgaggatctgtctttgttctatacttgtctataatcttgttaagttctttattgtgttctgttgtgaatcatgaacataattgtggaacatttgttgattgttgaacttagcatgttttcggctttgacaatgaggatctgtctttgttctatacttgtctatacttgttctttactgtcaatgatcttgttatgttgactactgtgttctgtgtgtgatcttgtcggcttatacttgtctagaatcttgtagaatttgcctttgttcaattatatagtctgctgtagttgtagtgttttggattttaaacatgtttactttctgtctgtgttgcatgtgtttggaggtttactcgcgacagaggatctaaattggttagaaagatcacacggatttttactcaaaagttcaatgctccctactataattggtcctgtgtgcattggataaagagaaagatgttttagagtttgcggtaagcttcttgtatttctccaattttcattagactgtactatttaatctgtcatttgttcactaacttcacactttttttgtagaaaactcaccattgggatcccttaataacagggacagtccaatactacttcaatgagattgttaagaggcgcttgaaggacatggttagcaccgcaaggagaactcgagagcagcctccatggattggagaaactctgtggggaaccatgtgcgactactgggacactgaagaggcacagaaaaggagtaagacatattccaaagctcgtctctctgaccgtaacggtctcggtcctcacgtccactactctgggccaaagtctttccaagaaatccaagatgaattggtaagtgtttctgcaatcttcccatgtgttttagtgatgttcgtttaactgtgtgtgatgtttagtctgttgatagtaatgaagcttgtgatctgtgtttgcaggaagaaaaaatgggaagacctgtccctcttggtgaggtgttcatccagacacacactaagtcggatgggacttatgttgatcagaaggcagagaagattgctctggcgtatgagcagaatgtgagagagaagctgtctgaactagaggcgactgcttctgctgtgtctgatggctcttcacgtcctcgggatctcacactagatgagtatgcagccatatttctcgaggtaagatgttctttgtctttttcagagtcttagagacatttaggatctgtcactaattatcttcctctttatttcttgcagtccacagaaaaggatgcaagaggcaatccttatggacttggctgtcttaaagaaactctaggcagtgccaaccgccaactccccggagactcaacctttaaagccttagaagaacggctgcaggaagctcagcggcaaattgaagaacaggctgcatataacgagaagcgagatgctgagattgctgcccgagaagccgagacagcccgagtcacaggtgagcaaaaggacaagctcgagcacttgtccttagtcgagaagtatctccgccaaaccgatccgcagttcttggacttcattgcaacacactcttccacatccacagagcgtatcccaattactcccccatctaatgatccatagaatttaggtttccaaacactaattgtatctttcaataagttgtatgtttgaacaagataattttatgttttgaacttgattttcaatatataagcagtgttttcatattgtatagcatatcaataacaaacaagaacaatcgatgaacaaacaagaacaaacaagaaacccatcacctgatgaccaaatctttattcggaccaaactattagtcgcaaaaaagtagtaaataagtagcactatagtcgctgaatagtcgtcaattagtcacataactttacgacaatcataagactaaacaaattagtcataaaagaatcgtaaaacagacgtccaatagtcgtatatacttatacggctatgttatgacaaaaagtttcaaatccttggtaaagtacttttaatcgtcaaagagtcgtcgaatagtcgtaaacatatttacgactattttacgacaactggaaacatacccagggtttagaatatttaatcgcaacatagtcgtaatgtcgtcgtacacaattaacgactacgaaacgactacatgttctcacacgctctgtacagtacaataatcgtaggatagtcgtcaaatagtcgctgacatagtacgactacgtaacgacgatttttcactgtttagtcagttgtcgtattattgtcgttgaccaacgactaattaacgactagtgtttttagcgactatggattaatgactatagtcattagtcgcaaattagtcgtattagctttagttacgactactaaacgactgacttgtaggtcgtcaatcacctgttttcttgtagtgtatcgttatgatataaggaatcaatctccgcaaggtgtgcattaaagattgatatatcaaaggcttttgactcggtccaatgaccttttcttctcactgttctaaaaggttattatctcccgctggttgttgttcgatgaattgaactctgtattggtattgcatctttttcggttcaagtcaatggaagaattggcaggttacttccaaagcaaacgagggttgagacaaggctgctccctctcaccttatttcatcgtcatttgtatgaatgttctgtctaaaatgcttgacaaagcggctagggataatgatattgggtaccatccttggtttaaaaacatgggactcatgcagtcatttgtgttttgcggacgacaatttggttttttagatggtagtgctcgatccatagcagcattactacaggtctttgggaactttccaggattttcgggtctataaatcagcttagagaatcgacgttgtttatggcaggttgctcacctcagcgtatagataatctgcttcaccgatttccttttgttgcgggaacacttccggtcgagtatcttggtctcccgcttctcacaaaaagtatgacacgtgccggctatctcccacttcttgagaaaatacgatctagaatcgcttctttgacagatcggtttttatcgtttgcgggtcgcttacaactgctaaaatcggttctatcgagcatcacaagcttctggctctcagtcttcaggttgcctagtaagtgcataaaggaacttgaaagtctcctctcaagggggggggggatggggctaaggtcgctatctgaaacgaacactgttttactgaagcttatttggcgactcgtctctaccaaagattctctctgggtcagagcaactctgttacgatcaaaatccttatgaccggtaaacggatctacaagtattggttcttggatgtggagaaaaattctaaagtatcgagacaaggcaaaatctttacaaagattggaggtaaatagcggttcagatacctccttttggtatgattattggtgttctcttggtaggttgacggatcttttaggtcctcgtggatgcattgatttaggtatctcctttacttgctcagtagttgaaggcctctcagcgcaccgtcgtcgtcataggtctgttttgctcaaccggattgagaaagaattagagtccctaaactcacgccctactcatcattccgggaaggacaattttctttgaaaaagaaacaatggcactttcgagaatgttttcatctgaagagaaacttggcatgcgatacgacaacatatacattatgtgaatggtacaaaggtgtatggtttcccaaatctacacctaagtactctttcatagcatggatcgcagttcgtaatcgcttagcgactggtgacagaatgctcaattggaatgttgccgtaagtggtaattgtgtcttgtgtcatgaggatatcgaaacaagggaccatctctttttctcttgttcatattcgactcaggtttggtccgccttcacccggcacttgcttggacaacactacacaactcattgggagtctctgatttccatgcttacgactttaccaattccaaagctccatctctttgtcttgcattatgtgtttcagttatccatccatagtgtatggcgggaacgaaatgggaggaaacatggggaaccactaactccacccaacatgctagcaaaaatggtcgataaaaatgtctgaaaccggcttagtaccttg

SEQ ID NO: 163142 - DNA, 2343 bp, Arabidopsis thaliana landsberg
atgaagtgtatgaatggtgccgacaaccaagatgtagttgttcttacagactgttcagatctggtggagatggtgtctttcccaaccgaatgaacagctttcttagtgtatttggaggagttacagagcgacaatgataagttcacaaggaattctttatctttaatctttagtagctaatgttgaagcggttattttgacacaaaaagatcgtacccaaccgattcgtattatatatgtaaacaatattcttcacgaatgactcgtttatttttggatgacaaaaaaaaacacattttagttttctgttgacaggagtctattatcttttagaaagatccaaacagaaaatttactttgaggtttgtgtgttagtaaaataagtttgaaagtttatagtaaaacttgtttttcgcttttttaacgtcaaaagtaaaattatatcatttttttgtcatcaaattttttttaaaaaaattatatcatttttaacatcaaaaattaaaattatatcatttttttaaatcaaaagtaaaaatattatgattaaggagatacacaaatactattttacgtcaaaggataaaactatttcgtaaaataaagtcttttttttttgccgtctagatttactatttattacaaattatgaaaattgttacatagacgattctaccacggtaaatacagattcttagatttaattttctttttttgggtgcaaaattccactaaaccgttttgataaacttttgtgcagttagtttggtcaaacaataagaaacatatttagtttgtacagcttttgtgttctggtaaccaaccaggtttggttcagctttacctaaaccaccatctatcattagctctttcaattaatccacaaattaaacttctttagcttattttaagtcgccttgatctcatcaatgtttcaaactttttcttcattaattcgcatcttctaattcacatgttcatgttgcgtatggaatctccttagcattaaatgcaaattctgaccccaacccattatttatcatttcttcagctgcacgtttctttctataccgtgagaacagagaacatgggagatcatttcgtgctgctggtggatcggttgataacagaatccacgattgaggctgcgattcagagcaggaaccagatgttgcaagctaatatacccgttgaggaatgtacaatcttggacgataaaacacttgagatgctgcgtaacggagatttgtcaatggctgagtgcaggatctgtcacgacgaggacttggattccaacatggagactccttgttcttgcagcggcagcgtcaaggtaaacacaattagaaacatttttcccaagttaagagaacattggttggatcggatgatcaatgttgttggtttaacttggcagtatgcgcataggaggtgcgtacagagatggtgtaacgagaaaggtgataccacctgcgagatttgccatcaggtttgtctcctctcttttttttttttcttctctttcggagaagagatccctcccaacgtgactcaaatccagcacctccacccgggagatttaccactgggccaacagctatttgtctcctctctttctattgtccgttctgagggacacgtgatgacaggtcgtatgtgggtcgctgttcaggaattcaagccggattatacagcgccgcctccgttgctagagttaggccatgttcctctccatttcaggggaaactggggaatctctcaacgggagcatcgtttcatcacagttgtacctgctgattccacttttattgaccaaccatatcctctttcttccaccacaagcttcatctgttgccgttcccttgttctcattgtacggacccttcttgttttcccaccaaaccaacactttgattttgtctttactcataatgtttgtaatttgcagttcatggctcttctcattctccgacataccctccctttagtcctcaccggatcaaaccttcatgtcttccctttgttcacggtgagattattactcacaacagattcaagggactataacttgaatgaatgaaccctaagtgttgttatttttggtttcagttgttatttctgagaatactcggaatcatgctacccatctacgttgtcaccaaaacagtcgccacctgccgccgacattctcggaccttagacacctctccctccgatgattcatctgatgaagattcagattcatggcgcttgcctcaaacgcaatcttacattataggcgtacgatgatcactcattcttttctttcacacacacacacaaagtcaaatgacactgtaaata

SEQ ID NO: 163143 - DNA, 6732 bp, Arabidopsis thaliana landsberg
atggcgagaatcatagggatcgcggcggagacaggagagaatctccgtgccggcatcgtacttccagaaaagtccaccggaggtcgtgtagagcgagagaaacgaagatccagaaatcgcagcgaggacatgagaatcgtggcgagcttgaacccaacaaaggtcttgaattccgagcttgggatcggaggaaggattaagccagacgacgacggagcgaagatggaagtcaacgagagcgacacggccgtggcgatctgcaacggcgaggagaaggtgagaggcggagggttcggtggagagtagatcgcgggggagagggagaggaatccaacggacggaagtgacgaagggagagagagcaccgggaggaggagggagagggatagtggaaacgagctggagagaacgagaatcgacgacagagacggaggagccagaggcaaaggcgaagagaccggagggactgagatcggcggatccgaagttgttacggctgggaggaccggggagagtagaatccccaggtatcggttggtgatggcttcgatgctgccattgttgcagctttctaccaactttatttctctcgatttcaatttcaattgtctcatttgtaaacctccaagggtagtttagatctaaacatgaaacagcatgtacagaggaccattctatttttaattttttttcacaaagtgttctttttgtttagaaacagagaggttccaaacattataaaagtgggtacaaccacctacaagctttaaagcctgctaactattacaagttttggattatcaaacagagtactgacaatccctacttcaacagaaccaaaagtatcctaagttacttgaagctcgaccataacatcttgaacattcaaggattaatgagctcgtaatgagaatagccaaagatcattagaagactctacaacataggctagtcttcatcttttacctgaaagttaacacacacaaattcttaaaaactgggttaaagaaaaaaaaaacgaaataaccttttcctgctttgtcgaaactacgtgataccaaaaagtggatgacagtatttgtagagtgatattatctcttctttggaggtatcgcaactccccaaactgatgttcttgaaactttcattatttttttcttcagttcattatctgtcacaattgatagatatttagatgactccccaacctcaatctttgtgtcatctcatctatcagtcctcactctttacaaagttctttgctgcccaacaatgctttctttggcaaattgatccgacaatcattgaagatgactgctagcaacatataagattgaagtcttaatcttgttatcactacaacaaatatccacattaatagcacatgaagatacattgatagcagacgaggatagcacattttccgtcactgctatgaaagattattttttttttgggttcttttttaatagttcattaaaaacgctatgataggaaatacatgagtgggagtctaaaaccactcaacccgccaacactttaccttaaattattcacttaagcgcgtctagaactattcatgtctcttccctcttctctcgacaaagacctaaggtttcagaaaaaacacaccaaattctctgatccacgattgctgtcaaattctacagtctcaaacaccaaatttcattatccccgaaactataatcttctctctcgccggtctgcttctatttcgagctccattgaagtcacattcaagctccatcgaagtcacattcctctttaatcgccagcgtcagcgagctcaaatcaaaggcatgtgtttcttcctttcactaattcctctttactcccaaatctattgtcgaacgattttgagatggttttattgaatttagggtttatgtgcatcgatttggtttatgtgaaattagggttcttgggtaatgtgaatcgattacaagtttcagagttataattcttgtagaaattataaaacaatcgattacataagttgtctagcttcattgtcacatgattatgctattttttttgcaagtgttggtgattgaaacgcttggaaactgaagcttgttgttcttgtaatcacacgacaggttagtctcttcagttgctttggttgtctttgtgattgtgattcaatttgtctgtgaatttgcttcattttccccgactgttttggttctgtgcattgctttggttgtctttagaattgtgattgtgattcatccgttatttgcattgctttggttgtctttagaattgtgtttatattagaaatgtctgcacataagatgtagctgtgagtgaatgtgctttctttctttttaatgttggttatggcttgaattggtgttaaaaaggtttaggcttatataatgttggacaagacatgggtgcagggaattatcttatataagttaggtttacaaatgggttttggatactttaagaggcttctatttggctttctttattcattgaagagttgatcccaattacgagagaggtgctcggagttttgtacgtgatgtggttgcggctctaggagatattgatatgattatatgtccctgcaaagagtgtcgtaacatgtaccgccactcaagcagtgatgtggtggtccatcttgtaacgaaagggatggatgaggcatacaagttgcaaagcgaatggtattatcatggagactctgtggcttcaggagaaggcgaaagtacaacaaatcagtggaatgatgaaattctagagttgtataaggctgctgaatattttgatgaggagttggctactaaaggagacttaggccagcctcaagtggatgacttagctgagattgctgagggtgaggacaagagagaagatgactttcttgcaaagctgaaagatgctgaaacccctttgtaccctagttgtttaaaccacagtaagctatcagctattgtgtctctctttaggattaagaccaagaatggatggtctgataagagcttcaatgagctgctggagacattgccaaacatgttgcctcaagataatgttcttcacacatcattgtatgatgtgaagaaatttttaaagacctttgatatgggatatgagaagatccatgcgtgtgtaaatgactgctgcctattcagaaagaagtacaagaagctggataagtgtcccaaatgcaatgcgtctcgttggaagactaatatccacacaggcgaggtaaagaaaggtgtcccacaaaaggttttacggtactttccaatcatccctcggcttaagagaatgttcaggacagaagaaatggccaaggacttaaggtggcattttactaacaagagttgcgatggaaagctccatcatcctgtagattctgttacatggtagaagatgaatgataagtatccatcatttgcagctgaagaaaggaacttgcggcttggactttccacagatggtttcaatcctttcaacatgaagaatactaaatacaattgctggcctgtactattagtaaactataatctgcctcctgatctatgtatgaagaaggagaatatcatgttaagcttgctcattccgggaccacaacaacctggtaatagcattgatgtctacttagaaccgctcattgaagatttgattcatctgtggaagaatggagaggttacttatgacgcccatagtaaaactacatttactctaaagacaatgcttctttggacaataagtgattttccggcttatggaaatctcgctgggagtaaggtgaaagcaaaaatggggtgtcctatatgtggaaaaaacacggacagtttctggctaaagtttagcagaaaacatgtgtttatgtgtcatagaaaaggattggcaccaacacatagatatagggataagaagacatggttcgatggaaaagctgaacatgggagaaaggctagaattctaacaggtcatgaggtatctcagaacctgaaaacttttaaaaacgattttggaaatgtgaaagagtctgggagaaagaggaaacggactgtatgtgttgatccagtctctgatagtgaagattcttcaagtgaatccgaggaagatgaggaagttgaaatagacttgaaagagttatcaagatggaagaaaagatcaatactatacaagctgccttattagaaggtatgattcattaaagaatgatctgttatgtaagaattaaagtctcaatcagtcttaattgtatttgtattctctataggatctcccggtaaggcataacttggatgtaatacatgtagagaaaaatgtgacttcaagcattgtctctacattgttacattgtggaaaatcaaaagacggtcttaatgcccgtaaagacctccaaaatcttgggataaggaaggatttgcatcctacaacacaagaaaagagaacttaccttcccgcaacaccttggtctttgtcaaagaaggagaagaaaacattttgcaagcgcctacatgactttaaaggtccagacggttattgttctaatatagcaagaggcgtttccttagaggactgcaagataacaggactcgaatcacatgattatcatgtgttgatgcaacagcttcttccggttgcaatcagaggtataagatgaattcttttagctgaaattcttgcataatttgatgtgttgtttttaatcttcaatgttatccatttataggtttgttacctaaaggtgttaggatagctattggacgcttgtgtgcgtttttcaacaaactgtgtcagcgagttattgacagagagacagtttctacaatggagaatgaaattgtggaaactatctgcatgtttgagaggttctttcctccaagtttcttcgatataatggtgcatttgacagtccacttaggcagggaagctcgtttatgtggaccagttcatttccgttggatgtacccatttgagaggtacaatccagtagcttataaggttttttcttttacagaatacttttatgcttaaaggtagctgttttatcttcaggtacatgaaagttctgaaggattttgtcagaaacactgcaagaccagagggttgtattgctgaagcatatcttgctgaggaatgtatgcgattctgcagtgatttactgaaaaagacaacaaatgctgaagaggaaattgaaagaaatgctgattatgagaactgctctatattggagggtcgacctatatcagcagccacttcaattactcttactgagaatgagaagaacatagcacatcttgcggtgattcataatatggcgcagcttgatccttatgtggagtaagctattctcttaacttactctttattaattttttaggatattcacaatggtttagatgatgttttgctttctttcaattttagcatgcacctagaacatctacaagattctagtgaaaggtgtagacgggattcaggatttttatggaatacacattctcagaaatttgcttcttggttaaaagaacaggtaaattttctggttttgtattgttttattctctgagatgctatctatatagtaaacgacacttgtttttttttaaattgatacctatgacttctcataatgaagatgcagttaagtggttagcatatggtcctcgtctatgcgcaagatcttacacgggttacatagtcaatggcaatcggtttcatacagtttcaattgataggcagactcagaactgtggtatgttgcatgaggcgacaacaatgtgtatagctagttcaaaggacaataccccaatggttgatgttgtgtcttattatggccgagtggtggatattatactgcttgattataatgtcttctacattcctatattccggtgtcaatgggcaaatataggaaatggagtaaaggaagaagatggcttcatacttgtcaaccttaaccaaagtcaagtttcctttgcaagagatacatatatactagcatctcaagcaaagcaagtgttttattcaagggcagatgaatcatcgagttggtatgtagctatgagaggttctactagaagatacagtgcagaagatgctgaatctggaaatgcagacgttgggccattgccagtattagtagacatggatgtccttgcagatgacttggttgatgatgataggaatgcccgagctgactgtgaagggatctatgtgtgaaatcatattacttgtgatagttttgattgcttattattgcttataatgtgtgttttgtgagattgagattgtttttgcagctcaagaatttgttctgataacaaatctatgttttgtttcaggtgaaccaagatggtgaataatcgaaaaaggaaataccaaaagaagaagaagattgacgagttagctgagagacatattgagactcaggaatttactgaagtacaggcagataataatgaagtggaggctgatttactagcagatgaaactaatgaagtggaggctgatttactagcagatgaaactaatgaagtggaggctgagttagtggataaagagaatgaagatgctaacaatgaagtgaacagagaaagtgaggaaccagttgatgatactgcttctactgacgctggggatcctactgtggatgttgctgaaacagctgctgaaccaaagcgtaaaaagaaacgaggaccaacgaagatgaaacacatcgccaaggacccaaaatga

SEQ ID NO: 163144 - DNA, 5885 bp, Arabidopsis thaliana landsberg
atggcgggaaactataattatccgagtagcggtggttttaatcgagattggatgtacaagaggttcgatgaaatgacggggaatttgtcagcagaatacgtcgcaggagtggaggagttcttgacatttgctaatagccagcctatagtacaaagttgtcgaggtaaattccattgtccttgtgctgtgtgcaagaataaaaaacatatcgtctcgggtggaaaagttagtagtcatttgtttagtcaaggatttatgccagattattatgtttggtatatgcatggggaagatttcaacatgaatgtaggaacgagtaattatgtaattgatagtacgtatctaagagagaattatgaaagtgtgggtaatgttgtagaagatccatatgtggatgtgggtaatgttgtagaagatccatatgtggatatggtgaacgatgcatttcgttataaggtggggtttgatgataactatcatcaagacggtactaatcagaatgtggaggaaccagtacgtaaccattctaaaaaattctacgacttgttagaaggtgctcaaaatccattgtacgatggttgtcgacaaggccagtctcaattatcgttagcagctcgagtcatgcagaacaaggcggatcataatatgagtgaaagatgtgtggattcggtatgtcaaatgttgacagattttttaccagaaggaaaccaagctactgattcgcattacaagacagaaaaattgatgcgcaatttaggccttccttattatacaattgatgtttgtattaacaattgtatgattttctggaaggaagacgaaaaggaagataaatatcggttttgtagtgctcaaagatggaagcctatggatgactaccgtcgaagaaccaaagtgccatatagtcgtatgtggtatctacctattggtgaccgattcaagagaatgtatcaaagccacaagacggcagctgcaatgcgttggcatgcagagcaccaatcaaaagaagaagaaatgaatcatctttcagatgcggcggagtggagatattttcaagagttacatcccggttagcggaagaacctcgtaacgtttatctcgggttatgtactgatgggttcaatccttttggcatgtctcgtaatcattcgttatggcctgtgattctgactccatataatttaccccctggtatgtgcatgaatacagagtacttatttcttacaattttgaattctgggccaaaccatcctcgagctagtcttgatgtcttcctccaacctcttaatgaggagctacaagagttgtggtctactggagtcgatgcatacgatgtatcattgagtcagaattttaatctaaaagcagtgctactatggacgataagcgattttccggcgtatagcatgttatcaggatggactactcatggtaaattgtcttgtccaatttgtatggaaagtacaaagtctttttatctacccaatggacggaagacatgctggtttgattgtcatcgtagatttcttcctcatggtcatccatcccgtaggaacaagaaagactttctgaagggaacagacgcttctagcgagtatccacccgagtcattgacaggggagcaagtttattacaagcggttggctaatgtaaatccagcaaaaacgaaggacgttggtgggaacggtcatgaaaagaagatgccaggctatggaaaggaacataattggcacaaagaaagcatcttgtgggagttgtcttactggaaggacctcaatcttcgacataatattgatgtgatgcatacagaaaagaattttcttgacaacatcatgaacactctcatgagtgttaagggtaaatcaaaagataatatcatgtcaagattggatattaaaaatttttgttctcggtcagacttacatattgatggtcagggtaaagctccattttcagcgtatgcattaaccgaagaagccaaaaagagtttattatcatgtgtgaaacatgaggttaagttcccagatggttattcttcagatttggctacttgtgtagacatggagaatggaaagttttcaggcattaagagtcatgattgtcatgtttttatggagcgactactgccatttatctttgctgaactccttgaccggaatgtccaccttgcattatcaggtacaatatatgttttttaatttgccacacttttttaaacctctgatttagacttagacatatatatatattagggattggagcatttttccgggacttatgttcgagaactttacagaaaagtcggattcaaattctcaaacagaacataataatctgtaacttggaaaagatctttccaccatcattttttgatgttatggaacacctacctatccatctcccatacgaagctgaattgggtgtctctgtccaatatcggtggatgtactcatttgagaggtttttcaaaaagttgaaaggaaaagcaaagaacaaaagatatgtggcagaatcaattgttgagtcatatatcaatgacgagattgcttatttttcaaagcactactttgccgatcatatacaaacaaaatcaaggtaaatataactatttattttacgattcgcaatctatacttcagaattaaaatcaattacatgaatcaggttaacaagattcgatgaaggagaagttcctgtatatcatgttcctggagtacctaacatatttatgcacgtcggccgtccaagtggtgaaatgcacgtagaatggctttcagagaaagactaccaaagcgcacatgcatatgttttaagaaattgtgactattttcaaccacttgagaggtattttaaatcactccttaatttaaaattttcattatgataactttaatttatttatcttcggttgtaaatatagtacgttcgaggattttctttctgtgaaatatccaaccttgtccgaaaaagagctcaacgcgaaaagagctgaagaatattatcaatgggttaaagaatatgtaagtctacatcattttagtaatttttaaaagtgatcatttaaattatgttgatattgatattgtttatttattatgtaggtaatatattggaaccctacttctccatttcctacttgggttcaagagattgtgcatgggcctttgaacaaagttaaaacttgaccaatgtatttcacacgaggatatttgtttcatacgaaaaatcatggcgctgaacgaaaaacatgtaactatggggtatgtgttaaaggtgaaaactacgcggattcatctgatgaagcggatttctacggtaccttaattgatatcatagaactcgagtatgaggggatcgtcaatttgaaaatcacactttttaagtgtaagtggtatgaccctgtgattggtagaggcactcgacgaagccatagtggtgttgtagacgttctatctacgaggaaatacaataaatacgagccatttattcatggtacgtaattattcttaagtccaaaatacgtttcttttttaattattaataatctatctttgatatatgtatacaggatctcaagcagatcaagtttgttatattccgtatccatatacgaagaaaccaaagaacatttggttcaatgttctaaaagtcaatccgaggggaaacatttctggagaatatgaaaacaatgatccaactcttttgcaaacagaaaatgatgatgatgttttgctcactacaattgaagatcttgttcttgaaactccggtagccaacttaaacccaataatccttgattacgatgtcggggatgctgaaccagaagacgaattccgatgtaatttatcgtcctcggacgaagatgaagtagaagatgaagatgtataactgtgttaatatatgtataattatttgaataaatattagaatgaattttgtttcataaaatcattgaacttttttatgatatacaaatatttcttcacatctagaattatatcaatttaaaagtgactattatgcgactaatgagcgactaagataagttttattgggcttctaaacgttgaaatccaaacccattaaaatcggcgacaaaacgacgactattatgcgacaactgtttgatatgatgggctttaaaattttgaggcccaaacccattagtataggcgtctatattgcgattttttaccgagacaagtttgttttgtgggcttcttaatttcggggcccaaacccattattatcggcgatgatattgcgagtattggccgacagatgcatggtattttgggcttctaaatgttgaagcccaaacccagtaatattttatgacaaagatgcgactatgttccgacaagttttgatttgttgggctttgaaattttgaaacccaaacccagtataattggcgacaaaattacgactattcaacgatacttttttgattagttgggcttcaaaattttgaggcccaaatccaaatgaatatgcgacaattatgcgactattatgcgacttctattgtgttgaaaaccctaaatcgagtcatttctcttcgagccaaacacttagccatttcttcttcttcttctttttcttcgtctcgaaaaccctaatccccaattctctttctaagatcgatcctttctccttctagatcgatcttcttcttcttctgctaagatcgatcgatcttcttcgatctctcaccttaaacctattcgatccaacctcctcttcttcttcttcttcgtctcgaaaaccctaatccccagaactctttctaagattgatcctttctccttctagatcgatcttcttcttcttctgctaagatcgatcgatcttcttcgatctctcaccttcagcctcttcgatctgcttcgtcttcttcttcttcttctcttcaatctcttcatttggctcactatcatgcatatcgccggtcgaggtggctcccggaagcgtaagacgacgccgaacgtcactcagagagccggcgccggcggatcaagacctgcaaatcttcctccccaatacaacttcactccggcgccggcggttcaagttcctgcgacggagccggctcaacaacatggaccttcaacgtctggcccccacgtccgcaactatccaccgcctcttcaactgttccagaactcaacgactcaaccacaacgtcaagctcctccgcctctatctgaagaggtccactacaatccgccgccaacagcgccagctcagtaagatcctcctcagtcgccagattcagacgctccaacaaacagccacccttcatctcaagggaacaacttccaagagtaagttcctgggacgttgccggagctacaagaagacaaggcggtggctctgcaagcgacactctccgtgccaaacagggagctgtggtgttgtgtcttgtctccgattcccaaaccaaaaaccgagtggtatgttctcttcctctattttattctcgtgttctcagcctgtgcagtgtaactcgtgttctgttatgtagaatggcttgttgtggaacatagttgtgaatgatggttgttggaattggatgtttgttatgggttgtgtaacatagtagaatctgcctttgttctatactcgtgtgtgatcttgttaagttcttcactgtgtctgctcttgttatgttctttattgtgttctgttgtgaatcatgaacataattgtggaacatttgttgattgttgaacttagcatgttttcggctttgacattgaggatctgtctttgttctatacttttatagaatcttgttaagttctttactgtgtgtgatcttgttatgttgactattgtgttctgttgtgaatcatagactattgtggaacatttgttgattg

SEQ ID NO: 163145 - DNA, 2685 bp, Arabidopsis thaliana landsberg
atgtgtgatgcatcagattatgcagtaggagctttttttttccagaaaacagacaagaagcttggtgtcggatattacgccaggcgaacgttggatgacgctcagggaagatatgcaacaactgagaaggagcttctagctgttgtattcgcatttgagaagtttagaagctatttggttggatcaaaggtaactgtctatacagatcatgcagctttgaggcatctgtatgccaagaaggatactaaaccaagactgttaagatggatacttttattgcaagagtttgacatggagatagtagataagaaaggcattgaaaatggtgcagcggaccatctgtcaaggatgagaattgaagaaccccttccgatagacgattcaatgccagaagaacagctcatggttgtagagttcttcggaaagagctacagtgggaaagagttccaccaactgaatgctgttgaaggagaatctccatggtatgctgatcacgtcaattacttggcatgcggagtagagcctcccaacctgacaagttatgaaaggaagaagtttttcagagacatacaccattactactgggatgagccttatctttacactctctgtaaagataagatctacaggagatgtgtctcagaagatgaagtggaaggtatcctgctgcattgccatggctcagcatatggtggtcacttcgcgacgttcaagacagtgtccaagattcttcaagcaggcttttggtggccaacaatgtttaaggacactcaggagtttgtttcaaagtgtgattcatgccagagaaaaggcaacatcagcagaagaaatgagatgcctcagaatccaatcttggaagttgagatctttgatgtatgggggattgattttatgggtccattcccatcttcatacggtaacaagtatatactggtcgctgtagactacatatcaaagtgggtcgaagctattgctagtcctaccaacgatgcaaaagttgcgctgaagttgttcaaaaccataatcttcccaagatttggagttcccagggtagtaatcagtgatggcggaaagcatttcatcaacaaggtttttgagaactttttgaagaagcatggggtaaagcacaaggtcgccactccttatcatccacagacaagcgggcaggttgagatctccaatagggagataaaaacaattctggaaaagactgttgggattacaaggaaagactggtctgcaaagctagatgatgcattatgggcttacaggacagccttcaagacccccataggtacaactcctttcaatcttctctatggaaaatcatgtcatctacccgttgagctcgagtacaaagcaatgtgggcggtaaaacttctgaactttgacaataaaaactgctgaggagaagcgattgatccaactcagtgacctcgatgagatccgtctagaagcttatgaaagttctaaaatctacaaggagagaaccaagcttttccatgacaagaagatcatcactaaggatttccaggttggtgatcaggtgctgctattcaactctcgcttgaaactctttccaggaaaacttaaatccagatggtctggccccttctgcatcactgaggtccgtccttatggagcagtcactctagctggtaagagtggagattttacagtaaatggtcaaaggctcaagaaatacttagcagaccaaatccttccagaggtgacatcggttcatctgcaggagcttcttgatgattaaaggagtaaaggagtcaagctaatgactttaaacaagctcacttgggaggaagtcccatgactatccttgtaaataatttttactttcttgttatttttgatttgttttagttgtgtttgtggttttcagagacaagagaacaacgtggagatagagtaaaaattcaaaacttttactctacagaagacttggagatcgagtgtacagcccgttggagtacaaaattttgaaaatcttctgttgcacctggagaccttgcactcgagtacattggtcgagtatgtgtgatgttttaaaacccaaaaacttttaaatcatcattttacacgaccaacagaagctacagagacttgcagggatttcctacagtttacagtagattttctgcaaaaatttctcagtcaacagagtgtggaccacgcgttgatataagctcgagggagaatctaaaactcaacctcaaccactcttttcgaaacttcactcgacttcaccgattccactcaacctacctctcttcatctcaccaccgacactccaatttctctacaccacgaatcaccgtccaaagagctactcgatccagaccacttcactcgacctccaggaatcactcgacctccgcgccgccgtcaccaattcatttcctccgtcactcgatccagaccacttcactcgattcctttgctatactcgaccaattcatctacatcaaccgccgtctctttcaaaagaagttactcgacttcgattcccagtctcgtagctcaatcgacctccgcgtgacagaatatctcagccgcctcagccaatatcacttgaccgcttaccactacacctcaccaagatttaatcgaccaatcagtttactagacctccaaaaattactcgacctctgcgccgccagaatcgagtag

SEQ ID NO: 163146 - DNA, 2442 bp, Arabidopsis thaliana landsberg
tcgtcttcaatggagtcttcttcttctatcaaggaggggaaactctacaaagatgctaaagatcacatcgctaaaggaaactacatcaacgcattgaagatacttgaagatttgattcgaatccatagagaagatcaaaacgcatggcttattcgtatcaaacaaggtcaagtattcttaaaactatcgctagaaacagagaattctgatatggaattcacatacttgttaggttctgtgggatgttactcggaagatgagaggttatcatcattttgtgcaaaatcgcttcacatgttggccaacaagcttggatctttgatgtactacaagaaatgtttcgtgaaagcaaaacaagctttatctgttactttcccagatatcacggattctgttgctcggcaaatacgaatgaatgaaaaaaagaaggagatgttgagcgtaatcaaagatgcagagtctaagattgcttctccggagactctagttgcttctactatgaaacaagtctctaaaccaaaagttttggagtcagagaaaattccagacacacgtgagggtgtggtgaaaagattgaggtcttattggatgggattggatattaagatcaaaagagactttatgaaagtaagcattgcaaagcttaaaagttttgtcgagggagtacataacagagagggacgagatgtttttgagaaagttctcacttctgctaaggcagatagaaaatggacgttttggatgtgtagaagtaaatgtttgaagaagctttctagtgctgaagaatgtaagaatcattttgaacaacaacatgatgcagattttaaaaatgcttcgaaaaaggatatggtccagaggataggaaaggactgggctcgtaagatatcggttggagcttgggaaccagtggatacagtagctgccgttgaaatgatcaagaatcggctcgcagatgtgaaagcgtttgcacctaagaatggatggtccgaagagtggcctttagctgcagatgaagatcgcagtaagttactcaaggaaatcaaattgctccttgtgtcactttgtgaccataaaattcttccttctagcattcgagagtggctgatgcgttttccggttcaacatcttgcaaaacttgatgtttccgaacagagtcttattgattctcacctagtgggaacacctcagagtatctgttttcttgaaagtcatgaactcaatcaaatcctagactttctaaaaaccatcaagtgtaaaaggaatgatggtacagatctggtttgcagagcagtggacagtttcttggatcatactcgagtcaaagaaaagatcgactttgaccctcagttttcatttctgcttctggataaaagactgctgaaatgcaataacgctccatgtgatgatgaagggacaatcaatgtttttgatcccattgcccactacgccaaggcacatgctcagggggatgatatcataccttggttatatgactacaattcagtagataagatctttcccaaacctatcagggaatacaatcttgatatatggctagctgttctcagagctgttcagttcacatgtaggaatatggaaaccaaatatacaaatcaaaagttgttcttaggttatagcgcaactcttactataatcgagaacatatgtatgagtgaagatgaaaaggagaaggaatcttcaggaagatcagtggatcagatatgcatctattctgtgcgataggtgtgaggagatagtccctgaaatttccctcgctagaaaaatatttgtgtgtgcagtacgagatgttttcgaaggagcattgcttccaacatttgatgtccctgatttagatgactgcttgaatcttatacgtgagcagaaaacacgtagtgacgataaagtgctggagtccataggccttctgaaattagcggtcatcttcaaggttctttcatgactgtaactttcattatttgcaacagagtaacatattcttcccatcttaataaattatcgacatgacttacagattttgctaatcgattcaaagattttgctggttgataattcaaggattagtttgctgaacaacctcaccaggctttctttatttgacaaccgcacttacatccttcaactactgaaacctttcttactggtttgtttgaagattcggttatatacacagagatttccctttcagttttatttggcctttgaattgtttcttatatgttattatgtattttctcatctagaatgaaattgtgaatatggaatccaaagccaagtcagatgcagcagtagcagatcttttactcgaggaggagaagaagaatccaaagaagtcacagtcaaagaagaggaaaaatacaagcaaaaaggtctttgaaattcaacatttctcgatttcttttttgaatttgtggttacccggtt

SEQ ID NO: 163147 - DNA, 2754 bp, Arabidopsis thaliana landsberg
  unsure (1)..(2754): unsure at all n locations
cttacagtgctttaaccaaaagtggtggagatgggtttctgcaattggaaacattgggataccaaaagctgttagactcccataaagcgatggaagaatcagaaccctttgaggaattgaatggaccagcaaaagaggtaatggtaatgagcgaagaagggtcaacacgagttcaacctgcacactcgagagcatactcgaccaatgactcgacctcgaatgccagcgactctggagagctaatcattctaacttcagatgactggtctgaactcaaggcaccgaaggttgatctcaaaccattccctaaaggtctaaggtacgcattccttggtccaaactctacttaccctgtgatcattaatgctgagttaaatgatgatgaagtgaacctgctattagctgaacttagaaagtacaggaaagcaaatggttattcattatctgacattaaggggatttcacctagtttatgtaaccttaggatccaccttgaaaacaaatcctactttagcattgaaccacataggaggttaaatcccaacttgaaagaagtagtgaaaaaagaaattttgaaactgcttgatgctggtgtcatctaccctatctctgatagtacttgggtttctccagtgcattgcgtccctaaaaagggcggaatgactgttgttaaaaatgaaaaggatgaattgatccctattagaactataactggtcatagaatgtatattgattatagaaagttaaatgctacatctaggaaagatcattttcctttaccattcattgatcaaatgcttagacgcttagctaatcacccatactattgctttcttgatggagatagtgatttctttcaaataccaattcaccctaatgatcaagagaaaactactttcacatgtccttatggannnnnnnnnnnnnnnnnnnnnnnntttggtttatgcaatgctcctacaacatttcagaggtgtatgacctctatattttcagatttaatcgaggagatggtggaggtcttcatggacgatttttcggtctatggcccctctttctcctcatgtttgttgaatcttggcagggtatagaccaagtgcgaggagatgaatcttgttctcaattgggaaaagtgtcatttcatggtgaaggaaggcataatgtttggtcacaagatatcagaaaagggtatagaggttgacaaaggaaaaattgaagtgatgatgcagttgcagccaccaaaaacggtgaaggacattagaagtttccttggtcatgctgggttctacagaagatttattaaagacttctccaagatagtcagatcgttaaccagactattgtgcaaggaaaccgaatttgaattcgatgaggactgcctcaaatccttttaaaccatcaaggatgctttggtatctgctccggttgttcgagcgcctaattgggactatccatttgagatcatgtatgatnnnnnnnnnnnnnnnnnnngagctgttttaggccagaaaatagacaagaagcttcatgtcatatattacgccagtcgaacgttggatgacgttcagggaagatatgcaacaactgcatatgtcttgaacgttggaacgtctacaggagatgtgtctcagaagatgaagtggaaggtatcctgctgcattgccatggctcagcatatggtggtcacttcgcgacgttcaagacagtgtccaagattcttcaagcaggcttttggtggccaacaatgtttaaggacgctcaggagtttgtttcaaattgtgattcatgccagagaaaagacaacatcagcagaagaaatgagatgcctcagaatccaatcttggaagttgagatctttgatgtatggacgattgattatgtgggtcctttcccatctttatatggtaacaagcatatactggtcgcccgatactacgtatcataagtgggtggaagcgatagccagtcccaccaatgatgctagagttgtgctgaagttgtttaagaccgttatattcccgagatttggagtcccgagagttggaatcagtgaaggagggaaacatttcatcaacaaggtttttgaaaatcttttgaagaagcatggattagagcacaaggtagccactccttatcatccacaaacaagcgggcatggggaaatctccgacaggaaggtaaaaacaattctaaaaaactgtggggattacaaagaaagattggtctacaaagctcgataacgcactatgggcttacataacagcttttaagacccctattggcacaactcctttcacccttctctatggaaaatcctgtcacctacatgttgatctcgagtataaagccatgtgggcaactaaactctggaacttcgatattaaaaccgctgaggagaagcggttgatccaactaaacgatctcaacaagattcgcttagaagcttatgagagttccaaaatctacaaggagcgaaccaaatctttccatgataagaagataatttcaagagattttaaggttggtgatcaagtgctgctgttcaactctcgcctgaggctttttccaggcaagctcaagtctagatggtctggtcctttctctgttactgcagtccgaccttatggtgctatcactctggctggaaagaatggagacttcacagtcaatggccagcggctcaagaaatacatgatagatcagtttattccagaaggaacctctgttcctttggaggagcctttaaacgcctaa

SEQ ID NO: 163148 - DNA, 1154 bp, Arabidopsis thaliana landsberg
ctcatcattcttgcatactttgcatgattaggatagctttgcatacatattgcatttctgagtttttttcaggtgatttggagctgtttgcaagcaaattagaagaaacgagccagaaccagaagacatactcgacccccaggtcgagttgactttggagccattcttcccacatactcgacccctaggtcgagtgactttggagccattcttcccatccactcgaccaccaggtcgagtaacctcaggtcaggccactcgatgacactactcgaccccctggtcgagtatcacttcgccacaccacctgacaacactcgaccgttcactctaccacaccactcgaccccacggtcgagtatcacttcgccacaccatcaccatcactcgaccattcactctaccaagttactcgaccccctggtcgagtatcatcactcaccaccatcagcatcactcgaccggacactcgatcacgtcttcacagtctactcaaatccgcactcaaccagacaagctgagcacaaggaagagaagaggagaagacaaagtgtttggaagcggcttggacttccatcggatcacgaagcatcggcccattatctctctatgggccgagcgattaggttattggcccgtctactatcattttattttgttttgtataaatagatgtcttagggttctgtcctgagacatctagtcgacattgagtttttgctttagttttattttctgttttactctgctgcgccgcttttgcttctgcaacctgtaattcgagatttttccaagttattcagattccgcatttgattcaatttgtcatctatttctctactctttatctctttacttatgcaatattatcgtttatctgcgtttatgtcttttagcatgttgtctgagtagtgacttagaattcttagggataggatagagtagttgtggaatctgtagtctgtagaatggttaagttttagaattgattgaatccctttaggactagttgcgtttactgcttatttctttctcatcaactggaattcgatcccaagcattccctcacccagaaggtgttcgatggaatgcttgatccactagttcctgagatattcgtctctatcccaagggattggccgtttagagcgttt

SEQ ID NO: 163149 - DNA, 1812 bp, Arabidopsis thaliana landsberg
atggatgagatagagtcgtcatcttcaggtcagagagagaacagagagaatatgatagcttcaaaagaaaagctgagatagcccgagggaagagagcgatgacagagaggtatgagcttatagatgaggatctggaagacgagtacatgcctgagcatactcgcagagccaccaaacttctgaacaaacccgatgtattgcctactgaggaatatattaggctcttcaagctgaatgagttctgtagcacgaggtatccttactcgaccacacttgcacaactcggattgttggaagatgttcagcacctgtaccagagttgtcatctgcacactctgatggcttatccgtatgtatcatatgaagatgagacaattcaattcctctccacgctgcaagtggagctctaccaaggtatgacctctgatgagttggattgtgaaggattgggattcttgcgattctctgtgtatggtcatgagtataggttatcaatcaagcgcttggaaggattgtttggcttccccagtggaacgggaactaagcccaagtatgatagagaagagttgaaagacttgtacatcaccattggcagctctgtaccgctgaattcttccaggtcaaagagcaatcagatacgcagccctatcatcaggtactttcagcgtgctatagccaatgtactctactcccgagagatcacagagactgttactaattctgatatggagatgatcgcaatggctctcaagggaactcttcgccaaactaagaatggcatgtctctccaaggtgaaatcaatgacacacctctctttgtacttcttctgatccatctgtgtggatacaagagctgggctgtcagcaataaccacaagagagcgctaggcgctttgtgcataggtggtgttatgacaccgattttgatagcttgtggagtcccaatcatttctgatggactcgagccgcgagcaatggatatcgagcacctacgtcactgagaattcctggagtttgcaatggttgacgacttgcacaggttcaggtttgagcactctacagacaagagagctaacatccttctccccagccctgaggttacacggattatagagggagataacattgatttttggcctgaggttggacgcctttactatgagaacgcttcgccattggatgatgatcttctagaagaagctgcttcggatgggatggatgaagacagagcagtggagttcgacactagcatgtatcactttggtgaacatgtacctccagcgagggagagcaagagcttgactgaagctcataagaacaacagtaaactgcagaagtaatgcaagaagcaggacaagctactcgccaagtgtgttaagactatcaagcttctgacagataagctgagttgttgctcctccaccactgctattccacaggaacagcctcctctggagatgtcatcgaggagatttgatgagcctgcgcacaggccttagcttagcgagtagagagtctcacatgtcctggctaggcattcatcatttgagtcccgggagcacaagagaagaaggaaggctacactcactcgatctagcagcagatcacgcctcattcactcgaggagatcactcgaccgcggtgctagccgcagcagaaggagagaggtcgagtatcctcagagcggtgctggccgccacattgctgatgaggtcgagtacccacctactggagctgatatagaacaaggtggttcatctatggcctgggagcaatcacatgcagccattgacgagcaactacgttcattct

SEQ ID NO: 163150 - DNA, 1076 bp, Arabidopsis thaliana landsberg
atagaagcctatcatgctcatgtacaagatcgggtgaaacagttcgacgagttcgagttgacaaggattcccgaggggaaagtacgtcggccgacgccctagctgctctggcctcaacatccgacccgaacctgaggagattcatcccagtggagtttatcgaaaagccaagcatcgagcttgacaaagaggaacatgccttccccgtacaggttgtcgcgggttgcgaagatgcttcagatgacaggtcggaccttggttgcaattcagaatggatagaacccatcagaagctacatatctgaaggaaaagtgccctcgaacaagtgggaagctcggaagctgaaagatcaggctgcgcgtttcgttctggtcgaggagaaactcttcaagtggcggttatcaggacccttaatgacttgcgtggaaaaagaagcagctcgcaaagtcatgaaagaagttcacggaggcttgtgtggaaatcattccggggaagagccctagctataaagataaaacgccacggttatttctggccagcgatgatcaaggattgcgaaaagttctccaaacgatgcgaaaaatgccaaaggcacgcaccaacgatccatccaccggccgagctttatcaatcgcctcaccatatccatttatgcgttggtcgttggacataatcagcccgatgcacgcctcgaagtaaaagaagttagtttttgtcttaaccgattacttctctaaatggatagaggccgaatcgtacgccagcatcaaggacgctcaagtcgaaaaggtgttgtgtggaaacacatcctatgtcaccacgggatcccttacaagatcgttacagacaacggctcgcaattcatatcgacccatttctaaggtttttgcgataagtggggaatccgtcttagcaaatatacaccacgatacccccaagggaacggtcaagccgaacccgcaaacaagatgatcctcgacagcttgaagaaacggctcgcagccaagaagggctcgtgggccgacgaactcgaaggtgttctgtggtctcatcgaacaacacctcgtcgagccaca

SEQ ID NO: 163151 - DNA, 3163 bp, Arabidopsis thaliana landsberg
atggggtctacttctgagaaacgtaagtcttcgaatattatataatggcgtgctgtcacatacccattaccatttccatctgcttgtctcgtcatctattaatgacttcttgtcttttgcagcctgctttaagttgacgtcctgcaatcctaacacagcaaatcagaacatgcatgcatttgggattatggttatcgtaagttttttcagatattaatgaatgtaaatccaagattaagattttctactgaaagagtggccttcaatttgtttgtgcaggctgcagtgagtactattctactcattatctacaattgttccgatcaaatcctaacaactagggaaaggaggcaggcaaaatcaagggaagcagcggtgaagaaagcgagagctcatcatagatggaaagctgctagagaggctgctaaaaagcatgtgagtgggatccgtgcgcaaataactcggacattttcaggtaaaagagccaatcaagatggggataccaacaagatgttgggtcgtggggactcttcagaaatagatgaagatatagacatgtccacatgttcaagtcctgcgagttcctctgctgcacaatctagttatgagaatgaggatcatgcagccgctgggagtaatggaagagcaagtcttggcatagaaggaaagagagtaaaaggacagactttggccaaaattaagaaaacacaaagccaaatcttcaagtatgcttatgatcggattgaaaaggagaaagccatggagcaagagaataaaaatctcacattttcaggaatagtcaaaatggctaccaattctgagacgagaaagaggcatctcatggagctttctttcaaagatttaactcttacattgaaatccaatggtaagcaagtgttaagatgtgtcacaggaagtatgaaaccaggtcggatcacagctgtgatgggtccatcaggagcaggaaagacaagtcttctttctgctttggctgggaaagctgtcggatgcaaattaagtggtttgattcttataaatgggaagcaggaatcaatccactcatataaaaaaattattggctttgtgccacaagatgacgttgttcatggaaacttaacagtagaggaaaatctttggttccatgctaaatgcagattacctgcggatctatccaaagcagacaaagttcttgtggttgaaagaatcattgactccttggggctacaagctgtgaggagttctttagttggtactgtagagaagcggggaatctcaggagggcagaggaaacgagtgaatgtgggtttagagatggtaatggagccttcggttttattcttggatgaacctacttctggcttggatagtgcctcatcacagcttcttcttagagcacttcggcatgaagctctcgagggagtaaatatttgcatggttgttcaccaaccaaggtatcttgaaaacaagtttctcatagaggaaatttctgcaagtgtcataaagtttgtttttaattcataatgtttttatcttttattgcagttatactttgttcaaaacgttcaatgatctagtacttctcgcgaaaggtggccttactgtttaccacggatcagtcaacaaagttgaggaatacttctcgggtctggggatacatgttccagaccgtatcaaccctcctgactattacatcgatgttctggaaggagtagtgatttcaatgggaaattctggtattggttacaaagagcttcctcaaaggtggatgcttcacaaagggtactcggttccattagatatgcggaacaacagtgctgctggacttgaaacgaatccagacttaggtactaattcaccagataatgcagaacaaacatttgcgagagatctgtggcggcatgtgaacagtaatttcaggatgcgtcgtgataaaatacggcataacttcttaaagtctagagatttatcccacaaaagaacccctagtacgtggctgcaatacaaatatttccttgaaaggtttacttctgacattctccatgacttacttacgatcaattgattcttggatattggaataaagcggattaatgttcttgatttcaggatagcgaagcagcgaatgagagaagctcaattacaagccacagactatttgatattgttgcttgctggagcttgtttaggatcactgattaaagcaagtgatgagagctttggagctcctggttatatttatactattatcgcagtctgtaagttggattaaaccctttactaaactatcattactgttattaatcattttttgagaagtttcttcatgttcttattgtatcttatgttatgatcctcttcttcttctgtcagctcttctttgcaaaatagcagctttaagatcattctcactagacaagttacattactggagagaaagtgcttcagggatgagtagttcggcctgcttccttgccaaagatacaatagacattttcaatatacttgtcaagccattggtctatctctccatgttctatttcttcacgaacccaagatccacatttttcgataactatattgttttggtctgtctcgtatattgtgtgaccggtattgcatatgcgttggctatctttctccaaccgagcacagcccagctggtgagttttatttaagtttccttttatagaagaatcatatactctctctacttattctaattaacgaacttttttggggattttgcagttttctgttcttcttccagtcgttttaacacttgttgcaacccaaccgaagaatagtgaacttatcaggatcatagctgatttgagttatccaaagtgggctttggaagcatttgtgataggaaatgctcaaaagtaaggataaaaagcaaaaagaaataaattatatttcttccctcaaaagctgggtttgattcattcattgggtttcaggtactatggagtatggatgattactcgatgtggatcgcttatgaagagtggctacgacattaataaatggagtctgtgtataatgatattgcttctcgtaggtttgaccactcgcggagccgcctttgtggggatgctcatacaacaaataaagtgaagaaagatctttccttgagggggtttaattcacttatagttcgcag

SEQ ID NO: 163152 - DNA, 2714 bp, Arabidopsis thaliana landsberg
  unsure (1)..(2714): unsure at all n locations
gctccatatcaccaccaagcatagcggacctagacatggacacttacgacaaagtgatgcgtctcaacgtgcgaggtactgtcttagggataaagcacgcggctcgagccatgatccccgctggctcgggctccatcctctgcctctctagcatcagcggcttgatgggtggtctaggcccacacgcatactcaatctctaaattcacaatcccgggtgtggtcaagacggttgcgagcgagctgtgtaagcacggactaagaatcaattgtatatcgcccgcaggcatcccgacgcctctaactttgaggatgtttcgagaggcgtttgcgggtcatagcattccggaggaacaacttttggcgattgtgaacgcgacgggagaactaaagggagagaagtgtgaggagatagatgtggctaaagcggctttgtatttggcatcggatgatgctaagtttgtgacggggcataaccttgttgttgatggtggatttacttgtttcaagtctcttaatctcccttctgcttaattaatttatcaagttcattaaagtccttttttttttagttttctgatgtggttattacgagtgttttggtcttttgggtcattgctgatgtgatcgtttgtaatcaatctatgggacattatatggtaggaatttggaattataaatttagcctctctgtggagtttcgacatttcactagtatcgttgattatatcagtcaacttagtattagataatcattatgtgtattgtgtaattctaagtgattcattgtttctgatgatttacgtaaagcttatcagaggtttcaaaacatattgcaagcagagttatctatcgtggcctcaggtgttgtaagaatagcttgtccatcagataacatgtatgtagaaccgttagttgtggtctatttaaaactttttaaatactttcttttgagatagatgtatttctcctaaatcacatatgtttcttagttatggtcaaatatagaatattaaaatattgtacctaatagtgacactagtcactagagttaggtgccactacaccaagctcttctgactttgtatccatcaatactagaaactcttttgatctcaacaagcagtcttatggcggccatagtactgatcagatctatcgtcaggttaatttagatcatctctcgattactactaatttgtttcaataaatcagcttaattttgtttcttcttctcgttctttcagaaactttaaacggccagccaccgcagcctcagccgcttactcgacaggtggtggtggcggcggttgtacttgtacgaggtaagtttcttcttctgtctctcatatctgattttgattggaccaaatcgatcgatctcttagtatcacatttaaatgaaaaagaacctattgctaattttttttttaactcgatgagtcttgatctaatttttatgtattgatcgtaacacgttagtcaacttaactagatagattatatgtgttttttcactctggacttgaatgagttatggcatggtcaggacactaatacaaatcactagataatttccttatacatgtatgcactaatacaaatcactaaattctacagtaaaaagctagaaggcaaagtagcgctcataactggtggtgctagcgggctcggtaaggccacggccagcgagtttctcaggcatggtgcccgagtcgtgatcgccgacttagacgcggaaaccgggattaaaaccgctaaagaactaggctcggaggcagagtttgtgcggtgtgatgtcacggtggaggctgatatcgctggagccgtggaaatgacggttgagcggtatgggaagctagacgtgatgtacaataacgctgggattgttggacctatgactccagcgagcatatccgagcttgatatgacagaattcgagagagtaatgaggattaatgtttttggtgttgtctccggcatcaaacacgccgctaagtttatgattccggctnnnnnnnnnnnnnnnnnnnnnnnnnnaagcgttgcaggtattaacataaaatcaaagtcttagattagatagaaaccttactatatcaaaccaaaagatggttatttagtagttagtacttagtacttagtacttagttaagaatgtataatatcatatcgtattaatcaaagcttggttagtacttagtacttagttaataatgtataatatcatatcgtattaatcaaagcttggttaaacaaaaacttaaatgaagcttaatagttttcaatttgtggtcaacactcaaatttgacttttggtatggacaaaacaatgtaggcgtgactggagggttggctccacattcatacacaatctcaaagttcacaactcccggaatagtcaagtcggcagcaagcgagctctgcgaacacggcgtgcgtataaactgtatctcaccgggtacggtggctacaccgctcactctcagttaccttcagaaagtgtttccgaaggtatcggaggagaagctacgcgaaacagtgaaaggaatgggtgagttaaaaggagctgagtgtgaagaagctgacgtggctaaggctgctttgtatttggcttccaacgacggtaaatacgttactggccataacttggtcgtggatggtggcatgactgctttcaaaatagctggttttccttttccttcggattcatga

SEQ ID NO: 163153 - DNA, 6923 bp, Arabidopsis thaliana landsberg
  unsure (1)..(6923): unsure at all n locations
ttgcaggtttatgcatccgggggttcaagctggattatcgacagcggatgacaaaccatatgacgggggagaagaagatgttcacttcctacgtcaagaataaggattcccaagattcaattatattcggtgatgggaatcaaggcaaggtaaaagggttaggtaatattgcaatctctaatgagcactcaatttctaatgtgtttttagttgagtctttgggatataatttattatctgtaagtcaattatgcaatatgggatataattgtctatttacaaatgtagatgtgtctgtctttagaagaagtgatggttcactagcttttaagggtgtattagacggcaaactttatttagttgattttgcaaaagaagaagccggtctagatgcatgcttaatagctaagactagcatgggctggctgtggcatcgccgcttagcacatgtggggatgaagaaccttcacaagcttctaaagggagaacacgtgataggtttgactaacgtgcatttcgaaaaagatagaccttgtgcagcttgtcaagcaggtaaacaagtgggaggaacacatcacagcaagaatgtgatgaccacttcaagacctttggagctacttcacatggacctcttcggacccgtcgcctatctaagcataggaggaagtaagtatggtctagttattgttgatgacttttcccgcttcacttgggtattctttttgcaggataagtctgaaacccaagggaccctcaagcgcttcctaaggagagctcaaaatgagtttgagctcaaggtgaagaagataaggagcgacaacgggtccgagttcaagaaccttcaagtggaggagtttcttgaggaggaagggatcaagcacgagttctccgctccctacacacctcagcaaaatggtgtggtagagaggaagaacaggacgcttatagacatggcaaggacgatgctaggagagttcaagacccccgagtgcttttggtcggaagccgtgaacacgactttccacgccatcaaccgggtctaccttcatcgcctcctcaagaagacgtcgtatgagctactaaccagtaacaaacccaatgtttcgtattttcgagtttttgggagtaaatgctacattctagtgaagaagggtaggatttccaaatttgctcccaaagccgtagaagggtttttgttaggttatgactcaaatacaaaggcgtatagagtcttcaacaaatcatcgggtttggttgaagtctctagcgacgttgtatttgatgagactaatcgctctccaagagagcaagttgttgattgtgatgatgtaggtgaagaagatgttccgacggccgctatacggaccatggcgattggagaagtacggccacaggaacaagatgaacgagatcaaccttcttcctcaactatggtgcaacccccaactcaagatgacgaacaggtacctcaagtggaggcgcttgatcaagggggagcacaagatgatcaagtgatagaggaagaagcgcaaccggcaccnnnnnnnnnnnnnnnnnnnnnnnnnnnnnnnnnnnntcccgtcgaccaaattttgggtgatattagcaagggagtaactacttgatctcgattagttaatttttgtgagcattactcctttgtctcttctattgagcctttcagggtagaagaggccttgctagatccggactgggtgttggccatgcaggaggagctcaacaacttcaagagaaatgaagtttggacactggtgcctcgtccgaagcaaaatgttgtgggaaccaagtgggtgttccgcaacaaacaggacgagcacggggtggtgacgaggaacaaggctcgacttgtggcaaaaggttatgcccaagtcgcaggtttggactttgaggagacttttgctcctgtggctaggctagagtccattcgtattttgctagcatatgccgctcaccattctttcaggttgtaccaaatggatgtgaagagcgctttcctcaacgggccaatcaaggaggaggtgtacgtggagcaaccccctggcttcgaggatgaacggtaccccgaccacgtgtgtaagctctctaaggcgctctatggacttaagcaagccccaagagcatggtatgaatgccttagagactttttaattgctaatgctttcaaggttgggaaagccgatccaactctttttactaagacttgtgatggtgatctttttgtgtgccaaatttatgtcgatgacataatatttggttctactaaccaaaagtcttgtgaagagtttagcagggtgatgacgcagaaattcgagatgtcgatgatgggcgagttgaactacttccttgggttccaagtgaagcaactcaaggacggcaccttcatctcccaaacgaagtacacacaagatttgatcaagaggtttgggatgaaggacgccaagcccgcaaagacgccgatgggaaccgacggacacaccgacctcaacaaaggaggtaagtccgttgatcaaaaagcataccggtcaatgatagggtctttactttatttatgtgctagtagaccggatattatgcttagcgtatgcatgtgtgctagatttcaatccgatcctaaggagtgtcacttagtggctgtgaagcgaattcttagatatttggttgctacgccttgcttcgggctctggtatccaaaggggtctacctttgacttgattggatattcagactccgactatgctggatgtaaggtcgataggaagagtacatcggggacgtgccaattcttaggaaggtccctggtgtcatggaattctaagaaacaaacctccgttgccctatccaccgctgaggccgagtatnnnnnnnnnnnnnnnnnnnnngcgcaactactttggatgaggcaaaccctcagggactttggctacaatctgagcaaagtcccactcctatgtgacaatgagagtgcaatccgcatggcgataatcctgttgaacacagccgcactaagcacatagacattcgacatcactttttgagagacaccagcaaaagggagatatcgaagcgttttatgttagctccgagaactagctagccgatatctttaccaagcctctagatgaacaatcttttaacaaacttaggcatgagctaaatattcttgattctaggaatttcttttgttaacttgcactcatagctcatctgtatacctttgatcatatctctttcatatgctatgaccaatgtgttttcaagtctatttcaaaccaagtcacaggtgtattgaaagggaattggagtcttcggcgaagacaaaggcttccactacgtaactcatccttcgccatcgctccaagcaactctccgttctagggggagaaaagcatgagcatcaaagaaaaggaccggacttcgtctttggtataatcttaactcatttatttatgaccaaagaggagaaagcacttcgagggctctaatgattccgtttttggcgattcatgccaaagggggagacagtaagagcccaaagcaaaaggaccgcaccaccaccaatttcaaaaacttaacttaagtgttgaatattttcaattggtatcctattgtgttcaaacagggggagaaagtagtatttcaaaatgatacatcaaaaccctcttgaacactaagaggagaatctcatttagggggagttctgcttagtcaaaggaaaagcatttgaaacagggggagaaaatatcagatcttgaaaatgcttctcaaaatcttattcatatgcctttgactatttgccaaaggaattttgaaaagatttacaaaagattttgcaaaaacaaaacatgtggtgcaagcgtggtccaaaatgttaaaaacgaagaaacaatccatgcatatcttgtaagtattaatattggctcaattccaagcaacctttgcacttacattatgcaaactagttcaattatgcatttctatatttgctttggtttgtgttggcatcaatcaccagaaagggggagattgaaagggaattaggcttacacctagtccctaattaattttggtggttgaaattgcccaacacaaataattggactaactagtttgctctagtgtataagttatacaggtgtcaaaggttcacaacaagccaattaaaaagaccaaagttgggttcaaaatagagagctaaaggcatcccggaaggctccctggtctggcgcaccggacagtgtccgtcgaccaggggacttcgcgcagaactcctcagcctcaggaattttcagaagccgacgcgctataattcaccggactgtctggtgtgccacggacagtgtccggtgcaccaggggacttcacgctgaactcgccagcttcgggaactccgccgctataattcaccggacatgtccggtgcacaccggactgtctggtgagccagcggagcaacgactacttcgcgcgcaacggtcgactgcaacgcattaaatgcacgcctgcgcgcgcagaggacagagcacgcgcggtggcacaccggacagcctacagggcctgtccggtgcgccaccggacagccagacaggcccacaagtcagagctccaacggtcggaacccaacgacctggtgacgtaggtggcgcatcgnnnnnnnnnnnnnnnnnnnnnnnnnnnnnnnnnnnnnnnnnnnnagtttggtggttggggctataaatacaaccccaaccacctccacattcaagacatccaagttttccacttcccaactacttacaagagctctagcattcaagtctagatacaccaaagagatcaaatcctctccaaattccacacaaagcattagtgattagtgagagagatttgttgtgttcttttgagctcttgcgcttggattgcttctttctttcttgattctttcattgagatcaaactcacttgtaattgaggcaagagacaccaattgtgtggtggtccttgcgggaagtttggttcccaattgatttgagaagagaagctcactcggtccgagggaccgattgagagagggaaagggttgaaagagacccggtctgtgtgaccacctcaacggggagtaggacacctttgtggtggttgccgaacctcgggatattatcttgtgtctcttgtgttcttgctcattgtgtttgttcatgttcttcgttctctcaccattccgtggaagattgtttatatctttttggtgtgtggattttgagaagtgcccttctcagatctactactttgaaccctgtggatcatttagaacatctcatttccaaagttaactgggtgaatttcgagatcaattcagttttacccagtttgcttctagtttttgttgaaaaagttttaacttgcctattcaccccccccccctctaggcaactttcaattgttcaagcgattcaatgggaaaatactgcgctgccgtccgaaagctagaggacaaattcgaagggctggaatttcatcatgtagagagagatcgcaacgcgcagagacgcgttgtcgaaactaggatccagtcggacccaggtcccacctggggttttcgtccaagaagtgccacgcccgagtatttccttagaacaggaagaagattgcaatgttctgagccaaccagagtcagattcagatgactggagggagccaatcatcagatatattaagaatgaagaagaaccagacgacaagaactcggcagaacgcagttgccagacagtcggctcactatacactcattggggagacattgtatagaaggggtgcatcaggcgtcctcatgaagtgcatcctcctgtccactgggaagcaacttctggaggagaccacgccgggcaatgcgggatacacgcaaaatttaggactctagttgggaaggtcttcaggtctggtttctattggctgacagcaaagagtgatgcagctgagttagttcagagatgtgaagcttgccaattcctatcaaagcagcagcatttaccagcacagcaactgcaaaccataccagtgacatggccatttgcgtgctagggattggatatgattggacccttcaagaaatctcaaggaggtacactcatgtactagttgctattgacaaattcactaaatggatagagtacaaacccatcacttctctgacttcagctaaggcagtggaattcatacaagatataatattcaggtttggaataccgaatagcatcataactgacatgggatccaatttcactagttcggagttctttgatttctgcgaaaaaagaagcatccagattaaatatgcatcattagcacacccaagagtcaacggtcaggtagaaagagctaatggaatgatattggaagcactcagaaagaaagtctttgataagaacgaaaagttcgcaggaaagtggatcagagagttgtcgtatgtggtttggagcctaagaactcaacctagccgagctttgcatggaaacactcccttcttcatggtctatggttcagaggcagtgctacctgctgacctcaagtttggggcaccaaggctgatttttgaaagcatagcagaggccgaagcaactaggctggaagatgtctatgtactcgaagaagagcggctgaacacgataattcaatcagcacggtaccagcagaccctgaggcgctatcacgataagaccatgcgacgtcgatccgtcttagtaggagatctcgtcatccgccgaactctagcgggggagggacggcacaagttatcgcccttatgggaaggacccttcatagtagcagaagtcactcggcccggatcatatcgcctcactcagatggatggcacagaagtcgggaactcctggaacatagaacacctcaggaagttttatccctag

SEQ ID NO: 163154 - DNA, 3182 bp, Arabidopsis thaliana landsberg
atggtcaacaatcacatccccgataacactgttgacgcagagggaaacccgatccctccaaacgagacagacgttcctgaagccaccgctcccgctgtcctagcagaattaagaagtatgatggctcaacttcagaagaaggtaaacgatcaagaacaggcgaatcggtctttggcgcaacaactcgaagcagctacctcccaaggacagatcaggactacttgttttggtgcacgacatcttcaggatcgacgaacagtagtagatctcaatccaacacggctcgtgttccacacgcctggcaaaacaacgaggcccatccgccgaaccgcgctggaaattggaagggaccgagcagaaccgacagctttgagaaatcgggacacgatgaaccgagcagaaggaaacgatctgcagctccctcttccctgaggagaacttgccgaggccgatcagatcgggatctcggacgatgaagacccataagagaacgttcgatgggctgaggaataggccagagaacaagaaataagcgctatcaagctttccttagccaaggcagaaaccgagatcaagctcgtaagatcccaaatgcataacgcagtctcctcggccccaaacatcgaccgcattctggaggagtcccataacactcctttcactcgcagaatctccaacgcgataattttatacccaagaaagctaaggatcgagtacattaatggatcttccgacccaaaggcacttgaagtccttcataatttctgtagcccgagccaaattcaaatccgacgaaagggacgccggtctctgtcacctgttcgttgaacacttgaaaggaccagccctggattggttctcaagactcgagggaaatttcgttgatagtttccaggagctatcgacactcttcctcaagcaagattcggtgcttatcgatcctggtatgtgggacgccgatcttttgtcattatctcagccaccgaacgagccagtttgagatttcctcgcaaaattccgatctactctagccagagtcgaaggaatcaacgacgtagcggctctctctgctctgagaaggcgctgtggtacaagtaagaattccgaaaggaattaaatttgtccaaaccacaaacaatccgagatgcattacaccgagcatcggataacgtatctcatgaagaagaaatggaactattagccaaaagacacgaaccgtccaagcaaacgcctcgcatcgataaatcccaacccagtgctcgaatcacaaaaagggtgctcaaggcgggacattcgttcaccatgaagggcaaaatttctccggagcccataattaccaggctgatacaccctgaggcgaagccgcctgaggccaagggcgaggccgcggtcgaggacgcggtcgagaatcctacacttggacaaaggatcaacccgcaggaaacgagcaggaatattgcgagttgcataagagttacggccatcatacttccagatgtcgtagcctcagagcaaggttgtcagcaaaattcctaaccggagaaattggttgaggtttgaccatcgaagatttataagcagaaaaaggtaaaaccgagcaggtcaacgctgtggccaatcccgagcaggcagctcccacggcgaaccctgaaggacccaaaagaggccgaggtaatcgcaaaacagacgacgatgagccagaagctgctcggggaaggattttcacaattttaggggattcggctttctgtcaagacacggcggcatcaataaaggcttatcaaaggaaggctgacgcgaatcataactgggcgcggccatttaacgagccaaatgacgaagtaacttttcacgaaagcgataccaacggtttagaccgtccgcacaacgatcctttagtcattacactgaccatcggtgatttcaacgtcgaacgagtcctagtcgacacgggaagcacactagatatcatttttcttacaactctgcgagaaatgaagatcgacatgacgcaaatcgtaccaactccacgacctgtgctcggattctctggggaaatcactatgactctcgggaccatcaaattaccagtccgagccaaaggggtaacaaaaatccccgatccctctgttaccgaccagccgaccgtgtacaattcatttatcggcacaccatgggtaaatcaattccgagttgtcgcttcgacatatcatctttgcttgaaatttcccacgagcaatggcgtgaaaaccatctggggaaatcagaaaaatgctcgaatctgcttcatggcagcacacaagctcaagaaccccgtcacagagtcaacgaccgacgcgaatcataagaagactaagcttggccgagccgaagagaaagcaattttcgagcagttatagcagctaaagatcgaggaggctcgggaatccacaagaccaatccccaatctggtaatctctatctgccttgatgacgaaaaacccgagcggtgcgtggaaatcggtggagacctaggagaagaattaacagctgaactcatcgctttcctcagagaaaaagtcaatacattcgcctggtccccggaagatctgcccggagtaagtgttgatatcgtatcacacgagctcaacatcgacccgacgttcaaacctgttaagcagaagaggagaaaattgggtcgggagcgagcagaagccatgaaagccgaagtagagaaattactgaggatcgggttcatcaccgaggcaaaatatcccgaatggctcgcgaacccggtcgtagtaaaaaagaaaaacggcaaatggagagtctgcgtagatttcaccgatcttaacaaagcttgcccgtaagacagcttcccattactactcatcgatcgcctcgtagaatcaacttctggaaacaagttgctatcattcatggacgctttcgtcggttacaaccagatcatgatgaaccccgaggatcaagaaaaaaccgcattctacacggaacaaggcatcttttgctaccgagtgatgcctttcggactcaaaaacgctggggcaacttatcaacgcttcgtgaacaaaagggggggggagtggggtccgtatatccatactcccacttcaattttaaactctcgtttcggtttaaatttgaacttcgatttttctacttcaaattttcttggaatttga

SEQ ID NO: 163155 - DNA, 1944 bp, Arabidopsis thaliana landsberg
ttttacagaagattcatcaaagacttctccaagctcgctagaccactcactagactgttgtgcaaagaagcagaattcatatttgaagaagaatgtctaacagcttttaagtcaaccaaggatgctttggtatctgctcctgttgttcgagcgcctaattgggactatccatttgagatcatgtgtgatgcatcagattacgcagtatgagctgttttaggccagaaaatagacaagaagcttcatgtcatatattacgtcagccgaacgttggatgaagctcagggaagatatgcaacaactaagaaggagcttctagctgttgtattcgcatttgagaagttcataagctatttggttggatcaaaggtcactgtctatacagaccatgcagctttgaggcatctgtatgccaagaaggatactaaaccaagactgttgagatggatacttttattgcaagagtttgacatggagatagtagataagaaaggcattgaaaatggtgcagctgaccatctatcaaggatgagaattgaagaaccccttccgatagatgattcaatgccagaagagcagctcatgattgtagagttcttcggaaggagctacagtgggaaagagttccattaactgaatgctgttgaaggagaatctccatggtatgctgatcacgtctattacttggcatgcggagtagagcctcccaacctgaccagttatgaaaggaagaagtttttcagagacatacaccattactactgggatgagcattatctttacactctctgtaaagataagatctataggagatgtgtctcagaagatgaagtagaaggtatcctgctgcattgccatggctcagcatatgctggtcacttcgcgacgttcaagacagtgtcaaagattcttcaagcaggcttttggtggccaacaatatttaaggacgctcaggagtttgttccaaagtgtgattcatgccagagaaaaggcaacatcagaagaagaaatgagatgcctcagaatccaatcttggaagttgagatctttgatgtatgggggattgatttcatgggtccattcccatcttcatacggtaacaagtatatactggttgccgtagactacatatcaaagtgggtcgaagctattgctagtcctaccaacgatgcaaaagttgtgctgaagctgttcaagaccataatcttccagagatttggagtacccaaggtagtaatcagtgatggtgggaagcatttcatcaacaaggtttttgagaacctcctgaagaagcatggagtaaaacacaaggtcgccactccttatcatccacatacaagtgggcaggttaagatttccaacaggtagataaaagcaactatggaaaagactgttgggattacaaggaaagactggtctacaaagctcgatgacgcattgtgggcttacaggacaactttcaagacccccattggtacaactcctttcaatcttctctatggaaaatcatgtcacctaccttttgagcgcgagtacaaagctatgtgggcggtaaaactcctgacatttgacataaaaaccactgagcagaagcggttgatccaactcggtgaccttgatgagatcagtttagaagcttatgagagctctgaaatctacaaggagagaactaagcttttccatgacaagaagatcatcactaaggatttctaggttggtgatcaggtgctgctattcaactcttgcttgaaactctttctaggaaagcttaagtctagatggtcctgtcccttctgtgtcactgaagtccgtccttatggaacagtcactctagctggtaagagtggagatttcacagtaaatggtcaaaggcttaagaaatacttataagatcaaatccttccagaggtgacgtcggttcatctcgaggaacttcatgataat

SEQ ID NO: 163156 - DNA, 4851 bp, Arabidopsis thaliana landsberg
  unsure (1)..(4851): unsure at all n locations
atgcctcaggataacgagggttacattttataccctgcaggctatcctgagagcaaaattaggaagattcattctaggaagtctcactctggccctaaccatgctttcatgtataagggtgagacatctagctctaggcaaccaacccgtgccaagttgcctaagaagaaaattcctaatgcatcaaatgaacatagtctttcatttaaaacttttgatgcatcctatgttttgactaacaaatccggcaaggtcgttgccaagtttgttgggggcaaacacaagggttccaagacttgtgtttgggtacccaaagttcttgtttctaatgccaaaggacccaaaacagtttgggtacctaaagtcaagaactaaatttgttttgtaggtttatgcatccgggggctcaagttggatactcgacagcgggtgcacaaaccacatgaccggggagaaaaggatgttctcctcatatgagaaaaaccaagatccccaacgagctatcacattcggggatggaaatcaaggtttggtcaaaggacttggtaaaattgctatatctcctgaccattctatttccaatgtttttcttgttgattctttagattacaacttgctttctgtttcccaattatgtcaaatgggctacaactgtctttttactgatataggtgtcactgtctttagaagaagtgatgattcaatagcatttaagggtgtgttagagggtcagctatacttggtagattttgatagagctgaactcgacacttgcttaattgctaagactaacatgggttggctctggcaccgccgactagctcatgttgggatgaagaatcttcataagcttctaaagggagaacccattttaggactaacaaatgttcattttgagaaagacaggatttgtagcgcatgtcaagcaggaaagcaagttggctctcatcatccacacaagaacataatgacgactgacaggccactggagctcctacacatggatctattcggcctgattgcttacataagcatcggcgggagtaagtactgtctagttattgtggatgattattctcgcttcacttgggtgttctttttgcaggaaaaatctcatacccaagaaaccttaaagggattcttgagatgggctcaaaatgagtttgacttaaggatcaaaaagattagaagcgacaacgggacggagttcaagaactctcaaattgaaggcttccttgaggaggagggcatcaagcatgagttctcttctccctactcgccacaacaaaatggtgtagtggagaggaagaatataactctattggacatggcaagaaccatgcttgatgagtacaagacttcggatcggttttgggccgaggcggtcaacacagcttgctacgccatcaaccggttatatctacaccgaatcctcaagaagacatcatatgaactcctaaccggtaaaaagcccaatatttcatattttagagtctttggtagcaaatgctttattcttgttaaaagaggtagaaaatctaaatttgctcctaagactgtagaaggctttttactaggatatgattcaaacacaagggcatatagagtctttaacaagtcctcaggacaagttgaagtttcttgtgacgttgtgtttgatgagactaacggctctcaagtagagcaagttgatcttgatgagataggtaatgaagaggctccgtgcatcgcgctaaggaacatgtccattggggatgtgtgtcctaaggaatccgaagagcctccaaatgcacaagatcaaccatcctcctccacgcaagcatctccaccaactcaaaatgaggatgaggctcaagttgatgaaggagaagatcaagcaaatgagccacctcaagatgacgacaataatcaagggggagatgcaaatgatcaagacaaggaggatgaagaacaaaggccgccacacccaagagtccaccaagcaatccaacgagatcaccccgtcgacaccatcctcggcgatattcataagggggtaaccactagatctcgtgttgcacatttttgtgacattactcttttgtttcctctattgagccacacagggtagaggaagcactccaagattcggattgggtgatggcgatgcaataggagctcaacaacttcaccagaaatgaggtatggcatttagttccacgtcctaaccaaaatgttgtaggacaaaatgggtcttccgcaacaagcaagatgagcatggtgtggtgacaaggaacaaagcacgacttgtggccaaggatactcccaagtcgaaggtttggatttcggtgaaacctatgcacccgtagctaggcttgagtcaattcgcatattattggcctatgctacttaccatggctttaagctctatcaaatggacgtgaaaagtgccttcctcaacggaccaatcaaggaagaggtctatgttgagcaacctcccggctttgaagacagtgagtatcctaaccatgtctataggctctctaaggcgctttatgggctcaagcaagccccaagagcatggtatgaatgcctaagagatttccttatttctaatggcttcaaagttggcaaggccgatcctacactctttactaaaactcttgaaaatgacttgtttatatgccaaatttatgtgatgatattatatntggtctactaatgagtctacatgtgaagaatttagtaggatcatgacacaaaaattcgagatgtctatgatgggggagttgaagtattttctaggattccaagtgaaacaactccaagaaggcaccttcattagccaaacaaagtatactcaagacattctaaccaagtttggaatgaaggatgctaagcccatcaagacacccatgggaaccaatgggcatctcgacctcgacgagggaggtaaatccgttgatcaaaaggtataccggtcgatgataggttctttgctatatttatgtgcatctcgaccggatattatgctttccgtatgcatgtgtgcaagatttcaagccgaccctaaggaagctcaccttacggccgtaaaacaaatcttgagatatttagtttatactcctaagtttgggctttggtatcctaggggatccacatttgatttgattggttattcggatgccgattgggcggggtgcaaaatcaatagaaagagcacatcggggacttgccagttcttaggaagatccttggtgtcttgggcttcaaagaagcaaaattcggtcgctctttctaccgacgaagccgcgtacattgccgcaggtcattgttgcgcgcaactactttggatgaggcaaacccttagggactatggttacaaattaaccaaagttcctcttctatgtgataataagagtgcaatccgcatggcggataatcccattgagcatagccgcactaaacacatagccattcggtatcattttctaagggatcaccatcaaaagggagatattgagattgcatatattaacactaaagatcaattatccaatatctttaccaagccactatatgaacaaacttttaacaaacttaggcatgagctaaatattcttgattctaggaatttcttttgatgtcttgcacacatagctcatttatatacctttgatcatatctcttttatttgctacgactaatgtgtttccaagtgtgtttatatgctaagtaatagattgaaagggaaatggagtactcgacgaagacaagacttcgacttcactctaccgactaccgatatcatttacacttcgtcgttacttcacaacactctccaatttggtataacctttcactcatatattgtttaccaaagggcgagaaaatgttaaagggctctccaatgtctccgtttttggcgattaatgccaaagggggagagagtattagcccaaagcaaaaggaccgcaccaccaccaaattttaaaatgaagttttcaaattggtatcttaatgtgttttcaaaagggggagaaagtctttagtattttcaaaaattggaaaaaccctcttgaacactaagaggaggatttcattaaggggagttttgtttagtcaaaggaaaagcatttgaaacagggggagaaaatttcaaatcttaaagatgctttacaaaatcttattcatttacctttgactatttgcaaaagaactttgaaaaggatttacaaaaggttttgcaaaaacaaaacatgtggtgcaaacgtggtccaaaatgttaaataagaaagaaacattccatgcatatcttgtaagtagttttattggctcaattccaagcaacctttacacttacattatgcaaactagttcaattatgcccatccctgtttgctttggtttgtgttggcatcaatcaccaaaaagggggagattgaaagggaattaggcttacacctagttcctatataattttggtggttgaattgcccaacacaaatctttggactaactagtttgcccaagtgtatccctcatacaggtgtaaaaggttcaccctcagccaataaaaagatcaagttattggattcaacaaaggagcaaagaggcaaccgaaggcacctctggtctgggggcaccggactgtccgatgtacatcggacagtgtccggtgcaccagaggacttcaactcgaactcgtcaccttcgggaaattccagaggcgactccgctataattcaccggactgtccggtatacaccggacagtgtccggtgctccaagggtgagccgccccaggaactcgccagcctcgggaattcacttcagccgctccgctataattcaccggactgtccggtgtaa

SEQ ID NO: 163157 - DNA, 3293 bp, Arabidopsis thaliana landsberg
atggcgacggaggaagctgtgactcgtgatttcctatcagggtttcaaaatcaagacgtggagatggaagaaagaaaaagcaccgaagcagacgttgttaaaactggttcagattattggcgtgattatgaagttaagagaaattttaaagctgcgaaacattttgctcttgaattgcattcagatctcaagattgttgaaaaaacggaggaagaggtagaagaagaagtaataagagatgaagataaaagtgagtttcgaaaagctaaagaatcgatcaagaagagaagacaagagatctctacaacaagtgatatggagatagatctgaatgtacgaaggaaagctccttcgcttgtggagctgagtgcgagagttcttgctcagaattttttagctatcaagtctttgaaacttgttcctgatcacttgaggaagaagctctcgtatcttgttagtggtttaggtgaattcgatacacgtcttatggagcttttgattgaagattctccgagtgagatttgcgctaagaactgtgtccaattagtggaggatgacttggtaaagatcttctgtgactgtgatagagttagcttgaaggtatattagaatccatttgttatagaagaagtacttttggtagcaatctttgtttgtgaaagtttcaatcttttgcaggtgttgattcttgatctttgcggaagatcgatgacggattatacgataaaccagttctttaaacgcgcgcctaacggattcccgtcattgactacgttatctcttcaaggagcgttctgtttaacagacaatgcattgttgttgatatcgaaatcatctcctctgcttcagtatattaacctcactgaatgctctcttctcacttatcgtgcattgaggattcttgctgataagtttggttcaactcttagagggcttagtattggtggatgtcaagggattaaaaagcataaagggtttagtagcagcctgtataagttcgagaaattgaactatctttcggttgcgggactcgttagtgttaatgatggtgttgtcagaagtttctttatgttccgtagttcgattctcactgatctatctctcgctaattgcaagtaagttactctttttaggccttgatataccaaattcattaccaagttttatgctgaaaactaatgttttttttgctttctctataatggtaactagtgaggtgactgatgaatgcatgtggcatattgggagatattgtaagaagctagaagctcttgacatcacagacttggataaattgactgataagtcattagagtttattactgagggttgcagatatttgaaatcactcaaacttacaagtaacagatttaggttcgtacaagtctcccaatttgttctttttgtacataacatccgttgagtgttctgaatatcatcaatgtatgggattactttgacagtgacgaatgtattgccgcgtttcttgaagtctcgggaggttctcttagagaactctgcctaaacaaagtccgagatgtgagtgtttttagtacctaaagtcttgttcatgttcaagttggttttcgaaagtgtttgaggagttttgtttttaacaggttggtccagagactgctttttcgcttgccaaagtttgtaagatgttacaattcttggacctctcgtggtgtcggagactcaaagaagatgacctaagacggattttgcgttgttgctcgtcacttcaatcactcaagctatttggatggacgcaggtatgatattatagagaaacctgtaattcaggttacactggtgcctttttttgtttatgttgaattgaaccttggggtgatctgtgtcaaaagtacttaaatgacagtattatcgttgtaggtggaggatacatatcttgaagaactttcaagatcagacgttcatattaccggattgaaactgacttcactctatgctcaccttgataacttttacccaagtgtaggtgccaagttcttctgatgagtagacaactggcgtttgtatatatagctttgaattgatgacctttcttcattgttagaccaaattatagctgttgtacaggttcatagtaaagaaaaaaagatagtgatatatgaacaatgttactatgtcttttagaatcagctttttgtaaaaagattgaactaatagaaagagaagaaaagttttaagcatatgatcccttggaatatttttagcagtgtgtggtcacaactgttcaccagaaacgaaagaatcttctttctctcttctctttttgagtaaatagcggagggataccatctaaacggctttttgaaacaatcctgcaacttgtgttcagattcttaccaagaaacaagccattttagctcagatgaacaccaaccggggattgtaaagaaagttaccagttgtttttatatattttgtactggcatttttctgatggaaacggcatcatccagcccgatgatggggaggtttactacttccaggaagcttttggccataagcttgtcggtactagccgtgctctcaccactctacatcgacagattatcagaggaagatctagaagaggaagaagaactcttcagctttatgttttccttctctctgcttctcctcttgttgattttagccatagccttgtccttgtacagtgacccgagcttgaccaggtttgatccttactggattcacaggctatgtggttcgtttggtggattgcttgtcatcctcatccttcttgttttcgtcttgatatgcaaagcctctggttagaatctgagcgaaagttgttttgatgccacaaatgaagaagaaaagctcatctcttgcaaaatttttacaatatttctgtatgttcaggaacacaactcttttattcattttctaaagaaaatttatacaaaactcagaaatccaaagatgcagagtaatgaaattactcgaaaggtagattttacatttgaagcgcagaaaagagtagatattttagacaggttcaggtcatagaagctgagctcggtctgtggtctttgtggctgctcaaccttctccttctcatccactttgtctcactagaagctggagaaacggctccatcagctgacgggagttcgcaaggaagtgccatagccgagctggtgaaggcgttgagaacaaggaacgccaaaatgggagacaaatctaatcctccaagaggcggtatgaatccccggaaaatgttcaagtatggatcacataaagtgctgaaacaatggtaa

SEQ ID NO: 163158 - DNA, 3196 bp, Arabidopsis thaliana landsberg
agttttgttagaacaaactctcccccccctgccccgcaaactaaggacagggagcagcatgtctctatacaacctcccaacggataactgtcctccgctcaacctggcttacccctccaagcaggtccttctgagatctgccaacgagttggccaagctccgcacaatgatcataaacctgatcaacataagcaaaaaccaagaaatcgtgcaccacaatagtagggcaatagttggctaagctccgcgcaatctactcgcgcggggcatgagatatagcgcgatatcgcgggcaaggaaactcctccccaggaaactgagatcccttcccagatctccatagatttgacaggagctgcttccctgacagatcccactccaaggactcgtttagacttcgcctcgatagaggtctaaccccctcttaagcggaaggtcaccttcgtaccagcacctatgcacatcgaaaacccaataatagggaccaagacacgtacaacggctgttttcccaaggctactgataataggtttttagtcagttatcctaaaacaccaatcatgtcgttgtagtattttaggttgtcaatccaaatgagtgtgatgctaataatcaagatgcaatcagagttcacagagtcaagccaagcaataacaggtttgggtgtgttctagcagccctaagtgaacattcagaaaacagaagtttaagcagaacagtaaaaacactcgaccaacacagcttgttgccaagcactgggtgtggtcgagtaaacagcagagacagtgacaaagatactcggctgcacagtctgttaccagacaactgggtatggtcgagtatcagagtgataacaggagagaaatgcaaaaactaagcaacatgtaacaagatgcagtaaacaacagcagagtaaacaaagaaatcaattagataaagaattctcgaggatgggataatcgagtaggtttgtttactggtgattgacatgctcaataaattatccctagacaacaagttcgataaccaaatctaagtgccaccacaatagagaccctcaagttaaaccagtcccaaactcaatcaccattgacaagagctaacctaacaggcattacgaatcaacaagttaaagccaaaacgctctatgtaaccaataccttgatacagagccacgaatctctagaattagtggttcagacatttcatcgaacaccttttgggtgcagaaatgtctaggctcaaattccagccgatcagaaaaagcaataggcattaagaacaactaatccagaagggatctatcaatcaatactcaatcacctagcatactgagaattctacactactctaacccatcctcagaaacctattcgctactcagacatcatgacagaaagcataaacgttgaacaggttgaagacatgataacagcagtatgataacagaatgaataacagtaaacgaaaatcaagaacagaaactgaatattgaatactgaatagataaagagaaatccggattacaaaaagtctagaacacaaggtctgcggaaataaaaactaggtaaaaaaaactctcttgcgaaaatgagaagtacatactacttatagccaaatatcccgaaaccctaatactcaaaacgacgaagtatttggacgggttaagaactgtactcgaccaacgtggtcgagtgagagctcgagtgaatagctggagtcttcttttcttccttgtactcgagtgtctggttgagtgcggaatgaagaaggctctgaagcttgtcatcgagtatgcagtcgagtggtgtgatggcgatactcgacctctaggtagagtgaagaggtcgagtggttgtctggtgatggaggtgaagacactcgacctcatggtcgagtgaagtgatcgagtgatggagacgagggcactcgacctcggggtcgagtggtgaagtgaagtagtgatgtcctctactcgacctggtggtcgagtggtctcttgaggtcttgaagctcctactcgacctctgggtcgagtggtttgtcatgatcaggtccgcttcttccagatagctcgtcaacagctccaaatcacctgaaatcaacgcaaatatgcaacacgcatgcaaactatcctaaacatgcaaagtgatgacaaatgatgtgaaatggtataaaacagtgatgatattatgctaaagtgatgacaaatggatgctcaaaacatgcaaaatacacacttatcagttagtgttttggagtcaaatatgacaagatatcaagtgtatggttgagcataagaactagaaccgcatcaggttcccaaaagcttaagtagtgtttccttgttataaaaaaacaaagccaaagactcatacagaatttggctacaccatcaaagctttgagaagcaataagaagactagttagtgttttgaagtcaaatatgactagatgctttgtgtatcaatgagtataagaactaaaaccgcaaccggattccggaagctaaagtatagtttccttgttagaagatacaaagccaaagactcatacagacttctgctacaccatcaaagctttgagaagcaataaggagcttggttagtgttttggagtgaaatatgacaatatgtcacgtgtatgatgtagtataatgatatgtctaaaatttgcatgttttcagtgtccattcatcatcgttttgagtccagtttcgtatcattcatcactgttttatatcatttctcatcattcttgcatactttgcatgattaggatagctttgcatacatattgcatttctaagttgttttcaggtgatttggagctgtttgcgagcaaattggaagaaacgagtcagaaacagaagacatactcgacccccaggtagagtgactttggagccattcttcccacatactcgacccccaggtcgagtgactttggagccattcttcccatccactcgaccaccaggtcgagtaacctcagctcaggccactcgatgacaatactcgaccccctggtcgagtatcacttcgccacaccatcaccatcactcgaccattcgctctaccaagttactcgaccccctggtcgagtatcaacactcaccaccataagcatcactcgaccggacactcgatcacgtcttcacagtctactcaaatccgcactcaaccagacaagctga

SEQ ID NO: 163159 - DNA, 1542 bp, Arabidopsis thaliana landsberg
atggaattcggcgacggcgtttccttcgccgtcgtccccactgtcttcaaaagagaagactacaaacgaactaaacacgacaccgtcttctccaagtggcaggtcctctgtctttctctttctcgatttgtagattgagacttttcgctcgatcttgtgttttctctgaaacccatttcggaattctcagattttcagttgaatcgaaaaatctgatcttccatttccaggatttcagtgtaaagatcccattttgaatgcctagtgtgtctgctttgtcccaaatgcattttctctggatttctgtagaattggtcgctaactatatgtatatctaactagcctaaattctgtttcatttgctacttgaagtggttggtttttagatctaagttttatctgattgtgtaaagtttgatgctgcacaggtacttataggatccaacgattgggaagatttcaaaaacggaaaagatggtgtaggtagatacagagtccagaacttacctcgtaaatcttgtccgggtctgtatgagctcggtgtagcggtcatcggtcaagaaaaatgtcgaaagcttgaaccagatattgttcttgcttcatatctaggacaagctgaaagtgttaggtctagacttcagcgttatggaagatccggtgctcatttgcgcaatgttaacaaccttaacgactgtgaaactattgaatctccagttaaggctgttactggaggtttatttgaagacatattttcgaaaggaggctcgattttatacagatgggctccggttagtaaatacatttcttcttttcttctatattggtttgctaagtatacaactttgatctaactcatgtgattgtatcagatgggatctaagagagaagctgaggcaacagaagggatgctcttgagcacatttgactatgcttggaacaaaggaagtaacggggagcgaaggcagcttgatttgcttaagaagctcggtgatcgcgagtttatgagcaagagaaagtccggtatatctcgaatgctgtttccttttcttcggaaccaagttggtatcagaataaaaggagagaagcatgtgcttaaagaagagaggaagctaacctgtgatgttgatgaagagaagagtaataatttcctcacttcaatactcaaactcacccggtctagacctcaaccggtttcagacagatttgatgaggttgatggttcttgttctgatattgtttgtggagtcttacttgaagatggtggctgttgcattagaagtccagtcaaagggagaaagagatgcatagagcataaaggacagagagtttgccgtgtttcacccgaaaaacagacaccgccaaagtccgagattttcactggacaagatcatcacaatcataaagactctgatgttgtgtgtggagtgatcttacctgacatggaaccttgcaataagagacctgttcctggaagaaaacgatgtgaggatcataaaggcatgaggatcaatgcttttctttttcttcttaaccaaactgacc

SEQ ID NO: 163160 - DNA, 856 bp, Arabidopsis thaliana landsberg
acagcttaacttaataaaatacatatcaaattaaaaaaaaaagacattgacatatatatcatcgatgtaacacatcaaccaccatctttcttgagagttttcttgttcgtgtgaggagaactaagatgtgttttgaatggaaggaacgaagatgtgagttttaaacacaatcacaatgttttactatggttttgcttatgttttgctatggttttacgtatgttttccttatgtttttaatattatcttttaaatatagttcttccaaaaatttcactttcccaaaatatatttaattagtataagaatttatagtttcaattttatagtacatgcccgcctattttatagtatatttaactgtgactttgattatctatcatgtcgtcagtccaagaagccatgttatctaagtttctaacgcaaagcttaacagcttcctcttcggttcacctgaaccgtcaatttcgacggcgatatgttgttgcagttaaacttcaccaacccgaacaagaaaatcagtgtgatgtttgagaaagtttcggtaaaaatattgtttaccgacgaaatgattgccacacaaggtatcttgccgttttcgctaagaaacaacacgactaggctacaaacgatccatttggttgcaaagccgatcttcttgcctataaatgatatggttgagctcagaagacaagtgacgagcaacatgattgaatatgaaatcataagtagattcagagtaaaagttgttattgggtatattaactattcgtattggttaaaagggagttgtcaacttcagttgaccagtccgccagccgatgacttactgtctcggaagtatacactacaaaaa

SEQ ID NO: 163161 - DNA, 3405 bp, Arabidopsis thaliana landsberg
atgtcagaaaactcgaggggtaaatccatgaagatgcgtggatacattaggagcacaagcgtggtaatactgatagattttggggccacgagttgcttcattcacgaaggcatagtgaaacacaaaggttggcgagtcacagaaaccagaggctttggagtaaaggttggtggaggtagagtaataagaggaagcggtaaatgtgcagacatagcactggaagttcaaggcatcgaatttatagaggatttcttgctttttgatttgggggatttagatgtggtgttgggattttcttggctggccaggttaggagacacaagagcaaaatggggacaactcaaactaagctggcagattggtaacacatgggttacccttcatggtgatcccgaattatgcagagaacaggtctctctgagagccatggaaagggtgattaaatacactggagcagcttacttgctggagttatctactttatttgatcatatgagccgcaagataaaaaggcaattgtgcaagacattaagagagtcttggataattagggatcagtgtttcagatgctaaaggggcttcctccttcccgtaacatggaacatgcgatcactttgcaggatggtacctcatcgattaatctgcgtccttataggcactcttttggacagaaaaacgagattgaaaagttggtcagagagatgctggactctcagattatacgtccgagtataatccaatactcaagcccagtggcggatccaggatatgattctatataaggcacagttaaaaaaaaatcaataaaaagacattagtaaagcttgaacttgggttaatgtggggcaccattaagtaaaaaaccactacaccaagtacatttttaactacatagtgcaaacttatataatatttattgaattcagtatagggcacatgccccacccaagaccaacgtggatccgtcccagctctagccctatcctactggtcaagaagagagatgggggctggagattctgcgttgattatagagcgctcaacaaagctactattctggataggtatctcattcctgttatcgaggagctactagatgagctcaaaggagttgcgatgttctccaagctggatttaaagtcaggatattttcaaataagaatgaaggcggaggatgtcgagaagactacgtttaaaacccatcaaggccattacgaattcttagtaatgcccttcgggttgtctaatgcaccctcaacctttcagagcgtcatgaatgatcttttccgtccctacctcagaaaattcattttggtgttctttgacgacatcttagtctttagccccgacatgaagactcacgtgaagcacttggagacggtacttcagctgctgaaatttcataaattctacgtcaatgagaagaagtgtgtgttcggaagtaccaagatatcttatctaggacacatcatgtcttcacaaggagtggctacggatcaaaattactaagctggcctcaaccaaaatcagttacagaattgagcggatttctaggcttaacgggttactaccgcagatttgtaaaaaactatggccttattgcaagacctttgatagatctcttaagtagatggcttcttgtggaatgaggctgccactagttcatttcaggcattgaagaaggctgtcactcaactccctgtcttgattctaccagattttcagaagcagtttactgtggaaaccgatgcatctggtacaggaattggtgttgtgctctcccaggaaaagagaccaattgcatttctcagtcaaggtttttcaagccaagggaggattaaatcagtttacgaaagagagttgttggcaatagtaatggttgttaccaagtggaaacattacctagcgggaaaggagtttgttatcaagacagatcagcggagcttgaaacacctcctagatcaaaacgcagtctccacaatacagcaacgatgggcttcgaagttaatagggctgaagtataagattgaatacaagcctggtgtggacaacaaggtggctgacgcactgtccaggaaaccccagaccgaggtgttctcacagctaacattgcaagctactcacaccatcgacataacagctctaaaagaagcagtcaaggcagataaagaattgagtaagctgttgcaggatatagaacaaggctgtcagaaaaatggagattttactgtggaagatggtgtgccttacaggaaaggttgtcttgtaatacctgtagtaactcccttcattccaaaactactggaaacgttccacacaagcgctgttgggggccatgaaggagctctgaaaacgtttaaacgattgactaaggaggtgtgttggacatgcatgagaagtgatgttgttaagttcatcaagggttgccaagtatgtcaggagaacaagtattccacactctcttcagctggattattagctcctttgcctatcccgcaacagacttgggaagacatcagtttagacttggtggagggtttgtcagtctcaagagggttcaattcgattctcgtggtggtagacaggttgagcaaatatggtcactttatcgcattgaaacacccattcacagcaaaaacagtggcaaaggcatttatgagagaggtagtcaaactgcatgggtttccatcaacgatggtttctgatagagataagatattcttgagccatttctggacttagcttttcaagttacaaggtaccgctcttcacaagagctttgcttaccatccccaaacggatggccaaaccgaggtggacaacaggtgtttggaatcatatttgcgatgcttcacgggtagacgtccaactacttggaatcaatggttgccttgggcggaatactggtataatacatcctaccattctgctactaagaccacaccattcatggcagtctatggaagagagcctcctgcaatgatcacgtatggcgatgtccctactccaaatgctaatgttgaagagctgcttagagacagatatggtatcctaatggaattgagagaaaacttggtcctagcacagaacaggatgtgtaaagatgctaataaacacaggagagatgttgtgtttgaagttgacgagtgggtgtacttaaagctgaggccttatagacagaactcagtggttcacaggaagaatgagaagttagctccccgttactttggcccgtatcagataatcagtaaagtgggcaatgtggcttataagttgaaactccctgctcacagccacattgacccggtattccatgtcccccagctgaagctggccgtgcatgcagcctacagccctcaggagctacccaagatcatgacccctttgctggaatgggcggtgggt

SEQ ID NO: 163162 - DNA, 1017 bp, Arabidopsis thaliana landsberg
atgggttacgacggcctccgcgacttgaatccttgcataacttgctggacgatttgtgttatggttcttaggaagtacgtctcgtttatcacaaataactcattcaaactacgggtcgtctttgtcgatgagtgggtaatgggatcttcactcgtgatacaaggcatacttaaccttctgcgtgtcttattccctatatgactcaccctccgattttgttttcatagggtatccaaattgaagctataatcggaagtcggttttctcaacgttactacgacatgcttgaagagaattagtggaaagaaatcagaacttttggtgttatcgaaaactggggttttgtccgaacaacaacccacaaatacatgattgagttcatgaatgcaactgaggtaactcattccgacccaagggaaactgtattatttaacagattcacaccttttgactacattattgaagacaccggtgatactgaaaatttggtcggtaagtaatacgtatctaatgcaaatttcatactttcacaaatcacatgcctgtttttaatctttatttcatactcccagatttggttggtgcactcgtcgaggtcggatgtctgagaaatattacagaagatggttgggagatggacggattcagacttaccttccagattatggacaaatagtataatttcttttgtttctttacttctaaatttctttcttttcatcatgtatttttcttgagttagcttaattgtaagactgttttatatgtttcagtaaggagaggttgaaatgtgaggcctctggcgaattggcggttgacttgcataggaaatttcgatattttcgcaatgacagtattgttattgacaatatatatgtagcactcacctggtggaagatctgcaggtatcatcctggccccaatcacgtgaagatccaaaatcatgccgggatatcagatgtcactgtcgaccccaatatcgaagaagtgcaagagttaaaaatggtcctcgagtaa

SEQ ID NO: 163163 - DNA, 3641 bp, Arabidopsis thaliana landsberg
  unsure (1)..(3641): unsure at all n locations
tccctcgcaaaaccctagcaatttgcgaggggtttcctacggcgactcgcaacttcctcgcaaacttgtaacctatgctgtgtgagggatttactactgtcccacgcaactccctcgcaaatttgctagggatttactacggccctcgcaatctcgtcgcaactttgtctagaaaccctaatcgaatctctgtgtaaccctacaactttgtgagggatttgctacgaggactcgcaagtccctcgcaaagttgaagcgatttcattggttgtttagtcgattcctcgcaaagccctagcaatgttgcgagggctttgcgaggctatttaagtttatatatacaaccacgcgagtttgagcgaagctggtcgccgtctctcttccaagccaagccgtctctcttccaaaccctaaaaatttcttctttgtttctctctcgatccgacgactgccgaagctagtcgccgccgtcttgaccttcgtcagcgatacagagagccgtcgtgtcttcatcttctttgccgccgtctggagcttctcatccacgcctgttcttcgtcgccgtgtacctggagcttcttcggcgacgtctgttcatcctctccgccgtgtctacctcttcttcgccgccgtctggaacccaaaggtaatgtttcaatttgttaggattatcgattagttttttgtgttggtctttcaaaacctagtgttgaatcggttttaatctatcttattcgagtttatatttggagatctaattaggtttctagttgcatgttgattttcattgtagaactaattagggtttcttgtttccggttgatttcattgtagatctaattagggtttcttgtttccggttgattttcattgtagatctaattaggatttcttgtttccggttgattttcattgtatatctgtttagggttttctatttgttgattttcgttgtatttcgaattaacctttactaatgttctctttttttttgcaagatgtcattcaatggcaatgattattcccggtttcgatctcagcaacaaaatcatcgtcgttctcctagtgaaggaaacggttcagccactcagggtaatcttcaaacccccaatcaattccaacaatcaagcagatggtgcttctcctccgcctatcaatcaatctcctcgcggttatgccaatcagtctcctcgcggttttgccaatcacactactcctctagctgctcggctcaatgacnnnnnnnnnnnnnnnnnnnnnnnnngccctggtcgtgcaaggttgcctagattagaccctaatcgacctcctggtactctctggtaagccactaggctctgttctcttcactattacttgattgtttagttttgtctgtctgatggagtcttgatttgtaggtttgacgatgacacctcagttgcagccactgtccggagcatttttgaaaaagatttcaaagagcgtcatgcaaattggtcacagacatcagttgcagtggtcgatagatggtttgaaacctttgctgtaagtgaaataatgttgtgttttttttggtacagcttttggtcttgtctatttctaatgtgtcttgtctttgttttgtagcaagtatataactgggactctgcaataaaccagagagttagattggagtttgaggcagagctgaaggataggatgtctgatcaagttggtcgttggaagggaaagtggaaggagaagggagatgaggcaaaaccgcggtggatagatccagaagtttggaaagttctggttagcttttggagggattcgaagtcggaaagaaagagtatcaacagtaggaatgcaaggtatcatgatccggacggcctcgggatacataaacaccggtctgggcagacctcatacaaagccagagcccgcaaatgtgtaagttaatcaaattttttcctttaaaaaacttgtatttcaaaaaactgacctatatgtttatgtgtttcactgtgagatgacaggagatagtactccagattttctcctccttttagatcaaacactcagaaaacctgattgcagtttcatcaacagaaagtcagaggagatctataaggaagtgtcatcgaagattcaagaggaagagtcactcctgtgtttagacgactgtacggagagcacgggttcaggcgggttatctgttcaggcaaagaacaagatctatgcacatgtatcttatctctttcaactcaatataaaagacagcttttttttgttgctttggattggtctgttttcgcttgaattggattggtctgttttagcttgaattggattggtctgttgtggcttgaattggattggtctgttttaacttgaattggattggtctgttttagcttgaattggattggtctgttgtggcttgaattggattggtctgtttttggtgctttggattggtctgttttagcttgaattggatttgtctgttttagcttgaagtggattggtctgttttagcttgaattggattggtctgttttagcttgaattggattggtctgttgtggcttgcattggatttgtctgttttagcttgaattggattggtctgttgtggcttgcattggattggtctgttcaggcttgcattgtgtcattgtgattcaaactgaattgaatatgttgtgtttttggtttgcaaattggcagtgtgtgtaaatggatatgattatgttgtgaaactgaattgaatatgttgtgtctttgtgtttttggcctgattcagttgtgttgttggtctgaataatatcattgtattttcggcctaatatgactatgtctgaagctaaaaactgtataatcggatagttttagttttgtatgttgctttgtgtttgtctgtagtagcttgcattgtgtcattgtgtttcaaactgaattgaatatgttgtgtctttgtgtttttgatctgattcagttgttgttggtttgaatgaaatcattgtattgtcggcctaatatgactatgtcagaagctaaaaactgtctaatgggatagtttcagttttgtatgttgctttgtgtttgtctgttgtggcttgcattgtgtcattgtgtttcaaactgaagcttgcttgttttccattaggcctaagatcattatgtctgaagcttgcgtgttttccattctgtctaagtgtttctactttgctttgattatgtttgcttggtttggttgtgagtttgtgacaggttgctcctaagaagaaagggaggatttatggggctggttcattgtagcagaagcgtcttcagctcatgccggtccggtgcttcctcgagatgatccagttgtgctctcgtagaagctggctgttgctgaagcccttattgcaaaccaggctaagaagatcaccagttttgatgcgtactttgactaccttgccgataaggatccagaatttgctacgctgtttcgagacagatcctctacaagacctgaatcggtcaactccaatctgagacccgaggagcctaatgccgcagctgctacatctgctgggatcggacatgtggctgtcggacctgaggctgtcaaacctgaggctgttatagctgaccccaacactggatcctctccatctcatactttctaa

SEQ ID NO: 163164 - DNA, 1307 bp, Arabidopsis thaliana landsberg
atgttgactttgtacggtcaagaaaggtcaccggagaactccaccacaagtacgaccgatgcttccgatcgccgggatgagacgccgtcgtcggagatagtcgtgagagatattcacgcgatgacgacgacaacagagcttactcggccacaacaaaggggatcaggaggaggatacttgtctccgtcgaggtctattgcttttagcgacggaactacttcttccggtgagaatttcaccaccgtgagcagagagttcaacgctctagtcatcgccggatcttccatggacaacaacagtaacggaactaaccaatcaggtggtcatcgtgacgtcatacgtgatgaaagaaacgagctgactaggatcggagaaaacgatgacgttggtgatcatggtcaggtgcctgaggaggattcaaatccatgggcgattgtaccggacggttacaacaaccgggccggttcagagaataatattgtgttggcgtcatcaggtggtcagaaccggatggttacgactgcttcggtgcaaagagttaagagggaagaggtggaagcgaagataacggcgtggcagacggcaaaactggctaagattaataataggtttaagagacaagacgccgttattaacggttggttgaatgagcaggttcatagagctaactcttggatgaagaaaatcgaggtgactcattttttttctattttacgaatatcttagttagatccgatcgattaagagaacaagatgtcttataacatgcttttcttgaaactgtttgcttttacagtgtataacaaaatgaatttagaaaaagctatgtaacgttttcaaattgcaaacgataaacgtggacaagcgttttttacaaattataaaatgcatattttatccaaccaaaaaaaaaaaaaaaatcaaaatgtaagaattatgggtttatttgaaaaaaaagcagaaacacaaataaacgatagatccttgaatggtggtgatatatcaaatatttgaaatgtgataaagctatccaaaagactgactaaatagacgtcgatgttgtctttggaataatagattatgcgattgatacatatatgtggatgcagaggaaactggaagataggagagcgaaggcgatggagaaaacacaaaacaaagtggcaaaagctcagaggaaggcggaggagaggagagccacggcggaaggtaaacgagggacggaggttgcgagggttcttgaagttgctaatctcatgagagccgttggacgacctccggccaaacgatcattcttctctctttcc

SEQ ID NO: 163165 - DNA, 5219 bp, Arabidopsis thaliana landsberg
atggacagtgaagcacaacagatctctttacttattggaaaagaagatagatacggccgtgttgaagtaaacctgatggaagctgaacccatgaatgctgaagattttaatgcaaagcttgacgtttcatttaaggcatggaaggatcaggtcttaaagatttaatcctttgcaatgttcctttgatatggttttctttgagcatgagtttctagtgtcagtgaatgacttttgtggacatggacttccaggggaaaaaaggaatttggataaagcttccttgtgagctttcgagtcttgttgacattgcaatgaaggtaattaagaagatgttatgtttgtgatttggtagttttgttttttgattgattcttgttcagctttagtgatcgaatcggattctattttggtgattttacagaaagggtttacgtaccaccatgccgagaatgaatatgcggtgcttacttcttggatctccgacttgcctaacactattcctgccaatgcttctcatcgtattggcatcggtgctcttgtcctaaacaagaacagagaggtaacaatacattactactacttcatatttctcctggcttagctgtttggtgtatcagtattgattttcactacgttatgtttatatattgctgagtcttgctttattctctggtacaacaagacctgaaccatacgttagattgaaccttgatgaacaaatttccatttgcaggtgcttgttgttcaggagatcgatggtgttttcaaagataccggactgtggaaggtgcctaccggtgttattaaagaggtgagtttgttggatcgtgtcacatttttgtatatgatctttatctttaaagccctaaagtaatatttacaatcacaagaagagttaattataagaatcaatgaaccaaattttgtataagttaagagccaagggttgaccagataatcaaagaaaccaatgtgttaatacttgtcccagctaactccctatatctacaatacttgtctacaaatatgttagtaaactctgaatattgtcgattaggtcattgctatttcctgtagtatacaagttaatggatgctaaacttcacagagatttggctatttgagcatgtcagcttgataaagagatatagtcacacattgattccaataatgaggcttgatggtatcaactacaagttattacttattagcacttaacaactactacaagagtccttgatttggatatgtttttgcacttccctttgatatcttggctaactgaatatatcaaatccacagggtgaaagtatctgggctggagcagttagggaagtgaaagaagagactgatgtacgtatccgatttcaaacaccgacaaacatttatatctcttgggttttatattgatactgtaatctcaactccgtgttttctttttgtcttttgctccagattgatgcagagtttgtagaagtcttgtctttcatgtaacaaaacatctcttcatcctttctttataagttacccattgatcgatttcatcttgacatcatatggttggtgtctcgcagggaaagtcccctagcagtctggcaaagaaaaacggatatatttttcgtctgcgagttggaagcaagaacttttgaaatccagaaacaagattctgagatccatgctgctaaggtaaaacatgttacatatcttgtgatgaatctcaattagtttactgaagatcttttaccagcctagctctcttgttgtgggtttctcagtggatgccggttgaggaatacgtaaaccaactttttattccagaacagagagaacttcaggttcatggcgaacatctgcttgaagagattgcaggagatggaatacatgggtttctccaaagtccttactacgacttcatctggtaaggagagctatctttactgcaacaccgatcacgccaacctcctcaacgcaacgcgtggcctagcctccacctctggttgaaaaacccttcttcagaacgtgtttatgtttcgttgtttcatgtccattgttcaataaaagcaccagtctcgtgtgtacaacgattggagacttctttatgtaatttaccatcatttcctcactacaacttcatatataatatatttctttggctaccaaaaagaggtatcctttttattctagtttcaataagagtgtgaacccatagatgctgagacatttgccaaaactctgagtgattcacttaaggcatggaaggatcaggtattaacagaacaccttagattcaaagccttccaatgtttctttaatgtggtcgtgtttgaatgtcaagtttgatcctaaatgagaatctcaagctagctgttctggagtcaaaggttattggttttggttttctccattggtttctagttccagtgactgactttgggacatggatttgcagggaaaaaggggaattcggataaagcttcctctcaagctttcaaatcttgttgacactgtaatggccgttttatacctcaacaaaaagttgacttctaatttaacctataagttatcgttgatccagccaaatcgactcaccgttaacacttcttaacagcgcccattatataaaggggaatggttgttgatgaatgtatagctctctatgtgattatcctttattattacttcaagacatcattctaggttctacatatcttatttgttacattgattggtaacaaaactataacaaaaattataccactaacctcatatatataatgaaataataacacttgtaaaattggagagagtcgcgcgagtgagatctacgcgctggcgatttctctctcaactcttcttcttctgatcacaaactcttgctctgtcgatgtgtttcttcgttgattccggcgatgaagagaccccgtggttcatggcgcttcaattgtgatccgctacatattctcggcaaatcaatccattcaaaataaagagagtagcgaaggggagaagattccacgagacaccgctggtaagagctatattggcggtgtagcttcgcggagaggaagggtaagactttacggtgaagaaaaagggttgacgggagttagattggaagactagagattcaggaggtttcattggatcgctgcttggctaaggaggtcgactccggtccggtgaggctataccaccgtcgatggtcctcagatctactccctactggcatcaactctcggattgcttcttcctcctcaaaactgctttacggtggcgggatggcaacgatcttggatcaccatcttcgttcggcgcgcgtcgtccaggctcaccggaggttttctgttccggcgagattgtgcaattcttggatggcggctcagatcgtgttttacgatctgagattagggtttcaagattccggtgtagattggtttggtaaaacctagtcggttttgtaatagatggtttagactggttaaatgtaagtggattgggcctaaagaaaaaatgtatgggcctaaatccggaaatagcccattggcgcttatttataacattgaataccctttaacaaaaaaaaccttgtatatatgaaagttggctaatactctccatatgagtgacacatcatcacacaagaaaatgacaagtgtaattctacattaattaaattaaaaaactagcaaaactaattgagaaaaaaacaaaagtcttttgttgtgttaaattctccattaatctcactcttaaatgaattttctaaaaacattcaataaataaaaattataataatgtaccaagcacaactttcattctattctatttatttaattttaaaaaatttcatctaggtggtcgctaaataatcgcagaggagtctctacgatactcgttattcatgtgattcaatcgtaactcagtcgtcatattttacgagtacaatatgactaatgttatgacagcgggtattagtcgtatcgtagtcgtcatttagcgattaaagttacgactattttgtttagcgactctggattaacgactaaggctattactcgtaatatagtcgtaacttctactttaacgactatattgctactaatgttgtagtttgaaaacccgtgttttcttgtagtagagcgggtgattatctagtatttcattaaaaatgaaaacaatttaggttacaatagaaaaattataaacctgtacaatggttacatggcaaaaggtaaaaagcatttaagcataatactataataatttagagaatatatttatttggaattggagttttggactttctataataataaaaaataatataaacaagtattgtatatttttttagaaaaactttttttttttctcttttctcatggcttatagttgatcttacatacagtaattgctacttgattttatccttttttctttaaaattcaatttaaatatatttatgtttacctaatacttgaatttatctaaatttgaatatatttatctaagttcacaatatcaattggagtttccgactttctataatagaaaaatcttttgccaacaatagtaatacaaaaagaaatatgttataacttaaaactaaaaatttatttgagtagacaatatgttataacttaaaactaataacaaatgaaatcttgcgccaacaatagtaatactgatgtgtgtgtatatatagataccataagaacaaaaaacaaattaataaaaccaaaaatcaaatcatctaccaaaaagtaaaaaaaaaatgaaacaattgttagtctttctatttgtttttagcatttgcatgctagaccatgtatcaggcggcggaatcaggatctcgaacgaactcaaaaacaagaaacttctttggatgcggtgttattccaaagatgacgtattaggtccaaagataataccaatcggacaacattatgaaaatctttttgatattaacttttggcatacaacgcgttttatgtgtactttgagacaaggtcctaactttagacactatcagaactttacagcattcaagcttttcgctatggcagatgaaggaggtctatgggattggagagcaagagaaaatgggatctatttaaagaaagaagctggcgagaaagttttaaacccaatttggatgcataaagagtatgcttggatttattaaaattattgacaaactatctaaaaataaaaaagaagag

SEQ ID NO: 163166 - DNA, 2023 bp, Arabidopsis thaliana landsberg
atgaataaggctcaacgaaagagaaaaaacgcaccaaatgtttctcaacgacccaccactctaccaccgcagtataacttcacgccggcagccgacgttcctcctccgctacagacgcctcaagtaaacgaaccgatgttgccgggacagtcaacggctggccatatccgaaactatccaccgccccagcagctcttccagcactccactactcaacgacctagtgtggagacgaatcattcagtagaagtgcagttcaatccggctgctcccagtcaacatccaacgtctcctattcaacactctccggcgcacagtcatccatcatcacaaggcaataacttccatgaagaacacgctaatgctgtgcctcatctccgggaagactcgctgtagaatcttcatgacatccttacggtcccaggcagggatcagttcacaactgtcctctctcccataccaaaagaaggaacgacatggtatgtacttcttcatctcaagtgttgtaatgattttgatgtgttttgtctgattagtagcctctttgattgttttagagataggtcttgtcttattagtaacctctttgattcttaagtgtaaacgcctagacctaactcttcttatgtgtgaacgctttattaaaatgataagattttgatgtgttttgtatgatttgtctgaattgtgtattgatgtgtttaaaatgataagctttatgagattgttttattgtttcatgtaattggaggtttactcgcgacacaggatcaaaaattgtccaaaagattacaaaagtgtttacgaacaagtttgatggtccctattacagctggacatgtgtgcctcgccacaagcaagagcaatacttcctcgagttcgcggtaaaaatatcatgtcctttagcaattcatgacttttattatctgtcttctttccactaacattacctctttatttttttttttagaaaacccacacgtgggatcccttgattacagggacagtgcagacttattttgaagaaatctgtcaacgtcaaatgaaagacatggtcagcaacgcgaggactagtggagagaaaccaagctggattgcaccccttctctgggacagaatgttagctcactgggacactcaagaagaaaagcaaaggagtcggacttattcaaatgtccgtatgtctgaccgtaacggtctcggtccgcacatccacttcttaggccctaaatcgtttcaacagatccaagatgaaatggttagtcactttgtacattcgttcttaatagtttttacactgcagccacattttattctaacttctctaattgtttggttacattacaagaagaggaagtgggtcatcctgtttgtcttggtgatgttttcatcaagacacacacaaaggctgatggttcttttgttgataaaaaggcggagatggttgcaaagaaataccaggagaatgtgctactgaagctgtctgagcttgaggcagaatcttctgctgtttcagatggcacatcaagaacacgggagctcacacccgaagaatatacaaccatcttccttgaggttatgtttcatttctcccaatacttctgctggcttgaatctttttttattttaatctcagctctggttctctattgctttgtagtccaccatgaaagattcaagaggaaatccgtatggagttggaagcctcaaggactcgctggtcaaaggaaagcagaagctagaagactcttcttgttatgttgcattggaagaacaggtgaaggaagctcaacgaaagattgaagaacatgttgcttattctcaaaggcgtgatgctgtgttagctgttcgtgaaactcaggtagctgcgcgtgaagcagagcagaagtgtaggctcgagcacttgtcattggtggagaagtatctccttcaaacagatccgcacttcccggaattcatggcaagtcaatcatctagagagacaaccacagaccctaacacaccatctccatctgcttcatag

SEQ ID NO: 163167 - DNA, 2331 bp, Arabidopsis thaliana landsberg
atggattcaagaaggaagtgttcatctcgggcaagaagatcctctattgataatgaggaagttgaggcatttgacatgagtgacatgacagaaccccaaattcgccaagctcaccgtgctcaaagatcaagcttgattcaaggtggaagctcaagccgctcaaccatgcaaagagaagaagtagctcgaggaaagagggttgttgaagcagaagaagaacaccatgaagaggcaccctttgaagaggtggtttctgaggaagaggttgagatcatcggggatgatacaccaacccctgtttggagaagaaaccggcctaggaggaagagagagccaaccctgagcaagtactatcaatatttgaaggagttgaagtttgagggaactagttaccctcataaggaaacgatgcaaaagcttggtatttgtggtgatgtggaatacttgatggaattagccaatcttgtaacattcatgagctgccaatgtgggggatacaaagaggagagctgccaactccttgcaaccctcaaagttcatttttgtgttgatgattcggagaaggaagagagagtaggtcttggttacataactttcaaggttaggggtgtcgagtatactcttgatatatgcaatcttgataccattttcgggttccctagtggagaaggaatccgccaagactatgatcaagaagagctgaaatccctttggaaaacaatagccggtccgaaacccttctcaccaagcaagagcaagagttcttcaatctgtaatcccgtgattagatacctccaccaatgcatcgccaacaccctctttcaaaagaaggccaccggatttgttagtgaagaagagctatgcatgatagaccaatctttggtcttcattttgagggagacatgagattggaagaagatggtgggggatagagtggacacttcgttgagtgttgttctcttggatcacttattgagttacaaggagtatgctgcaaccatccatcactcaggaattcgtgggagtttttgtgttggtagtctattaacgctaatactaggagccgtgggtatagaacttggagcccctgacgtgttgcccaagttcattgacctcgactatctcaaggggaaggattttcttgagaaaacaactccggaggatcgctatctcttcaagttcaaccactcggagcttggaccttctcttctaccctaccatgcgagaatcggacttcggtgaagacaaggcgcaacatcaatttcatgccatctccctttgccttgaacatcgacattggaggagctcgggaagatgaaccagaatatagtccagccgactatgagcaacatgagtactttacccaagttgattatgaggaacaaatcgagtttgagcaacatatagatcagccggagcacgggaccagcgaacaagagcaagctcattatggagaaggtactgaccaaggaggagatgagtttgctgaagttcacaagaatctcggtgtacttgaagagcttgggaaccttcccagcaagacaatgaagggtttcaagaagaagatgagaacaatgaagaagtcgctcaagagtatggcttttcaactcaaggaataccagagcaagccaaggccaccatctcccactcccaaagtaagaaggagcggttcaacgagctcagctacaaggagagctgaatggatcgatcaaccccgagcttcatcttttgagcctcgggaagtgatctccgagttgagagagccaaggagaaggcagagacgagcttccacacgctcgacaacctactcgaccggacagaacgagcaaaaccctcccgcctcaacatcagcccctgcttatactcaagagagtatggacgataaagtctccatctacttcacctgatcagtgaggtcacaccacctcaaccattgtacataccattagctttttttttttctttgtgtgttttgtgttttggtcttgaattctcttctcatatttttattacacaagggactgtataaatttaagtttgggggagggttcaagacatgtttgacattgtgttctcttttcttatttcaaattttgcatcatttaagacatagaaaaaaacataaaaatttgaaattttcttaaaaaatgatttcacaaaaacagagtgtcatgtagattccatatcattttaggattgtatatagagtgcttgcatttaggatttgctcatttgcataggggataatgattatttcaaaccgttaagcatgttttgattcaatgaagtaagttcaatgcccaggttgttagttctcggttgcataaccga

SEQ ID NO: 163168 - DNA, 3405 bp, Arabidopsis thaliana landsberg
atgtttaggatagttttgcatgcatgctgcatatttgtgttgatttcaggtgatttggagttgttgacgagctaactggaagaagcagacctaatcaagtcaaaccactcgaccccaaggtcgagtagaagcttcaagacctcaatagaccactcgaccccctggtcgagtatgggacttcacgatttcatctcatcactcgaccccctggccgagtaccaccacgattgatactcgatcacttcactcgacccccaggttgagtgtcttcagctccaccacctgaccatcactcgatcacaccactctacctggaagtcgagtatcaccatcaccagcactcgactacatactcgatgtcgagcttcagagtcttctccattccgcactcaactagacactcgagcacaaggaagaaaagaagactccatctattcactcgacatctcactcgacaacatgggtagagtacagttcttaatccatcacaatattgagtagttttgagtattagggtttcagaatattttgatataagtagcatgtactttacattttcgagaacaaatttttatctagttttattccgcagacactgtgttctagaccttttgtaatcctaatttccctttatctatttagtattcagtatttgttcttgatttcgtttacagttgttcatcctgttatcattttgctattactctgttgttatcatgttttcaatccattcaacctttatgctttccacaatgatgtctcaatagtgaataggtttctgagaatgggttagagtagtatagaattctcagtatgctaggtggttgagtttgattgatagatcccttctggattagttgttcttaatgcctattggtttctgatcaactggaatttgagcacagacatttccgcgcccaaaaggtgttcgatgaaatgtctgaaccactaattccagggattcgtgaccctgtaccaaggtattggttgcagggagcgttttggctttaacttgttgattcgtaatgcctgttaggttagctctcgtcaatggtgattgagtctgggactaggttaacttgagagtctctgttgcggtggcacttagatttggttaatgaacttgttgtctagggttaatttattgagcatgtcaatcacctgtaaactgagaaaacgaaactactcgattaccccatcctcgggaattctttatctgattgaattctttgtttactctactgttgtttactgcatcttgttatctgttgcatagtttctgcaattctttcctgttactcaacctgatactcgaccacccagttgtctggcaacagactatgcagtcgagtatccctgtttcactttctgcctgttactcgacctgtcactcgacctcatccagtgctctacatagagctgtgttgagtgtttcgttgtttctgtttgattgtctgttttatgcatgttcacttaggactactagaacacaccaaaacctgttattgcttggcttgacttagtgacttctgatcacatcttgattgttagcatcacacccatttggattgacaacctaaaatactacaacgatatgattggtgttttaggataattgacttaaaaaacctataatcaatttgataccattctctatcaatttgaacatgaatctgatctttaattatcatgtctgcatcaaatttgaactcatggataccctaaaatacttggattttcttatttattttgatcgctcttgttaatccaagtagctgactctccttgttagagcagttaacccaaacccaaacctagactttctttcaagccctatatcacttgtgagtgtttgtgaggttttattccgattaagcttggtagaaagtgttaggttcgtaacgacagagatagcgtctcatgtagttctagttcgtattttttggactagataggactaggtgagtgcttatactttgggttgggatgtgtttaaaagaaaaaaaagggggttgattcattgatgagaaaaggtagaggactctaggtgaagtaagctaaagaagcagaaaaagtctagtaaaggttttgggatttgtaaagaaaagaaagagttcttgttagctattgaagatgggcaaaagcccttggttttaaaatgataaaaacaggaaccttagttgttaaagaaatccaaatccgctagatatatcaaagtgttgaagcttcgcctagagttaagagaaaagaaaagaatgattagaaaaagggtttaaaagattcatgaatgcaaagggtagagtttagttcttgtattgggattggagatgggattaccattagagcttcatttgatgtactctgggtagatgggatcttatctctgtatgcatagcttgggacttacctttagcattctactaaaacttaatcattttttttgagagatcccctgttactaaagcctattctgtaagggaccatctttgtctcttgaccttttaccttagccaaatgagttctttgatgatgcattgcttgattcacgttccagaactaatgaatgttaaagggattggtggatttgaaaacttatgtaggtcgagcatatgagtcggattgattgattaatgaggcatggctaacgtttttaagtagaattcgatcttgcagcttagaactttcaacttggacattgatttcatctggtttatctagtgttttcgctctgagtccccgctttcaaacctcacctccagcttgttcttgattgtttgcttgagggcaagcaaagactaagtttgggggagttgataagtgtgtattttgcatgttttgagcatccatttgtcatcactttagcatcatatcatcactgttttataccatttcacatcatttgtcatcactttgcatgtttaggatagttttgcatgcatgttgcatatttgcgttgatttcaggtgatttggagctgttgacgagctatctggaagaagcagacctgatcatgacaaaccactcgacccagaggtcgagtaggagcttcaagatctcaagagaccactcgacaaccaggtcgagtagagcacatcaccacttcacctcaccactcgaccccgaggtcgagtgccatcatctccatcaccagacggtcactcgatcacttcactcgaccttgaggtcgagtctcttcacctccatcatcagacaaccactcgacctcctcactctacctagaggtcgagtatctccatcacaccactcgactgcatactcgatgacaagcttcagagccttcttcattccgcactcaaccagacactcgagcacaaggaagaaaagaagactctagctattcactcgagctctcactcgaccacgttggtcgagtacagttcttaa

SEQ ID NO: 163169 - DNA, 1268 bp, Arabidopsis thaliana landsberg
atggagaacatgtttaggctcatgggaagtgaagattcctccgacagaagacggtgcatttgggttaacggtcctgtaatcgtcggagccgggccatcggggctagccacggcagcctgcctccgcgaggaaggtgttccctttgtggtattggagagagcagattgcatagcttcactatggcaaaaacgaacttacgatagaatcaaacttcatttaccaaagaaagtttgtcaattacccaaaatgcccttcccggaagactacccggaatatccaacaaaacgacagttcatcgagtaccttgagtcctacgcaaacaaattcgaaattactcctcagttcaacgagtgtgtccagtctgctcgatacgacgagacaagtggtctctggcgcatcaagacaacatcttcctcttcctcggggtcggagatggaatatatctgccggtggttagtggtggcgacaggagaaaacgcggagaaagttgttccagagatcgatgggctcacaacggagtttgaaggcgaggtgatccactcgtgtgagtacaaatccggcgagaaatacagaggaaagagtgttcttgtcgtcggatgtggaaactccggcatggaagtctctcttgatctcgcaaatcacaatgctaatgcatccatggttgttcgtagctcggttcatgtgttaccaagagagattttaggcaaatctagttttgaaatctccatgatgttgatgaagtggtttcctctgtggctagtagacaagattctactgattcttgcatggctgattttaggaaatttgacaaagtatggcctaaagaggcccacgatgggcccaatggagctcaagattgtttcaggtaagactccagttctagacatcggagctatggagaaaatcaaatccggtgaagtagaaatcgtcccgggaattaaacggttctctcgtagtcacgtggagctagtagacggtcagagattagatctcgatgcggaggttctcgccacgggttaccgtagcaacgtcccatcatggctccaaaaaaatgatctgttttcgaaaaacgggttcccgaaatcgccgtttccaaacgcgtggcaagggaaatcgggactttacgcggctggattcacaaggaaaggattggctggagcatcagcagacgccgttaacatcgctcaagatattggaaacgtgtggagagaagaaaccaaacgacagaaaatgagaacacgagtgggtcaccgcagatgcatttcagt

SEQ ID NO: 163170 - DNA, 2649 bp, Arabidopsis thaliana landsberg
  unsure (1)..(2649): unsure at all n locations
atgccgcctaagacccgtggaggaggtcaagggaaaagaaaggagatagaagcgccggcgcaggcgaagacagaaaaagttaaggcgccggcagagaaagtgaaggagaaggtgccggcgaagacgactgcgacggcacaaacgactgcgacggcgatggcaaccaatgcggcttcaacgacgacggctccaacgacggagagcccgatgcttgatgattctacgttttatgatgctctgaagcaaattcctgctgaagaaattcaagagaatatgcaaactgatgaggtggaagatgaaaatgaaaaagaagaaccaagtgaagaagaagaatcaaggagtagtagccgaaccttgggctccgattccgattcagaggagacggagacaaacaaagaactcgcgtgtgctaatcccgtggaagaggcggagagacaagatgacggcctagccgttatcgaggaggaggaggagaggagctccgcgagcgacgaggacgtcaatgtggaaaagtccgtggaggatgagggacacgaggacgagagagacgatgacgtgatagtggaaaaacccgtggaggagaggaccatannnnnnnnnnnnnnnnnngtggtaagtattccatttcgtaataccgatctaattgggtaataatgcaattgtgaactgtggacagtactagtaacattgggaaatgctatgttgatatttaggcaatattggcggatgtgggtaataccttagagtaatactacaattgtgatttatcagtagttagtactagtaactttgagaaatactatatagtaaaataggagtatctgtgtaatactggtaattacggggaatacttttaggaaatacagagtaataatgtggcagtactatttacaattgagtgatatatgaataggagtatctgtgtaatactggtaattacggggaatactttttggaaatacagagtaataatgtggcagtactatttacaattgagtgatatatgaatgaatgtttgtttctttcaggatatggaggaagcgatggcaatgcagccacttggtatgtacttcccggcgtcggagtataccaagaagatgaagttagcaacgaggtgttatatctcggaggtgttgaagaccttcgctgacttggaacatcctctaacgaatgttgaaaagaattattttatggagcatccgagtttcaagcacatctaccacctgccttccggatatacccacaagttaatggggatgtggatgctttttcttcgaacggcatctattgagaagaagaaggaggtttggttcgttgttaatggagttcccatccgctatggtattagggagcatgctttgatctctggtttcaactgcaaggcctatccagctaattatcagagtgctggtaatatgaacttcgccaacaggtacttcaaaaccggggtaattagacgtgaagacgtgaaaaccaagctaatggagatggaaccggctagatcaaaggataggttgcggatggcggtcctctattttctaacaagcatcattgtcgtgcctactaagactggagaaagggctagtccaattgatgatttctgtgttagggctgcaagtgatcttacgttttgtaagacattttcatgggggagatattcatttgagtacatgttaaaatcgatctcacacatattggatcattttaacggtgtcgtcccgaatactcagtcaccatggtctgttcccggattctgtgtgccgcttgaggtaagtcacatgttttatccttgttacattttcgtaattgaagctaacaattaaatttcatgtgttttgtgtagtttttagcatttgaggccattccatcacttagggaaagattcatagaagaaaaagagggtgcacatgccggttgtccaaggatgtgcaaggtgaatttcaagaggaccgagatgaaagggtttacccttgagcaaatcaaccatgtactcggaacaactgaggttagtatttcctattattccttgagcaaatatgagcaaatatgattttatttctttctaatatttcattgtctattatttccataggtcattgagagtataattagagagaaggctgaagaagtacctcttttggctgaaatcacgggagtagaggatgatgttgataagcacgatgttgtagttgatagttggatgaagcgtcttggtcaagggcgtgaaattagatttgaggaggtgtacaacgaggatgtgcatgcacgaatgaaagccccaaatgaagaggaagttcccacagttgttggaccgagagacccgacgttagttgatgtaatggagaagctccattccatcaatgacaagctgaatgaagctttgttggcgcttatgaaaatggaggaaaaacaagcaacgttcgaagcatttatggatgagatgaaagccaaggtaaatctgggtaataccggatatactgtaccataattagtaatatcgcgtaataccaaggtttaactaaattaacaatgcagatgtctcagaacccaccagatgaggaggaatcaacaatcaaggaaaatgcggctgctcctgttgtgcccaaacgagtgacccgttcaacccgtgcaagatctagtaacgtgtga

SEQ ID NO: 163171 - DNA, 6623 bp, Arabidopsis thaliana landsberg
atgaggagatattcgcggagcggacctgatatttcggaactgacctgccgaatatccaggaggatctccgcagatcccggacgaagctaccacgtgcgtagttctatataagggagcaaggacgacttggaagagacattcaatccagttcacattcgcacacacacacttttacacttgtaatctcttttcacattgtaaaagctttgtcataattaatacaaaagtccattcgttcttagcaatataactctcaagatttcagtgaagatctagccctcctttctcataatcttaaatacaaatatcgagtgtggatttcagaaccgacatttggtgccgtctgtggggacggaaatagatcattccaacaccgaaactaacacatcaattgtgaccaacgatcatggcacctcccaacggatctccctcccggagcccaggttgatgctatccataacactgacacggagaacatctcccaaaactcgaattcttctggatctgaccgaatcactccccctccgcaaacaaggggcggagaacgaaacgtcacgatacagcctccaaacggagataacccgaccaacctgtctaatcaggtccccccgcgacctcccagcgaattggccgagctccgcgcaatgatcattaacttgatcaacttaaccaaaaaccaagaaattatgcatcgcaacctcgccgcaattgtgggtcggtagagacgcgactccactcgcatggcacatgaggaagagcgcgataccgcgggtaagtaaatttaccccccgcgaaactaggattcctgcccaggtccccattgatctgacaggtaccgtctccccggccgatcctactccaaggacttgtctagacttcatctcgatagacgtctcacctcctaacaaccggtaggtcacctttttgcaggcacctaccaacactctcgtcgaaaacccggcaacaggaaacgagatgagcacaacacttgccttcccaaggctaccggtcccaccttcactgccgctgggctatttgcctcctaggtacacgtggacgagaaatcaaacaaccgcgtccagctcccgcgttcccgggaactcaacgcaacaacgaacctctatcgctaatccgccatccattccccggataccaggaagcgacctccttaacagttcaaccgatccccaagcaccggtcgatccgcgtaacgtcctagatatggaaacattccgcaattacgcagcttaaacaaacgcgaacatggctcaaatgcattctcgaatgcccctagcagtgagcaacgctcccgacatagatcatgtgatcgaagaaaccaggcgcaccccgttcaaggataggatcgctcgttttcgcctccaagacgtcaggagactccgtttcctggagtacgacagaacgagcgacccaaaggctcatctgagatccttccgttttgctataacacgagcgtacctgacagacgaagaaaacgaagcaggtcattgccgtttcttcgcagaaaacctcgtaggtcacgccctcgaatggtttgctagtcttgaagggaactccattgataccttcgaccagctcgccgccgctttcttaaaacagtattcggtacttatcgaacagaggacgtccgaagccgacctctgaagtctcactcaacttcagaacgaatccctgcgatcttacgtcaaaacattcaaagcagtctaataaaaaattgcaaacctaaacgaagaggtagccatagcagcccttcgtaacggcctttggttctcctctaggttccgtgaagaactcactgttaggcaaccagtctctttagacgatgcccttcacaaagctctccacttcgccaaagccgaagaggagctcgctgtgctggccttacgattcaaagaatctataaccaaaacgctccccttgcaattaagaaacccttcaagaaggaaaacaaacgcaggggcagcataccttattcgcaatagacgaggcagctgaggaggagagtccagaacttgacctcggaaaatattgtaagtaccacaagaaaagaggacattccaccgaggagtgtcgtgccgttaaaaagttaatcgcagctgcgggaatgactaaaaaaggtgcaaaccccaaagttgaaacccctcctcccgacaaacaggaggaggagcaaactcccaagcaaaagaaacgggaacgaacaccggagggaagtgactctcccccacctgctaggagagaacgcatagacgtagtctttgcagaactcgatctaggtggcgagacaggaaggtcagtcaccacacagaggtttccattacgcctctcaaaattctgctgaagcgcaaccgagcacctctcccctaaacgcatcgatttcatcatgggagggtcttagctctgcaacgactcaatcaattcgatcaaaactcattagaggaaggcagattcttacacaaaaggcaagagctcgatgatgggacctgaccaccagatcacattctgggaaagcgaaaccaccgaccttgataaactcacgataacgctcgcgttattcgaatcgatgtaggcaactacgaacactcccgtataatgatcgacacaggaagctcagttgacgtactcttttacgacgccttcaaaaaaatgggacaccacgattccgagctgcaaggcaggaaaatgccacttaccgtgtttgctagtatacgaccttttctttaggaatcatccagctcccaaccatcgcacgaggagtgagacgacttacgagtttcctcgtagtcgacaagaaagctcttttcaacgcaatactgagaagaccatgggtacacgccaataaagccgtcccatcaacctaccaccaatgcattaaattcccctcggacaagggaataacagtcgtatacggcagccaacgcagctcccgaaaatgctatatgggcagctacgagcttgtcaaaaaggctgaccccgtagtactaatgatagaagacaaactcgcggaaatgaaaacagtcagatcctctgatccttctcaacgcggacctcgaaaatcattgataacacaggtctgcatagaagaatcagatcccaaatgatgcgttgggataggtcaagacctcgacccagcgatacgagaggatctcataacctttctcaaggaaaacaaagacagcttcgcctggtcgagtgcgaacctccgaggattaagcctcgaggtaacctcacatgaactcaacgtcgatccgacctaccgacctataaagcagaaacgtcgcaagctaggtcccgaaagggccaaagttgtgcataatgaggtcgaccggttgctcaagatcggatcgataagggaagtaaaataccctgactggcttgccaacccggtcgtcgtgaaaaagaaaaatgggaagtggagagtaagcatcgactttacggacctgaataaggcatgtcctaaagatagtttcccactcccacatatcgaccgaccggtcgaagccactgcaggacacgaactattgtccttcatggacgcattctccgggtacaaccaaatacttatgcgcctagatgaccaagaaaaaacagcttttattaccgaccgaggcacctactgttataaagtaatgccctttggtttaaaaaatgctggatgctaccttccaacgattggtggacagaatgttcgctggctagataggtaaaccgatggaggtttacatcggcgacatgctggtcggatcagctccagaaaatgccatcgtcaccccatttacagtctgcttctatatccaaggcgtctttgaaatgaagctaaaccccgagaaatgctctttcggagttccatcaggagaattcctcggatacctagtaaccgaaagaggcattgaggccaatcctaagcagattgcaaccttcatcgaaataccatcaccaaaaaatggcacgagaggtccaacgactgactggtcgtattgccgccctcaacaggttcatatccaggtctaccgacaaacgcgtccctttctatcagctcctccgacaggagaaaaagttcgattggaatgaggactgcgagcaagccttcaaacaattgaaagcatacctgtttgaaccacccatactcacaaaacctgaacaaggagaaccgttgtacctgtacacggcagtctcccgaaccgcgataagcggtgtcctggtgagaaaagatcatgaaggacaaaaaccgatctattacgttagtaaaacgttgatagacgctgaaacccgttatttagcaatggaaaaactggcactggccgtagtcatgtcagctcaaaaactgagaccatattttcaatcacaccccatcgtagtgatgacgtctcaaccaatcagaaccattctacacagtccaactcaatctggttgacttgcaaaatgggccatataactaagcgagtacgatatagaatatcgcaccagaaccagcttgaaagcacaggtcctagccgactttgtaatcgagctcccgttagcggacctggatggaaccaactctaataagaagtggctcctccacgtcgatggctcctccaaccgacaggcatccagagtaggaatacaactcacctcccccaccgaggcagttatcgaataatcgttccgattcggattcaacgcatcaaacaacgagtctgagtacgaagacttcattgttggcattaagctagctcaaggaatggggatccgcgatatacacgcccatagcgactcccaactcgtcaccagccagttccacggggaatatgaagctaaagacgagtgcatggaagcgtacctcgaactagtcaaaaccttgacccaacagttcgaatcgtttgaattaaccaggatccctagaggagaaaacacctctggatacgccttggcagctctcgcttgcacgtcagatcctttcatcaaaagaattatccctggtcgaaggaatagaacactcgagcatcgacctaacggtcaaacatgctaggatggaaacctacacaacttgcaactttacgcgagtaacctgaagcaccagcggcgcggctagagccctcgcagcagctgagaaggcaggtgcagcggaggaagagtctgagctcggaacccccgaacaacctgcctcatacgaacctgaaccgtacaacgactggagaatcccaatcatcgattacatcgaacgagggatcacacctcccgacaagtgggagaccagaaaactcaaaacccagagcgcaaggtactgcatcatggaagggagacttatgaaacgcaacgtcgcagttccctatatggtgtgtacctacgggcaacaaataaaagacctcatgaaaagcatgcacgaggggcaatgtggtagccactatagtggacgtaccctcgccctcataatcaaaaagcaaggctacttctagctaacaatgctagccgattgcatagctcattcactcaagtgcgataaatgccaacgacatgcacctactcttcatcaacctcccgaagaaatgttctcgatatcttctctatacccatttatgaaatggtccatggatgtcgtacgtcccatggaagcctccggttggaagaagagactaaaaaacctgctggtcgtcactgattattctaccaaatggattgaggctaaagccttccaacaggtaaccgagaaacaagtcgaggacttcctatgggaaaatatcgtatgtcgacatggcataccttatgagatcgtcaccgataacaggactaacctcacctcgggaaaaatcaaagcattttgcgacaagtggaagatccgtcttaccatatccacccccgttacccacaaggtaacggacaggcagaagccgccaacaaagttatacttagcaacatcaagaaaagacttgattcaaaaaaatcaatgtggtccgacgtgctccacggagttctctgggcctaccgaaccacacctcgcaaatcaacgcaagaaacactgttctcccttacttatggtttagaagcagtaatccctgtcgagaccatggtaccaagcgtgagaagaaccgcctgtcctgctaacccggacctgaagacgcaaatattacaggacaacatggacttcatcgacgaacgcagagatcatgcaatgatccgagttcaaaattatcagcaagctgttgaccgctattacaactccaatcaaaatttggagattcgtcatggaagagctcgttttacaaaagtgttcagcaacacgagagagctaaacgacagaaaattgggcaccaactgggaaggtccctaccgaatcaccgaggtggtagtgacggcgtctctacgctcgaaaaactaatcaacggagtacctgaattttacggcgttggaatgctatgcatctcaagaaatatcattaataagtaccctaaaataattgaactacgataaggcttgataccctaaccggctacataggcagttcccccgggtacgtaggccaccatcttaactccttctattttaaaaggtcctttgacaaggaaagcaggcatcacgctctcaatataaccaagacacgatcggacgtgcccctctgtcgaagaact

SEQ ID NO: 163172 - DNA, 950 bp, Arabidopsis thaliana landsberg
atgttcgaagattttctttctattaaatatccaggattgaacgaaaaagaactcctcgtaaaaagaaatgaggaatatcatgtgtgggtgaaagattatgtatgtctaaatagtttatctatatatgatttacatttatttattgttattcttatctataatgatgtttatttctaaatttgcatacaggttacatattggaactctagtaatccttttccaacttgggttcaagagatagtcgatggacctttgcacaaagtcaaaacatggccaatgtattttacaagaggctatttgtaactatggtgtatgtgtgaaaggtgaaaattatacggatgcatttgacgctgcagatttttacgcaaacttaactgatatcatagaacttgagtatgagggggtggtcagtttgaatattacactttttaaatgttcgtggtatgaccctaagctcggaagaggtactcggaggagcaatagtggtgttgtcgacgttctttcatcaagaaaatactacaaatacgaaccctttattttaggtacgtatggtatatatatatggtcatttagtttttctagttaatatacaaatatctaattctccaaatatggtgcatttacaaacaacatctcaagcgtaacaagtgtgctttattccttatccatacatgaaaaaaccaaagcgggagtggctcaatattttaaaagtaaatccaaggggaaacatattaggagaatatgaaaacaatgatccgactcttttgcaaacagaaaatgatgatgctgttttactcatttcaattgaagatcttgtactagaaaatccgggagaaggcttaaacccaataatccttgattacgatgttggggatgctgaacaagaagacgaattccgatgtaatttatcgtcctcggacgaagatgaagtagaatatgaagagttataa

SEQ ID NO: 163173 - DNA, 2902 bp, Arabidopsis thaliana landsberg
ggtatcaccaaatcaggatgaaagagtccgaccagctcgcgacctcttgcatcacaccctttggcatgtactactatattactatgccatttggtttgaggaatgcaggcgcaacataccaaaggtgcatgaaccacgtgttcggagagcacatcggccgaacggacgaggcttacatcgatgacatcgtagtcaagacgaggaaagcctccgacctcctctctgaccttgaaacgacattctagtgtctgaaagcgaagggcgtgaaactcaatcccgagaagtgtgtcttcggaatccccgaggcaggctcctggggttcatcgtctccgagcagggcatcgaagccaacccggagaagatcgcagccatcaccagcatggggcccatcaaggacttaaagggcgtacagagggtcatgggatgtctcgcggccctgagccgttcatctcacgcctcggcgaaagaggtctgcctctgtaccgcctcttaaggaaggccgagtgcttcgcttggacccctgaggccgaggaagctctcgggaacctgaaggcgctcctcacaaaggcacctagcttggtgcctccagctgacggagaagccctcttggtctacgtcgccgcgaccacccaggtggttagcgccgcgaattgtggtcgagaggcaagaagaggggcatgcattgcccgttcagaggccagtctacttcgtcagcgaggtactgtccgaaaccaagatccgctacccacaagttcagaagctgctgtatgctgtgatcctgacaaggcggaagttgcgacactacttcgagtctcatccggtaactgtggtgtcatcctatcccctgggggagatcatccagtgccgagaggcctcgggtaggattgcaaagtgggtagtggaaattatgggcgagacaatctcgttcgcccctcggaaggccatcaagtcccacgtcttggcggactttgtggctaaataggtcgatacccagctcccaacagctctgatccaaccggaactctggaccatgtttttcgacgggtcgctgatgaagacaggggcaggcgcgggcctgctcttcatctcgcccctcgggaagcacctacgctacgtgtacgcctccacttcccggcgtccaacaatgtggccgagtacgaggctctggtcaacgggttgcgcatcgccatcgagctaggggtccgacgcctcgacgctcgcggtgactcgcagctcgtcattgaccaagtcatgaagaactcccactgtccgcagacccgaagatggaggcctactgcgatgaggttcggcgcctggaagacaagttctacgggctcgagctcaaccacatcgcccggtgctacaacgagactgcggacgagctggctaaaatagcctcggggcgaacaacggttcccccgcacgtcttctcccgagacctgcatcaaccctccgtcaagatcggcgacacacccgagcccgaagcgccctcggcccagcccgaggcaccctcagcccagcccgaggcaccctcggctcgagcccgaggcaccctcagctcgagccgaggcatcctcggttcagcgcgaggtaccctcggcccccgagggtgaggcactgtgcgtcgaggaggagcagagcgggccacgcctgatcgagattggcaggccccgtacctgcaatatctccgtcgaggagagctaccccccgaccaagccgaggctcggcgggtcgcgacgcgccaagtcgttcgtcttgctgggcgatgaagaggagctctaccagtcgcagcccctcgggcatcctccagcgatgcatctccatcgccgaaggtcgggaactactgcaagaaatacactcgggggcttgcggccatcatgcggcaccccgagcccttgtcgggaatgctttccggcaaggcttctactggccaaccagccagtgtgacgccactagaattgtccgcacctgcgaagggtgtcaattctatgcgaagcagacccacctgcctgctcaggctctacagacgatacccatcacctggccctttgctgtgtggggtctggacctcgtcggccccttgcagaaggcgcccggggctacacgcacctgctggtcgccatcgacaaattctccaagtgggtcgaggtccgacctctgaacagcatcaggtccgagcaagcggtggcgttcttcaccaacatcatccatcgcttcggggtcccgaactccatcatcaccgacaacggtacccagttcaccggcagaaaattcttggacttctgcgaggatcaccacatccgggtggactgggccgccgtggctcatcccatgtcaaatgggcaagtagagcgtgccaacgacatgattctacaagggctcaagcctcgcgatttacaacgacctcaacaagttcggcaagcgatggatgaaggaactcccctcggtggtctggagcctgaggaccacgccgagccgagccacgggtttcacgccgttcttcctagtctatggggtcgaggccgtcttgcccacagacctggaatacggctccccgaggacgagggcctacagcgatcaaagcaaccaagccagccgagaagactcgctggaccagctggaagaggctcgggacaaggccttactccactcggcgcggtaccagcagtccctgcgacgctaccacgcccgaggggtccggtcccgagacctccaggtaggcgacctggtgcttcggctgcgacaagacccccgagggaggcacgagctcacgcccccctgggagggaccgttcgtcatcgccaaagtcctgaagcccggaacgtacaagctggccaacagccaaggcgaggtctacagcaacgcttggaacatccaacagctacgtcgtttctacccttaa

SEQ ID NO: 163174 - DNA, 2162 bp, Arabidopsis thaliana landsberg
tatatgggagatcgtagaaaatggaatgcactttgatagtacggatagtcccatgttcattaatgagcaaattcacaaaaatgcacaagctactactgttcttctagcttcattatgcagggatgaataccataaagtgagcggcctggataacgccaagaagatttgggacaccctcaacatctcacatgaggggaacgacgccaccatgctcaccaagatggagttggtggaaggcgaactacgaatgttcgcgatgatcaggggagaggagccaactcaaacatacaataggctcaagaccttggtcaacaagataaggagctatgggagcacgagatggatggaccacaacgtcgatcgacttatgctaaggtccttcactgtccttgatcctcatcttgcaaactctattcatgataatcctaggtacatcaagatgacgcccgatgaaatactcagaaagttcataagcggccgaatgatgatcaaggaggcaagatatgttgatgaggcattgaatggcccaatccacgagcctcaaaccattgttctccaagcaacaagaagcaaggaggcgctacctagcaaggtggcacaaattgaggcggtcgggcttaatgatgaagaaatggccctcatcatcaagcgcttcaagacggcgctaaggggtcgcaaggagcatcccatcaagaccaagacaaagggaaagcactcatgcttcaaatgtggtaagattggtcattttatcgctaattgtcccgataatgatagtgaccaggaacaagggaacaagagggaaaagaagaaggcttacaagaaggctaagggcgaggcacatcttggcaaggagtgggactcagattgtttgtcatccaactccgacaacgaaggactcgccgccaccgccttcaacaaatcggccctcttccccaacgaaggtcacacaggcctcatggcgaaggagaataaggtatgtactaggaatactacttatgattcttcaagtgaggatgaatctagtgatgatgatgaaatagattattcatgcttattcaagggcctagatagaaccaaggttgataaaattaatgaattaattgatgccttgaatgataagaataggctattagaaaagcaagaggatcttttgtatgaagaacatgataagtttatagaggcacaaaaatctcatgctttagaaattaaaaggaatgaaatgctttcttgtgaattatcttcctgccatgagacaatttctagcttaaggagcattaatgatgatttgaatgctaagttagaaatagctagtaaatttacaacttgtgtagaaaatgttgttgtttgcaatagatgcaaagattttgatattgatgcttgtagtgaacacatagcttctattgcaaaattaaatgatgaaatggctagtcttaatgcccaacttaaggctagcaaaagtgattttgataaactaaaatttgctagggatgcctacacgattggtagacatccctcaattaaggatgggcttggcttcaagagggaagccaagaacttaacaagctataaggctcccatctccgccaaggagacaggcaaggcccctatggcaagtagtactaaaaggaaccatgcttttatgtacaatgatagaagacagtctcataggagttgtaatgcttttgattcacatgcctatgattcttatgctatgtttgcttccagttcttcctatatgcatggtagagatatgcctaggaaaaatattcatcatgtgcctagaaagaatattgttcatgttcctaggaaagttatgaatggatcctctacaatttatcatgctttaaatgcttcctttgctatttgtagaaaggataggaagatagttgctaggaaattaggggcaaaatgcaagggtgataaaacttgcatttgggtccctaagacaattgtgactaaccttgtaggacccaacaagagttgggtacctaagacccaagcctaaatttgtcttgcaggtttatgcatccgggggttcaagctggattatcgacagcggatgcacaaaccatatgacaggggagaagaagatgttcacctcctacgtcaaaaacaaggattcccaagattcaatcatatttggcgatgggaaccaaggcaag

SEQ ID NO: 163175 - DNA, 1133 bp, Arabidopsis thaliana landsberg
  unsure (1)..(1133): unsure at all n locations
cttcttctgatctttgcaatggcagtgtctgggttcgagggtttcgagaaaagactcgaacttcggttcttcgacgatgacaaaccaatcaccaaaaaccctatgggactccgtctaatagacttcgaatctttagaccaagtcttaaacgaagtgcagtgcacagtggtctccgccgtagcgaatcgtagcttcgacgcttacgttctctcagagtcaagcctctttgtatacccaaccaaaatcatcatcaaaacatgtggaaccacgcaactcctcaaatcaatccgaccgttgatccatctcgcacgtaacctcggcctcacgttacgcgcgtgtcgctactcgcgtggcagcttcatcttccctaaagctcagcctttcccttacacaagcttcaaagacgaagtcatcgtcgtcgaagaaagcctcccaaaatctctctgttaccgcaaagcctctgttatgacgccttctaataacccatcacgtgcttggcacgtgttcaccgcaagcgctgacgtggaatccgacgaacatgtcgtcgtagtcgaagtatgtatgacggagctggaccgagtcaacgctcgaagcttctttaaacggaaaggtgacgagaaaaacaacagcgattccgccgggaaagagatgacgcggctcagtggtatcgataacataaacgcaaacgcttatatatgcgatttcgcgtttgatccttgcggttactcgatgaacggcgtcgacggtgaccgttactcaactatccacgtaacgcctgaagacggttttagctacgcgagcttcgagtgtggtttgtctctctacgacaacggtcacgaagatatctctgaggtgttaagccgggccattgatgttttccggccaagtgacgtctcgatcgccaccacttacggcggcgaagattacaaccacgaggtgactaagcgcgtggagcgtgtgttagctaagaagcttgatcttaagtgtcggagccgtcttatgnnnnnnnnnnnnnnnnnnnaaccgtcgtttatcagtccttcacgcctcgtcggaaataggcttcgcggnaggagtataaaaggagaaaatgttttaattaggtttcaattagcttaaaggagaaaaaagaa

SEQ ID NO: 163176 - DNA, 1275 bp, Arabidopsis thaliana landsberg
atgtcgtctctgcttctcagattctcttccaagtcctctctccacaaacttgctctcgtaaatctcttcaatctctctctgtttctagtttttatataatctctgttttattcttcctcttcttctaatgtctacttctttactcatcccacagagatgtaacacctttaggatgttctcctcctcaaccaccaacccttttttgctgcatcatgccatcccttgtggtgaagaagcccaaagaacagagttcctcatgttggacccggccaaagaggattatttcaccaccgttgataagccacttcccaaaaatttgattaagtctaagctagtgggaagttcccatggatggggtgtttatctcagctcccctgattacatactaatcagcaactatccctcgagctctaaatcaaatcccaagatcattgatctgcctcctcgtcctagtctaaatggttctcaaactgaattggtaagtggtgtggcaatgtcctcttctcctgaagaggaagaatgcattattgctgtcaaatacatgggacgtccggtgagtatatatacgcctggtcaagacagtcaggggttcctccttgctatgtccactagattattcgattattttgagcaatctaagttgatgtattccaagagagatcaaaggttctacatgccaagttctggtggccaccacttgtggtcttgggttggtctcccatccaccacgcctcagtaccatgagttaaagtttcataaccttcctcagttttcgcattccgagttgcagcttttcgattcttgttacagggcacacgagcttgtggagtctccttcaggacaacgtttcttactcaaattttactaggtttcatgttagggttgtctgttggcttgggcggattcatgttataagcatgttctttctttttggctctgctaggcagggacgaacaaagccctgcgaacaaggcgttagtatccacatgaggcggcacatagcggctcatggtctttagagaggaggaagacatgaacatgtgttacactgaggacattggagatctctgcatattcctcggcagaagtgagcccttctgtgtcaaggcaagctcattccctggcttaaaccctaactccatctattttgcaggcgatggctttggtgtttacgatatcgccactagaaaaccacgttcctttcgtcccaagtctccctcagccttctccacaacaccactcttcccttactggatccctccaatgcctctctag

SEQ ID NO: 163177 - DNA, 3898 bp, Arabidopsis thaliana landsberg
atgctctttgtcagcggccacaacgagaacgtttcttgttcgaccaccgactgttgtcatgtcggcaaagagagtttccatctgaagagatttgagtgtcttcatgagatctttcaagagctctggccggtcctcgcagcaaaacgataccttaaagattatgcgtcgatcgtcgcctctggaacagtcctcaatgttgagtacactgatttcgtcagtctccgacggtattgtttcgtcggtgatttctagggtttgttgttttagttctttgactcgttgaaccacttttgctagtagtgtggatttgtctgtctgtgtaaagaaaattaaaacaaataaaggaaacaaggaaagagaaaaggtcagatcattagaatttgtcttgattcgagaaaatttgtcttgacgtttcaattgttttcaaatgagaaaaaaaaaagctcgataactttcccgacaaagtgattatcagcttcagagaaaaaaagggacttgtaagctttttatatctcctcaattttctagatattcccagtacttgcagcttttttataattcgaaaacattacatttgactgatgttagttttaaaatggttcattttctataagtgatatacttccaatattccacctttctcaccaataaataaaatcttagctagacactagactgtagtaacgtatatcacataagcaagattaatctgattaagacaaaaaaattgtcatttggatataaagatttaattaaaaacacaaaagtctggtgagataacatcaaaactttaatcctcatttcataaatcttttcctaattaaattatatgcatgtttagacgagtactgaagaatatgtaactttagaagttaatttcatatcttaaataacccaaagaattaatagtttcatcatgcttaatcttccatttttatcttctatgctttttataattttccggttcaagtctctatctaagtttcattataagtttagagtagagtagtgagatagtaaagtaaaagatttgtgtaccttggagttacaagagagtaacttgcggagcttgttgagatgggaattgattcttgctcttctctttcgctcagcctctttatggttcctcagagaagcaagagctttgtcttcataaaccgtggcaaaagggtcagacgacgacgtcacggtggtggaagtagacgaggcacataatcctccggtgaggaaggcataaaatatttgatctgaaatctctggctgcatttttttgttgctgttgtttgcttctccgccgcctccctttttgttgggtttggagctttctttcggtgggttctgtcctaaaagaatatgactatactataatttatacgaaaataagcttagagtgagaggagatgtatgtacatacatatttttttttgtcgtcgtatgtacatagatatatacttaggtgtttgtagaaatatttttaaaaaaaaaaattgaaaaaaggtttcattatttttccgcaaccgaacgattgcaattgtatgtttcataacatttttaatagctctagataacaaaaaaaattgggtagtgaagggtggcaactggcaaggtattggaatttttgtttacaaagttatcttaacataaaaaagaaatattttacaaaagcaaaaacttagaagaaattttttactatatatcttttaccaaataatatcatatcaaactttaataaaatttttgttagtatatctacacaacacatcaacaacttctatgtttcttcctctttaaaaggggatttattgaaagcacaattttgatatttctcatttgcatttttatgtaatggattttttatccttttctattgaaaagaaggaaattaattggctttaagactctgttttctacttggcccatataaacacaccgagggatatgattgaaccaagaaattgaaccagaacattaatcagatcggtttaagttcatactaactggttatcttcttctttgtggggaagtcgaagggtttgtgagatctcataactccggtgaatcctcttcctccagactccagactccagactccagatcttcagaatctacctcgcacgaaatctcgtaagtattagttggaaattatatttattagttattggagaaacttgataagcaataaaaagttttgacctaaacaagttatttgtaattagggttttaaacatagtctaatgttttttcgacctaaacagagacaatgacaaagaaggtttgttcatgtatcaacgagttgcccgacgatttgatcttgaagattttgtcattcgtttctactaaacatgttgtagtgacaagtcttttgtcaaaaaaatgaaaatctctttggacaagggtgcctatactcaagtacgatgttcgggatcacactagatttgaacgatttctcgacaagtctctgttctcacaccaatctcatgttctagaaagccttcatgtcgaattaagtgtgaccctgtggaataaagacattggaccatggattagaaccgcgcttcatcatcatcattgccacctccgtgagctagagatagatgcttgtattgtccataccgtattacctcctgaattgtttacctgcaaaacacttgttgtcttgaaactcaaaggtatagtgatcgatgtggaagctcctcttacaacggtctctctcccatccctaaaaactctgcacattgaccactcgagtttattcgactttggatcccttcaaatgcttttatccaattgcaattttcttactgacctaatggtcataagagaatctcgtttcttttttgctgagtacgacgtttcttggtgtaaaacacttatggccttgaaactcgaaggcttgaaggatgtgataagcatttcttcttcttccgcggtatgtctcccactcctcaaaactctccatgttgcccgcatggaggactttaacaatgattccttttgtcggcttttatccaattgccctgttctctccgacctaacactggaagaaaaaaccagtgatgttttgttgaatttggatatcgacatgccttacttacaaagattgtcgattatcacaagagtcgatgcagattccaagcatatttttagtttgatgaaaaactacactcgaaagcttgcgattattgcaccttctttcaagtacttcagcattcaagagttggcatatgcaagccgttaccggtatattgtacgggttaggctcggagttccatcaaaattagaggtaacttttttcattccatgtcgtttctttctcgtgttatatcttgttggaaccatcacataaatgaaatatcgtgtttttttttctttttttttttctaggatgcaagtaccttcagtcgaatcgtgcatctggagctgagcatatgtagtgaaagatctgtggaaatgcttgtagatttgctcctatgtttcactaaattggtggtcctcaagcttgaacatgtattcagttttctcccttttttcctttaccattgtaatttatactagtgtttaatattcgacctcaacgatcttattattaatagcagttttaccattttttctcgtgatcgcaggtttacttactaaccccgttgggtcgttgggaaccgccaagtttggttcccgaatgtttgttgtccagtcttgaagctctagagtggaaagggtacacagggagatacggagataaggatctggtgagttatctcctgaaccatgcgctttgtttgaaaacggcaaaaatcttctataagacatatccatgtgaagtggaagcccagcaacccattgaagaggacttagcttcaatgccaaaaggttcaaagtcatgtgaagttcttttaatgaa

SEQ ID NO: 163178 - DNA, 1007 bp, Arabidopsis thaliana landsberg
atgtcttcatcctttgtatataaacgcctctttttggtccctatcttggccgtggtggccatgcaactctcatttatacagagtgttttgtccctaaaccagacaaatgagtatctacaccatttatgccttaatcgtcaagggacatacgagtcaggtagtaaatacgcgagagaccttaacaatctcatccaaatgatctctatctcaattttaggtgacgttgtcgtctttagcggtgacaattccatctacgtcaagctccagtgccggggggactcctccacatccacgtgccgctcttgccttgacaccgccttctctggggtaacgtaatttgaatattgttgattagctgtcacgtacttgcaaatataaatgtacacacacatgcatgcacactagttttttggttgcaccttactatcctgtactatattcgggtggtttagttgttgattggcattttgacaatagtaccaaacgaaaccataaatataatatagtaccaaagaaaacaatagagcttgatttatgtgtcaatatatatgtatatatgacaggttagtaggagatgtctgaacaacaaaggaagaataatatggtacgacaactgtgttctcacaattttaacatttcatacgtatggcgagatcgattaccagaacaatttctatatttccaatgcaaaggatgtgagcggtgatgcaaaatcattcaacgagaagacgaggactctcctctataagctgaaggagaaagcaagtagtaaagaaaacatccccaacaagaaaaattacttatatgcaacaggggaggaaagtctcgggaagatgaaactgtacgcaatggtgcaatgtacgcaagacttatcaattaaaaattgtagtgtgtgtttgaactggattctggggaagcttcccaaatgttgcaacggtaaacaaggaggaagatttttgagtacgagttgtaattttaggtatgagctttacccctttgtaaaactt

SEQ ID NO: 163179 - DNA, 4359 bp, Arabidopsis thaliana landsberg
atggttaacaaagtcatcagacttgatgaggaaggagttttgagagatgaggatgggcaagcctacaatgaggctaatcagagattggatgagcatggaatcatcctccctgaggacgccaatgaggatcaggcgcgcctcaatgcgcaattagctgccagaaacgtagcagggctcggtgtcgagcgacaccaactaggtgtcgatcgacaccattgggagcagcaagcggatcaattggtgtcgaacgacataacagaggtgtcgatcgacaccaacaccagattcttgcagctattcctccagctgggaaaccacgtcgtaatcttggggatttcaacaggctagacctgttctatgctaatcgatcagcgattgaacccccaccattctaggagaacgactatgagctgaagccttgctactttgctttagttggcaacatcctttccatggcttatctcatgagcagccaatggatcatatcgagcgatttgaggaccttgttgtcagcatcaaggctaatagagtctcagaggactacctactgtgcaagctcttcccttattcacttgctggggaagcaacttcttggctgaagcaacttaaagcaggttccctcaagacttggagaagcatcaagatagccttcttgaacaatttctacgatgatgctaagtatgaggagttgagaaacaagctgtctactttcacacggggtccagttgaagctttcaaggctgcttgggttcgtttcaaggagtaccaacgagattgcccacatcatggtttcagtgaggtacaacttctaggtaccttcttcagaggagttgattggagataatagatgtgcagcgagcaatggtaacttcaacacatgttacctagctgatgctacatccttgatagagaacctcgcttgtagcaacagtaacaagaatgctgattttgagaggaagaagattgctggagctatttcaggaaatcagatggtagaggtgaatgctaagctagattcggttcataacttgctcacagggaagaagcatgtccactttgcagccgaggaagagactattgagcatgagcctgagtcaaaggaaggagtcttctatatagatggtcagggatacaggaagtttgggctgccacaaggcaacttcagtggcaacagatttgcagggaactagggttcctccaactacactccaaagcctgctttccagaagacttttcctcagaacaactttcagagaacctatggtaattcagcttaccaagccccccccccctccaccctcatcagagacaagaatggaatcgatgcttgagcagattctagagagccaaacaaagcttgttgtggattttaatggcaagtttgatgctgtctacacagatcttaatgggaagatcgacaatctaagctctcacttgaagaagctagatgtacaggtagctcaaactgcacaatctatcaagcgacaagagggttttcttcgtggtaatcctgatgctaacccaaggaacagctgcaatgccatcttgatcagagaaggagatgatgtttgggaggaattggacactaaagacgagttggagctcgcagttgcagagatagtgtcgatcgacaccatacgggactcttttctcagaaacgactcaatatgacggtgtcgatcgatacccctccagtgtcgatcgacactggatccggactgcaccctgtgaggtgcaaatacctatgcagatcgagtctgtctacactcctcctgtcccgtatccgaagaggcatcgttccaagcaggagattcatgctgctaagtgtacaaccataatggagaagatactccatactcttcctaaggatgcttctgagacatcttctccttcactcaacaggtatgtcaaacgacttgttgacaatggaattagctcatatgaagctaagctgcttaccagagatatcagtgcaatcatgctgcctaaggccaagaaggagaaggcacaaagagtagacatagctgagtacatcctcattattactcatggtcagacaactgagaagcttccagatccaagtagctttgttcttgattgctctatctccacaagcagattatgccgctctttgtgtgatatgggatccagcatcaacgtcatgcctaagtctgttgctgagagactaggcatgactcactacagacctactcgcatcactcttcctttcacggatcgttccaagcgaatccttgaaggaatccttgaagatgttcctgttaagattggtaactctgttatccgtgctgattttgtggtcctggactatgagaaggaacccaaggatccccttatccttggaagagcattcctagctacagctggtgctaggtttgatgtgaagagagggagaatctctctcaaggtttgtgattcggagatggagtttggcatggatggttcagaacttactaagcctattagttgcattgcgtccagcatagacacacctccttagactgatcagaatcccaccacagagccacacacaacgctccaacacgttgagctcgttaatgagagttgaagagcaacggtgttgatcgataccactacccctgtcgatcgcaccctcgggtttcatagacgaaaaattctgcacattctcttcaacccacaccactcaaggacctatgtgataagttctcttctctctcttctcctgtttatctttgattaattctttggattattcaaagactgcttcacatgataacaagcctagagttcctcgaaagcttgttcctcttattgttcttgcttgtgacgagacgagtgttgatcgacacacccctgagtgtcgatcgacaccagaagctgctccaactaaatccatttacacatccgccttggaaggcgaggaggcaacaacaatcctctaccagtccacccacatcttaaaccccaccaagtcaagttattgactcaaaacaagcgcttagtgggaggcaacctactggtttgatttttcttttccctttcttttcttttcttctatttttgatttatttcccccgctttctctggatttgaatgccactggggacaattgtcgtttaagtgtgggggaggttcatactaatattgcttttatttttgtttcttatcatttttcgttttgcagttcatttggttatttctttattctttcctaaaaaaaaaaaagaatgtttttttacttaagttaggaatcatgatctatatttctcttgtttattgcctgattggtgagtattgcaggttcgactcaatccgactattggaaaatctagatggcataccaacagacttgaagatatcctagtttccaacacaaccactaaggctggagctaatctcactgctcttctttttacctcttcaaacggttagtattcatatatcttgactccttgttcatacctaatattgagaccaatgtgatagaaagaatgtgttcctctccccttataaaaataaaaagaaaatgagagattgaaaagaatttcggatagtgtataggcgtaggaatgtttcctatgaccccattattatatattatttggaatgaccaattacaaaggttggaaaatggccgagggtgtcaatccagtatccgagttccccattgtttactctttaaaaaaaaataagtctggaggagagaaagaacaacaaagaaaaataaaaaaaaatatatgaagaatggtcgatttatcatggtatattacaggaatgagtctagaaggatcttgaatgttagcttgtttgatgagacccaacgatgaaagcctcgtggatatagttgtggaacttaggtatggaatctagaaagttgtgtaagcttgtagagaagtagatgttggttaggatttgattagacttgttaggcatgtggatttagtttggatgatcatggcaaaaggctacagagtatgggagttcctttgttttcaaaacctcttccacgggttcgacttttgtgttttgcttgagggcaagcaaaagctaagtctgggagaggttatatatccctatttttattgattttatctatgttttaggtataaaattttgagtcgttatgttatttctcgagtctttttagtgtcttttcaggtattctatgcaatgggacaacaatggagatgaggagacattttagagcaaaagcaaaggaaaaggaagctaaggacaatttcggattccagattcagagagagtgtcgatcaacaccagtttcggcccagcaaagtccatgatgctttcaaatttacaaaagtggaaatttgccccagaagacttccctatttgcattat

SEQ ID NO: 163180 - DNA, 7216 bp, Arabidopsis thaliana landsberg
  unsure (1)..(7216): unsure at all n locations
tctgttcctctttcttcctctttctctctcgtctattccggccgaaaataagacgcaggagtcgcatttctggtatcgtgaagtcacatccgacatctaagttctggtgagtatatttccgttaagtaagaattcgacatctaagttcaatcacaagtgattcccgtcactgaaatcgttttccgatgcttaacgatggtttttaatgatgcttaaagctggtttttaacgtcgtcgttgattgacatatggtggccgatttgttagatctatttgatttgacggctgagttactgtttgtttgccgactgatttatgatttatcaattcatctatgtctgagtttgttttatgctgtgattgagttatggtttaaccttacatcgatggatgagtttctgttatatgacggctgagtttgtttatgttatggctgagtgtctgttatgatatggttgagtatggtttatgttttgactgagttgttgttaggttatggtttgactcagtttgaaacttatggtggctgagtttctgttaagatatggttgtgttagatttatgttatggctgagttatgttatgtgtggcagagatagatttatgttatgactaagttatgttatctatggctgagctaggtttatgttttgcctgagttatgatgagtttgttttatgttatggttgagttattgaatgcttacggctgatttatggtttatcagatgtctgaagaccaagcaagggatgaccctccaagactttacccagatggggattctaatctagagggtaaaaccattgatcacaacataaagctgggagatttccctacaattaggaaaagatatatgggaagaactgaaagagacaccgctttgattaattgctaagcttgttgatagtcattttgtatggtctggtaagactgtacataatctaatatggagacagttgagaatactgaagaagaagctttggtgtatcgtggctggtaaacccatccggtttggattgaactaatttcatcatatcacgggtttaaacacagatgaactgcctacagaaaagtttaggcctgaagctgactacaaagtgtttttcagtgaattgcatgtgccaaccagtgaaggtcctaatctagatgaacttaggcagggcttagtaacgtgcagagcttggcctactgaaaagcgtagatggtttgggttattgactcttctatccattagactttttggcttgcatactaactctaggataccatttgagagtgccaaaagagttttcgacgacaaagccatgaagacttatccatggggtcgggcagcatatgaagcccttgtcgtctctataaagttgctgaggcctattggcaagacgtacaccgtcagtggtctggttttcgtgttgcaggcttgggcgtatgagtcaatcatcaccatcgccgagcgttttgggaacgctgttaacgcagatgagattccgttgcttagatggggtggcaaccgtacccgtgcaactatagaatcggtcattgctgaagatatcaaagcgaatggtggtgaggtacggtttcggctctgttatgttctgttttttatcaaatatttatgttacggctgagttaatgttttatttttctctgtgaaggctgagttatgttctattttttttggcaaatatgttatgtgacgaccgagttatgttctataatggctgagttatattaagtaacgactgagatatgttctgtgatgactgagttagcttaagtgacgactgagttatattaagtaatggctgagttaaacatactgatgggttttattatctctcctgttgtagctgcgtgttcgtacaatggttgaaaaggctgagttaagcgagctatttcatttttggccagaccaattagaagacccagcacttgataacttgatccaagacttacacgaggttaagcttgttaaaggttattgggatgtgaagacgagtgagaagaagaagaaactcttaaaagataaagaagcggaggtgtctgaatctcccgctaagaaacagaaggtctctcacagtgagcatgttgattctcttgagaaagatgcagaaaagaagaagaagaagaagaagaagaagaagaagaagaaggaagtagctgtcgaatctgatgaggacgaggatgttcgttctcgtgagcaggatggtcagggagaccagcagtcgctcgtggatgtggtgtccaacttgatctctcccttaaactctcgatttgacaccgttgatactagcataaaagaaatgtcctcccgtctggatgtgattggatgtcaaatcgaatcgagtgttgaagcaaagtttgaaggaaggtttggatcgattgagaacgatgtcaaacagattaaagagcagctgaaggccatagctgattcaaaatcacgcagctatattagagatatgtttttatccaaaccacagccccaaacgcaggaagacaatcgtaaggcccaaactcaaaagacaccagacgttccaaagaaaattacaaataaccaatctgctgctcctagtcctcctccggtaaacttttagttagttatgaccgagttaatatctgattattattcggctgcgttttaacttttagttagttatggctgagttatcaatattatacggctgagttatctgaatattttacggctgagttatataaatattttacggctgagttataaacgcttgttagttatggctgagttgttttcatgttataaatttagttagttagttatggctgagttatatgaatattatacggctgagttaaaaatttaattagtcatggctgagttatatgaatatgatacggctgagtttagttagttatggttgaggtatatgaatatgatacggctgagtttagttagttatggctgagttatatttatacataggtatgagttttcgttgtttaacgcctgagttttcgttacgtttatgcagtcgaaataagctgatgttggggtaagtaggaagcttgaaggagaattcgataaggtctccattgtgtctgattttgatttcgttgagactgtttctcctctcaatcgtcgtttacgctctaggaagccaccagccccaaatgtgccaaagcagaaaaaggagaaaacattaaatgagctaatctagaaaccgccagcgagaagaggaagaggaagaaannnnnnnnnnnnnnnnnnnaaggtgcctcctactgtgccaaagattacaataaagaaaccaaaaccatctgaggaagctaaggaaaaagctgaggaagctaaggaaaaagctgaggaagattcggatgtagttgatgtcacggataaggttatatccgagtataatgaaatgcttcctgagtctgatgaagatgaggaggaaacgagaggctaaagagtgtaaaagaaattcggctcaaactgttaagctggccccggatgggagctcattgattaaccccgaagctatgcccactcacatttttccagttattggagacaacgggctgagctgcatgagaaagggttgtctgccttcacgagcaatctatgatcctctggcaccggttgatccagccaaactgcagaagcttaaggcttatttgacaagtcccgaatggtatgaccctttatacattactaagttgttaaatacgacatgcttacactatttgtttatattaactttctttactatttgttagcaaacaatatttgcaaaatgggatggacgaggtgctgttctactctgttatcaaggccgaaagaaaggactagccagacgagaaacatggatggctgggtgatgatgtaagttattgttatattctgtctgagtttggctaatgttatggctgagttatcgtgtcgttctgtctgagttaaagtagataatggctgatttacgatctaagttattgttatattatgtccgagtttttctaaggttatggctgagttatcgtgtcgttctgtctgagttaatttagctaatggcagatttatttaggtgttaaggctgagttttacttggttacggctgagttaatgttgtgttttgtcttggttttatttttgtccagcacattgctgcgtatgtgaaagtcctcaccatgaggctcctgcgagatcccaccccatactacagcgaacgagtcatgattctagacccgtggttcacgtcaatgtggactagggattacacacagtgggcgatgaagccgatgagggtttctttcaaaggtaccacgtatgaaagttggatcaacggaacgggtggagaagacccgacaaacaagaagtggataacagatgtggataacttgtatactatcctccaaaccggaggtaatcattgggtgaccattcacgtggacttgcctaggggtcacgtggactgctatgattgcatcgtcggatgtcatacaccggaaagcgatggaaaaatccaggaacactgtaggccgttcacgaggatgattccacagatcatgagtgaaattatccctcccgcagtccgtgtcctgcaatannnnnnnnnnnnnnnnnnnnnnngggaccttaaaaaggtcccgcagaatactatcaccggggactgcggcgtttacacgttaaagattcttgaatgtttattgcttggtgtttcttttgaaggcattaatgattcaaatatccaggggctacgggttaggatggcaacagagctctacgatgaattacctaacagaatgcccgttcgtttttatgagacctgaattgcgtttttgaacatgtctgtgtcttttgggatttttagcatgtgattgtactaaatattgacactttaggattgataaccagaattatgtccgtatgaatctattattatgttaattataacaaaaaccaatgtaatggctgacttatcatcgctcgattcgttttacggctgagctatgctaacgtaagggctgacttgtcatcgctcaaatcgtgctacgactgagttatgataccgtgacagctgagttatcgttgtttaattcgatgtttagctgagttattctaatgcggtggctgacttgtcatcacacaaatcgtgtgatggctgagttattctaacgtggtggttgacttgtcaaacccaaacttccatcccatcaaagaaaccaaacgtcactgtaggactatacatacaccggtttacgacaattgaatagtcaagaacccaaacgtcgttagaggaccaaacgtcgttagaggaccaaacgtttgattcatagggatacaaaatgaaagaaaaaaaaataaagatcattaactcaagaaatgatgcttacatctgatatttcgtacggacaactgaaaaaaaaaattccgattgtaacaggatcaagagaagtggcaacgacaaccttagcattgcaatcacactcgatcggaacgcccttatcgcgcctcctgttttcgccgtacctcgttcgcatccttatttctatacggtcaagctcctacattaacacaaacatgatatactcgacgttagatgggtaacgatttgtactattcagatgtggagataaatacctcatcaatactagattcgccttggaaaagagatctctgagccatcatcttcactgcaattagtatggtactaaagcactggttctatatagtcctgtctgccacaaaatgtactaatcaaacgacggcgtatttgtattggctgaataaatttagaagtggctgacttgtcatagcattgcggctgggttttcactgatttgtggctgagttatgtcgtcatacagtatgttactacttagcgtgttgctttaggttggatttatcgagattatttattatatcattatcaagataacaaacaacaactttatggagaaccgccagtaatgatttggtccacatgcacaggtacacacgcccgcagttaatattcaaaataatgcaaacgagttcgaaattattccttaactaaaccctccaataatcaaataacgttacggctgagttattcattaagatttcgtgttttggccgagttatgagataccatatgttattatgatatatcaaaccagccaccaaattgttggttatattattagcttgaagatgtgcaatttgaaaacagaaaataacttttattttcagcaagtgtcgattgacaaaacatggtctgtcaaaacctctaggaagtatgttgttggatatagtatgatgttggacaaagtaggatgttggataaagtttataggatatgagctagtttcacggttccactagttggaatttggttatgatgtgttaattacttgattttcacaactgttggctcaagaaaagcactttcagggtttggccgagttataacaaagtgatggctgagttattcctatattgtggctgagttatgttcgaattctgagaaaaatattctccgctattgaccagatacgacgtcggtttgttacagagtctccattattgaccagatacgtcgtcgtagtgacacacttataaatccccaaaacgaaaccctaatttataaaattccaatttctgatttcagatccggagctccttcttgcttttcgtctccgaattttccagctaaaaattaaagaaatgagtagcaatttcgataactcgattgcgagtacgcaatccgtcagccgttggggacgtgggttaccatcaaagtgtcattgcggattagacgtggttatctatacatcgacgtcagcaaggaaccctggaagaccatacttccgttgtcctacgcgtaaagatgtaagtatataattgatttgagggttttattggtttcgttgttaattgcggatgtgattgaatatacaggaccatttgtttaaatgggtcaaaaatggtacatacgaagtggttgtagacagttggccgaaattggccggcttcgacagtgagttaagcgcggccaagtccgaggtttctgtcgagctagaagcgttacaggggatggtgaaagaactgaaggaagaagtgatgaggagcgaaagggaaaaccacaaatggaaattgatgatcaaactttgctgtttttgtcttgcctttattatcattgtcattgtttttggtatcttaatgttcccaaaaatcaacgaacagaggctttttctgggctactag

SEQ ID NO: 163181 - DNA, 2427 bp, Arabidopsis thaliana landsberg
atggatgctagtggtaagggcaaatcttctagaggtcgaggtaggggatcttcccctagtgttcgaggtaagggatcttcccctgttgctcgagtctcccgtggtcaaaatccaagaggacgtgggagtggagtcgtcggagcttcttctcagtcgtcgaaccctaattcgacaacacagtttgttacccagtctgatagaagtcgtccttcacagtatccaccagcaaaacaagcctagacaataacacccaaaacgacacctcctattcaacaaaccttgtctcctgctcttcaaccttcgcgttctggttctcaacaaccgcctcctgttcgtcagcgtcagcttactattcgtcagcgtcagtctcctcttcatcaacaaccttttactcatccgcgtcagcctcctattcaacaaacccttaatcatgaagagaaagatagaggggaagaaggggaggaagaagatggggaagaagatggggaagaagatggagtggaaaatggggaggaaaatgggaaagaagaacaaaaccctaatgtcgactaccaagatcgcttggatcgcttactagccctgccaggatgggaacgacttccactcctgtctgagaaacctatccctggaatgaagactctctagtaattgcgtgagctttgtttagtttagttgagcatagtttgattgttcttttagatatccttagtagaaatctaaatttagcttagtttagtttagtttagtatagtgtttgattgttcttttagatatcaaaatcatattgtgattgtgatttagcttagttttgaatgacacttgcaaatcgattagtcatatcctttagtatgaggaactttgtgtttgtgatttagtttagtttttgaatgacacttgcaaatcgattagtcatatcctttagtatgaggaacttcgtgtttgattgtccgtgtttaattatagatcatgtgtcgggtcaagtgatgatttggtcttcaagctttatttttgatttggtcttcaagctttgtttttgatttggtcttaaagttttgtttttgatttggtcttcaagctttgtttttgatttggtcttaaagttttgtttttgatttggtcttcaagctttgtttttgttttggtcttaaagttttgtttttgatttggtcttcaagctttgtttttgtttggtcttaaagcttgttcttaaagcctcatatcttaaagtttgttcttaaagcctcatgtcttgaagtttgttcttaaagcctcatgtcttaatacttagtcttttcttacaggtttaacaggcataaaggaaagctgtctagagtgatttcgggaatatttcggaggaagtttgatgggccttacttcagctggaaggttactccaatacacgttcaagagagatatttcaggacttttgcggtaatttcatttatgcattactctattacagcctactatatgtgacttagctgcttgttatgtagcgtaagtataattgggatcatgctattactgagcttgttaaagaagggttcttggttattgccaagaaacggatgaaagggattgtcagtcaagcaaagaggagtggaaaccaaccagattggattcgtactaccatttggaatcgcatgtgggagcattggagaactgaagaagctattgtgaagagtgagactacttcacagtctagaaactctgatcgtggaggtcttggagtgcacaaacacttagctggtcagaaatcttttgtgcaagttcatcaagaactggttagagtccattcacttaaccgattttctaatattgcttttgtgattttaactgtttcacttgcattgtaggaggaacttttgcagcgacctataacatatggtgaagtgtttatgaaagcacatacaagacctgatggatctattgtggatcaaaagtctcaaaaagttggtgaggcatatgtgaagagccttgaagagaggatgtctgaaatggacgtggatggtcctcaaacttctgattattcttctcaacattcaactcatcgtactgtcagccttgaagaaaagaatgaaatatttcttaaggtaatccatttcttttatgcttagaacctgattgtttgcttaattagaatctgcctgtttttgcattagtctaactttattccttgtcttcttgttttagtgtactcatagaaatagcaaaggcaacccttttggccttggttcgcttgtggagacattaaacaacagaaaaagaaaggagagttatgcgagctcgtctccatcaactattgcggatcttcaagatatctgaacacgatgagcaaaacgcaagacgtgatgaggagcaccaacaatctcaatctcggatatccagcttggagaagctagttcatttcatgaaagcaaaagatct

SEQ ID NO: 163182 - DNA, 1560 bp, Arabidopsis thaliana landsberg
atggagcatttcatcctcatctccctcctctgtttccctatcgtcatcttcttcatcttcttccccaagaattcttcttcagaatttggtttcaagtcgtatccgatcgttggaagcttacctggtcttgtgaataaccgtcaccgattcctcgactggacggtggaaactctgtctcgatgcccaacccaaacggcgatttttcggcgaccagggaagctgcagttcgtcatgacggcgaatccagctaacgtcgagtatatgctcaagacgaaattcgaaagtttccctaaaggcgaacggttcatctcgattctcgaggattttctcggccgcgggatttttaactccgacggtgagatgtggtggaaacagaggaagacggccagttatgaattcagtactaaatctctccgtgacttcgttatgagcaacgtcaccgtcgaaatcaacactaggtataataattcaatttcactttcaatttcaatttcgttactgagattttctcttttcaggcttgttccagtgttagcagaagctgcaaccaacggaaaattgatagatcttcaagacatattggagcggttcgcgttcgataacatctgtaaattagctttcaacgttgattcagcttgtctcggcgacgacggagcagccggtgtaaacttcatgcaggcctttgaaacggcggcgacgatcatctcgcaacggtttcagtctgtgatttcgtattcatggaagattaaaaagaaactcaacattggatcagagagagttctgagagaatcaatcatgatcgtccataaattcgcagacgagatcgtgcgtaacaggattgaacaaggaaaggtaagtgatcacaaggaagatttgctttctcggtttatcagcaaggaggagatgaattctccggagatacttcgtgatattgtcataagtttcatacttgcaggacgagacactacttcctctgctttgagttggttcttttggttactctctatgcatccagaggtggaagataagattctgcaagagctaaactcgattcgcgcacgaactgggaagcgaatcggggaagtttacgggtttgaacatcttaagatgatgaattatcttcacgctgctataactgaatctttaagattgtatccacctgtgccagtggacataaagagttgtgctgaggacaatgtattgcctgatgggacatttgtaggtaaaggttgggcaataacctataacatatttgcaatgggaaggatggagagtatttgggggaaagattgcgatcgttttgatcctgagaggtggattgatgaaacaaatggtggttttagaggtgagaatccttataagtttcctgcgtttcatgcgggaccaaggatgtgtttagggaaggagatggcttatattcagatgaaatcgatagtcgctgcggttttagagaggtttgtggttgaggttccagggaagaaggagcgtcctgagattctaatgtcggtgacacttagaatcagaggaggtttgaatgtgagagtacaagaaagatcttga

SEQ ID NO: 163183 - DNA, 1189 bp, Arabidopsis thaliana landsberg
agtggagactccaaacgtcagtctcttcactttcctacttcttcttctctttcatggcgttcgaagagagcttagtaatggtttcttctttgtcgagattgtctatatgtacgagctctgcttacgacgaagcagccacgaagaatcaaccagattcgtgtgtttccacatctctggagaatttcgacggagcagaggcggatggggaagtttccgatgatggagaaggaaaagagaacgttcgagagtcagattaccgacaagagacacgtgggtttaactcacttccggtgactccatctcgccggagaagaaaacttacagtttccggcgagttagatgcgaatgagagtaacaaacatggcagtaagtgtagtttacggaggcaaaggagggaaaagaagaaaaagggagttaacggagagtgtgacgtcggtggaagagaaggcttaacggtattgacgagagcaagaggtggagataggtcgttgaggatggggttacaagaagtgaaagcttgtagagatctcgggttcgaattagaggttccggttccgggtcggatatctgtgtcaacaaccgggatcgaattatcgacactcagactagtagcggcggcgactcacccatcgccacctgacgcatctccagtcccggtaagtaaaataatagtgaaatatgtttacttatgttttatttatgtttgaatttgtctctgaataaatttatgttattgaattaggtgatgatccaaaggaggtcaaggcgaggttgaaggtgtgggcacaagcggtagctttagcttctgcgacacgtcaagcttcttaatcatatatctacttctctgttttagttttttccttcttctttttgttgaagttatagacttagcgtttttgatgttttttttaagttatgctttatggggacgagtttttagagttggatttagttccttttcttgcgtttgtaaatacgataaacagtagttgttttcatggatgatgagattgtttcagtcagtagtgagagccgttcttagagggattaatttttttgcgaaattctatcgaacttgttaattgaagtataatttttttccttatagctaacactttatgcactaaatcgaacctacactatgttaacacgcgtgcgattcaatttggtagaaaaaggtgaaaattaa

SEQ ID NO: 163184 - DNA, 1014 bp, Arabidopsis thaliana landsberg
atggcgaatttctatggccgggtgtggaaggtgattgcaccggaacgagtgagagtctttctatggctgctggggaatcaagtgatcatgacaaatgaggagcgttttcgaagaaacttatgcgataccgaaatctgtcaagtgtgtaaaagtggggtggagtctataattcacaaccttcgggactgcccagcgatggtaggaatatggactcgcattgtgcctagagggaagagacgaactttctttactaagtctctttttgagtggctatatgataatctgtgtggaggtggggaagcggacggtagcatatggtcaactctattctccgttgcggtgtggtggagctggaaatggaggtgtggtaatatttttggttcagagaatagggtttggagagacagagtcgggtttgttaagaaggttgcaagagaggtgctcgaggcaaacgcgaactgtggtctcgctgctccgagagtgagtcgagtggaaagaatgataagctggcagttgccgttggtggggtggataaagttgaatacagatggtacttctcggggcaatccgggacttgctgctgcgggtggggtgctacgagatgaggcgggggcttggcgaggggtttttgccctgaatatagggcgatgcacatctccgcttgctgaactttggggggtttactacgggttagttatagcctgggagagaggtataacgcgacttgagctagaggtggactccaagatggtggcaggttatcttacgacagggatagaagactctcatccgctgtctttcgtagaacgtttgtgctatggcttcttatcaaaggactggttagtccgagtttcggatgtctatagggaagctaactgtcttgcggacgagttagcaaactatgcgtttagtttacctgtaggctttctttctttagacgcagctcctccgtttgtcgatttgattatgcgggaggatgctgcgggagtggctagggctaggcatgtgcccaag

SEQ ID NO: 163185 - DNA, 4482 bp, Arabidopsis thaliana landsberg
aatttgaacaatggaaggcatttgaggagtggagttccaaatcgttccgaagaggttgtctcagtcaaaagcaacgggatgatctctggcttctgtgttgatgttttcattgctgctctcaacttattaccttatgcagtcccgtttgagcttttagcttttgggagtggtcatgacaatccaagcaactctgagctagtgcgcttgataaggactggggtgagtacataagcactcttttagaacttgttttgatgatccctctgttagcataactcaataataagtatacctctttgttgatcaaaactctgtttgtaaaatagtaaatcatttcgattaatgaatatttaaagtttaatattttattagtttctcttcttctttttgtcactttcatcttcctcagtcctcacgcttgtacatattatacagtagacaaaagcttgaacgaaatatgaaggttgtgtctggctttttgatcaacctttgaatcaatttccaaaacccttaagatatacacttttttttatctcggtctctatggaaaagctttgattttgtgaatctgggtttctttctttctacatttagccaattatcactttttagggtatagaaagccaaaaatggtgttcacttgagagtttctttttgcgcactaacttgattgcgtgaaagctgagatttttcatctgagtggtatgtttagtatttgaaggagcttctcactgtgatgtggaagtaatcatatgagattagaagtgggttgggggaaatatgaaggatttgagtgagtgagagttgaatctgtgagtaccattacataaagaagatctccactttacacctactataatgggcactcaattacttcctccaccattgcctcatgcttagtgagagaaagtgacaggtcaagcatctttcttccctcaaacattctatatctgctcgtaatggtggctaaattcagtgacttgaccttcctctcttttttactttgtgaaacaggaatctcctgaaattgagaagatgaagtggtttctgcttatgctcatcatctgcaatgctgttcctttacaaggactcaccaaaattgtctctgcgagaccccaagttgtgaacatcggttcggttttcacatttaattctctcattggtaaagtcatcaaagttgctatggatgctgctgttgaagacgtcaatgctagccccagcattcttaacaccactacacttaggatcatcatgcatgacaccaaatacaatggattcatgagcatcatggaacgtaagtgagacaactctgtgattattggatgattattatgtgtttgtctgtcgaggttcaatcatttcctttttatgttttgctcacggattattcgaaaggtctctactcctctggtcttctttacctttgaatcaactttttatgctcgctgattcattttcatgtcttggattgttctgctatctactttaggttatgatactgcaacatgcaagtatactcatgtccatattctggtatccggttaactgactgattgttttatgtatcatattaaaagctctgcagttcatggaatctgagacagtggccataattggccctcagagatctacgaccgcccgtgtagtagctcatgttgcaacagaactaaaaattcctatactatccttctctgccacagaccctactatgtctcctctgcagttccctttcttcatcagaacttcacaaaatgatctctttcagatggccgccatagcagatattgttcaattctatggttggagagaggtggtagcaatatacggcgatgatgattatggccgaaatggggtagctgccttgggagacaggttatcagagaagcgctgcagaatctcatacaaagcagctttgccccccgcacctaccagagagaatatcaccgatttgctgattaaggtagctttgagtgagtcaaggattatcgtcgttcacgcttctttcatctggggcctagagttgttcaatgtggctcggaatcttggtatgatgagcactggttatgtgtggattgctaccaactggctttctacaattatagacacagactctcctctcccattggacaccataaataacattcaaggggtcattacactgcgcctgcacactcccaactctatcatgaagcagaacttcgttcaaaggtggcataacttaactcatgttggacttagcacttatgcactgtatgcttatgacactgtctggctgcttgctcaggcgattgatgatttcttcaaaaaaggtggaaacgtttccttttcgaagaatccgattatatctgagcttgggggtggaaacttgcaccttgatgctctgaaagtctttgatggaggaaagatatttcttgagagcatcttacaggttgatagaattggcttaaccggtaggatgaagtttactagtgacagaaaccttgtaaatccagcatttgatgtgcttaatgtcattggcactggttacacgactattggttactggtttaatcattcaggcttgtctgtgatgccggctgacgagatggagaacacatctttttcgggacagaagcttcatagtgttgtctggccaggacattcaataaaaataccacgtggctgggtgttctcgaacaatggaaggcatttgaggattggagttccaaatcgttacaggttcgaagaggtagtctcagttaaaagcaatgggatgatcactggcttctgtgtggatgtcttcattgccgctattaacttatgaccttacgcagtcccatttgagcttgtagcttttgggaatggtcatgacaacccaagtaactctgagcttgtgcgcttgataacgactggggtgagtacataagcactcttttagaacctgttctgttgatggctctgttggtgggtgtgtatttgacatattttgtggctcaaaaatctttttcacaggtctatgatgcaggtgttggtgatatcaccatcataacagagagaaccaaaatggcagattttactcagccgtatgtggagtcagggctagtggtggtggctcctgttcggaagttgggctccagtgctatggcgttcttgaggccgttcacaccccagatgtggcttattgcagctgcgtctttcctcatagtcggtgctgtcatttggtgtcttgagcacaaacacaatgacgagtttcgaggccctcctcgtagacaagtgatcactactttctggtgaaaacataataagctccaactggatgaacgtaattccaaacactacaattttttctctgaaatatgtcgttgtttacttgtcttgcaggtttagcttttcaactcttttcttctctcatagtaagtgtactgcccacaccccctattctatcttaagttgttttccatttttaaattggtttccaattttctctgctgaatttatacaggagagactaccaccagcaacctaggaagaatagtgctgataatatggctattcgtagttctcataattaactctagttataccgcaagcctcacgtcaatcctcacagttcatcagctgtcttcaccaattaaaggcatagaaactttgcaaacaaaccatgatcctattgggtatccacaaggctcctttgtcagagactatctggtccacgaactcaatatccatgtgtcaagacttgtccctctccggtctccagaggaatatgataaggccttgagagatggtcctgggaaaggtggtgttgcggctgttgttgatgaacgtgcttacatagagcttttcctctcaaacagatgtgagttcggcatagttggtcaagagttcacgaaaaccggatggggatttgtgagtattgttctgaatataaacaactccctacttgtttgatgatagataattaaggaagaaacatcaggaagttcttccatgcataactttttagaatttgataatgcgatagtgatttatgatatgtattttttctctcccactgttcaggcatttccgcgtaactcgccattggctgtggacgtctccgctgcaattttgcagctatcagaaaatggagatatgcagagaattcggaacaaatggttgcttagaaaagcttgctctctgcaaggcgcagagatagaagtggataggctggagcttaagagcttttggggattatttgtggtgtgtggagtggcatgtgttcttgctcttgcagtgtatacagtgttgatgatacgtcagtttggacagcaatgccctgaagaagcagaagggtcgatcaggagaagaagctcaccatccgcgcgtatccactcctttctctcctttgtaaaagagaaagaagaagacgccaaggctaggtcctctagggaaaggcagcttgaagatatctctgcaaatggttcaagtcgctgcaactaaagtatttccagcaaattagtt

SEQ ID NO: 163186 - DNA, 4864 bp, Arabidopsis thaliana landsberg
ataggcaccctcatagtagaaggtcagcagagagatctttcgacagagctcccagcagagatttggtctctcactacccgtcaagaagaagcagctattacccaagaaactcccagcaaccgtggagagaaaaacataagagtgattttgcatcccagtttgaactctctgattcctcaagaagaagacgtaccaccttggagaaaaatgtaaaaaatattggtcaacaatcatcatatccctttcaggccaaccctgctactagaagaaggctaagtccaatagaagttggatccccccctcagattatccctacaaaagaacaagttatgagtgaactacaagaagtcacagtccaatatataacatgtgcagaccctacagaaagtgcagctagaaagcaaagagtgctacaaggtgaggcaaggaatttaatggccaatacagctaacctaataattcaggcagcaacagtttctacttcctctacataaccaaacgaaataatcaatcaatataaagagagactcaatgtcatagaagaacaagttcaaaactcagtccccactggggaacacacaaagagaagaagaggcagaccacctttaaaaaatggcactaaaccagcacccaaattacttggagttagcccaaaagtgaaaccttactactggatcccctaagaaaactccacattagaggtgctctccacagaaagtcactaacctagcggacccaagtactgtcaatcgggacccagaagagaacctccctccctcaattggtccaatttccaaagctggttctactaaaccacgaatacctgctgccccaaagatcaaattgatccttgcaagcataaaaaaagatggtggatatttagaacccgccagcccctattctttaagaatggtaagctagaactgttgtgggctggggaatcctataacagttcgcagactcaggaatatccatagccacatatctcctgacatactattccttatagagactaagcataactctgaaattgtcctaaaaaactagaatggatggactatacctcatatgcgtttgagtctccagtaactccgggagcaggggagtggctctttttaggaaaaacaagtggagttagaaattctcagctcttgtctacactacatcgataccaaaattacgacaaaggggaaaagcttctatgctacattcatgtatggagagccagacagaaccaaaagactacaaatttggacccaaatcaaagatcatgctgcttctagaagtgacctgtggatactgactggtgatttcaacgatatcattaacaacaccgaaaaaaagggaggaccaatcagataatagggctcctttgtagatctcagaacatttatatatatatgacctgaactacactagaaatttcctttcatggagaggtcatgatattctcacctggttaaatgcagacttgacagagcaatgaccaatagcgcatggcctaaagcttacccttttggaagaagtgaatacttgcgttttaaagggtcagatcacagacccgtgggtgtatactttgaccctgttaaaaagagacaacaaggttaagcagttggtagtcactgcttggaactctgatccctccgacacagtggagaatataatcattacatgtagaatgataattatcaagtggaatagagaaaaacacaataacagccagtcaaagattttgtcaagtgattcaactacttgagacaaaatctccaatattaataaagaactgctactggcctatcaaactgatgaagagttttggaaacaaagaagtagacaactatggctagcccttggagataaaaaattcaggctatttccatgtagctactaaagggagaaaagctataaacaatatttcagtcctagaagatgataaaggagatactatttttgaagaggaaggaatagaaaaagaaatctcaacttactatcaatctctattcacttcccaacagggcgatagaaccaccactgttcaggaatctatttctccatgtatttccccagaggtgaatgcatcccttatccatgcacctactcaaaaagaaatgaagaatgcttgtttcgccatccatccggataaagcccctggacctgaaggtttctctgcaagcttctttcaagcaaattgggctacaatggggccacatatcataaaggaaatccaagctttcttctcctctgggatcctgccaagtaagatcaatcatacccacgtcagacttataccaaagattacaagcccaaagaaagttgttgattatagaccaatagccctatgttctgtttactacaagatcattgctaaactgatatccaaaaggctgcaactagtgctacaaaggatcatttcagaaaatcagtcagcttttgttacaaagagggctatattagataatgtactaatcacacatgaaactctccactatcttaagacctctgatgcacaagtaaggtgctatatggcagtcgaaaccgatatgaacaaagcctacgatagacttgaatgggattttattcggctgagttctagagagaatggggtttcatggccaatggattaactggataatgcaatgcatttctacagtcacctactcttttctcttaaataattcagcacaaggttccattgtacctcagcggggaatcagacagggagaccccttatccccttacctgtttatcctttgcagcgaggttctctctggattatgcagcaacgcccaagtggatggctctttaaccggtataagagtggcattgggttgtccacgcatcaatcacctactgtttgcggacgacacaatgtttttctgcagatctgatgagaagagctgctttagcttgcttaatatccttcagagatatgagaaagcttcagggcaaatgattaataaaggaaaatcggctattaccttttcagctaaaacatcagatcctgctaagtccaaagtccatcaaatcctgggaatgcaacaggtgggaggtttaggaaagtatcttggacttcctgaactttttggaaaaaagaaacgggacatgttcaacctgattatagacagaatccgacagagagctctgtgctggtcttctcgcttcttatccacggcggggaaagccaccatgttaaagtctgttctgtctgctatgccaacttacaccatgttttgcttcaaaatcccagtctctttatgcaaaagaatccaatctgctcttactagattctggtgggattcttctgagacaaacagaaaaatgtgttggatttcctggcaaaaactagttcagccaaaaggagaaggcgggttgggttttagagacataccttgctttaatgatgggttgttagcaaagatcagctggagaattctccagaaaccctcctgtcttctggccaaaatcctgttgggtaagtattgtaggtctgttccttttctagactgcaatgcccctggaaatgcttctcacggttggaaaggaattcttattggtcgagaccttctcaagcatcatctgggaaaagcaatcgggtctggctccactaccttgctctggtccgaaccatggatttcgctttctcagtcgattactcccatgggaccaccaacagagtcaagtcagaaccttacagtggatcacctcatatgccctacaaccaaaagctggattattgagagaatgctactccctgacctggaacaggaaattctttctattcgaccaagcaaatcaagactgttggataaatttatctggctactatcaaagaatggagattacagtgcaaaatctggttatcaagcagccttgatgtttaaggagaacccggttcctccttcattcctatctggattcaactggttcaaagaggtttggaatctaaaatgtctgcaaaaaataaaattctttctttggaaagctttagcaggagccttaccagtgggcgagttgttgcgctctagaggaatcagagctgagtcttcttgtccccattgccaggcggctgaaacctgcctacacctcttcttccattgccctttcgcaaaggagatctgggctgcagctccttttaaaagtacaattaaccctcttcggatttccagctttcgttctggaatcgagggctccaaagcctggactaccttacctcctacgggtttaggttcgaaaccccttgccccttggattctctggaccatctagaaatgcaggaataagaaaatctttgaccaaaagcgcataccgacctctgatgccctgtcacaagccatttctcaagctcgagaatggatcgcagctcagccacaacgccccaacctctggcacccatttcaccggaagccttccgcctccagtttctcctgagacaatgatctgcttctcagatgcggcttggcactccgacacaaagatggcaggttttggctggatcttcttaaatcaggcgtccaagctggagatccaaggattcggcaccaatttgaatgtaggatcttctctcttggcagaggctctggctctctactctgcccaacaacaagcgctcgatctcggtttcaaaaaactccactttgcttcagattcgcaactgctaatctcagctctcaattcagggtcctcctccaaggaactctacgggattctacaagatatcctttcacttgcgttgaattttgaagaaatttccttctcctttgtttatagaaaacttaattcccgtgcagatgcaattgcaaaatctgctatcttggcacttattgtaccggcctctgtaacatctaccccaccggttcacatttaa

SEQ ID NO: 163187 - DNA, 2625 bp, Arabidopsis thaliana landsberg
aaggctgacagagcatccgagcggaggcagaagaggtcgagagctaggatgggcaagcctacaaggacgctggcaaagattgggtgatcatggactcatcctacccgaggatgccaatgaggatcaggccgcctcaagagcaattagttgccagagacgcaaagggctcggtgtcaagcgacaccaactgggagtcgatcgacaccttcgggagcagaacgcatatgcgattggtggcgagcaacacaacagaggtgttgatcgacaccaaccctagatttctacagctattcctccaattgcggaatcacgtcgtactctcggggatttcaacaggcctaacctgttctatgctaatcgatcagcgatcgtacccccacccttccagaggaacgattatgagctgaagcctggctacttcgctttagttagccagcatccttgacatggcttatctcatgagcagccaatggaccatatcgagcgctttaaggaccttgttctgagcatcaaagctaatggagtctcagctctgatagagaacctcgctagtagcaacagtaccaagaatgctgactttgagaggaagaagattgttggagctatctcaggcaatcaaatggcagctgtgaatgctaagttggattcggttcacaacttgcttacaggaaagaagcatgtccactttgcagctgagaaagcgactattgagcctgagcctgagtcagaagaaggagtttgggcagccacaaggcaacttcaatggcaacaggtttacagggaaccagagttcccccaactacactcccaagccggctttccaggaaacttttcctcagagcaactttcagaggacctatggcaattcagcttaccaagcccccccccctccaccctcatcagagacaagaatggaatcgatgcttgagcagattctagagagccaaacaaagcttgttgtggattttaatggcaagtttgatgctgtctgagctctcacttgaagaaactagatgtacaggtagctcaaactgcacaatctatcaagagacaagagatttttcttcctggtaatcctgatgctaacccaaggaagagctgcaatgccatcttgatcagagaaggagatgatgtgtgggaggaattggacactgaagacgagttggagcttgcagttgcagagatggtgtcgaccgacaccctcctgtgtcgatcgacaccatatgggacgcttttctcagagacgactcaatacgacggtgtcgatcgatacccatctagtgtcgatcgacactagatccggactgcaccttgtgaggtgcaagtacctatggagcccgagcccgtttacattcctcctatcccttatccgaggaagagtcgttctaagaaggagattcatgctgccaagtgcacagccataatggagaagatcctccatactcttcataaggatgcttctgagacatcttccgcctcactcaacaggtatgtcaagcgacttgttgacaaaggaattagcttagatgaagctaagctacttaccagagacatcagtgcaattatgctgcctaaggccaagaaggagaaggtacagagagtagacatagctgagtacatccgcaccattactcctggttagaccactgagaggcttttagatccaggtagctttgttcttgattgctctatctccacaagcagattctgccgctctttgtgtgatctgggatcaagcatcaacctcatgcctaagtctgttgctgagagagtaggcatgactcactacaggcctactcgcatcactcttttcttcgcggatcgttccaagcgaatccctgaaggattccttgaggatgttcctgttaaggttggtaactccataatacctgcttatttcgtggtcctggactatgagaaggaacccaagaatcctcttatccttggaagagcattcctagctacagctggtgctaggtttgatgtgaagagagagagaatctctctcaaggtttgtgatttggagatggagtttggcatggatggttcagagcttactaagcctattagttgcattgcttccaacataaacacacctccccagactgatcagaatcccaccacagagccacaaaaaacgctccaacccgctcagctcgccaatgagagttgaagagcaacggtgttgatcgataccactacccctgtcgatcgacaccctcgggtttcacatacagagcattctgcacattctcttcagcccacaccacttgaagacttatgtgataagttctcttctctctcttctcctgtttatctttgattaattctttggattattcgaagactgcttcacaagataacaagcctagagttccttgaaagcttgtttctcctgttgcttttgcaggtgacgagaagactgtcgatcgacagaaccggctccaaccagatccatttacgcaccgccttggaaggcgaggaggcagcatcaatcctccaccaccactccacccacatcctgaactccgccaagttaagctattgactcaaaacaagcgcttagtgggaggcaacccgttggttagatttttcttttccttttcttttcttttcttttctttt

SEQ ID NO: 163188 - DNA, 8962 bp, Arabidopsis thaliana landsberg
gatctcaccaactcaatcccagagtaaatctacttgatcatagctctcatgattatatttataaagatggagggaatgatgttgatccaactttggttatggttgcttcaaaagttgggggtgaccgaaacagtgtagttgaagtaagtcttatctctgagtatcagtgtttcttccactgcttaactggacacaagtattaacatgtataatttgtatcttcattcttcactctcgtgaatcttgctatatagctttgtgcagaatgtcttgtactatactaactatattgaattatacttcgttttgaatgtcttgtaccaaacagaaccatatattgaatgattgtacatcttgtttctaaacaaaacctcttcttcttgtttaacaaagacacaaacaacatttattcttgtttttactgcatttctattctctcctatctcattcctctttatttacttgctttcacatggtaaggaattgtgaatatatggtctcagtctctcatgttagacaaatttcttctaagattatcatcgctagatggaggaaaatgttcttagcattggattttgtttttatcaaaaaaggaaaaaatgggttccttcaaaagcacagaaatttgatcaattgtttcaattaaacttaaatacaaattttcaaagtgaaaagcaagatatatatgaaaccacattcaaacatttctcctggttattatttccacattactactctaaactcaattttttagaagatttcaaatcatgtaatggcactacaacaaatatcaacattgatagcactagcggatagctcattttctgttcctgctatgttttttttttttttttttggattttattataatagcgttgaataaaccctatgataggaatttaataagcgggaatctaaaatgactttatccgccaacacttagcaaaaaaacacttagctaattcagttccctctacagtcacttaccccaaaacccttaagcgcgagaacagtaaccaaacccaaagctcttcagtctctcaaaaaaacaattccgagcgacagagagatttatcaccaatttacctcaaatctcaatcctcaaagctcattctcaaggatcgaagtcgtattaagcctgtttgtactccgccgtggcctaatcttcactcgcagcggccgtcagagagttaaaaccaaggcatgtcattcttcgtttatattccttttgagtttttggttaagattgtctctaatatcgatctagttcagtagattgctaaggaacatcagatttgtttttcaatttgaaattagggttcttcgattagtttgaatttagggttcatcggtttgtttaaaatttagggtaaacaaaaaacttctgcgattatcatgtctgtttaacatttgaatccacattctcttcacaaagatcttgttttgtgatatagattttgcctaatcgatttgttatcagtttttttttttaaagctacattgtattatcttatactgattctgcatttttttggcaagtgttggtgattgaaatattttggaactgaagcttggctttgttatactcaaacgacaggttagtcattgtggctttgattcttgattgtaaatggtatgaatgttttggttttgcagtgactgttttggttttgttgaacttgctgtaactgttttggttttgttgaacttgctgccacagttgttgttttgttaaagctgttgtcattgttcttgtttcggagatagtgtaagttgcttaatgcttagtatgtctttagcattgtgttcagtttaagttgtctcttcatgataagttgtctgataagttctcttactcgatttgttgctctatgactgtgactgttgccgattatggtttcaaattatcttaataaggcttttttaagcttataacatataatgtcagacaagtcttgggtgcctctatgctggcaatgaataaaagtatatacatagggtcaatttaaaacggggtttagaacattgcttgagttttttttccaactttatttcttcattgaagagctgatcctggttatgagagaggtgctcggaggtttgtatttgatgtggctgcggctttaggagatatagttaagataatatgtccatgcaaagactgtcgtaatgtgtactgccactcaagtagtgatgtggtggttcatcttgtaacgagagggatggatgaggcttacaagctgcaaagtgattggtaccatcatggagactcagtagctgatggagaatgtgaaagggaagtcaatcattcgaatgaggaaattcatgagttatacaaagctgctgaatacaatgaccaagacttggctactaatggtgatgtaggtgacaatctagtggctaacttaggtgagattgcagagggtgaggacaagagagaagatgagttcctagccaaggtagcagatgcagaaacccctttatatcctgattgtttaaaccacagcaagctatcagcaattgtgtctctctttaggcttaagaccaagaatggatggtctgacaagagctttgatgagcttcttgagacgctgcccaaaatgtttcccaaggacaatgtgcttcacacatcattgtataatgtgaagaagtttcttaaacctttgatatgggttatgaaaagatacacgcttgtgtaaatgactgctgtttattcagaaatcagtttgagaagctcgacagttgtcctaaatgcaattcctcacgatggaagattaacacgcgaactggtgaggtgaagaaaggtaatccacagaaagtacttaggtactttccgatcattccacgtctcaagaggatgttcagatcagaggacatggcgaaagacttacggtggcatttcagtaacaaaagcaccgatggaaaaatgcgtcatccggtagattctgtgacatgggatcaaatgaattagaagtatccatcatttgctgcagaagaaaggaatgttaggcttggactctccacagatgggtttaatcctttcaacatgaagaatgttaactatagtgcatggcctgttttgctagtcaactacaacatgccacctaacaagtgtatgaaagaggagaacataatgttgacattgctgattcctggtccaactcaacctggaaacaatatagatgtgtatctagaaccgctaatagatgatctcaaccatctgtgggaaaagggagagttaacttatgatgcattcagtcacacaacattcacgttaaaagcaatgcttctgtggaccatccaggattttcatgcatatggaaatctagcaggctgcaaagtaaaaggcaaaatgggttgtccagtatgcgggaagcacacagatagcttgtggttgagtaattgcagaaagtacgtgtatatgtctcatcggaagtctctgtcacccacacatctttataggcgaaagaaagcatggtttgatggtaaagctgagaatggaagaagaggtaggattctgactggtcataacatatatcaactcctaaaaaaatacaagaatgattttggaaatgtaaaagtaaaagaaagaaagatgaagatgaacgattgtactggatcaacttctggtactgatgatgaatccattgcatcagaagaagaggaagaacaattagatgaaggtgagctttcaagatggaagaagcgctcaatcttattcaagttagagtattggaaggtatgatttattatcaaagttattcaagttcagattatttggagtaagttttgaaaaataaatgtcgtagccatttaagttattatctgttactattttgtctaggaaatgccggttagacataacttagacgtgatgcacgtggagagaaatgttgctgctagccttgtctctacaatgctgcattgtgggaagtcaaaggatggtattaaagctcgaaaagatctgcaactgcttggtattaggaaggatttacatccccaagcccgtggaaaaagaacctaccttcctccagctccttggtctttgtccaaaacagagaagaaagtattctgtaagcggttatttgacttcagaggtccagatggccattgttctaatatttccagatgtgtgaagatagaagattctactgttaaaggacttaaatcacatgattatcatgtgttgatgcaacaacttcttccagttgcaatcagaggtataagatgaattcttttagctgaaattcttgcataatttgatgtgttgtttttaatcttcaatgttatccatttataggtttgttacctaaaggtgttaggatagctattggacgcttgtgtgcgtttttcaacaaactgtgtcagcgagttattgacagagagacagtttctacaatggagaatgaaattgtggaaactatctgcatgtttgagaggttctttcctccaagtttctttcgatataatggtgcatttgacagtccacttaggcagggaagctcgtttaggtggaccagttcatttcagatggatgtatccgtttaaaagatatatgaaagttttgaaggattttgtgagaaacactgcaagaccgaaagggtgtatagcggagtgtaatctagctaaagaatgcatacagttttgtagtgaatttttgaagaagacaacaaatgttcaggaaagtgttgatagaaacactgagtatgagagcaactctatacttgatgggcgtccaatctcagcaggctcttatattaatcttactgaaatggagacaaaaatagcccatatggctgtcatccagaatatggcagtctctgaatcttatgttgagtaagttccaatctcaataggctcttatattacttagctatatatattttacttatccatatggctgtctctgactacttctaatttttccttgtattagtgagcatctgcaacatctacaagactcaaatgtaagatgcagacgtgatgcatcacacttatggaacttgcacactcagaattttgcttcatggcttaaaaaactggcatgtttataactcacacttgacacttaaacactatactttatcgataagcatataggtgtctgatattttttttttaaatttgttagatacctcttgattcaaacagacatgaagaaacacttaaatagttagcttatggtccacgtagttgtgcaaagacatattctggttatatagtgaatgggcagcgatttcatacaagaacagtggataagaaaactcagaacagtggtgtgtactatgaggcatctgctatctgtaggtctagtgcaaaagacacttctcaagtggtcgatttggtttcatactatggctgcattactgatattatcgtgctggattataatgtcttttacgttccattgttccgctgcaactgggcagtaaaaagtaatggagtgaagcaagaggatggttttacacttgtaaacctgaatcatagtcaagactcatttttgagggctccatacatactagcctctcaagcaaaacaggttttttacctaagagaagatgactcatcaccctggtatgttgcattgagaggttcttcaagaagatttagtcagaaagagtttgtagattcagttgcagccattggcacattgccaccaaatgttgacatagacgctgacttggatgaagctgagaatgagaggactgattgtgaaggaatttatgtttgtgaaatgtagttttttttgcttcattttcattccttgttgcattctctatgtttgatgtctgtttcccatagtgtgttcaatgtcttatttgcatcatgtgtacttaaccctttactctttcatttttctcatgtgatttaagatgggacaataaaagaaaaagcgaggtaaaagtaacaaaaaaaaggtcaatgcaaagaatgccaatgatgaggtcgagtatattggaacaattgaaccacaagtcaatgatgaggaacatgcagaaccagctgaagttcaagtatcagatgcagatcaagtagcagatctagatcaggtgattgatggagatcaggtgaatgatgaagatcatttggaaccagatcaagtagcagatccagatcaggtggttgatggagattcggataaggtcaatgaggaagagcctcacgaagagcttgttttatcttagggtgatgtttatgttgagccaaagcgtaagcgacatcgaggaccaactaggctgaaggatattgccaaggatccaaatgcaagagtaagagtagagttcgctaacatgggagagcctattggtaaaggctcagttaagctggcatcatatgtaggggcattggtaagagaacacgttccagtcacaattgaacgttggagtaaaattggtgaagaactcaggacagttctctagaaatctgttcaggtaagctttgtgtaaaatttacaagtttattagatattggtgagtacttgactgttttgtttttgactgcaggcaaagtttgaacttgatgaagagtaccaaaaggttacagtgcttaggcagatggaatgtttgtggaggtccttgaaatcaaggcaagttacaaacattagagaagctaagactaaccaagagaggataacatgcgacccaaaaacatttcttcttttgattggcgtaaatttgtgaagctcaaaactagccaagaatttaagatatgcatttggaatttgtaaatttatctatatacaatagaaattaacattcatctgttaggttgtaagcgatagctacaaggaaagaaggcgcaatcagattccacatacttgtagtcgcaggggaatggttagacttgccgaagacatggtaatagttgtacacacttatattgttcatattgctcagcctttttccaaagtccaaacacttatgtattaactaagatcattttttggtttagaaaactgctaatggagacccatctgaagtgacaaggctaaaggtttgggttaagtcacgtactaagaaggatggtacaccagtgaatacgaatgttgctgaaaagattgtgagttattgcttcgtttgatttgcaatttggcattttgaatgacacttgatattttaaaatgtatcttatgtgtttcagaaaaaggcagaagagattgttaacagtgataatccatcaacaaatgaagcacaagattcactaagccaactgttagggcctgagaatcatggtagactgagagcaatgggttgcaatatgaataagaccaagttagcttgtttccaagtgatgcacaagtgtatggctgaaatgcaagagaatcagcttcatctacaaaagaaggtcaatgagctacaagaagtaattaagaaaatgaagaaccaggttagtgcacttatctatttatatataaagacttacggctcaattagtacataagatttgactttgtttttctttttttgtaacagagacaatcagctgaagtaggtgaaaactcagctgcaagagtaagtcactcatatcatatactttgatatgctctaacagatacactaacttaatactttgtctattttttacttttacagagtgtgaacaaaagaacacaaccaaaatgtttcttacttgattggcatggttctgatgcaaaagttgttgagggatgtattatttcttctgatccgggtgaattagtgaatgactgtcgcttaggccctacggatgttaaagttttgattgacactgctattgaaccagaagcattcctttggagacatgcgactaatgtgttcaccattgagaaagctgttggacatatgattgcatggcctgctgctatgtgtgttagcctagaagaggatctccaaccagaagacaatgcaggccaggtaaagtttattattcagtctcattctcatatatagagtaatgatcttctattaacataatgaatttctgggtttcaatgttttttacagggaccaaataacaaatgccagcttttggatttgtcttcaaatgatgttgttgttgcagaaggacattggcagacacaagaaccaaatgcattagtcaatgggcttcctctcggacctgcagcagtgaagatatttgtcggtgcagttcttcaaccagagacgtttatatggaggccaacgatggatgtgacttatcttgaggactgtttaatgtcttttgttgcatggcctatcaacaaagttatctttaaaaaccctgcagatgcaacatgccagaaatctccacttcagacttctgctgccagaggaaaatcaccattggaagcagcagcatcagtaggcaagtttgcagcatcagtaggcaagtcagcaggatcagtaggcaagtcagcaggatccgagaaagcagtagcgtccgggaaagcagtagcatcaagttcacaaactgcagcagcaggttataagccatcccctgagatatctacaacaaaaggtacaaaatccgttgcaacagtttcaaaggccatagctgagaagtccatagctaaaggttcaaagtctcctgtcaagaaaagtcagctgctggattcacaactccctctgagaagatctccggtattttgtatgttgttattacctagctattgaatatggttatttttctgcatacattaaaactggtttatattgtaacatggcagcataaaagtgtagctgaagttatcaaggccaatcaaaagtgtaagttaatggatatcagtggaaggaagcaggtggttgctgaaggacgtgtgcattcagtcgacccagaccaaaaggtacaccatgttcgcttgggaaataatgcagctagagttttggtggatatagtgaaaatagatgatgcagcagtttggagggcatcagatgaaatcgagtatatgagagattcacttggttcatctattgcatggccaatggataagatggtcatctattga

SEQ ID NO: 163189 - DNA, 2373 bp, Arabidopsis thaliana landsberg
ggttttaagccacctccttatttttctacatctgaacctacatgtcgtttgtccgatccggctcaaccccacatgctttgccggcggagaccacgatctcatggtccactttctatctgcttttgcaagcatttggagggcagtatatactattactactgtgctacttgcaatttggaattccacaaaatgtgtcacttctttttgccggagataagacacccttttcacccctcccaccctctcactctcatttccttaaaacctgaccttgatctttataagctagccagccgctcgaattggatttattccttttcagatttggaatatgacgatgagcacaaagacgatgttgctgctgctgatgacgaggatgacgatgctgataataatgatgttgttgctgctgctgctgatgatgacgatgctgctgatgttgacaatgatgctgatgacgacgatgctaatgatgacgatgatgatgatgatgatgttgatgatgatgatgatgataatgatgatgatgatgacgacgatgatgatgatgatgatgatgatgatgatgatgaccacaataatgattattggaaatgggctttgggactcagcatcaacaacgatgatggtgcctctaaaaatgaattggtatacaaagttgatgatgactacgaagaaagcgtcaacagtaataccgtcgctagtagtgttagtgatgacaacgatggtgatggtgatggtgatggcgatggtgatggtgatggtgatggtgatggtgatggtgatggtgatggtgcctgtttatctggtggaaatcacctgaaatgcaaatgttgtcagaaacgttttgaagatatatactatcattgttctatctgcaacttctatcttaatttcacttgctcgatgagaccaccacctcccactatcactcacatcaaaagtcatgagcacaccctcaccctcttccctatacgacttcctttaccttgtgatgtttgtgggttgtctctcaatgacgctcatgatccagtttacgcttgtcttccttgtaactacatggttcatagagcttgtattaatctacctcgtgtcattaagatcacccgccaccaacaccgcctgtctctcatttcctctcttatttccggtgatttttcttgtggagtttgtcgtaaaaccatcgacattagctacggacattattcttgcattaagggatgttgttatggtgcccattcaaaatgtgcaacgagaaaagaggtttgggatggaaaagatcttgaaggagtgcctgaagaacccgaggaatatatggagtcatttgttaggattgatgaggagacaattcaacatttcagccatgagcattatctaaagctttatgaaaagaacaatatttgtgagaaagacaaggtatgtgaggcatgcacccttccagtaatgatctcacagagatattatggttgtatgaagtgtgattttgttctcgatgaagcatgtgcatttctttctcgcaaaaaataccacccattacataaacacccacttacgctccacgctttcccacttggtcggatctccgggttcggtcatctgtaccactcggcaagcaacatattcatatgtgatggttgcagccgaattggttgtggttttgtgtacaaatgcggtgaacaagattgtacatttctcgtagacgtcaactgcgcttctcttgcagatcctttcattcatggttgtcatccacatgatctctttttcaatttgacggaaggtaaatgcatggggtgttcaagtgattattgttcatcctattacctagaatgcattaaatgcacttcttttttgggtattagatgtgctactttgcctactaaagcacactacaaatacgataggcatccactcaccctatgctacggtgatgaagatacaacaagtggccaatattggtgtgagatatgtgaatcaaaattagatgcaagcaaatggttttatacatgtgaattttgcagcatcactctccatgtcaactgtttacaagggaaagatatgtacatgaagccccactacatcttcaaattggtttctggtagatatgaagttgaaattgctcgaaatgatggtaacactcggccactttgctctcaatgtaatcttctttgtgcacagactttggtattcaagcagataggcagatacgaaagttgttgtactcttgattgtctggcaaattacatttggaaattagcattggccaaaagagaaaggtgagagggcaccttgacaaagaaatctaatgctagacgagatgacaagaaatgcgtaacgtctgagtctgatagagctaaggtatttcaatttcaagaa

SEQ ID NO: 163190 - DNA, 954 bp, Arabidopsis thaliana landsberg
atgcttttgtctgcacttcttatgtctgttgggataaactcttgcctatgtgtattactcttcattctttactctgtactgaggaagcagccacgaaactacgaggtttttttacctcgcagactcgcgaatgggacgtataaacgtagacgtaacaaagtagcaaggtatataccttctcttaaatggatttggaaatcatggagaccaacagaaaaggaacttatggaatcatctggcttggatggtgttgtgtttatgagaatgatcacttttagtttgaaagtgttcttgtttgctggtatcattggtgttattgttctcttgcctgtgaactgctttggagatcaacttacagtgattgattacgctgaatggtcagccaattctttggatctgttttctgttgcaaacctcaaagtccgctcacaatggtaacctcaaaaatttatgaagttattattgttgctaggatgatgtatatatgtagatatttttgttttttttttgcaggctatgggttcactttggagctatatatcttgtgactgtatttgtttgctgtcttctttactttgtaagggcttgtacttatggttacttaaattattttatcgtaatgaatgctaaagttctttagtgatgactctttagaagactgtcattagtatttgctatattgtcattagtattgtctttctttgacaggaattcagatatattgcgttgaaaaggattgagcatttctattcatctaaacctaagccagaacagtttacaatattggttcgaaatatcccctcttcagatggaagcagtgtgagcgacactgttgataggttctttggtgaaaatcattcctctacctatttttctcatgtggttatccatcgaacaagtaaactccgaagtgtcgttgtaagtcttgaaaaagcttatctgccttccgttgga

SEQ ID NO: 163191 - DNA, 1908 bp, Arabidopsis thaliana landsberg
atggggaatggaaagttctcaggaatgaacagtcatgactgctatgtttttatggagcgactacttccatttatctttgccaaactcctagatcggaatgttcaccttgcggtatcaggtactttaatttccattactttttatacacgtcttggtgttaataataatttaattatatcttaaattgggattatgctttttgaatgtatatgtaggggttggagcgttttttagggacttatgttcaagaactttgcaggaaagccacattcaaatcctaaaacagaacattgtcttaattatatgcaacttagaaaaaatatttcctccatcattttttgatgttatggagcacctgcctatacatctcccctacgaagcagaattgggcggtcctgtccaatataggtggatgtatccttttgagaggtttttcaaaaagttgaaaggaaaagcaaaaaataaaagatatgcggtcggatcaattgttgagtcatatatcaatgacgagatttcttatttatcagagcactactttgccgataatatacaaacaaaatcaagataactaatagtaattaattaaacatctgcaccaagcaagttttcaatgcgcaaaaataaacatgaattacctcttttggatcaggttaacaagattcactgagggtgaagttcctgtatgtcttgttcctgaagtacctaatatatttagttccgttggtcgtccaagtggagaaatacgtgaagtatggttatcagaggaagactatcaatgcgcacatggatatgttatacgaaattgtgattattttcaagtaattaagaggtatataacaaaagtcatactcccattttaggtttttaattataaatgtttgtttactaacccttatatgttgtttttatctttatagtatgttcgaagattttctttctattaaatatccaggattgaacgaaaaagaactcttcgtgaaaagaggtgaagaatatcatgtgtgggtgaaagattatgtatgtgtaaatagtttatctatatatgatttgcatttatttattgttattcatatctataatgatgtttatttctaaatttgcatacaggttacatattggaactctagtaatcgatttccaacttgggttcaagagatagtcgatggacctttgcacaaagtcaaaacatggccaatgtattttacaagaggctatttgtttcatacgcagagtcatggagctggacgtaagacttgtaactatggtgtatgtgtgaaaggtgaaaattatacggatgcatctgacgctgcagatttttatggaaacttaactgatatcatagaacttgagtatgaggggtggtcagtttgaaaatcagactttttaaatgttcatggtatgaccctaagctcggaagaggtactcggaggagcaatagtggtgttgtcgacgttctttcgtcgaggaaatataacaaatacgaaccctttattttaggtacgtatggtatatatatatggtcatttagtttttctagttcatatacaaatatctaattctccaaatatggtgcatttacaaacagcatctcaagcggaacaagtgagctttattccttatccatacacgaaaaaaccaaagcgggagtggctcaatgttttaaaagtaaatccaaggggaaacatattaggagaatatgaaaataaagacccgactcttttgcaaacagaaaatgatgatggtgtattattgactacagttgaagatatcgtactcgacaatctgacagaagacttgaacccaataattctcgattgcaatgtcggagatgcagatccagaagatgaatttcagtgtaatttatcgtcatctgatgatgaagaagaagaagacggagaaccaaactaa

SEQ ID NO: 163192 - DNA, 1369 bp, Arabidopsis thaliana landsberg
  unsure (1)..(1369): unsure at all n locations
tttattatttttttcaggagtgaacagaacatcactgcaaggaggaagcttggcttcttttcatgtggaaatggcaatctaatagatgattgttggcgttgcgaccgcaactggaacaagaaccgtaaacacctagcggattgtgggatgggttttggaagtaaagcgtttggtggtcgtaatnnnnnnnnnnnnnnnnnnnntgaccatagtgatgatgacgttgtgaatccaaagccaggaactttacgtcatgccgcgatccaggctgaaccattatggatcatctttaaaagagacatggtgataaagttgaaacaagaactgatcatgaacagtttcaaaaccattgatgctcgtggtgccaatgtccacattgccaatggtgcttgcataacaatccaaaatataaccaatgttatcgttcatggcttgcacattcacgattgcaagagaaccgggaatgtaactgtcagaagctcgccaagtcaggccgggtttaggggaacggctgatggtgatgctattaatatatttgggtcaagtcatatttggatcgaccacaactcgctctctaactgtactgatggtcttgttgatgttgtaaacggttccactgccattaccatttccaataaccatttcactcaccacgatgaggtcaatcaaacacctaaaactttctcctttattttttttttgtaaaactctgttttttcttgatcataatgatattgtggagcaggtgatgttgctagggcacaatgattcgtacacacgagacaagatgatgcaagtgacagttgcgtataaccattttggagaagggctcatacagagaatgccaaggtaaatctacaatgtaacattgtgtttaactagacttatattacttgcaatacaagttaagaaatacattttgagtatttatatgcaggtgcaggcatggttatttccatgtggttaacaacgattacacacattggaaaatgtatgctattggaggaagtgcaaacccaacgataaacagtcaaggcaatagatttgctgctcccaaaaaccactccgccaaggaggttcgattcttccgtgtttttgcgtgcttataaacagagaaaatggatctttaattccaaaatatgacactgtacaggtggctaaaagattagacacaaaaggtaatgagtggatggagtggaattggagatcagaaaaagaccttctagtgaatggagcgttttttacaccatcaggtgaaggagcatcaggagactcacaaactttaagcttaccggctaaaccagcttcaatggtagacgcaatcactgctagtgcaggtgcacttagttgcagtaaaggcaaaaacatg

SEQ ID NO: 163193 - DNA, 1232 bp, Arabidopsis thaliana landsberg
tttgtagctttgtcttgttccttttgtggattacaatggttttcattagctgcttattgattaaagttttgatcttttaggagtttcgagagaaaggagttgtatttcagaggaggctttaagagctgcattttctgctactgaggaagggtttctcacgcttgtgcgaaggacttgcgggttgaaaccgttgattgcagctgttggatcttgttgtttggttggagttatttggaaagggactttgcttatcgctaatgttggtgattctcgtgctgtgcttggttccatgggtagtaataataataggtcaaacaagattgtagctgagcaactgactagtgatcacaatgctgctttggaagaagttagacaagagcttaggtcgttgcatcctgatgattcacatatcgttgtccttaaacatggtgtgtggcgcatcaaaggcatcattcaggtttgcaaagctctctaatcacatatttaaatgcctgtgacactatgataagaacaaagctatgaaactgctattattatggttccaattcactaaacaagagagacttgattaatgattggctctttgcacaagtagacagaccctatgtgtcatcttggcttatcaaactataagtcaatattgtgtttcatttgtgcaggtatctagatcaataggggatgcatacttaaagcgcccagagttctcacttgacccttcatttccgcggttccatctcgctgaagaactacaaagacctgttttatcagcagagccttgtgtctacacaagagtcttacaaacaagtgacaagtttgtgatattcgcatcagatggactctgggaacaaatgaccaaccagcaagctgtagagatagtgaataaacaccctcgtcctgtacgtgccaccacctaagattgctaaaagttaattctcaggttttgtctgctttcactgatgttgtatatatgtatgaaacaaacacagggaatagcgagaaggctggtgagaagagcgataaccatagctgcgaaaaagagagagatgaattacgatgatttgaagaaagtggagagaggagtgaggagattctttcatgatgatataacagtggttgtgatattcatagacaatgagcttcttatggtggagaaagctactgttcctgaattgtccattaaaggtttttctcataccgttggaccttccaagttcagtatcttcctctcttag

SEQ ID NO: 163194 - DNA, 5413 bp, Arabidopsis thaliana landsberg
ttacaaagtggaaaacagctaaatccagtgcttcaaagcaagctttctgtagccaaaatcgtcagtttggaagagaatgataatgcagtttttgtagaccagatacgagtgtcgatcgacaacaaccaacgcagacactataaaagtcgacagcgtcgaccgaccgataccaacagtgtgtccatcgacaccaacccaatccagacctgcgaattctccaaaacccgatttcagttgcaaaaaaaggcaaccaaacccaaggtttcttttccaagagtcttaggaagtccaaaaaagagccagatgatgctagatgcaaagctatgatggataagctgattgtagagatgccacttatagatgttttgaagtcttctcctatggtcagacagtatgtgaagatgatggttactaaggatttgaatactgagcaaggtgtgatgacgatttctacgcagattagcgacattattcagaataagattccacacaaacttcctgatccaggtagctttgttctcaattgtagtatccttaacgagtgttttgcgcaatgcttctgtgatcttggttctagtgtccatttgatgccgcgatccgttgcgttatcccttggtttgacagattgtgagccaacgcaaatcactattgttcttgctgatcgatctgtccatatacctgatggtatcctatgcaatgtccctgtacaagtcggtaatagcatgattcctatagactttgtagtcttgccttatgagaaagaacctaaggatccattaatccttgggagatccttcttgcacacagctggagtaattatagatgttcgacaaggaaggatatggttgaatgttggcgatcttactatgcagttcgatatgaacactttggtcaagaaaccgatcatagaagggaaaactttcttgatagtggaattagaagacccactagagcgagttttggtatcttccatagaagatagtgcagatttggacagtgaatcttctacatataccgaacatatgatgcaacttacagttaaagaagctcttccatctttgactccaacgccgactactaatcgagattgggatccagcaaaggctcctaaaatcgatttgaaaccacttccagcagagctaaggtacgcttttcttggtgaaaattctacttatcctgttatactgaatgcttcccttaatcccgcagagctcaccttattgctaagcaagctgcgcattcatcgtaaagctcttagctattctcttgatgacattaaaggtatatcttgggatgtatgcatgcataggatccaccttgaggatgagtctaagtcttcagttgaacatcagaggagactgaatcagaatctgaaagaagtggttaagaaagagattatgaagctgttggaagctgggattatctatccgatttcagatagcagttgggttagtccagttcatgtagttcctaagaaaggaggagttacaatcgtcaagaacgaggaagacgagatgattcatactcggacaatcacatgccatcggatgtgcatcgattactgaaagttgaatgctgccaccaggaaagaccatttctccgtaccatttatcgatcagatgttggaaaggttagcaaatcataagtactatttctttcttgatggatactcaggattctttcagatcccgattcatccagacgactaggagaaaatgactttcacctgcccctatggtacatttgcttatcggagaatgccctttggtctttgtaatgctccaacaacataaaagataggtatgatgtctatcttcacaaacatgattgaggatatcatggaggttttcatggatgatttttcagtttgtggatcatcgtttgaggattgtagagaatctctgcaaagtgttagcgagatgtgaggagaaacatctagttttggattgggagaaatgtcactttatggttcaggatagaatagttctcggacacaggatttctgagcatggtatagaagttgatagagctaagattgagatatgaaaagtcttcaagcgcttgataatgttaaagcagtgaggagtttccgtggacatgctggtttctataggagattcatcaaagactttagcaaaatcgcaagaccactgactgctttactctgtaaagaagtcaaattcgagtttacacaagagtgtcatgatgcctttcagcagataaaacaagccttgatcagcgcactaattgttcagccaccagattgggatttaccttttgaggtaatgtgtgatgcgagtgattttgcagttggagctgttctaggacagaggaaggataataagcttcatgccatctactatgcaagtagaactcttgatgatgtccaaaggaattatgcaactatagaggacttgttagctgtggtgtttgctttcgagaaattcagatcttatatcgttggatccaaggtcattgttcacacagatcatgctgccttgaagtatttgatgcaaaagaaggatgctaagccaagacttttgagatggattttgcttcttcaagaatttgacatagaggttagagataagaaaggagttaagaatggtgtagctgatcatttgtcacgcattaggattgacgatgacgtccctataaacgatttcttgcctgaaaagaacatatacatgattgatacatctgaagaagatgactgcaaacatgataggttgcagaatcgagcttcactatcgatcgacactcccattatgttgatcgacactcacatttcagaggaagtagacagtcaaagttgtgcgatggtgtcgatcgataccattgcacttgtcgatcgacacccttctaaatagacaagaaattggtcaccaactgagaattgcgccgtcacagcggtcgagaaggattacctgtggtatgctaatattgttaattacgtagctgcaaatgtggaacctgataatttcacagattacaacaagaagtgattcctaagagagattagacgatattattgggatgaaccttatctctataaggattgttgtgatggagtttacaagagatgcattgctgcaacagagcttcttgatatactatcgcattgtcacaactctagctatagtggtcattttgcaaccttcaagacagtatccaaagttcttcaagcaggcttttggaggcctacaatgtttcgggatgctcagaagttcatatcgcaatgtgacccttgttagagaaagggactgatcagcaagcgtaatgagatgcctcagcaatttatactcgaagtcgaagtcttcgattgttggggtatagatttcatgggacccttcccaccatcaaacaagaatctctacatccttgtcgcagtcgattatgtctccaagtgggtagaggctatagctagcccgaagaacgattcagcagtgtcatgaaactcttcaagtctatcatatttcctcgtttttgagtgccacgcatagtcatcacggacggaggtaagcatttcattaacaagattcttgcaaaattgctttttcagtatggagttcagcatcgagttgctactccctaccatccacaaacgagtggacatgttgaagtttccaacaggcagatcaaatagattcttgagatgacagtgggaaaatcgaaaaaagattggtcttataagttagataatgcactatgggcttacagaacaactttcaaaactccgcttggaccacaatttttcatcttctctatggtaaagcttgtcatcttctaatggaattagagcacaaagcagcttgggcagttaagataatgaatttcgacatcaaatcagctggagaaaaaagacttattcagttgaatgagcttgatgagatacgaattcatgcctatgacaactcaaatctctacaaggaacgcacaaaggcttaccacgacaagaaaatcctcactcgaacctttgagcctaatgaccatgtacttctttatgattctagattgacattgactcctggaaaattatcttctcattggtcaggtccctacacagtccattcggttaggccatatggaaccggtgttcttataaacgacaatggaagatcatttgatgtgaatggacagagagtcaaacactactgggctaagccgagattccagtagaaaagcctttggatcttcaggacccacctgttgattaagcatctacagagtcaagctattgactataaacaagcgtttagtgggaggcaacccactggtttgatttttcgtttccctttcttttttttattttatttttgatttatttttcccatcttattcggatttgaatgccactggggacattgtcgtttaagtctggaggaggttcttactaacattgcctttatttttgattcttattatttttcgtttttgagtctattgagttatgaaaaaaaagaaacgttttccttaatttagttaggaatcatgatctatatttctcttgattattgtttgattgatgagtgctctaggtttgagtcaatctgactatttgaaaatctagatggcaaagcaagagacttgaggatatcctagtgataagtgtgtattttgcatgttttgagcatccatttgtcatcattttagcatcatatcatcactgttttataccatttcacatcatttgtcatcactttgcatgtttaggatagttttgcatgcatgttgcatgtttgcgttgatttcaggtgatttggagctgttgacgagctatctggaagaagcggacctgatcacgacaaaccactcgaccaagaggtcgagtaggagcttcaagatctcaagagaccactcgacccccaggtcgagcagaggacatcaccacttcacttcaccactcgaccacgtggtcgagtgccctcatcaccaccactcgacctcttcactcaacctggaagtcgagtatcttctgacaccactcgatcacatcactcgacccccaggtcgagtgccttcaccttcactgccagacaagaagttttttacctagttttatttccgcagaccttgtgttctagactttttgtaatccggatttctctttatctattcagtattcagtattcagtttctgtacttgatttcgtttactgttgttcattctgttatcatcctgttgttacattgttgttatcatgttttcaatttgttcaacgtttatgctttctgttatgatgtcttagtagtgaataggtttctgaggatgggttagtgtagtgtagaattctcagtatgctaggtgattgagtattgattgatagatcccttctggattagttgttcttaatgccaaatgctaactgatcaactggaatttgagcccagacatttccgcgcccaaaaggtg

SEQ ID NO: 163195 - DNA, 541 bp, Arabidopsis thaliana landsberg
atggatcctaagggaaaggggatggtggtcaacgacaatgagaaggagtccatcttcaatgagccaagggacgacaacaacgagtcttcttcttcccaaaaggatgatgacgacaatgactacgagaaaaagaagacggttaattcaaatttttcctttgattattctcgtattccgcaaagttccaatgctcatttgctttccattcccctcggtaaaccccctcactttgatggagaggactacggattttggagtcacaaaatgtgtagccacttgttctctctccatccaagtatatgggagaaagtagaaaatggaatgcactttgatagtacggatagtcccatgttcatcaatgaacaaattcataaaaatgcacaagctactactgttcttttagcgtcattgtgcagggatgaatccataaggtgagcggcttggacaacgccaagcagatttgggacacctcaggatctctcatgagggaaatgacgtcactatgctcactaagatggagttggtggagggcgacttggga

SEQ ID NO: 163196 - DNA, 1040 bp, Arabidopsis thaliana landsberg
gaatcaaagttagttattttactccacggtatccacaagggaacgaccaagccgaagctgcaaataagacaattataagcaatcttaagaaacgtctgaatcatttgaaaggaggttggtatgatgaacttcaacctgttttatgggcgtttcgcacgactcctaggcgttcgatccgagaaaccccattctcattggtatacggaatggaggcagttgttccggccgaactaaatgtgcctggacttcgtcgaacagaagctccttgataagtgtgcattttgcctgttttgagcatccatttgtcatcactttagcatcatatcatcactgttttatatcatttctcattatttgtcatcactttgcatgtttaggatagttttgcatgcatgttgcatatttatgttgttttcaggtgatttagagctgttggcgagctaattggaagaagcggaccagatcatgtcaaaccagtcgagcaccaggtcgagtagaagcttcaagacctcaacagaccactcgaccccttagtcgagtaggggacttcacaactttatctcaccactcgaccccctagtccagtatattcacctccaccacctgaccgtcactcgatcacatcactcgacttcgaggtcgagtgtcttcacctccactacttgatcatcactcgatcgcaccactgcaccttgaagtcgagtatcaccatcacaaccactcgactacatactcgatggcgagcttcagagtcttctccattccgcactcaaccagacactcgagcacaaggaagaaaagaagactccagcttatcactcgacctctcactcgaccacctgggtcgagtacagttcttaatccgtcctaatactgcgtcattttaagtattagggtttcagaatattttgctataagtagcatgtactttacattttcgagaataagtttttatctagttttattccgcaaacactgtgtgttctagaccttttgtaatccggatttctcttaatttattcaatatttgctttcatttt

SEQ ID NO: 163197 - DNA, 1214 bp, Arabidopsis thaliana landsberg
atggcgtatgaagagagtgttggaaaaatagctgttgtggacaccttgagaggtcttcaagaagtttcttttattagtagtagatgttttattggtttatcaataggttaaagtctaatgctagtcattcattgctctatgtgatcaatgctttgacttaacatataaccacaacttgaagcatttaaaaaccgcaacccattcctttaaaattacttgaagctttttaaaacacatcaaaattacttgaagcgtttcaagtccttttaacctttagccaaaatattgttatggattcctcaaactcatattcccatcaacgaagttttttaaactttttaacctctcaaaaagagaaccaagtgcttccaccaaatcaatatgcttgtttttcaccaagcatagatgatggatcatcagaagttcaatggactgatgatccaagcaaagtggaacagccaattgcaaacaagaaatcaagatgcaaatggggaccaactgaagatgtggtcctcatcagtgcgtggctcaacacctccatagattttgttgtatccaatgagcaaaaagtaacatcattctagcaccgcatcgctgcctactttgctacaagtccctagctacaagggatggaaaagagatcaccaaaatgttgtatacagagatggtctaagataaatgagggttgttgcaagttcgtaggaagctatgtggcttcaaccaaagagaaaactagtgggcagaatgataattatgtggtgaacttggctcaccaaattttctacactgattacaagactaagttcagtcttgagcatgcttggagggaggttaggtttgatcaaaagttgtgttcttgcaatgatttaaatgtacctaccaagcgaggaaaacaaaatgaatctgcaggagatcatgtgacaattgaccttgaaggggatcaaactagtcccattggtgtaaggcagccaaagccaaagccaaaggtaaagccaaagcgtagcctactatggaaggtgatgcaaacaacactatgacggagatgcaatatatttgggggattaaggataagctacttaatggtaaagagaagcttctgtttcaaaaaaaagaagctaagtaaggacagattactagagagtgtcctaacaaaaaatgagtctttctacgagttggctcttaagcacaagttcattactgacatgttgtcctta

SEQ ID NO: 163198 - DNA, 3218 bp, Arabidopsis thaliana landsberg
tcgaacggctcgtttcgtgcgagttagaccgtttacccgaagcgtttacgagattcgcctcggggtggtatcctgaagtacccgaggcgctgctaaattcgggtcggaagattacctgcagggtctccgaggtgttttctaatctggctcgggatgattccttgatgcgatttccgaggtacttgtcatcggcccggagtacgcgtcttgaaacgactcccgagccaaatatacccgacagatgtttccgaggcgtttttggagtttgtttagttggctcggttcctacgagaccaaatccgaccccaacagtttgccccccagctcgttgtcttcgtttacgagcgacgagtttcgtgcggttaaataaccgagccgacagtatatcttttcagttcacgatccttggcgcttcgacttctcggacggtcaaacttccattcatgcgtggccgccttctttcttgagaagtggaagcgtcttgcttattcccgaggtttgcgcgcgtgttttctcctaccgagctcacgcgctattgaagtgttttaatttctctttcagacccgacgcgcctttatgtctctatatatatcgagctgctcctcaggattcatttatctgaagttgccaaagaaaaattttgaggtttgcttctttttctctgatcttgatttctttgcatcgtttttctttttccggtagtcttccgacgttgtttgttagtattttgattttttcggctagaaatcttccaaatcctcgtttcgtcagttcattccgagccgaagatgagttttccacgaaacagcgtatctctctcggtttccagttggctcgccgactccagcgattccaatcatagagatgatcttcccccgatttacaagcgtcggattgtttggacttcatctgagggttccgaagctgatgcagcttcgtcttcgaacgcatccgaggcgactccctttgtggctcgggaggacgctactgctgatattgctcgcaaattagatttgcctgaggattccaagccgtcccttgttcgtaagctccgtgtcccagctgttgacgaggccagtgcttcgaattggcaggacgtgacctagcgttttatcccgaagttaaaatcgaagagcatctgtttttcgggcctgatgagacggagaaccttgttcgagcgttcgagcaaaccgcttttgagaaagccgagagaaagaagaggaagaaaaataaaaaggtggttcagtcgaaccctcgaggctcatctttatccatcgagcagtcgttgtttgacttaagggctcggttcggttttggcaacgtcacccttcgcgttcctagcccaaatgaacgagccgacgatccccccgagggctttcttactctgtatgaaggatttttctacctttcttttctctcgttgtcagttccgaggttgattttggactacgtgacatcgtatcaaattgccctctcgcaaattactgcccgatgcttagacatctcatcgggatttttgtgcgtggttatgaaactgagtgaggtcacgcttgctcacctccgaaattatttggaaatctggcgagttccgaaatccaaggcggatagatactacgtttctccggctaagaacaggaagattatcgagggttttccgagcaaggatgatgcctacactgattacttcttctttgtggctctggaagacgctgtccttgaagatttcgtcgggaaagttcttacgaaatggggaattttgggtagtttagatattccgtgaattgacttgtttgtgcccgaggtgattattgtgatttatgctaatattatttcgttgatgtttctgcagatcgcccgatcaggtttctcgagccgtgtcccgacgaccttatttcctgtcatcgagagctgtcggtccgcaagtgtcactggacgaagcacttctcccgagattgagtcgaaagagcactcaagctatttcacggtgtttcttgtcgtttcagctcggagtcctctgatcatcgaacctagttttttgttgatatgcagacttccaagcccactattcgagaggtttatgagaagaaaaggctcaccgccgaggagaaacgtgcagccgaggagaatcgcgtcgcggaagagagaggcactgctgaaggaacggatgtcaatcccgaggcttccaggactcaggaggttcctttggctgctgcgcccgccgtaccgggactcgccgagatggatgacgccggtttggctctgactgacccgccggttgaggctgccagacaggcgatagttgcactcccggcacgtgataaggcctcggcaagcgtcctcagattgatgactccgaggagaagaagaggaagaaaaagaagaagaagttggcgcaaaaggaggataaacctcctatctttgaagataaggtcgctttggtgaatctttttgggaagtgcaggggtcgcctacttccgcctcgagacacccattttcttcaggtaagtatgttgtctattttggtcattggttgtgttccccgagccatttttgaacgtggtttcccgtctatttttcaagctatgggttcaatgaatcgaatggtccaatcttatgattcgcctatgtgaaataatctagaggcggtcaacaagctggtggataccgaggccagggcgaagaaggctgagcaggagagagacgcggcggtctccgaggcctctgaggcgaaaatggcgagagaagaggctgagaaagaagcctatgtgaacaaggagaacgccattaagctagctgagcgcaatctgaaaacggattccgaggttgttcgctgtaagcgaatgcttgtcgaggcaagggggctcagagatagcaagatggctcggggtgcatagaaggttaggcgagagactttggaggtctttctcgctaagtttaaggtggtcgaggggaaggtgtctctcctcgaagatgccaatgaccagtttatgtatttgtcccaggcgcgggccaatgcgcagctggtcaaggtgcttgaggatggtggatccttggcgaccgagaagaaataggtcgaggaatggctctcagatttcgcagatgccgagacaatcctcgtgcggatcacatccgagctgaaagaagagcttaaagcccccgctcctgagccatatcctctaagtcctggcggacatagatcgatcgagaccctcgcggat

SEQ ID NO: 163199 - DNA, 2706 bp, Arabidopsis thaliana landsberg
  unsure (1)..(2706): unsure at all n locations
atgatggcacctccgagaggctatcacgagttggagacaaaggaagagtttgttggtgtacctttatcttaccaattagtcgatgatttgggaatcaatcttctgatgatgagagtttctttgttaggcatgattgtgaagggttcacaatggcagagtaggacattgcttcttattttgaatttgaaaaatatttttaactgttaattcatggtttttcaggatcttgatggatgaggacaagaggaggattagtccgtcccagtgaacgccagcgaggcttgtagactagacagatcacaaagtggccaaaaactatgaaaacaaagaagacaaaaattgccgaactgatgattgatgttcaagaagataatcttgagattctagaaggtgaaaaagatgcttaggaagtagttgttaaggtgcgggttggtgaagaaaaatgtccagaaagatggtatagaggtttttgttggtgatcaagaagatgtagctgttgagaaagaagttgtagaggaagatgttgctgaaaaagaagatgtacacacaagtcactaacctgatgagcaagtacagtctgaagctgaatatgtagatatggaagctgaacaaactgataaagaagcagaacctactgattaggaagcaaaatctaatgatagggaagaggnnnnnnnnnnnnnnnnnnctggaacagagatgaatagcagttcagaattccaaacatcccagtcagctaatcctgtaaagaagagaagaggaccaaccaagatgcgtaaagtggccaaagatcctcaggaaaaggttgaagtttacttcactgagctaggtgaacatgtaggatgtggttcagtgacactatcatcatttcccggtgccattgtgcgtgaacatgttccggtaaaacctaaagattggagaaaactggaagccagacatggaatcattcaggaggaaattcaggtttaagaatttcaatttacaaattcatatgttatacgtatttgatcaagattaacatataccatgttttttataggggaggtttaacttgaaggaagagtggtagaaaagatgctattttcaaacagatgagttgtatatggaggttttcaaagcctaagctcctaactcaggtgcgagatgctaagagtagcacaaagagaatgaaactgaaaccaagcaatataccatctattcgagtttgtaattcttggattaagtgtaggactagcacaactttcaaggtgaaattgtttgaatttttttcattgtgtgtacctactattattatgtattggagtctgctcaacagtcaatgtcattgctattgcaggaaaaaagcaacaagtttagggaattgagaaaggctcagatttcccacacaaccaggcgcaagggaatgtttcgcctagctcatgaaatggtgagatcttttatgtactgaaatcaatagaaggtaccaaaattctgataagtaagtaagttggattacttgtagaaaaaacagtgatgaccctaaaaagatcacaaggagtaaagtttggatagcaggacacactcactcttatggtagacccgtgagacctgattttgctgaaacacttgtaagcagtctttatcttattaatatccctatcactaatcaaaaaggcattctatataaccaaattatactcaatgttttgtatgaggaacagatacaatcacatgatagtcaaatggactccactttaggtgataacataagagaagatgttgtgagtcaagttttggaaaaagacaaatcaggacgtgtcaaagggttgggcagagggataactgctaccaagctagctttcaatcaggctagagactcgagacttgaagaattgcaaaacgaggttgaagacttgaagaatattgttcgtgacatggctggaaagaatgtaagttcttctctcacttttctatgttgaattaactgtctatagttaaatatgactgcatcaattctatttttttttttattagaaaaactccacttggacttctcactcggaggtcagtgatgttagcaaaggagttaggtgttagatactggattggtattcaagtaaagatattgttgttggtgaaggagagttttgatctgctgaacctaactatcggataggtcgtattccgttgggtgaatatggcgcagctgtaatcgtcacgtctgtatcagttccagaagcatctgtttggaggccaacgccagatgtgttcttacttcaacaagctttaggagtcaaaattgcatggccagttgataaagttacattggacgctggattggagagtcagaatgactcggaaacggcaaatggaggcaaggtaatgtattttaactataactatatgttcacttgttccatcaaacgattaataataaatactactctactataggatactggtgtagatgatggtcaacttggtagatgtagagttttggattggaaaatggatgaagttatagctgagggtgttatctgttcaagcaacaaagttgagttgatcaataacatacctttgggtgtgaatgcaattatcctgaaagttgacatagtccttaaacctgatgcttgtttgtggagaccaaatcccaaaaagtttgtgatggctgatgcatttaaaacaaagatagcatggcgtgatcatagaatagacaaactttgttga

SEQ ID NO: 163200 - DNA, 2682 bp, Arabidopsis thaliana landsberg
agtttgcgggagtagaagaagattgtagtgatgatgatccaccggatgatgtatgggaggaagataaaattcccgatccgttttcatctgatgacgaagatgagagcagaaccagagaagtacatggtcatagagatgctgcgaatgaagaggttttgctagaattgaagaaaacttacaacactcccgatgacttcaagcttgcagtcttgaggtactcattgaagacaaggtatgacattaaactgtttagatcagaagctaggattgttgctgcaaagtgtagctatgttgataaggatggtgttcaatgtccgtggaaagtgtattgttcatatgagaagactatgcataagatgcaaataagaacttatgtgaataaccatatatgtgtgaggtctgggcattcgaagatgttaaagcggtcttccattgcttatttgtttgaggaaaggctgcgagtgaatccaaagcttacaaaatatgagatggctgctgagatattgagggaatacaacttggaagtgactccggaccaatgtgctaaagcaaagacgaaagtggtgaaagcaagaaatgctagccatgaagcccattttgcaagagtctggaattaccaagcagaggtaataaagcagaatccagggactgagtttgagatagagacaactgcaggggctgtcattggagccaaacagaggtttttttggttatacatttgttttaaggctcaaaaggattcatggataaaaacgtgtagacctatcataggacttgatggagcttttctgaaatgggatattaaaggccatcttctagctgcagttggaagagatggagataacaagattgttcctattgcttgggctgtcgttgagatagaaaatgatgacaactgggactggtttttaagacatctatctgcaagtttggggctttgtcaaatggctaatatagctatcctctctgataaacgatctgttagtttttttaactttgtgtctttgttaaattggtttgttgttttgtttactgatttttggtcatgttttatgtcatattgcaggggctagtcaaagctatccatacaatacttctgcatgctgagcatcgataatgttcaaaacacatcatggataattggaaaagggacagccatgatttagagctccagcgtctgttttggaagatagcacgaagctacacggttgaggagtttaataatcatatgatggagctacagcagtacaatcgtcaagctcatgaatctttgcagcttactagtccagtgacatggtcaagagcatttttcagaataggtacatgttgcaatgacaacctcaataatttgagtgagtcttttaataagactattaggcaggcaaggagaaagccaatattggatatgctggaggatatccggaggcaatgcatggtcagaactgcaaagagattcctaattgctgaaaaattgcagacaaggttcacaaagagagctcatgaagagattgaaaaaatgattgttgggcttagacagtgcgagagatatatagccagagaaaacttgcatgagatatatgtgaataatgttagctattttgttgatatggagcagaaaacttgtggttgcaggaagtggcagatggttgggatcccttgtattcatgcgacttgtgtgataatcggaaaaaaagaaaaggtggaagactacgtgagtgactattacacaaaggtaaggtggcgagaaacttacttgaaaggtataaggcctgtccaagggatgcctttatggtgtaggacgaataggttgcctgtattaccaccaccatggagaagaggcaatgctgggaggccaagtaactatgctaggagaaaaggtagaaatgaagctgcagctccttcaaatccaaacaagatgtctcgggaaaagagaatcatgacatgctctaactgccatcaagaagggcacaacaagcaaaggtgcaacaatccaactgtcttgaatccaacaaagagaccaagaggtcgtcctaggaaaaatcaggtttgtaactctcatttctgactctcctttttaacaatccaacattcatttatgactctcctttttaacaatccaacatgtgtttctgactctcttttttaatttaggaaccagaagtgtttggatctcaatcttatcttggatcacaagagcaatcacaatcttatcttggattacaagagcaaccacaatctcatcaaggatcacaggctgatcttgaatcacaaggaccaagtgctgcaggtcgtggtcttggatcacaaggaccaagtgctgcaggtcgtggtcttggatcacaaggaccaagtgctgcaggtcgtggtcttggatcacaaggaccaagtgctggaggtcgtggtcgcggagcacaaggaccaagtgctgcaggtcgtggtcgcgaagcacaaggaccaagggctgcaggtcgtggttgcggagcacaaggacaaagggctgcaggtcgtggtcgtggagcacaaggacaaacaacatcaggtggtggtcgtggagcacaaagacaagcaggtggaccatcacaaggaccgcaacctgatagaagacatggttcagcataagcacaagcagaaccacaaggacttcgtctatttgaatcatggtttgagtgttctagacaatct

SEQ ID NO: 163201 - DNA, 3261 bp, Arabidopsis thaliana landsberg
atggttgttcatccaaacctaaagtacttagttttctacagttttaactacaactttaaacaaatactaacaatctcttccgttttgtttttcaacaggttgctgctatcccagaaatttacttgccggccctggtgcttactaaaattgttagctacgttgcagaatctggtgttgatgcttcgaaaccctttgttaaggctggtccgttatttaaagcggaagtctattccaaggagacactaagttgtgtccgccttgacagattcggtattttatgtggtggtcaatgccgcattccatctattatcatttctttacaaaatgccttgaagccaacaatccacatgctttaactgttgtatatgaaatgaatagcaaacgagaatttggttgatgaatgctatagatctagtttatggatggaaccttatggagaggattggggatgggtaaaattgatggaacttattgggctcaaccccgagttcgagagagtattccacgttgttcccgttgcaaatttcgggcacacaaaatagctaattgtcccaaatattgaaagacaatgttttgataatgtgttatccatcattatatgtctatatacatgtttatatttttctaaaacttgttttttgtatttatgcttttgctagtctgacttttttatgttatattctcgttagctattcaatcttcatttctatatttgctaaggcttatccatcttactttgtggttggtgtttaatgattacagtttatgtatgtattacctgattgattatggaaaacctcttcccccataaatgagtccccgttggattgcatgttacaagacatccacgtctgtatattatataccatagagatatatatctttgaataacataatttggccacacatgatttattttggacatgagaaaccttatttacatgtctaaattttttttattttgtagtagccactacatatgtcgccactaactcatctcaccaccacaccccaccctctccaatgtgacagattattagggttcccattctatcacgatctcaaagttacttaaattttcattattagatcgctatttctacaccttcagtactatccgagtcgataatccaaaatgcccaaaatcgtatgcgagaaaggcaaatgtatccaccctcgaccaatggccctactagacatttctggctaccaccaagtgcccttgcccctgttaggggaaatcaatttgctgtccagcctcctcgtcaacctttggttcaatttcacctaaaggtaatgtttaactactaatcttcgctatttgaataaacacccaaatttaatgttaactttgagaattattttatctcagcttcctccgttccctgattttcagatgcctgaacacgtagctgctaatatactaatcttagtttttgaggacggtgtagatatgttaaaggcttggattcaatcaggaccagatggcaaagccgctgttttttcaagggaaactctttcttctgttcgactagataagtcccctgtattcattcatatggctcatgaatcttctagttatcacatgttttacacaaaatgcctagccttaaaaaatccctatgcactatatctttagagtttagtgttggcatttcatatgtgtgagctccaggaagcaattgatattttggatggcataaaagatgttttttcacatgctggtctactttacatcatgctccatagttgcgctggatcaattccgtgggaattttatactgagtacaagcgaaggtactacaaatttagtgaagtcgacttattcgcagataagctaatgttccatatcaacgaggttggtccacgtcatcaagggacatacaaaaattcctgggagtttgaggattacggtgagtgttggtcggaccatcagaacctcaatgagtatgagggacagtggtgtaacacatgtatttactattacctgtcccaggaaattgcacacatttcataagtaatactttcagaagtaccaatttcatttatgttcatcttatcgttcttctcgattgcagaaaaaatatttgaatctaagtttttattcttgattttatgtattagtttgttttgcatatttctccaactttatttatatattgttcgagtcttcaagtataaggtgtaacaattattatacaaatgattagagttgtttcagaactatgacttgcatttttgtatatgaatttgctttaatggaattcaagtggtagcttttatatttcgagttaatataaaactgaacccgtactcctcactaagcttcatccctcacgattgtaagctattaagagaaacttccaattaattactctgtttttattagtcatttgtaaaccgttttgatcagtactaaaacttctctctctaacacatcttactctttcgttattcgcaacagattgacaaaatgagtacatcatccaaatgtctacactctatcacacaacctatcagcacacatgtttaatttttcatccatttaaacaatatagttttcattcattccacaaagtatatgtaacttgtctaacttttcatttgtgttgtcaacagaggaagattgcgagattatatattccggaaccaattctcgcactaattgttagccacgtttcagaagaaggaattgaggctctgaaaaactggattaaatctggtcatgaagggaaatctgcagctttctctgtcgagacactatcccgagttcgtttagataaaagccctgacttcatcaacatgtcttcacccgactctgttcacttctcattctactccaaatgtcttgcaaaaagaaacccttacgctatgtatctccagagcttgaggctagggttctgttctctcgacatgaaaggcgccatttcattattgaatgattgtaaagatgtcattcctatagccaagcttctttacattgcgctaaaccgctgcgcaggtaatgaagtattagacgcgtttaatactttcaaacgagagaacaagtgttttacagatgtagatatcatggccaagacactaattgaccacatttctgatttggaaccaaaacgattcggatcttacgctgagctcttttattatgaggattatccagactgttggctcatccatgaattttacaacgaatataatggtgagagatgttcacattgcatctacttcttcctcttcagagacatccttttgctttcctag

SEQ ID NO: 163202 - DNA, 3210 bp, Arabidopsis thaliana landsberg
  unsure (1)..(3210): unsure at all n locations
tttggagaggctactcatggtaggtgggagcatacctctgaactggttattaccaaggttgatccagatgagcgagctcaacctgagaagcatatcggttagtcggttaaggttccccattgaatctggtcctctggtgaaatcattataggaaagatcaagatgagtgagataagaaagatttccgagtgaagaaggaatctttccaaagagatggcaaccacgaagactcaaaaccttcaaatatttgaggttgccgatggaatccggtagctcacccttcaaaccatcattataagaaagacttccgaatgaagtaatcgttaaaacaatacgattccggtagccaagatacagcttctgaagatgttgtagtctaaacaggctgctattagatctcaaagggccattgagatcactgctcatgagatctaactcgacgaccttgcctgtcttaggatcacaagagacacgattccaagaacagcaatcagtcttgttcctccacgtctctgttgccttttcacaattcatatggggatcgaactcttggacgtagaactcgtttttgaactccaaaagagcatccctctggtcgggaagacacaagtctttagcaatgacaagtattgagttagagaggccgaagattaaacacaagctccatattactgtcatcatcctcctctcactacaggaatgcatccttgttttatttcttctgtgaaacgaattgatcgttgcttgacttgacaagtctcctgggaaggataattgcttacacagaaaattgaatatctgactcttaattgctagatccttggattgacacttattacatctgtggaggagtgttataagaattcatcatcatttttcacgtgtggccatcgacagtttctacctagtcaaaggagtgtttttttgttgaaaatgaaagagtgtctactgttgaatgaaaataagaggaattggttgctccatttgtcaacaaaagtgtggttgtttgtatgggatgggtttaagtttctgaaagattgaatttggtttctcatcgacatgatctgatacatcgttatgccaatatccctaatatgggacaattctaatgtgaagcaaaggttatggttacttgatgaataatcaaaatcatacaaaaattgtataaagcgtgtctcgggcaatttaaaacacacaactatattgtacagtgtgggaacgtntaaaattaaaaacaaacaattcaaacatttaaaggggccgacgagactcgtccaaagcattaatttgttgatttttgtttcattaaaagaaatgtcatcgtcaaattggatcgacaacgcttttacagaggaagagcttctcgctatcgacgccatcgaagcttcctacaatttctccctttcttcttcttcttcttcctctgctgctccgaccgtacaagctacaacctccgtccatggccacgaggaggatccaaatcaaatccccaataatatccgtcgccaattgcctcgttccatcacttcttctacatcttataaacgatttcctctctcccgttgccgaggtatgaaacttcttcaaatcccagagatctttctgttctattttccaatttcaacttctttttgctttgaaaatgtcaattcattagttgtctcaccatttgattcgaattccaagttctttacaatgtattaatctgttcatgccgtaatttatagaattaagatttttttcgtaatagtgtgttgtttgaattatgtgggcggagcaacttaataatgtgtatactttgttgcagctaggaattttccagcaatgaggtttggtggtaggattttgtatagcaagactgctactgaggttgataagcgagcaatgcagcttattaaagttcttgataccaagagagatgaatctggaatagcttttgttggcttggatattgagtggagaccaagttttagaaaaggtactttcgttaatgttttccgttttgtgtctgattgcaagttttgtctttttcgattgcatttcttaaagtatgcaatgtgatatgcatctcgaactgtattttatctctatggatcatatgttgtcttttctaatttctctttatatatcttgatgatagaatgatgatgctcttgctttatatcgaatagagctttatggtcgttgtttcctttctgaatgttcggaggaaagtgtagatgcctactattgcagttttgtgtagtctagaatctcattgctgcaagctttgttctactaataatatctcttagactagtctactcatatgtgttgtaatgatagttgcttgataatgctttttgacacattcatgaacctttgtgaggtttttgtgatcttaactaataatattttgtgaaactttgtgttattttcaggtgttctcccggggaaggttgcgactgtccagatatgtgtagatagtaattattgtgatgttatgcatatttttcattctggtatccctcaaagtctccaacatcttattgaagattcaacacttgtaaaggtttgttatttttttttttgaagtggtcgaagttcttgttgtttgccatggatgctcaattaacgtagttctgatacatatatataggtaggtattggaattgatggtgactctgtgaagcttttccatgactatggagttagtatcaaagatgttgaggatctttcagatttagccaaccaaaaaattggtggagataaaaaatggggccttgcctcactaactgagacacttgtttgcaaagaggtatctgttattcaccttgtctggttgatttcaaaagcttgatttaagttttgataacagtagtgagaactggatttatcatatttccagtcttcctagaaatagcagtacaacactattctgttctgctgtatcaaaagtgggaatcttgattctatttcgctttgaaaatttgtctgttactttgcagctcttgaagccaaacagaatcaggcttgggaactgggaggttcatcctctatcaaagcagcagttacaatacgcagcaacggatgcttatgcttnnnnnnnnnnnnnnnnnnnnnnnnnnnngaaaaaccagcttcttatacttaactatcttgaaacaaaagtcacacgtcgttcaaattatactacttgtaacttgtcgaaaatctggagcttatctttgg

SEQ ID NO: 163203 - DNA, 2501 bp, Arabidopsis thaliana landsberg
tgcattccttagaccaactttccagagaagcaaaacatctaaaaccacaaaaccatggtcttaaaagaaaattcttaaacgtcaggtgtgtctgagcgcagaactgtcaagaaaaacaagataaagagttaggaggttaataaaaagaagaaaaaacatataaaacggaactaagaggtaaaagattgaaacccctcttcaagttgttcaagtaaagatcatcaagcaaaaggtagagatgtcgatcaaattggtggaacaaacgcacggagagggaggagaatcgtgagtaacgtacctggtttctgaggctttccatcggaccattttggagagggagaagtgaaccttgtcgcgattgattgtttcagctttgaatggttctttgagacggatatacgccgtccccatactcgttctcagcccattttaggcctttctgaattaggcccaaatacgtttacgtgtttttagaggaaaactttcaacgtgcatgtcaaagacaaattgtttgtttattttctcatcaagcaagacagagactactattttgctttttttaaaagaaaacgatgtagcattttccttgtcgagaagctaaggaaacctgacaaaaatgcaagggataacaaacgcattaaccaaagtatcattttttccaagcaaagaaacatttgcacaaaacccatgcatataaacctcattatccaataattagcaatgctgcataacacataatttaaaaaccctaagaaaaaaatcggaagtttgtggaagcaagaagaagaaatgatgaatccagaatccgatcatccttcatctcctcgtcaacgtaagattggaatcgccgttgagctctctgaagaaagcgccttcactgttcgttgggctgttgataactacatccgtcagggagacgacatcatcattctacacgtctctccaaccgccggtttcgttggagccgattggggatttcaccctctccaaactcaacctccttccaccaccgcttctatttcctccaaagtagcggatctcgggaagccattgaaggaagctggattccctcacacgattcatacagccaaagattacgataagagagagaggctttgtcttgagactcaacggctcaatctcactgctgtgattatgggatttggtgatggctctgttagtgatttctgtgttcaccactgtgtttgtcccgtcgttgtggttagataccctgatggtcctggcaatgttgaaggtactcgggcagcgcctattgtgactttcaaatcacgtacggatgatgacgaagagatagattataaggctcagactgctctgactgcttctgttcatcctcaacacatcaaaggtttctttccttgtggttttcatatttacttgcaaagcactctatctattcatcataaaaaatttcatgtccttttttttttttttccatcttagccatggattcggtgtcaaagcagcctcttctcttttgccctcgtgcatcttttactaacaatgaagaagagtttcgcgcgatgcaattcctagagctaccaagtctttcatcttcatcttcatttcacctcacctccttagatttgggcaacaacgttaacctaacacgcagatactactacagagatggcaagcctaaacctaacaaacaatgtgaaatctgctccatgtcattaatccctaccacgttttattcctgcaagatatgtgtccctcttcaatcttcagtattatcacgcttttcaggctactaccacgaagcttgtatcgagccgatatcaaagcacccatatcatcctaaacatgctctccgatttagttatcaatcagatcagatatgcttatcttgttcaacttttaaggattgtgcttaccattgctctatatgcagttttaccatgtgtcaagattgtgctagagagccaccactccttgcaattgactatccaaaaaggcatgagcatacactcttctactttcataggaaaggctccttgatttgtgacgtttgtgggttgagtgatggcaggtctttgctgtattcctgtgtcaagtgtaattttgtagtccataaagagtgtgtctattttccatgcatcataaaaatatcacgtcatgaacatcgtctctccttcagttcttcacttactcctgaacaatggttatgtggagtgtgtcgcgaaagcatagacacaaattttgcaagatattcttgcgtaaagggttgcagtttcgcggttcattctaaatgtgcaacgcgaaaagatgtatgggacggaaaagaacttgagggagaaccagaagaagatgaatctctatatatttttaagtcgttcaatgagataagtgatggaattatagaatattttcgtcaccgaagtcatcatatgagactggacgtcgattccatcagagcatttgaggaggatccttgttgtctagcacgatcgttcaatatgtgtgatgatcttatttac

SEQ ID NO: 163204 - DNA, 1512 bp, Arabidopsis thaliana landsberg
taagagagaggttaaaatgagcataatgaggaatttcttgagtatgataattatgctttgcgtatgtctcaattggtgttttgctgaaggagctgagaaaagcgagagtggaaaggtacttgattcttacaccattcaagtcagctctctgttcccttcatcatcatcttgtgtcccttcttcaaaaggtgattatcttagcctatttactcaccgatgattcattgtgtttagagttctttttttgggtctcttttgttatattttaacatgctattttcttcacagcatctaataccaagtcgtcgctgcgcgtggtgcacatgcatggtgcgtgctcgcatcttagcagcgatgcgagagtcgaccatgacgaaatcatcagacgcgatcaagcacgtgtggagtccatctactcaaaattgtcaaagaatagcgcaaatgaagtcagcgaagccaagtcaacggagctaccggctaaaagtggaatcacactcggatcaggaaactacatcgtaacaatcggaatcgggacaccgaagcacgatctatcgctggtcttcgacaccggaagtgacctgacatggactcaatgtgagccatgtctaggaagttgctattcacaaaaggaaccaaaatttaacccttcttcgtcttctacttaccaaaacgtctcgtgctcatctccaatgtgtgaagacgctgagagttgttcggcttccaactgcgtatacagtatcggttacggcgataagtcgtttacccaaggatttcttgcaaaggagaaatttaccctaacgaactctgatgttttggaggatgtttactttggttgcggtgaaaacaaccaaggacttttcgacggtgttgctgggcttctcggccttggccctggcaaactctcactaccggcgcaaacaacaacgacctacaacaatatcttctcctactgtctaccttctttcacaagtaacagtactggccatcttacctttggatccgctggaatctctgaatccgttaaattcacaccgatttcttccttcccaagcgcattcaattatggcatcgatatcataggtatcagtgtaaggcgacaaggaattagcgattactccaaactcattctcgaccgaaggtgctataatcgactcaggcacagtgtttactcgcctccctaccaaagtctacgcggaactccgcagtgtttttaaggaaaagatgtcgagttacaagagtacgtcgggatacgggctttttgacacatgttacgatttcactggcttggatacggtgacatacccgacgattgcattctccttcgccggtggcactgtcgtagaacttgatggatcagggatttcgttgccgatcaagatatcacaggtttgtttggcgtttgcagggaatgatgaccttcccgccatctttggaaacgttcagcagacgacgctagatgttgtgtacgacgtggctggtggacgagtagattttgctcccaatggttgttaa

SEQ ID NO: 163205 - DNA, 1460 bp, Arabidopsis thaliana landsberg
gtggatgtacccatttgagaggtttttgaaaaagttgaaaggaaaaccaaagaacaaaagatatgctgcaggctcaattgttgagtcatatatcaatgacgagattgcttacttttcagagcactactttgccgatcatatacaaacaaaatcaaggtaaatacatttatttatttaactatttactatacttcaattttcattcaattacatgaatcaggttaacaatattcgataaaggtgaagttcctgtttatcatgtccctggagtacctagcatatttatgcacgtcggtcgtccaagtggtgaaatgcatgtagaatggctttcagagaaacactaccagagcgcacatgcatatgttttaagaaattgtgactattttaaaccatttgagaggtatttttaatcactattaattcgtttgtaaattttcactaagatcactttgatttatttttctttgtttgtaaatatagtatgttcgaggattgtctttctgcaaaatatccatgcttgaccgaaaaagaactctacgcgagaagagctgaagaatatcatctatgggttaaagaatatgtaagtctacatcaatttcttgcattcaaaaagtgagaatcatatttatatgtattaatattatttatctattatgtaggtaacatattggaacactacttctccatttcctacttgggttcaagaaattgtgcaaggacctttgaataaggtcaaaacttggccaatgtatttcacaagaggatatatgtttcatacgcaaaatcacggcgctggacgaaagacatgtaactatggggtatgtgttaaaggtgaaaattacgctgattcatctaatgaagcggatatctacggtaccttaactaatatcatagaactcgagtatgagggcattgtcaatttgaggatcacactttttaagtgtaagtggtatgacccaaagattgggagaggcactcggcgaagccacggtggcgttgttgacgttctatctacgaggaagtacaataaatacgagccatttattcttggtacgtaatttttaagaggtcaattgtatttctcttttaattattaatactcttgtttgatatatatgtataacttgtgtttacaggatctcaagcagatcaagtttgttatattccgtacccatatacgaagaaaccaaaaagcatttggctcaatgtttttaagagttaatcctcggggaaacatttatggagaatatgaaaataatgatccgactcttgtgcaaacaaaaaatgatgaagctgtgttgctgactacaattgaagatctggtattagacaatctggtagaaagcttaaacccaatcatactcgattacgatgtcggagatgctgaaccagaagatgaattccgatgtaatttatcgtcttcaaacgatgatgaagtcgaagatgatgaagagtactaa

SEQ ID NO: 163206 - DNA, 1921 bp, Arabidopsis thaliana landsberg
  unsure (1)..(1921): unsure at all n locations
aacaaagagttcatctcgagctagaagatcctccattgataacgaagaggttgaggcgtttgacatgagtggcatgactgaacgccaaattcgccaagctcgccgtgcccaaagatcaagattgattcaaggtggaagctcaagccgctcagccatgcaaagagaagaagtagctcggggaaagagggtcgttgaagctgaagaagaacaccatgaagaggcaccctttgaagaagcggtttccgaggaagaggttgagatcatcggggatgatacaccagcccctgttgggagacgaaactggctaaagaggaagggagagccaaccccaaacgagtactatcaatatttgaaggagttgaagtttgagggaactaaataccctcataagtaaacgatgcaagagcttggtatttgtggtgatgtggaatacttgatggaattggtcaatcttgcaacattcatgagctgccaatgtgggggatataaagaggagagctgccaactccttgcaaccctcaaggttcgcttatgtgttgatgattcggagaaagaagagagaggaggtcttggttacataaatttaaaggttagggatgtcgagtatactctttatattcgccatcttgataccattttcgggtttccaagtgaagaagttatccgccaagactatgatcaagatgagctaaagttcctttggaaaataatcgccggtcngaagccctactcgccagccaagagcaagagttcttcaattcgaaatcccgtgattagatacgtccaacaatgcatcgccaacaccctctttgcaaagaaagccaccagatttgttggtgaagaggagctatgcatgatagaccaatctttggtcttcattctaagagagacaacagatgggaggaagatggcaggtgatagagcagacacttcgctgagtgttgttcttttggatcacctattaagctacagagagtatgctgcaactatccatcgctcgggaattcgcggaagcctttgtgttggtggtctcttaacgccaatactgggagctgtggggatggaatttggaacctctgacatgttccccaagttcattgacctcgactatctcaaggggaaagattttcttgagaaaacaactttggcggatcgctatctcttcaagttcaaccatccgaagctttgaccttctcttctacccctaccatgcgagaaccggaatttggtgaagacaaggcgcaacatcaatttcatgtcatctccctccgccttgaacatcgacattggaggagctcgggaagatgaaccagaatatagtccagccgactatgagcaacatgagtactttaatcaagctgattatgaggagcaaatcgagtttgagcaacatgttgatcaatcggagcatgggggcagcgaacaagagcaagctcattatgaagaaggtgccaaccaaggagaagatgagtttgctgaagttcacaagaagctcggtgtacttgaagagcttgggaaccttcacagtaagacaatgaagggtttcaagaagaagatgagaacaatgaagaagtcgctcaagagtatggctgctcaactcaaggacttccagagcaagccaaggccaccatctccaaccgccgaagtaagaaggagcggttcaacgagctcagctgcaaggagagctgaaaggatcgtcaagcccgagcttcatcttttgagcctcgggaagtgatctccgagttgagagagccaaggagcaggcagagacgagcttccacacgctcgatcggacagaacgagcaacaccctcccgcctcaacttcagcccctgcctatacccaagagagtatggatgactatgtctccatctacttcacctgaaaactgaggtaacaccacctctccattgtatatacca

SEQ ID NO: 163207 - DNA, 2712 bp, Arabidopsis thaliana landsberg
atctcattcgattcgaatcatcttcgatctcttcgctttcttctactctttgatctcttcgctttcttcagttcttcgatctcttcgtctctcttcatcgatgcctatcgccggtcgtggaggttcacgaaagaggaagacaacccccaacgttacacagagagctggagggtccacaccgcttggaaggccagcttcgctgcctcagcagtacgacttcactctggcggtggcgcctcaagttcctctgacgcagcctcctcaagccgtcggagcctcaacgtcagcaccccactaccacaactatccgggggcgcatcaactattccaaagctccaccacttagcgtgttgatccgccgccaccgcgatctgaagaggcgcagtttaatccaccgccataagatcctctaaaccaagagcaaccagagtctccaaatcccaactctcagggacacaaccatccatcttctcaaggcaacaactttcaagagggagctcctcaatcattgtcggagctacaagaagacttggcgagggctctctccgacatacttatggttcccggaagggaaatgtggaccaccgtactgtctcctattcccaagccgaagactgaatggtatgtgctcttcctcaaccctattagcttgttttagattctgtattagcttgtgttacgttgcagcaatgattagcttgtgttaggttgtgtcttgattagcttgtgtcttgatttgcttgtgttagattgtggtggattgctcttgtgtccgctttgttaatttattgtgaacatagattgtgtcttgatatgcttgtattagattgtttcattggattgtgtcttgattagcttctgtaatactctgtcttgatgagcttgtgttacattgtggtcgcttcctatcttgtgtaaacatagtgctcatgtcttgatgagcttgtgttctgttgtggtggcttactcacttgtggtttgttgaggtggtttgttctgctgtggtggcttgctatcttgtgtctctgttgtggtggcttgctctcttgtgaacgcttgctatcttctgtgaacatagtggtcatgtctagcctctcttgtgttctgttgtggtggtttgttctgttgtggtggcttgctatcttgtgttctgttttggtggcttgctctcttgtgttctcttgctatcttgtgtgaacatagtggtcatgtctagcctatcttgtgttttgttgtggtggcttgctatcttgtgttctgttgtggtggcttgttctgttgtggtcgcttgctatcttctgagaacatagtggtcatatctagcaatacttgtgttctgttgtggtggcttgctctcttgtgttctgttgtggtggcttgctattctttctgttgagttgtttcactaatgtaacttgtttttatctttcattgtttcatgtgtttggaggtttactcgcgacaggggttcaaagttggttagaaagatcactcggatttttacacaaaaacttaatgctccctactataactgctcatgtgtgccattggataaaagagagaggttatttttctagagtttgcggtcagctgtcatgcatctctcttactttcttaactttcctgcttaatcttttgaatttcactaactcaagctactcttttttgtagaccactcacagttggattcccttaataagagggactgtgcagtattacttcaataaggtctgtaaatggtgcttaaagtacatggttagccccgcaaggagaactagagagcagcctccatggattggtgaaactctgtgggctgttatgtgcgcttactgggacaccgaaccagcacaaaaacggagtcggacctattccaaagctcgtctctctgaccgtaacggtctcggtcctcacatccacttctgtgggccaaagtcttttcaagaaatccaagacgaatttgtaagtttttctgttacctctttcagttacctcacatgtatgtttttgagtatttgagctgtgttggtttcattgcaggaagagaagttgggaagaccggtccatcttggtgaggtgttcatcgaaacacacactaagtcggatggctcatttgttgatcagaagtcggagaagattgctcaagcttatcagcagaatgtgagagataggctgtcagcactagaggcgtctgcttctgctgtctctgatggctcttcacgaccttgggagctgacaaatgaggagtacacagccatctttctcgaggtaaaatgttttagtctaaacctcttgacttagagtccaattaatattctgtcactaatgagcttcttctctatttcttttcagtccaccgaaagggattccagaggcaatccttatggactaggatgtctaaaagacactctaggcagcgccaaccgccatcactccggttcctcatcatcctttcaagccctagaagaacggctgcaggaagctcaaaggaaaatagaagagcaggctgcatataatgagaagagagatgctgagattgctgcccgagaagctgagtcatcccgagtcacagctgagcaaaaggacaagctcgagcaattgtctttagtcgagaagtatctccgccaaaccgatccgcagttcttggacttcatggcaagtcactctaccacaaccacagaacgtctaccaagtcctccacctaatgatccttag

SEQ ID NO: 163208 - DNA, 9451 bp, Arabidopsis thaliana landsberg
  unsure (1)..(9451): unsure at all n locations
atgtctgcagagggatatattcctcacaaattttgtgacgacttagcgacggtctcctatctgctcgcaaagtcctcgcaattctttagcaaatttgcgatggaccttttccatcgcaaatgttcctcgtaaatcgcttgttttcttgaagtaaaaaggtttttaaaaggattttaaagcgtttaaaaagttattgtaatgttaacacattaattgttagtaattgggcgtagacctcttatttttcgaaaaagcaaactgttttatgataaattcacttaagcacaaaattaactaaaaaacaaaacaaaaaaagaaaagaaaacagtgaaagtaacaaaaagtaaaaaaaaaaagttagagaaactgtcgtctctctgagtgtgtattcttccttagaacaatttgaagaaattttgtttctccagcaaaggaatcaattgaaggtaacaaacttatgaaactaaagtttgatatatgggtttgttcgattttatttctttttaacgaatctcttctctgttataacaatatctagggtttttagttcgcaatgtcctcacaattttgcgagagatatatttgcaggttgaagtgaaatcaatagttggtgttaatcctcatgaatatgaccacttggtttcaaaaaagaatcctaaagattaggatttgttacatatttttgatcttctgatcaaagggtataaaatgagcaagaaagattggagtgagtgatggattgaagtggaacaagtacatgaaagtagaatagatcaggtaatgaaacctgcaattgaaacacttgtgtatcacataagaaaaaggaaatcaatatcctttggtgagaaaataggactggtctatgaaaactatgaagttcttaggtacaaagtttgaaggatggacgactatttagggatcgaaagagttcatgccagttctactagagaagaagaaaaaaaagaggaagaagaaaatgttgcgagggatatattcctaacaaattttgtgacgacttagcgacgttctcctatatgctcgcaaagtcctcgcaattctgtatcaaatttgcgacggaccttgcaaatgttcctcgtaaatcgcttgttttcttgtagtaaaaaggtttttaaaaggatttaaaagcgtttaaaaagttactgtaatgttaacactttaattgttagtaattacgcgtagacctcttatttttcaaaaaagcaaactgtttttgtataaattcactaaagcccaaaattcactaaaaaccaaacaaaaaagaaaaggaaacactgaaagtaacaaaaagtaaaaaaagaaacagtaagagaaactgtcgtctctctcactgtgtattcttccttagaacaatttgaagaaattctgtttctccgcaaaggaatcaattgaagataacaagtttatgatactaaattttgatatttgggttcgtttgattttattgctttttgtcgaatctcttctctattatagcaatatctagggttttcggttcgcaaattcttcgcaagtacctcgcaatttttcgagggctatatttgcaggttgaagtgaaaccaatagttggtgttaattctcatgaatatgaccacttggtttcaaaaaagaatcctaaagacaaggatctatgacaaattttttatcttgtgatcaaaaggtataaaacgagcaagaaggattggagtcagggatggattgaagtggaacaagtacatgaaggtagaattgatcatataacgaaacatgcaattgaaacacttgtgtattgcagcagaaaaaggaaatcaatgtcctttggtgagaaaagaggggttgtctatgaaaattgtaaagttcttaggtaccaagttagaaggatagaagactatttaggggtcgaaaggctttctgtcagttctactagagaataataaaaagaagaggaagaagaaaattttgcgagggatatattcctcgcaaattttgcgacgaattagcgatgttctcatatctgctcgcaaagtcctcgcaattctataacaaatttgcgagggaccttttccatcgcaaatgtttgttgcaaatcacttgttttcttgttgtaaaaaggtttctgaaagaattttaaagcgttgaaaaagttactgtaatgttaacactttaactgttagtaattgggactatacctcttattttcgaaaaagcaaaccgtatttgtataaattcactaaagccaaaattcactaaaaaccaaaaaacaaaatcgaaaagaaaaccatgaaagtaacaataagtaaaaaaaattttttgagaaactgtcgtctttcttactgtgtcttcttccttagaacagtttgaagaaatttcgtttctccagcaaaggaatcaattgaaggtaacaaatttatgacactaaagtttgatatttgggtttattcgatttttatttcttttgtcgaatctcttctctgttataacaatatctagggtttctgttcgcaaattcctcgcaagtacctcgcaattttgctagggatatatttgcaggttgaagtgaaaccaatagttggtgttaattctcatgaatatgactattcggtttcaaaaaagaatcctaaagattaggatttgttacatatttttgatcttctgatcaaagggtataaaatgagatagaaggattggagtcagtgatggaatgaagtggaacaaatacatgaaagtagaatagatcaggtaatcactacaaaaaaagtcttcattgatagcatatctttatagcacggattactcaattgctattgaagatgtcatgtaattttcgttattatattacagcagttgataactgctaaacgctaagatatagttttaatattacagccctttataaacgctgatataaagttttaatgagcgggaacacaaaatacttattccgccaaataacacttagtcattttcgagaaaaaaaaccaaacacaaaacaacgtttcgaaaaccctaagaaagaaaactctctcagtcctcagctgtcagtccgacgaactcactattccggccaccgattaaaccctctgttgcctctccgtcgccgtcgtgaaagctctccgttcaactggaacctccgccggcactcaatccgctttatatctgtccactttgagatcgaatcgaaggcaagtcattttctatgtttttttttttctcctttgacactcaattcgttaccctaaatctgttttcatccatctctgagactcaataaccgatgtttgtgtgattttagaatggttttctttatcgattcttaaaattttgtctactttgcatgcctttgtttattgcgaattcatatgaatttcgtcttaataatgttaacctgaactgctctaggtgcttgtgaacaattttgcattcgaaattgtgtatttatttgggcattagagttgcaaattttggattttggctctgtaatttttgattttttattgagtgataaaacttgagaatttcattgtcagattgattaagcttcgtctgttgtctgaatcgtgttgttattgtcacatcgatttagttattnntgttatgtcaaactatcattgattcactttcttgaatataaaatattttgctcattctatatattttgtttaatttgtaagcgttgctgagcgaatcaatggacatttggaagcttatcaattctctcttttcacaggaaaggttagtatcattgtctcccttttgtgaattgttttctcttgtcatagttagtatataagtttgagttatttgtgaatgttgtctgcttgttctgtgattgtttacttagaagaattcttttcagtttcatttattttaaaacatgctaatataatctagtaactgtacttatctactgaattgttttgatagagtgattagtaaatgttgtattctgtgtttgtttatattgaagattcttttgagttacatttgtttaaaacctgctactataatcgagtagcatgtacttaaaacctaaattgctttgattgattacgtttataagtttgaatttacttgtgaatgttgtctacttattgtgtgattgcttattcaggagattcttttctttacacaatatggtatgctgtttaggttactaaaggttaatttatgttacggttagcacatagaatggtggccaaggattgggtgcattttggcaagtaaggaatataattataattataattatatttcttaggtttcagtaagggttttggggagtttacttcttttttttctctctttctacttctgcaacaaagagctgatcctgcttatggagagaggggctatcaagtttgtacgggatgtggctgcggctttgggagatgatatgattgtatgtccttgcattgattgtcgtaacatagatcgtcactcaggctgtgtagttgttgatcatcttgtgacaagaggaatggatgaggcttataagaagcggtgtgactggtatcatcatggagaattggtgtctggtggtgaaagtgaaagcaaagtcagtcagtggaatgatgaagtagttgagttgtatcaggctgcagagtatttggacgaagagtttgatgctatggttcaattgggcgagattgtagaacgtgacgacaagaaagaagacgagttccttgcaaagcttgcagatgctgagacacctctatatccaagctgtgttaaccatagcaagctgtccgcgattgtgtctctatttagactgaagaccaaaaatggctggtctgacaagagtttcaacgatcttctagagacattgccggagatgctaacagaggataatgtgctacacacatcactgtatgaggtgaaaaagtttttgaaatcctttgatataggctatcagaagattcatgcatgtgttaatgactgctgcctattcagaaagaaatacaagaagctccagaattgtcctaaatgcaatgcttcacgatggaagacaaacatgcatactggtgaagtaaagaaaggtgttccacagaaagtgttgcggtactttccaataatcccacgcctcaaaagaatgttcagatctgaggaaatggctagggatttaaggtgacattttcacaacaaaagcacagatggaaaggtctgccaccctgttgattcagtaacatgggatcagatgaatgcaaaataccctttatttgcatcagaggaaaggaacttggggcttggtctttccatagatgggtttaatccattcaacatgaaaaacacaaggtataggtgctgacctgttttgcttgtaaactacaatctgcctcctgacttatgcatgaagaaggagaacatcatgctgacattgttgattcggggtccacaacagcctggaaatagtattgatgtatacttagaaccacttatagatgatttatgccatctgtgggacaatggagaattgacatatgatgctttcagtaaatcatcatttactctcaaagctatgctgctttggacgattagtgatttctggcttatgggaatcttacgggttgtaaagtgaagggaaaaatagcgtgtcctttatgtggtaaacattcagaaagcatgtggttgaaattcagcagaaaacatatctatatgggacatagaatgggtctgccaccatcacataggtttagaaataagaagtcttggtttgatggtaaagctgaacatcggagaaagagtagaatactaagtggtttggaaatttatcataacttgaaaaatttccaaaataattttggaaatttcaaacaatctacaaggaagaggaaacaatcggagtctgttaaatcaggatcaaatagtgatgatctatctagtgactcggaggaggatgaggaagaagaggcagaagtagatgaggaagagttatcaagatggaagaaaaggtcaatctttttcaggctatcttattggcaggtctgttctcttttcttgaaatatgttatattgtttagattgaaacaaagggaaaatgtctaatgcattttgtttgtctgttttgtaggacctaccagtaaggcataacttagacgtcatgcatgtggagagaaatgtggctgcatctattgtatcaacattgttgcattgtgggaagtcaaaggatggtctcaatgctcgcaaagatctcgaggtgcttggtataaggaaggacttgcatccgcaaaccaaagggaaaatgacataccttcctgcagcactttggtctctctccaagacagagaagaagctattctgcaaacgtctatttgattttaaaggaccagatggctactgttcagacatagcaagaggtgtatctttagaagactgtaaggtaacaggactgaaatcacatgattatcacgtcttaatgcagcagcttcttccaatagctttgagagggttgttacctaaaggtcctagggtagcaattgaacgcttatgcaaatttttcaatcacttatgtcagagagtgattgatatggagcagcttttggaaatggaacctgagattgttgaaaccctttgtctgtttgaaaggttttttcctcccagtttctttgacatcatggtgcacttgacagttcatttagggagagaagctcggttagggggaccagttcatttcagatggatgtacccttttgagagatatatgaaagtcctcaaagattttgtgagaaacacagcaagacctgaagggtgtattgctgaatgttacttagctgaagagtgcatccaattctgtagtgaatttttgaagaagacaacaaaagttcaggaaaaggcagatagaaatactgagtatgagaacaactctatccttggagggcgtcctatctctgcaggcacctttattagtcttacagaaatggagagaaaaatagctcatttggttgtgatccagaatatggctgtcgtcgaaccttatgttgagtaagttacaatctatctctctttctattgcttttatatatatatagaaactaattaattgtatctgtaatggctaagttaagcttcactttctacttctatgaatgctgattctgaattttgttttctctgtttactagtgagcacctgcagcttctacaaaacactaatgggagatgcagacgtgatgcgtctctgttatggagtatggacacccaaaattttgcatcttggcttaaagaacaggctagtatttgtctttcacttagtagtttagcttaaagaacaagctagcaatagatataagagcctgactttttctatttttctttaatagatacatcttgattcaagtactcatggtgaaacactgaaatggctggcttatggtccatgttgttgcacaagatcatttactggttacatagtgaatgggcaacgatttgacacaagaacagttgacaggaaaacacagaatagtggtgttttctatgaagcgacatcagtttgtaggtctagtgcaaaggataaggaacaagtggtggatttggtgcagtgttatggctgcataacagacattatactgttggactataatgtcttctatgttcctttattcccttgaaaacatcgatggagagacagaaaaagaagctgaagacattaatggagagacagaaaacgaagctgaagacattaatggagagacagaaaaagaagctggagtgcaagcagcagaagaacctgaaggcgagcttgaaatatctggagatgaagatgttgttcaacctaagaccaagaggcagcgtggaccaactaggatgaaagatattgctaaggatccaaatgccagagtgagagtggagtacaccatgatgggagagcctgttggtaaaggttcagttaaactggtatcatatgtaggcacattggtacgtgaacatgttcctatcacaattgaaacttggaaggatgttagtcaggatatgaaaacggttctctggaaatctgtgcaggtaaattcttcttttcagtctttttttctgcttgttagttgtgtaaaggtttatttccatactttgtgtgatggtaaatgattgcaggcaaggtttgagcttgatgaagagtttcaaagggttgctgttctaaaacaaatgggcagtctgtggaggtcatacaagtcccggactgtgaaagatattaatctggctcctaataatcagcaaaggatgaatctgagacccatgaatatttccccaacagaatggcgcaaatttgttaaagtcaaaactagcgcatcctttaaggtaatgagttggaattatgaccattttaacttttatttgtcaattattaacatgtttaattggtaggttgtgagtgagaaatacaaagaaaggaggaggaatcaaatacctcatactacaagtcgtaaaggaatagtgagattagcagaagacatggtaagtaaattgacatgtaagttgtctcttctggtaagaatgcattctcatatatttgaatgaaattttttttttgacacagaaacttgaaagtggagatccatcagaagtgacaaggctaaaggtctgggtaaagtctcgtaccaaaaaggatggtacgccggtgaacactaatgctgctgaaaagattgtaagtaatctctgcaagactgatcatgatttcagttatcaatattagtagatgacacaatttcatattctgtagagaaaggcggctgagctggttggaaatgatggtccaccaacgtcagcaaatccagaagaagatcacctctctcaactttaggaccagacaatccgggtaggctgagagcaatgggtagaggcatgagtaaaacaaaactagcttgcctccaagtcaagagcaagtgcatgactaacatggaagagaagcaagttcttttaatgaagaaggtcaatgagctgcaagatgaacttaccagaataaagcagagacaagaacctgaagtgggtgaaaactctgctgctgccagggtaagtgattccttctccctttattccatcagttttggaatcacttctttttattaaagtttggccttcttttgtagagtgtaaacagaagaacaaaccctaaatgtctgttggttaattggtctggacctgaggatatcattggtgaggggcgaattctttcttctgatcctgatgacgtggttaatgactgtcgcctatgccctgtggactcgaaggtgttggctgaagctgctaatacaccagatgcatttctatggcgacctgcacctaacatgtatactatcacggaagctgttggacagatgattgcatggcctgcatctaaatgtgttcttgtagagaaggatatcgaaataaaggacattgtgcctttggtaaactgcagatttcagcacattcttagtcagctttttgatgagatcatgtttgatctagtagagacagagctaatttga

SEQ ID NO: 163209 - DNA, 7430 bp, Arabidopsis thaliana landsberg
  unsure (1)..(7430): unsure at all n locations
atggcgggaaactacaattatggcggtagtggcggtttctatcgagattggatgtacaagagattcgatgaagtgacggggaatttgtcagccgaatacgtcgcaggagttgaggaattcatgacattcgctaatagtcagcctatagtacagagttgtcgaggtaaatttcattgtccttgtagtgtatgcaagaatgaaaaacacatcatctcgggtagaagagttagtagtcatttgtttagtcaaggatttatgcctgattattatgtttggtataagcatggagaagaattgaatatggatatcggaactagttacacggataggacgtattttagtgagaatcatgaagaagtgggtaatgttgtagaagatccatatgtggatatggtgaacgatgcattaattttaacgtggggtttgatgataactatcatcaggatagttatcatcaggatagtagttatcagaatgtggaagaaccggtccgtaatcattcaaagaaattctaggacttgttagaaggtgcaaatactccattgtacgatggttgtcgtgaagtcagtcgcagttatccttagcatctcgactcatgcagaacaaagcggattataatatgagtgaaaaattggtggattccgtttgcgaaatgtttacagattttttaccaaaagaaaaccaggctaccagttcccattaccaaaccgaaaagttgatgcgcaataaagaacttccatatcatacgattgatgaacgcaaaaacaagcgtctgttgctttggaaagaagacgaataactagatcagtgttctttatgtggcgcacaaaaatggaagcctaaagacaaccgtggaagaaccaagataccatatggacctgtgtggtatctacctattggtgaccgattgaagagattgtatcagagccataagacgacagcggctatgcgatggcatgccgagcacaaatcaaaggagggagaaatgaatcatccttcagatgcggcagagtggagatatttccaatctttatatcccctgtttgccgaagaaccccgtaacgtttatctcggattgtgtactgatgggttcaatccatttggcatgtctcgtaatcattcgttgtggcctgtgatcctcactccatataacttaccccctggtatatacatgaatacagagtatttatttcttacaattctgaattctgggcgaaatcatcctcgagctagtcttgatgtcttcctccaacctcttattgaggagctaaaagagttgtagtctactggagtcgatgcgtacaatgtttcattgagtcataaatttaatctaaaagcagtgctactgtggacgataagcgactttcgggcgtatagcattttatcaagatggactactcatggtaaattctcttgtccagtttgcatggaaagtacaaagtctttttatctacccaatggatggaagacatgctggtttgattgtcaccgtagattttttcctcatggtcatccatctcgtaggaacgaaaaagactttctgaagggaagagaaccctctagcgagtaatagtatccactcgagtctttgacaggggagcaagtttattacgagcggttggctagtgtaaatccaccaaaaacgaaggatgttggtgggaacggtcatgaaaagaagatgcgaggctatgggaaggaacataattggcacaaggaaagcatcttgtgggagttgtcttactggaaagacctcaatcttcgacataatattgatgtgatgcatacagagaagaattttcttgacaacatcatgaacactctcatgagagttaagggtaaatcaaaagataatatcatgtcaagattggatattgagaaattttgttcacgcccaggcttacatattgatagtagtggcaaagctccatttccagcgtatacattgacagaagaagccaaacagagtttattacaatgtgtgaaatatgatattagatttccagatggttattcttcagatttggctagttgtgtagatctggataatggaaagttttcaggcatgaaaagtcatgattgtcatgtatttatggagcgactacttccatttatctttgctgaactgcttgaccggaatgtccaccttgcactatcaggtacaatatatactaactatattttattccaccatttttttaatctaatcatttaacttgcacatatattttaggaattggagcatttattccgagatctatgttcgagaactttacagacaagtcgcgttcaaattctcaaacagaacatagttttaatcatctgtaacttcgaaaagatctttccaccatcattttttgatgttatggaacacttacctatccatctcccatacgaagctgaattgggtggcccagtccaatataggtggatgtacccattcgagaggtttttcaaaaagttgaaaggaaaagcaaagaacaaaagatatgctgcaggttcaattgttgagtcatatatcaatgacgagattgcttatttttcagagcactactttgccgatcatattcaaacaaaatcaaggtaaatatatttaattatttaacgattagatattcttcgatattaattcatttacatggatcaggttaacaagattcaatgaaggtgaagttcctgtatatcatgtccctggagtacctaatatatttatgcacgtcggccgtccaagtggtgaaatgcatgtagattggctttcagagaaagactaccaaagcgcacatgcatatgttttaagaaattatgactattttaaaccgtttgagaggtatttttaatcactcgttgtttgtaaattttcactaagatcactttgataaatttttcctcgtttgtaaatgtagtatgttcgaagattatctttctgccaaatatccatgcttgcccgaaaaagaactctacgcgagaagagcggaagaatatcatctatgggttaaagaatatgtaagtctacatcaattttggttcattcgaaaggtgatcatttaatatatactaattgatattgtttatctattatgtaggtaacatactggaacactacttctccatttcctacttgggttcaagagattgtgcaaggacctttgaacaaggttaaaacttggccaatgtatttcacaagaggatatttgtttcatacgcaaaatcacggcgctggacgaaagacatgtaactatggggtctgtgttaaaggtgaaaattacgctgattcatcagatgaagcggatttctacggtaccttaactgatattatagaactcgagtatgagggtatcgtcaatttgaggatcacactttttaagtgtaagtggtatgacccaaagatcgggagaggcactcgacgaagccatagtggcgttgtagacattctatctacgagaaaatacaataaatacgagccatttattcttggtacgtaattattcttaagtccaaaatacgtttcttttttaattattaataatctatctttgatatatgtatacaagatctcaagcagatcaagtttgttatattccgtatccatatacgaagaaaccaaagaacatttggctcaatgttttaaaagtcaatccgaggggaaacatttctggagaatatgaaaacaatgatccaactcttttgcaaacagaaaatgatgatgatgttttgctcactacaattgaagatcttgttcttgaaactccggtagccaacttaaacccaataatccttgattacgatgtcggggatgctgaaccagaagacgaattccgatgtaatttatcgtcctcggacgaagatgaagtagaagatgaagatgtataactgtgttaatatatgtataattatttgaataaatattagaatgaattttgtttcataaaatcattgaacttttttatgatatacaaatatttcttcacatctataattatatcaatttaaaagtgactattatgcgactaatgagcgactaagataagttttattgggcttctaaacgttgaaatccaaacccattaaaatcggcgacaaaacgacgactattatgcgacaactgtttgatatgttgggctttaaaatttcggggcccaaacccattagtataggcgtctatattgcgacaaaataccgacatgttttgatttgttgggctttgaaattttgaaacccaaacccagtataattggcgacaaaattacaactactcaacgatacttgtttgattagttgggcttcaaaatttcgaggcccaaacccaaattagtatgcgacaattatgcgactattatgcgacctctattgtgttgaaaaccctaaatcgagtcatttctcttcaagccagacacttagccatttcttcttcttcttcgtcttcttcgtctcgcaaaaccctaacccccaattctctttcttcttcgatcttcttcttcttctttctaagatcgatcgatcttcttcgatctctcaccttaaacctattcgatccaacctcctcttcttcttcttcttcgtctcgaaaaccctaatccccaaaactctttctaagatcgatcctttctccttgtagatcgatcttcttcttcttcctataagatcgatcgatcttcttcgatctctcaccttcaacctctccgatctgcttcgtcttcttcttcttcttctcttcaatctcttcatttggctcactatcatgcctatcgccggtcgaggtggctcaaggaagcgtaagacgacgccgaacgtcactcagagagccggcgccggcggatcaagacctgcaaatcttcctccccaatacaacttcactccggcgctggcggttcaagttcctgcgacagagccggctcaacaacatggaccttcaacgtctgcaccccacgtccgcaactatccaccgtctctgcaactcttccagaactcaacgactcaaccacaacatcaagctcctccgcctctatctgaagaggtccactacactccgccgccaacagcgccacctcagcaaactcctcctcagtcgcgagattcagacgctccagcaaacagccacccgtcgtctcaagggaacaacttccaagaggaagttcctgggacgttgccggagctacaagaagactcggcgatggctctgcaatcgacactctctgtgccaaacagggagcagtggtgttgtgtcttatctccaattcccaaacctaaaaccgagtggtatgttttcttcctctattttattctagtgttcttagcctgtgtagtgtaactcgtgttatggtctgtagaatggcttgttagggtttgtgtaacatagtaaaatctgcctttgttggagttggatgtttgttagggtttgtgtaacatagtagaatctgcctttgttctaaactcgtgtgtgatcttgttaagttcttcactttgtctataatcttgttaggttatttattgtgttctgttgtgaatcatgaacataattgtggaacatttgttgattgttgaacttagcatgttttcggctttgacattgaggatctgtctttgttctatacttgtctataatcttgttaagttctttattgtgttctgttgtgaatcatgaacttaattgtggaacatttgttgattgtatcccattgcatgttttcggctttgacattgaggatctgtctttgttctatacttgtctataatcttgttaagttctttattgtgttctgttgtgaatcatgaacttaattgtggaacatttgttgattattgaacttagcatgttttcggctttgacataaaggatctgtctttattctatacttgtctataatcttgttaagttctttattgtgttctgttatgaatcatgaacataattgtggaacatttgttgattgttgaacttagcatgttttcggctttgaccatgaggatctgtctttgttctatacttgtctatttttgttctttactgtctatgatcttgttatgttgactattgtgttctgtgtgtgatcttgtcggcttatacttgtctagaatcttgtagaatctgcctttgttcaattatatagtctactgtagttgttgtgttttggattttaaacatgtttactttctgtctatgttgcatgtgtttggaggtttactcgcgatagaggatctaaattagttagaaagatcacacggatttttactcaaaagttcaatgctccctactataattggtcatgtgtgccattggataaaagagaaagattgtttttagagtttgcggtaagcttcttgtatttctccaactttcttaactttccggcttaatcttttgaatttcactaactcaagctacaatgttttgtagnnnnnnnnnnnnnnnnnncccttaataacaggcactgtgcagtattacttcaatgaggtctgtaaacggcgcttgaaagacatggttagcaccgcgaggagaactagagagcagcctccatggattggtgaaactctgtgggctgttatgtgcgcttactgggacaccgaaccaacacaaaaacagagtcggacctattccaaagctcgtctctctgacggtaacggtctcggtcctcacatccacttctctgggccaaagtcttttcaggaaatccaagacgaattggtaagttcttctgttacctctttcagttaccccacatgtatgtttttgagtatttgagctgtgttggtttcattgcaggaggagaaattgtgaagaacggtcactattggtgaggtgtttgtagagacacatactaagtcggatggtacgtatgttgatcggaaggcggagatgattgctcaaacttatgagcagaatgtgagagatagattgttacagctagaggcggaagcttctgctgtgtctgatggcacttcacgaccttgggagctgacaaatgaggagtacacaaccatctttctcgaggtaaaatgttgtagtctaaacctcttgactttgagtttatggttattctgtcactaatctcttctttatttcttttcagtccaccgaaagggattccagaggcaatccttatggacttggcagtctcaaagacacattaggttgtgccaaccgcaatctccctggagaatcatcatcatcctttctagatttagaagaacggctgaaggaagtgcaacgcaagattgaggagcaggctgcctacaatgagaagcgagattctgagattgctgcgcgtgaagctgagacagcccgaatcacggctgagcaaaaggacaagctcgaacacttgtccttagtggagaaccatctccgacaaacagatctgcaattccttgacttcatggcctctcaatcttcgacaaccatagagcctctaccagctactccacaaaatgatcaatag

SEQ ID NO: 163210 - DNA, 948 bp, Arabidopsis thaliana landsberg
atggaggggtttcatatggtctcagaattgtgtcctctgatcactgggtggcgaatttatgtctttgtcgtgagagtcttcaagaaggttatatcgcccaacgtcttcgaactcggccttatcctggcagattatgcggtaatttctgtcaaatcattatgtgtttttctcgttcattcgcttaacttgtatattaaactgtctactatcatgttctgtatgtaaagaataaccgtattgaggccaccgttgatcgtcgccttgctccgttttatgaagaccgattcgttgaaaatgagtggaagacgatcacctctttcttggtccgtaagtcaactgacttagtcagagcaacaaagcatgaatacggcatacttttatgtatcggaccatcgtcgttcaggccccaccgagatcaccaccagttccagatttcgatttcactcccttcgactatattttggagaaatctgcttacaagaacgttttagtcggtgaggaggaataactccgacgcttcatttattacatttttgaaattttttgtttattatctttgtttctccatcatctagatgtcgttggagcgttggttgatgttggcgcattgactacagactattacggtctcaaactgagtttcaagataaaagatagatagtaagtgttcttttcatttgttttatttacaatgtcactctaaacgctaacagtccttatttctaacgtagtaatgaagtcttggagtgcgaagcccgcaatcaacaggcggagtacttggatggttactttcagagtttgggtaagggaaattttgttgtcgtactcagcttttggcgtctaaccgaactgtctaacccgaagcttgagagccatggtgctatttcaaaggtggttgccaatccggacagagcagaagttgcggatatctcgatggtggttttttag

SEQ ID NO: 163211 - DNA, 1217 bp, Arabidopsis thaliana landsberg
  unsure (1)..(1217): unsure at all n locations
atggttgcctcagccgccgcacgacctcttgtcaccgtccaaggacttgacggtgacatgagcaccgatcaatccaccaccgtcactttaccagacgtcatgactgctccagttcgacctgacattgtcaacttcgtccacgcccaaatctccaacaacagccgtcagccttacgcagtctccaaaaaggccggtcaccaaacctccgccgagtcctggggaaccggaagagccgtgtcacgtatccctcgtgttcctggtggtggaactcaccgtgccggtcaagcagcgttcggaaacatgtgtcgtggtggtcgtatgtttgctccgactaagatctggagacgctggcaccgtcgtgtcaatgtcaacatgaagaggcacgcgattgtttctgcaatcgctgctactgctgttccagctcttgtgatggctcgtggtcacaagatcgagaatgttcctgagatgcctcttgttgttagcgactcagctgaagctgtggagaagacatcagctgcgatcaaggtattgaagcagatcggtgcttacgacgatgcggagaaagctaagaacagtattggaattcgtcctggtaaaggtaaaatgaggaatcgtcgttacatttctaggaaaggtcctcttgttgtgtttggaactgaaggagccaagattgtgaaagcttttaggaatcttcctggtgttgagctttgtcacgttgagaggcttaacttgttgaaattagcccctggtggtcaccttggtaggtttgtgatttggactaagtctgcttttgagaagcttgaatctatctatggctcgtttgagaaaccatcagagaagaagaagggttacgtcttgcctcgtgcgaagatggtgaatgctgatcttgctaggattattaactccgatgaggtacagagtgtggtgaacccgattaagaaggatgcgaagagggctgttcttaannnnnnnnnnnnnnnnnnnnnnnatgtgatgttgaagttgaatccttatgctaagaccgcgaagaggatgtcactgttagctgaagcacagagagttaaggctaagaaggagaagctcgccaagaagaggaaaaccgttaccaaggtaatctcaatacttgacttgttctcttatcaaccgtttttggattgtctttgtttagttactgattacattttgatctgtggttgcatttcatttgacttaactta

SEQ ID NO: 163212 - DNA, 3992 bp, Arabidopsis thaliana landsberg
atgaaacccccaaagacgttaacgacgacgacggcggaggaggaagaaacaaccatgcggaaacagccgccttcgcctccaaagccaccacgtgtcaattctatgctccaatggtggcggagatggacggtgttggtggccgctatctggattcaagcattcaccggcacgaacttcgatttctctgcctactcttccgacatgaagtcttccatgggggtttctcaatctcggcttaactacatggcggttgcttcagatttgggtaaagcattgggttggtcttctggtttcgccattgcctatttccctgtctccggcgtgcttttcgctgccgccgcaatgggactcgtcggttacggtgtccagtggttatccatcgccgatgtgatcgatctaccttactctctggttctggtttgctgctccttagccgggttaagcatctgctggttcaacaccgtcagcttcatcctctgcattcgacatttcaaagcgaaccactcgttggccctgtctctcgttgtgagtttcaacggaatcagtgccgcgttgtacacgcttggccatgaagccattagtgggaaatcatcggcaagctctgatatttaccttctccttaactctctcatccctctgatcgtctctgttttagccctttggccggttcttactaaccctaattcctctgaaaccgatactacgcgaacgcatgacgaaaccagaatcttcgtagtcttcaatgtcttagccttagttacatgcttttaccttctcttgccttcctcaggcacctacttagcctcatcacctcgttggcatttcctcggagctattttccttctccttttcccattgtgcgtcccgtttctcgactatattcaccgtgctctcgagtcctgtttccaccaccacagctctggctatgcagcggttaacattgaggagcccaagatcctcaaaatcaaaagtcagaagagtaatgcggaggaggaaagtgatcaagtgagactaggagatgaacattctctcggaatgcttgttcgtaagcttgagttttggttatactacgtagcttatttctgcggcggcacgatcggtcttgtttatagcaacaacttaggacagatcgctcagtctctaggacaaagcagctcaaacgctaaatccttagttacactcttctctgccttctcctttctcggaagattgctctcctctgcacctgacttcacacgcaagaaactaaaatacttgacaagaacaggctggttcacgatttcgctactgccaacacctttggcattcttcatcctcgcgtattcacccaagaccaaccagaccgcgctactagaagttgcgacagcacttatcgggttaagctcggggtttgtgtttgcggctgcagtttccataacttccgaactctttggacgcaacagtgtcggtgtcaaccagaacatcctcatcacaaacattcccataggatctctcttctacggctacatggctgggtctgtctatgacacaaatgccagcctcggcaggaaatctgtggtggctgactcggttgtttgcgtaggaagaaagtgttatttcgtaacgtttttgttttggggttgtttgtctgttttggggtttgtatgtagcttgtttctgtttattagaaccagaccggtttatcaccggttaaaattgaacagaatgtaaaactgtgtagagtattatcagctgcctgcttataatggtatagattggtaggatccaagaaaagagtgaccattgccttcacacgactcagccaattatcaaaagtgttgtacaaaacattaatgcttagctctgttccaacttcatatataagaattaacatatactaatacatagttggtcattttaaaacttgctcgtgattcgtaaatttcccatcttaaatgaattagacaaattagccatcattatgaaagagaaaggttaaattagatgattagcgggcaataaaaggttagaattgatattatcatgtcattcgatagtgacacatgtgactagtttgacctttaggagcgccaacgtgtcatatatcagcgtaaattccaaaacaaaacaatctagtgtgggacccaaatactgttataaaaaaggatcattaaaatggatatgttaaaaaaagaaagtaaaaaacgcgtcagggaagagaagatggatccgaattccacggtttccggcgatggtcaggcgacggcggcgatagagcatcggtccttcgctcggatcggatttctcggaaacccgagcgatgtatacttcgggcgaaccatatcattgaccatcggaaacttctgggcatccgtgaagctggagccatcggagcatctcgtaatcaagcctcatccattccatgatctcgtccagttcacctctctcgaccatctcgtacgttctctttccatttcttctcattctcctctctggatctctatttatcctccaacattgttgttattctcctctctttgtttggatgcattttcaatattaatattatgatttcactgaatttcaggctcatcttttttcattagattccaaatcatttgtttattagtttgaattgtgtaaaacatttttcacgcttcatggctctaattctgagattttgtgtagctgaatcgtttgcaaaatgaaggatactacggtggggtaaggttgctaatggcgatatgtaaagtattccgtaactattgcaaagagaatgacattcaacttcaccaagccaacttctctctttcttatgataccaatatccctaggcaggtactgatcattttccttcccctttctctctatgtttttttcttttctctgccaccaacgcttatcttttcaactttgatgctccttccagacagggctttcgggttctagtgccatcgtatccgctgcccttaactgccttctcgacttctacaatgtcaggcatttgatcaaagtacaagtccgccctaacattgttctcagtgctgagaaagaacttggcattgttgctggtcttcaggacagggttgctcaggtctatggtggtcttgttcacatggtcagtgtctcccctcctatctcatacattgccgttggttccatcggttttatgactttttatcatcttcttcactttgcaggattttagcaaggagcacatggataaattggggcatgggatttacactcctatggatatcagtctcctccctcctctgcatctcatctatgctgagaatccgagcgactcagggaaggtacttacacttattcaatgattctggtttatgcatcaatcaagtgaaattcctcaaaaagcatttatgacactagaactcagatctttggggcataactcagtagaatttagaagtatctctctgttagatgtttcataatattagcattgccttctaatgcaggtacatagtatggttcggcaaagatggttagacggtgatgagtttataatctcatcaatgaaagaagtcggaagtctagcagaagaaggtcgaactgcattactcaacaaggaccattccaaacttgtggaactcatgaaccttaatttcgacattcggaggtaaatataattccagacaaaactcgaatatatacacaactcgagattaaactccatgctcacatgatgtttaaatagatgggagtgagtacacacatctaatagtgattgatgtgtgtttttttccgataggcggatgtttggggatgaatgcttaggagcaatgaacatagagatggtggaagtagcaaggagggttggtgcagcttcaaagttcactggaagtggaggagcagtggtggttttctgccctgaaggtccatctcaggtgaagcttctggaagaagaatgcaggaaagcgggatttatgcttcagccggtaaaaattgcgccttcatgtttgaatgattctgacattcagaccttatga

SEQ ID NO: 163213 - DNA, 1243 bp, Arabidopsis thaliana landsberg
cctgtatcactctctccctctccctttttctcccctaagtcgatcatggagacattgggcttacctctgcctctcttcgaaaagatcttattcagattggatcccatatctctggttatgatgaaatgcacgagaagatctttcaactcccatatatctgaagatccgtattttaaatccaagtacttgtctggggtcagatccgggttgcttcacatctccagcttcggctccaaaaacctcttctgcaaccctttcggcgattctagttcatccaggcaccacgatttcttagatatcacgacaaggattctcggctcttgttctggcctcctcctactcttcatcgatggtctctgtgtcgcgaatccgctcacaaagaggtatcgattcctgaattactctaaatcaatgtttcttagtcgtgttgacagatggggaattctaaattttgaccttccatcggaaaaaatgaatcgccttggtcttgcggttgatcaaataactcagagattcaaagttgtctgcatgaacgaaactgagacttcggatcccggcgaaaccatgtgtcagatcaagattctcacaggagattggtgttggagattgttggcaacaaccattacttgcagcgcaagtgtcctcattatggataagaaacctggttactttgaacggatctgttcactggttgagaaaggacggaagcattttagcattcaatccagaaacagagcaagcacggctgattccaatcaagtttcccctagaactaagcgcggtggcgaacaagttcttgttcgaggccacagagaaggaactagcattgatatcagcgacggaggaatcgattaacgtttattccctcgaggctattcttatcgatcctaagtgggtcttagtgaaggaaatccagaacggagtgttgcacaaaaagacaatgaggtgctggaacgttgcggcatacaacggtaagtgtttggtgttgtggcaaatgaacaaggtagcttgcgacggagatgtttttgggtacgacttgagagctaacaagtgggaagtcataggttggattccagagtggtgcgatggttatcaagtcttttacctctttaaaccgtctttctcctctgcgatagaactgaaacaaaaggtcgacgttgagacgatgaatatggtgcatggtgatgattgtaaatatatctccactctaaggaaagttatgagcctgattgaggaaatctca

SEQ ID NO: 163214 - DNA, 4967 bp, Arabidopsis thaliana landsberg
atggtgacaagtgaagaagatgaagcgtcatctgcctctagtttggaaaggaggattttgaaaacagtcacatcagctatggcaacattaatcgatgaaaagcttggtgctctaaacttatatcaagtcaacccggacacaaatccacgtctaagacaagaagaaccaagggaagatgaagaggcaagaaattactatagtcacgcctcctctcacagtagccaacgtaggcatcgacgagagagaccaccacctaaagatcccttgggaggcctaaaactcaaaattcccgcattccatggaaccaacaatccggatacttacttggaatgggagcagaaaattgagttagtctttctttgtcaagaatgtcttgagtccaacaaggttaaaattacggctactgagttctacgactatgccttaagttggtgggatcaacttgttactagccgaagacgtacccgagacgtacccgagactatccgatcgaaacatggaaccagctgaaaaccgtcatgcgaaagagatttgtgccgagttactatcatcgtgaaatacatcagcggttgagaaatttggttcaaggaagcaaaaccgttgaagaatactttaaggaaatggaaacccttatgttaagagctgatcttcaagaagatggagaagcggtcatgtcccgattcatgggaggtcttaaccgagaaatccaagaccgtctagaaactcaacactatgtggagcttgaggagatgcttcacacagcggtcatgttcgaacagcaaatcaagagaaagaacgcccgatcaagtcacaccaagaccaactacagcccgggaaagccaagttatcaaaaggaagagaagtttggttatcaaaaggattacaagccgttcgtcaagccaaaatcggtcgatctagatccaaaaggaaaggttaaggaagtaatcacgagggctagagatatccgatgctttaagtgtcaaggacttgggcattatgcgagcgaatgttccaacaaaaggatcatggtccttagagacaatggcgaagtagaatctgaagatgagcatgcggaagaagactcaatggaagaagatgtggaatcccccgctagaggagagttgcttgttgcgagaagatcgttgagtgttctaactaaggccgaggaacaagcgcaaagggaaaacttgtttcatacacgttgcttggtcaaagataaggtatgtagtttaattattgattgttgaagttgtactaacgttgcgtgtaggaacatggtcgagaaacttggtttagaagtgcttaaacacccgagaccgtatttttgttccaatggcttaatgaaacgggtgagatgtccgtcagagaacaagtcaaggtaccactatcaattgggaagtatcatgatgagatcatgtgcgatattctacctatggacgctagtcacatccttctcggacgaccatggcaatcggatcgaaaagttcttcatgatggcttcaccaaccgacaaaccttcgaataaaatggccgaaagacaactctcatcccgatgactccgcacgaagtcgatctagaccagctaagtatgaaacaatgggccatcaaaccaaccgaaccaatcgatacaaagggcaagaacaaggtaagtaaaaatagtttactctttgttttcaaagagacacttacttgttcaactaatcccgtaccggtgctatcgagtaagatcaagttgattttgcaagagtataaggacgtgtttctggaagacaatcccataggtttaccacccatctgtgggatcgagcatcaaatcgacttcgttccgggagccgctctaccaaaccgaccagcttatcgcaccaacccgaccaaaacaaaggaactcgagagacaagtgaatgagcttatggacaaaggtcatattcgagaaatcatgagtccgtgtgccgttccggtcttactagtaccaaagaaagatggaagttggcgtatgtgtgttgattgtagagcaatcaacaatatcacggtgaagtatcgacaccctatccctagattagatgatatgttagacaaattgcatggttctagcatcttttctaaggttgatctaaaaagtggatatcatcagattaggatgaaagaaggtgatgaatggaaaaatgcatttaaaactaaacaaggattatatgaatggttagtgatgccattcgggctaacaaatgcacctagtacattcatgagactaatgaatcatgatcttagagcttatataggacattttgttgttgtttactttgatgacatcctagaagagcatgttgagcacctaaaaacggttttagaagtgcttagaaaggaaaagctttatgtcaatcttaagaaatgtacttttggaacggataaccttgtctttttaggttttgttgtgagtacagatggagttaaggctgatgaagataaagtgaaagcaattagggattggcctaccccaaattagtcagtgaggtacgcaactttcatggtcttgctaccttctataggagatttataagagaatttagtaatattacttttcctattactcagagtttgaaaaaaggaaagtttcattggggtatcgagcaagagaaaagtttttatttaattaaggagaagctttgtaccgcaccagttctagcattacctgattttgataaagtgttccaagttaaatgtgatgctagtggtgtgggagtaggggctgtcctgtcccaagaaaaacgaccagtggctctcttcagcgagaaattgagtgaagctcaacataaatagagcacctatgatcaagaattgtatgcggtattttgagctctaaggaagtgggagcattatttaattgagagagagttcattttgttaactaaccaccaagctttgaagtttcttcacacccaaaaggtgataaacaaaatgcacgctcgttgggttagttttctgcagaaattctcttttataatccagcataagttaagcgcgcttaataaggtggcagatgcattgagtaagagagcgtcattgctacttactttagcataagagattatagctttgagtttaagaaggatttgtatgaaaatgatgttgaattcaaggaactttgggcttagtgcgacgagaagcatccttctgcagattttcatgtccgagaaggctacttattcaaaggagatcgattgtgcatcccttgctcatcgctaagagagacgttgatcccagattagcatggggtggtcttagtgggcatttgggtaaagacaagaccattgctagtctggaagggagatatttttggccacatttgagaagagatgctggaactattgtcagaaggtgttatatatgtcaggtatcaaaaggttcttggagctggatttccctccaagagtccacctgcgaaaataccaggccaggccactaagcccaacaagcccacctgtagagaacctgcgcagctctggagcccatgtacgcattaggtatttgggcctgataagcccgcttacctaatgaagggagataagcgaataacaacctaggaactgacaaggagatattcgcggagcggacatgatatctcataactgacctgccgaatatccaggaaaatccctgcagatctcggatggagctacccacgtgcgtagagctatataaggaagcaaggacgacttggaagacatatacattcagcttaacactaacacctatacttttacacttgtaatctcattctacattgtaaaagttctactatcatcaatacaaaagtccattcgttcttagcaatataaatctcaaagttcttgtgtagatctagccctcctttcttataaatctatttacaaatctctagtgtggatttcagaacccacatttggcgccatctttggggacggaaatagatccttccaacaccgaaactaacacatctattgtgaccaacgatcatggatctgaattcattcgattcaacgagatctggcgtaccagttcagatcccaaacgacaatgtcacggacaggcaccttccaacggatctccctcttggaatcgaggccgatgctatccatgacattgatgtggagaacatctcccaaaactcgaattcttctagatctgaccaaatcattccccccccctcgcacacaaggggcggagaacaaaacgtcacgatacagcctctgaacggagataacccagccaacccgtctaaccagccgatcgtactccgaggactcgtctagacttggcctcgatagacgtctcacctcctatcaaccggcaggatgcctttttacaggcacctacgaacactctcgtcaaaaactcggcaacaggaaacgagataagcacaacgcctgccttcccaaggctatcggtcccacctttactaccgatgggctattcgcccctaggtacacgtggacgagaaaccaaacaaccgcatctagttctcgcgttcccgggaactcaacgcaacaacggacctctatcgcttatccgccatccattccccggataccaggaagtgacctcctaaacagtccaaccgatcccaaagcaccggtcgatacgcgtaacgttgtggatatggaaacattccgtaattacgcagctcaaacaaacgcgaacatggctcaaatgcactcacgaatgcatcttgcagtgagcgatgcttccgacatagatcgagtgagcgaagaaaccacgcgcacccctttcacggataggatcgctcattttcgcgtctaagacgtcgggagactccgtttcccggagtacgacggaacgagcgacccaaagactcacctgaaatccttccgtttcgctataactcgagcgtacctgacagacgaagaaaacgaagcaggtcattgccgtttcttcgtagaaaacctcgtaggtcacgccctcgaatggtttgc

SEQ ID NO: 163215 - DNA, 6547 bp, Arabidopsis thaliana landsberg
  unsure (1)..(6547): unsure at all n locations
ggcaagccgagagtatgtgaaaggagcaacaaattttgttactgttgcatcaaggaggttagggaatccaactgaacttttctgtccctgcatcgattgccgtaatgtttgccatcaagaagtagacacagtattgtaccatcttgtgatcaagggtatggataagaagtacatgaggaattcttgtttgagtatgcatggtgaaagaaagtctgatattactcatggtccaacattagaatctgaggcttatgatttgctaaggacggcttattgtagtggtgaaggtacacatccattagacaactttggaggagagaatttggatggtgaaactgcagaagactctgagtttaggtagaaactgaaagatgctgaaactccattgtacccgacgtgctctaatcacaccgaggtttctgcaataatgggtttataccgcataaaggtgaagagtggaatgtcaaaaaactactttgatcagttgttgacgtaattccatgacatgcttcctaaagagaatgccctgccacagtctactaatgcaatgaagaaattcctgaagatttttgggtttggatatgatgtcattcatgcatgcaagaatgattgtatcctctatcgaaagcagtttgataagatggaaagctgccttaggtgtagtgtttcaagatgggaaacagataagaatagtggtgaggtaaagaagacaattccagcgaaggtactgagatattttccaatcaaggacagatttaggagaatgtttagataaaagaggattgtagaggaatcgcattggcattctagcaatgcaagtggagatggtacaatgcgcaccctgttgactctataacgtgggatcaagtaaatgataaatggccagattttgttatggaaccaagaaatcttcgtctcggtctgtctacagatcgaatgaaccctttctccattcagaacaccaagtatagtacctggccagtcttgttagtgaactacaatatggctccaactctttgtatgaaggctgagaatataatgttggctttgttgattcctggtccaacagctctaagaagcaatattgatgtctatcttcagccactaatagatgatctaaaggatctatggaatgaaggtcttcaggtttacgactcgctgtctaaagagaagttcatagtcagagctatgttattatggacaatcagtgactatccagtattaggcactttatctagctggaaagtgaaaggaaaacaggcatgttgtgtatgtggaaaggacacaccttggagatggttgaagaattgccggaagcatgtttatttgggaaacaagaagcgactaaggccaggacatccctacagaaggaaaaaggcttggtttgacaacacagttgaggatggaactgtgaatagaattcagacaggatctgacatatttgagacacttaaggactttagaaatgatttcggaagacctttggataagaaaacaaagaggagcagaacagatttgggagatgaggatctggttttagaagacgaatatgaagaaaatacagatcagtggcggtggaagaagaggtcaatactctatgaattagcatactggaaggtagctaatcttagactataattctatagttatttttttcagtagtcttactaattctgtttctttatttgtgattagtatatgccagtgcgtcacaacatcgatgtaatgcacgtggagaaaaacatttctgatgccattatatcacttttgatgcaaagtgttaaatcaaaagatggattgaaggcacgtctagacctggaagacataggaattcgatcacacttacacacagaggtaagaggaaagaagacttacttgcctcctgcagcttattggttatctaagacagagaaaaaggggttttgcagtaggctagctaaattcagagggcctgatggttattgcgctaatatctcaaattgtgtttcagtcaaccnnnnnnnnnnnnnnnnnnnnnnnnnnnatgatcatcatgtactcatccaaaatttgttacatgttgctttgagaggcttgttgccaagcggacctagggctgcagtgactcgagtctgcaactacttcaacagattttgccaacgtaccattgacccagagaatctaatttccttggagtctgaaattgtagagacaatgtgtcaacttgagaggtactttcctccttctctgtttgatatcacgttccacctcccaattcgtctagcaagagaagcacggttaggaggtccagtgcactttcgctggatgtatccattcgaaaggtttgaatttatttatatctttacattatgtgctttgacaaaagttaatttcaaacaatgactacaaattgtacgagttgtaggtacatgaaaatacttaaggcatatgtaaaaaactatactagaccagaagtgtgtatggccgaaggatacttagccagagagtgcattgccttctacttagagttccttcaaaattttgtaccactgcaagaggctgtaaaccgtaatgaggatgttgaggctgatggaagtgttgttgaaggcagtccattacataggggtcaagaagttgtcctttcagagaaagagagagacatagcacatcgatatgtcttgatggacatggcagctatggatccctatattgagaaagtaagatacttatactatgtctttatagtttctttattacatatatactagtaagataactgctttatctatggaaaacaggattgcatttggaagaattgcagtctcaggatggtcgatgtgctagaaatgaaacattgctatggaaatttcatacagaacagtttgcccaatggattaaaaaaaaaaggtttgtacatatctatttcatactctaacactctttctaatttttaaaattaattcatgtatcttgttatatgaacattagatcccttctaactcagaagttcattcgatgaagctgaggtggttggcttttagaccgagactaactgcgcaaagccataaagggtttatcattaaagggcatcgctttcacactgatgacgtcaagcggaagactcagaacagtggagtaacttatgaagcttttagcatgtgtagatctacagcacatgatactagacaaactgcttatatagtgacctattatagagtgatcaaagaaataatacttctagactatcaaataatcacagtaccattatttagatgccattgggccaatagaggatatggtgtcaagcaggaggatggattcacgcttgtgaaccttcatatgaatcaagcgtcatatatgcaagatccctatattctcctatcgcaagctaaacaagttgtttaatctagagaggatgacacgtcaccgtggtatgtagttatgagggcacctcctagagggtattcacaagttagaaacagaagaggagtttgttgcaccttattctgttcctgaagtagaggatttagggaaccaatcttctgatgatgagagtttttatgttagaaatgattgtgaagggatcatagtggcagagtagtatatatggaattattttgaatgtcaaaaattgactaactattaattcatggtttttcaggatcttgattgatgaggacaagaggaaggttagtccgtcccaatgaacgcctgggaggcgtggagactagacagatcacaaagcggccaaaaactatgaaaacaaagaagaaaaaaatagnnnnnnnnnnnnnnnnnnctccagaagatgttcttgagatactggaaggtgaaaaagatgctcaggaagtcgttgatgaggtgcaggctggtgagtaaaatgtccagaaagatggtatagaggcttccgttggtgatcaagaggatgtggatgttgagaaagaagttgtagaggaagataaggaagttcagtccgaagctaaacatgtagatatggaaactgaacgagctgagaaggaggcagaaccaactgagaaggaggcagaaccaactgataaggaagcagaacctactaaggatatggcagtaggaactaatgtaagggaagaagactcgcagcgtactaatgctggtataaagaagaatagtagatcaagattacaaacaccatagtcagctcctcctgtaaagaagagaaaaggaccaaccaagatgtgtaaagtggctaaagatcctcaagaaaaggttgaagtttacttcactgagctaggtgaatatgtaggatctgatttagtcacactgtcatcatttcttggtactattgtgcgtgaacatgtttcggtgacacttgatgactggaggaaactggatagtcaaacaaaggataccatttgggaggaaattcaggtttaagaatttcaatatacagattcatatgttatacgtatttgatcaagattaacatataccttttttacaggaaaagtttaacatgaaggaagagtggcagagatatgctattttcaaacagatgggttgtatatggaggtctacaaagtctaagctcctaactcaggtgcgagatgctaagagtagcacaaagagaatgaaactgaaaccaagcaatatactatctattcgagtttgtaattcttggattaagtgtaggactagcacaactttcaaggtgaaattgtttgaatttttttcattgtgtgtacctactattattatgtattggagtctgctcaacagtcaatgtcattgcttttgcaagaaataagtgacaagtacaggatgttgaggaaggcacagattccatacaccacctgccgcaaaggaatgattcgcctagcccatgagatggtatagtatatgtctactctgtaatcaattaagcttgtgtaaattggttaccatcaactaatcactatctgttttgtagaaaaaaaaagttccaaccctaaattggtgacaagaagcaaggtttggatagcaggtcatacacacttagatgggagatctgtcaaccctgaatttgtagagacgattgtaagacaatcattcacttgctttctttttttgttttgctagtacttattgtcattacattctgtttcaggaaaaaatcaaatctattgatagtgaaatggactcatcatcattcaccgatcttaaagaagatgctgtgagtcaagtattaggtaaagacaagcctggaagacttagaggtatgggcagaggagtcactgcaactaagttagcattcatgttagctagagattcacatgtggagaagcttgaagctacacaagctgatttgctgacaaagcttgaggacttgcaaaatgtagttagtggcttagatgccaaaaaggtaaattatctaactgaatacacttgtgctattaagcaaaattgaatgttatatgttactaattccattgtttttgtcaggaacatgtggaagaggtttctaagtctgaggctagtaatgttagtgcagaagttcgatgtcagttacttgattggtgatcagatgatgatgttgttgtaggtgaaggagaattctgttctgctgaacaaatgaacaagattggacggattccacttggacgtaatgctgcggctgttgttgtgaagtcagtgtcagacgccacagcttctttgtgaaggcctacaccatcagttttcacactaggtgaagctttagggaacaagattgtatggcctttcgataagatcattctagacattgatgtatcatcaccttctgagaatcagactgcaggatctttggtaatgtctttttctcatcacttgtcaattatctagctgaacctaaacactgactctagtcacttattatttatgcatcatgccttaggctaaagattcatcagccgttaaaatcatcataattgattggaatatggctgattctgtggttggtgagggtcagttgtgttcaacagaccaactagaacttgtgaacaatatgcctcttggtccttctgctggaattgttaggttgaaaaggtgtttacaaagccgcgtatttgtggagaccaagtccaggaaagtttgttatgggagatgtactaaatgagaacattgcatggccacttcatagtatacaatatgtgaattcatctcctccactgtatgaaacaacatcaccagataaaagaccagcacctccactggtaaatttctgcactttaacttacagcgtagaaaagtccatcacctgaatgcttggtattatttttgattcttatagagcttaagtaacagtactgctagcaccatcaaatctgccaagaagcaatgcatcatgttagattacaagaacaggagagaaagaatagcataaggaagagtatgtacctctaacccttcagatacagtccatcatatgcccctaagtccaaatgcgagcaaggtatgtgtagaagtttcaaagattggagatgctgctgtgtggagaccaaactctaaaattcaaaccattgtcgatgtagtaggtagtattgtggcttgacctactgataaaatcatgtttgtg

SEQ ID NO: 163216 - DNA, 3253 bp, Arabidopsis thaliana landsberg
gaacaatagatacattgcattgtgtctgaaaacccaaaaatactattcgatagcaatgtctcttgcaaccacaatgatcgccatctttcttcaaatcattacatattttctcattaccaccacagcctcatcacctacagggcttcactatcgacttgatccaccgtcgctccaatgcatcttcttctcgagtctttaatactcagctcggatcaccttacgctgataccgtctttgatacctacgagtacctgatgaaactacaaatcggtactcctcctttcgagatcgaagctgtcttagacaccggaagcgagcacatatggacacaatgtttgccttgtgttcactgctacaaccaaaccgctcccatattcgacccttccaaatcctcaaccttcaaagagataagatgcgacacacatgatcactcttgtccttacgagcttgtctacggcggcaaaagctacaccaagggaaccttagtgaccgagacagtcacgatccattccacttcagggcaaccctttgtgatgcctgaaacaattattggttgtggccgcaacaactcagggtttaaaccgggttttgcgggcgttgttggtctagacagaggacctaaatccctcatcactcagatgggcggtgagtacccaggtttgatgtcttactgttttgctggtaagggaactagtaagatcaattttggagcgaatgctattgtggcaggagatggggttgtatcaactactgtgttcgtcaagaccgcgaaaccaggtttctattacctaaacctagacgcggtcagcgttgggaacacccgcattgagacagtggggacaccctttcatgccttaaaagggaacatagtgatagactctggaagcactctcacgtactttcctgagagctactgcaacctagtaagaaaggcagtggaacaggttgtgacagcggttcgattcccgcgcagtgacattctttgctactattcaaagaccatagatatctttccggtgatcacaatgcatttttctggcggtgcggatcttgtcttggataagtacaatatgtatgtggcatggaatacaggaggagttttttgcctggctattatatgtaatagtccaatagaagaagctatctttgggaacagagcacagaacaatttcttggtgggttatgattcttcttcactgctggtttctttcaagcccaccaattgttctgctttgtggaattgaagaaacaaaccctagagagtctcttttccatcattttcaacttcagtttgtttttctcggttaacttcagtttgttatttatatatatcttatcaaaataaaagcatagaccatggatatgtttatatgaataatatgcgaagttacttagaatctgtatatttcttgcattgatatgggttgcttaaggattggcaagattaacaccttccaaatgataatattaacaagtttgtagaaaaacagaaagaaacctataatacgtaaaatctcatattccaaacctctttagagccctagcagccacaagttgtgataattaactcctcccaccgagccgtttgagccctctcatatggtcaaatatacacttcagactctggtgagataccataggtaggagatggttttatggcaagaagattaagttatccaaaaccaatatctatctataaaagtatattttgaattttaggttcatcaacaataactttagactaaaatttccaagaaattatacattttgctatagcaaggtgatcatctaatttccattaatacaaaaaagtcaatctaaaagaatgtaaaacctagagagaaaaataaaacttagtagtaacaaaatgtaaaattcccccaagttagaagacgtaatggcaataacaaaattgaacgaagttgacaaaattgaaaacttaacaattacgacaaaaggtctaacatgtataaatatgtgcatgaattaatgaagaacattacattgtgtctgaaaaaccaaaaatattattcgatatcaatcaatgtctcttgcaaccacaatgatcgttctttttcttcaaatcattacatgttttctcttcacgaccactgcctcatcacctcacggcttcaccattgacttgatccagcgtcgttcgaattcatcttcttctcgactgtccaaaaatcagttgcaaggagcatcaccttacgccgatactttatttgactacaacatctatctaatgaaactacaagtcggtactcctcctttttagatcgcagcggagatagacacaggaagtgacctcatatggacacaatgtatgccttgtcctgactgctacagccaattcgatcctatattcgacccttcgaaatcttcaaccttcaacgaacaaagatgccacgggaaatcttgtcattacgagattatctacgaggacaacacctattccaagggaatcttggcaaccgagacggtcacgatccattccacttcaggagagccctttgtgatggctgaaacaaccatcggttgtgggctccacaacacagacctcgataactcagggtttgcatcgagttcttcgggtattgttggtctaaatatgggacctcggtcgcttatctctcagatggacttaccctacccaggtcttatctcttactgcttttctggtcaaggaactagtaagatcaattttggaacaaatgctattgtggcaggagatggaacggtagcagccgatatgtttatcaagaaagataatcctttctattatctaaacctagacgcggtcagcgttgaggacaaccgcattgagacattggggacaccgtttcatgccgaagacgggaacatagtgatagactctggaagcactgtcacgtactttcctgtgagctactgcaacctagtaagaaaggcagtggaacaggttgtgacagcggttcgagtacctgacccgagcggcaatgacatgctttgctacttttcagagaccatagatatctttccggtgatcacaatgcatttttctggcggtgcggatcttgtcctggataagtacaatatgtatatggaatcgaacagcggaggacttttttgtctggctattatatgtaatagtccaacacaagaagctatctttgggaacagagcacaaaacaattttttggtgggttatgattcttcttcactgctggtttctttcaagcccaccaattgttctgctttgtggaattga

SEQ ID NO: 163217 - DNA, 5371 bp, Arabidopsis thaliana landsberg
gttgcagtttgacatcgagagagggttcacatgggtcaacagaagatggaaaaatctctagaaatgatagagtggggaaggatatgagactgaaagagttgaagaaacttaaaaagaggtgtaattagcaagaagaaactatagagaggctagcccactctgttcaggaacttaggagtaagctgaatcagatgcagaaggaagctcaacctaaaggcgggattaacactatcccgagaaaaaaattcacttcaatatggtctgaagagacagattaccctctagaagagaaggaagcctattttgagaaaggggaattgagtattctgctgtagacctctcaagggaggacgctgagtatgatgatgatattagagaggattgtgcagaccctctctatcattcattttcttcttgataagtgtgaggagtcaagctagagactttaaacaagctcacttgggaggagtcccatgattatcattgtaaataatttttactttcttgttatttttgatttgttttagttgtgtttgtggttctcagaaaaaaaaaaaatgggaataacgtgaaggtaaagtagaaaatcaaaacttttactctactgatggcctagagatcgagtacattggtcgagtgtgagtgatgcttaaaacctaaaaacttttaaatcatcatttcactcgaccaacagaagctacagagtcttacagggagtttataaagtttacaaaagattgttggatttcctgagactttcctagtgaagaaagaataataactcataacaaggagacaaacgaggaacccactgctgcaccctatgtctcccatgctcctaaccaacagacaagaaatccaacaccttcttctcacaaccactcgactccctcaccctatcctatctcaacccatcactcgacctcgacgccatcaccatccctcacctatcacttactcgacctcgttatcttctccacacctattaaactctaccacatccctcctcattcatcatcaccaacaaatcaactctcatactctcaaccactcgacctcctcaccatcttcttcatatactcgacctcaacatctttttccacacaccaaacttttcgcaactctctcatttcccatcgtcactcattgcaattcaagtcctcaagtgttcgattccatcactcgatcgccgctgctttcgtctctttgccaccacatcctctcattcgtctctgtttcactcgaccgtcacattcgcttcactcgacttcaccacaagaacacctctgcctttcaagctcacagtcactcgaccacgagttcaccaaaccgaaaaaaagaagaaaaaatttggtacactcgatcggtttactctgttggattgtgtttttggttttgttggaactaacgtattaacgttaattttttagttacatttgttttcaggtttcatcatgagtaactacagtggagaatcctctttggaccctgattataatgtggatgaagctaagtcctggtccgctagaccgagagagcaacatgtttaccagagcttcagggatgaatttgaacgctctacaactcgacgtaatcagagaagtgctgaaatcgccagaggaaagagggcgatgtcgagtagatatgagctgattgatgaggacatcggaactgagtatgagccagagtcttggcgtaaggagacgaagctgcggaacaaacctgacgaggttacagtggaggagtatatcagattctttaagatgaatgacttctggggaacgaggtatccgtactatgagactttagcccagctggggttactagaggacgtgcagcatctgttcgagaagtgtcatctggagacactcatgtcttacccttacgttgcttataaggaggagacaatcgagtttctttccacacttcaagtggagatgtatgagggactcacagactttgagctggataccatggggttaggcttcttgacgttctcagtggatgaacagcggtatcagcttgtgatcaagaagttggaagaactgtttggtttccctagtggaaagggaaccaaacccagatttgacagagaggagcttaaggatttgtaggccactatagggaacaatctaccgctaaacttggcgcggtctaaaagcaaccaaatccgaagtcctgtgatccgctactttcagcgctcggttgccaacgtcttttactccagggagtctacaggcaccgtgtctaacacggacatggagatgatagattccgcgcttacagggattctccgccgtacgaagggaaagaatgtcttgagaggcgatctcaacaacgcaccaccagaaatgtctgttgatccacttgtgtggatataggaagtgggcgttgatgaacggcaaaaagaaggtgagaggagcattatgcgtgggaggcgttgtgatgccaattctggaagcttgtggagtccgctcaaggaaccaggtttagcaccgaggatgatggacttggatcatttgcgccgatgtgagttcttggagtttgacatggctggcgactttcaccgctacaggttcgagcattcatcgattagaatcgccaacattctcctcccctgcattgacgctactaggattctcgagggcaggaacattgacttcaagcctgcgcttgaagatctttatttcgagggcagtccgccaactgaggtgatcagtcacaccgaaggagctacaacagaagatgttgatgagacagatgatatagatgaggcggagtttgacacaagcatgtatcatttcagtgagcacatacctccagcgagggaaagcaagagtttgagcgaagcacacaggaacaacagcaagctgcagaagtggtgcgagaaacaggacaagttactcgccaagtgcctcaggacaagtttcttcattttttgtttctgtgattggatttgtcctgagtactctcttcaaagtttattcacacagtggactgtgtgatttaagtttgggggagggctcaggaagtgtgtgttacattgtgtattttttgagtctgcattcatctaaggcatagaaaaaccaaaaaacattgaaaaatttcagaaaatgatttcacaaaaaaagagtgttcatgtagttgcattatatttaggatcgagtctagagtgtttcatttaggattgttgcatatgcataggggatgatgatgagatagccttgtaagcattttgattcatcggataaactcagtgccctcgttgctagttgtttgttgcgtagtcaatgaatttgaaataaaactgtaccatgcctagattgctctactcgagcacactgtcatgatctgataccattccctatcaatttgaacctgaatctgatctttaattatcatgtctgcatcaaatttaaactcatggataccctaaaatacttggattttcttattcattttgatcactcttattaatccaagtagctgactctccttattagagcagttaacccaaacccaaacctaaactttctttcaagccctatatcacttgtgagtgtttgtgaggtcttattccgattaagcttggtagaaagtgttaggttcgtaacgacagagatagtgtctcatgtagttctagttcgcattttttggattggataggactaggtgggcgcttatactttgggttgagatgtgtttaaaagaaaaaaaaagggttgattcattgatgagaaaaggtaaaagaatctaggtgaagtaagctaaagaaggagaaaaagtctagtaaaggttttgggatttgtaaagaaaagaaagagttcttgttaactattgaagatgggcaaaaacccttggttttaaaatgttaaaaacaggaaccttagttgttaaagaaatccaaaattcgctagatatatcaaagtgttgaagcttcgcctagagttaagagaaaagaaaagaatgattagaaaaagggcttaaaagattcatgaatgcaaagggtagagtttagttcttatattgggattggagatgggattaccattagagcttcatttgatgtactctgggtagatgggatcttatctctgtatgcatagcttgggacttacctttagcattctactaaagcttaatcattttttaagagatcccctgttactgaagcctattctgtaagggaccatctttgtctcttgaccttttaccttagccaaatgagttctttgatgatgcattgcttgattcgttccagaactaatgaatgttaaagggattggtggatttgaaaacttatgtaggtcgagcatatgagtcggattgattgattgatgaggcatggctactgtttttaagtagaattcgatcttgcagcttagaactttcaacttggacattgatttcatctagtctatctggtgctttggctctgagtccccgctttcaaacctcacttccagcttgttcttgattgtttgcagtagggcaagcaaagtctaagttcgggggagttgataagtgtgtattttgcatgttttgagcatccatttgtcatcattttagcatcatatcatcactgttttataccatttcacatcatttgtcatcactttgcatgtttaggatagttttgcatgcatgttacatatttgtgttgttttcaggtgatttggagctgtcgacgagctaactggaagaagcggacctgatcatgacaaaccactcgacccagaggtcgagtaggagcttcaagatctgaagagaccactcgacccccaggtcgagtagaagacaccaccactcgatcacatcactcgacccccaggtcgagtgacttcatctccatcttctgaccaccactcgatcacatcactcgaccccctggtcgagtgacttcatctccatcttctgaccaccactcgatcacatcactcgaccacgaggtcgagtgtcttcacctccattaccagaccactactcgaccacatcactcaaccttgaagtcgagtattaccatcaccaccactcgactacatactcgattgcaagcttcagagtcttcttcattctgcactcaactagacactcgagcacaaggaagaaaagaagactccagctattcactcgacctcgcactcgacctcccactcgaccacatgggtcgagtacagttcttaatccgtcctcatacttcgtcgttttgagtattagggtttcgaaatatttggctataagtagcatgtacttcacatttgcgcagacaagaagtttttatctagttttattccgcagaccttgtgttctagaccttttgtaatccggatttctctttatctattcagtatttagtattcagcttttgttc

SEQ ID NO: 163218 - DNA, 3260 bp, Arabidopsis thaliana landsberg
  unsure (1)..(3260): unsure at all n locations
atggattacgagaatacttttcctatgcacaacccaaacaacatcaacggggatactcagttgttcaaccaaaagatgaagaatttcctctatgagctagcgctgaaagcggataaacccaaagcggacggtaccggtttgctatattacgcggcagggacgaagaggctcgggaagaataaactgtatgcaatggtgcagtgtactttagacatatttcattgtaaggtttgtttggaatggagtattaaggagctttcaaagtgttgtgaaggtaaacaaggagcgagagttttgggaacgagttgtaatgttaggtatgagttatacccttttattaggacctaaagactttgtaatgatgtagaacacattctcttgacaactctttaattttgttttggttttgttttcttctccattttagtctttgtattgtttcttttaagctttgctttcatatatttgtttacatatacctactttgttgttcctcaccctttcatctaattggatgattgttgataaggagacaacgctgataaatggtgtattacatttttcatgatttcacttttgaaaagtgattccgttacttttactattaagaatatgcatgcatcaacgatttcacgctgttaaaaagtgattctgttatatactataagcaaagcataatagtagagtgtgccctattagagtcatttgagtcgataaatccatcagatgtatgcaaaatagtaatgcatgtatttatgtgactctacacaatcagatgagtagcagagaagaaagcttgtgtttttttgttattcaccaagaggctagttggttggaaatagggttcttctacgggctaagaagtcagatcgtgtggattggtcgaagacaatacgtgtgttctctagatgaatccagagaccattactcctaaggttccataaagctactacttgtggtagtggtgtacatcttggctctgggggattggtcgaatgcatatttctcattatggaataaaaatcagtttttaatgtactgagacaccgttttgttttactctttaatgtaatgtatttctcattgtgctttacccttttattaggacttaaatactggtgatgatgcagaacacattctcttgacaacttccaaattttgctttggtttctttactttctagtttctaagtctctttttcaacccttatcatttttttcccctcgttcgccattttgttttgttttgttgatgttctacctatgactatgattatgaatagggttcaaaacatcgctatccccataagagatacatttctttttcactctgtctcttatatccagataagttctttagaatatagctacaaagaaatcaacatgttccagcatttcaatactttggcaacgtcatttgatgagatttgcatacttttgtaagtgtgacgaactcgaacaacaacattctatgatttggnnnnnnnnnnnnnnnnnnttattcttcactagatatatgttcagttaatttttacaatgctaatatttaatcagtgatacatagttttaactaagctttagattgtgatcccaatggacttctattataaacaagcttctccacaatgatctcacacaaccgtgaatcaatggattgaacacccacctccaaacttgctatttgaaaagattcaagatatgcaatatttccacttgcgatccttagtgttaacagctcaatctcaatcctcaaacctatatatattaatcgccaaaaaaacctaacctaatcgtaatgcaatctttgttaaatcacaaacttaatctccaagtttcgttccaaaaccgacgtaagaatatttgtatttttgcaagtctatccctcaagtctatccagcttagcaaaaattcatctaatagaaacatcctaatggtgattctattttcaacgattgataaattagtataaatttgaactttgacaatttaaccttctaccaaaaaaaaaaaatgaactttggcttttaccaaaaaaaaaaaaattgaactttgactttttcataggctctccccatccctcgccgaaaattcccaactcatctctgtcctctctgttatagacaaaattccttctacaaactgaaatgatcaaaagaatatatagctttgagttagagaaaaatagttaatttagttactactgagacgaattagctaaaatccttattctcctctagaaaaagaataaataaaccaaaacaatgttctcttcatattctctatggaaatgcctcgtttctttccatatattggctatacaagtcctcataagctgtgcgtcttccttgaatcttactaatgagtatctgaaccacaaatgtcgcgttgatcaaggaaaataccaaccaggaagtgagtacgagaaagaactcaacactctcagccgtagagttgctacccttgactttacagatggtttcacacaccggtccaatagtagagataccaaatctgtcaccatcatattccagtgtcgtggtgactcttacaagtctaactgtcgaacctgctatgacaccgctctggccggggtaagtaatgcctcttcaacatttttgcatgaaagaatttaattatcatttgaaatataccttaacattaacatgtaagtatatgtatttaacagtttcgtaagagatgtccaagaaacaaaggtggaataatatggtacgaccaatgttttctcgatgttagtatgatcaatgacctagccccaaggaagatcaattacaaggatacttttgctatgcacaacccaaacaatgtgaggggggatacaaagatgttcagcaagaagacaaatgatttcctccaacagctgattgtgaaagctgataaacccgacatggacggcgtcgagttgttatattatgcggcgggagagatgagaatcgggagggaaaaactgcatgcgatggtgcagtgtgcgaaagacctagcggactgtaagtcttgtttggaatggagtttcaaggagctttctaagtgctgcgacggtaaacgaggagcgagatttttgggtacaagctgtaatcttaggtatgagctatatccttttcttaggacttgaagactcttttgttaatgcggcaggacacaagttttcaatttttttgttttttttactttctaattctcttatttttagcatgttacattagagtttgttttggtatctgttatatctacacatgtgaatag

SEQ ID NO: 163219 - DNA, 4220 bp, Arabidopsis thaliana landsberg
  unsure (1)..(4220): unsure at all n locations
atgtccggtgctccaaggaagttcggcctccggaactcgccagcctcgggttcgcgcggcatgtcgtccgctaaaattcaccggactgtccggtgtgcaccggactgtccggtgtgccagcggagcaacggctccctgcggcgccaacggctccctgcgctgcattaaatgcgcgcacacgcnnnagacgtcagggctgcccataccggtgcaccggacatcaaacagtgcatgtccggtgtgcaccggacacccaggcgggcccacaagtcagaagctccaacggctagaatccaacggcaacgctgacgtggcaggggcaccggactgtccggtgtgcaccggactgtccggtcgccatcgaacagaagcctccagccaacggtcaagttgggttgttggggctataaataccccaaccaccccacattcattgccatccaagttttccacttctcaaccacttacaagagctaggcattcaattctagacacattcaaagagatcaaatcctctccaattccacacaaagccctagtgactagtgagagtgatttgccgtgttcatttgagctcttgcgcttggattgcttcttttctttctcacttgttcttgtgatcaatactccattgtaatcaaggcaagaggcaccaattgtgtggtggcccttgcggggaagttttgttcccgactttgatttgagaagagaagctcactcggtccgagggaccgtttgagagagggaagggttgaaagagacccggcctttgtggcctcctcaacggggagtaggtttgagagaaccgaacctcggtaaaacaaatccgtgtgtcacactcttcatttgcttgcgatttgttttgctccctctctcgtggactcgtttatatttctaacgctaacccggcttgtagttgtgattatttttgagaatttcagtttcgccctattcaccccccctctaggcgactttcaattggtatcagagcccggtgcttcattagagcctaaccgctcgaagtgatgtcgggagatcacgccaagaaggagatggagaccggcgaaaagcccactacaagccacgggagcacttcatcggaagagtcccgcacgaagaggaaggagaagaagaagagctcctccaacaaaggaaaggagaagaaatcttcttcgcaccacaaagagaagaaggagagatcttcctcccacaagccacatcggagaggggacaagcacaaaaggatgaggaaagtggtctactacgagaccgacacttcatcaacatcgacctccgactccgatgcgccctccgtaacttctaaacgccaagagcgtaagaagtttagtaagattccctacattacctcgcatttctaaaaatgcacctttactttccgtcccattaggcaaaccaccaactttcgatggtgaagattacgctaggtggagtgatttaatgcgatttcatctaacctcgctccacaaaagtatatgggatgttgttgagtttggtgcacaggtaccgtccgtaggacatcagaactatgatgaggatgaggtggcccaaatcgagcacttcaactctcaagcaacaacaatactcctcgcctctctaagtagagaggagtataacaaagtacaagggttgaagagcgccaaggagatttgggatgtgctcaaaaccgcgcacgagggagacgagctcaccaagatcaccaagcgggaaacgatcgaaggggagctcggtcggtttcgcgttcgcaaaggggaggagccacaacacatgtacaaccggctcaagaccttggtgaatcaagtgcgcaacctcgggagcgtaaaatgggatgaccacgagatggttaaggttattctaagatctcttattttccttaaccctactcaagttcaattaatccgtggtaatcctagatatactaaaatgacccccgaggaagttatcaggaattttgttagttttgagtgcatgatcgaaggctcaaggaagatcaacgagcttgatgatgccaccacatccgaagctcaacccgttgcattcaaggcaacggaggagaagaaggaggaggctacaccaagtcgacaaccaatcgacgcctccaagcttgacaatgaggagatggcgctcgtcatcaagagcttccaccaaatcctcaaacaaaggagggggaaagactacaagtcccgctccaagaaggtttgctacaaatgtggtaagcccggtcattttattgctaaatgtcctatatctagtgacagtgaccgaggtgacgacaagaaggggaggcgaaaggagaagaagaggtattacaagaagaagggcggcgatgcccatgtttgtcgcgagtgggactccgacgaaagctcaagcgactcctccgacgacgaggacgccgccaacatcgccgtcaccaaaggactcctcttccccaacgtcggccacaagtgcctcatggcaaaggacggcaaaaagaaggttaaatctaaatcctccactaaatatgaatcctctagtgatgacaatgctagtgatgaggaggataatttgcgtaccctttttgccaaccttaacatggaacaaaaggaaaaattaaataaattaattagtgctattcatgaaaaagatgaccttttggattcccaagaggacttccttattaaggaaaacaagaaacatgttaaggttaaaaatgcttatgctctagaaattgaaaaatgtcaaaaattatctagtgagctaagcacttgccgtgagatgatcgacaaccttaggaatgaaaatgctagattaattgctaaggttgattctcatgtttgtgatgttcccaatcttagaaataataatgatgatttgcttgctaagattaatgaattgaatatatctcttgctagccttagaatagaaaatgaaaatttaattgctaaggctaaggattttaatgttactatttccaaccttagaagtgagaatgatatattacatgctaaggttgttgaattaaaatcttgcaaaccctctacatctaccgttgagcatgtttctatttgtactagatgtagagatattgatgttgatgctattcatgatcacatggtcttaattaaacaacaaaatgatcatatagcattattagatgctaaaattgccgagcataacttagaaaatgaaaattttaaatttgctcgtagtatgctctataatgggagacgccctggcatcaaggatggcattggcttccaaaggggagacaaggtcaaacttaatgcccctcctaagaacttgtctaactttgttaagggcaaggctcccatgtctcacgataacgagggttacattctgtaccctgccggttatcccgaaagcaaaattaggagaactcattctaggaaacctcattctggccctaaccatgcatttatgtacaaagatgaggcttctagctctaggcataccactcatgttaaaatgcctagaaagaaaattcctgctgcatcaaattaacataatgttttatttaagacttctgatgcttcatatgttttaactaacaaatcaggcaaaatagttgccaaatatgttgggggcaaacacaagagtcccaagacttgtgtttgggtacccaaggtgcttgtttctaacgtcaaaggacccaaggctgtttgggtacctaagaacaaggcctaaacttgttttgtaggtttatgcatcgggaggttcaagttggataatcgatagcgggtgcacaaaccacatgacaggggagaaaaggacgttctcctcatatgagaaaaatgatgatccccaaagagctatcacattcggggatggaactcaaggtttggtcaaaggtttgggtaaaatagtgaaagggaaatatgcccttgggcaatttctataagtattttggtgattaagtgccaacacaaatggtttaagtgttaaattgtgccaaagactaaagaagtgcaaatcaaggtgcaaggtatgtttctagacttagtacattgttttgaagactaacgtattgtgtctaagtgctagaaacaggagaaaacaatttggaaaagagctgacagtgtgcagctaaagacagcttcggtctgggtgcaccggactgtccagtgcgccaggaccagtgtcggtgaacagtccgctctcgggactcgacggcggtgtacggctataaatcaccggactgtccg

SEQ ID NO: 163220 - DNA, 1875 bp, Arabidopsis thaliana landsberg
  unsure (1)..(1875): unsure at all n locations
gattatcatgagtaattatagtgacggttcgtcaatggatcctgactatcacatggatgaggctgagtcttcatcttcaaggccagaaagagaacagagagaatatgataacttcaggagaaaagctgaggtagctcgagggaagagagcaatgacaaagaggtatgtgctgatagatgaggatctggaggacgagtatatgcctacgcatactcgcagagccacacaacttctgcacaaacctgatgtattgccagttgaggagtatatcaggctcttcaagctgaatgagttctactgcacaagatatccttgctcgactacgctggcacagcttggattactggaggatgttcagcacatgtaccagagttgtcacctggacactttgatggcttactcatatgtagcctatgaataataaacgattcagtttctttccacactacaagtggagctttaccaaggtatgacctctgatgatttggaaagtgaaggagtgagattcttgcaattctatgtgtatggtcagggttatatgctatcaatcaagcgtttggaaggattgtttggtttccctaatggaatgggaactaagcccaagtttgacagagaaaagttaaaggaattatggatcaccattggcagctctgtaccgctgaattcttctagatccaaaagcaaccagatacacagtcctgtcatcaggtacttccagtgttctgtggccaatgtcctttactcccgagagataacagggactgtcaccaattccgatatggagatgatcgctatggctctcaatggcactctccgccaaaccaagaacggtatgtctctccaaggtgaaaccaatgacacacctctctatatacctcttctgattcacttgtgtggatataagagctgggctgtcagcaataaccacaagagagcacgaggcgctctttgcataggaggtgttgtgacaccgattgtgatcgcttgtggaatcccaatcacatctgatggactcgagccgcaagcaatggatatcaagcacntacgtcactgcgaattctggagtttgcaatggttgacgaattgcacaggttcaagtttgagcactctaaagacaagagagctagcatccttctccctagccctgaggttacacggataatagagagagataacattgattttcggcctgaggttggacgcctctactatgagaacgctccgccattggatgaggatgatcctctagaagaagctgcttcggatgggatggatgaagacagagcagtggagttcgacactagcatgtatcactttggtgaacatgtacctccagcgagggagagcaagagcttgactgaagctcataagaacaacagtaaattgcagaagtggtgcaagaagcaggacaagctgctcgccaagtgtttcaagactatcaagcttctgacagataagctgagttgttcctcctccaccactgctattccacagggacagcctcctctggagatgccatcgaggagatttgatgagcctgagcacaggcctgagcttagcgagcagagagtctcacatgtcccggctaggcattcgtcattcgaatcccgggagcacaagagaagaaggaaggctaaactcacacgatctagcagcagatcacgcctcattcactcgagaaggtcacttgaccgcggtgctggccgcaatagaaggagagaggtcgagtatcctcagagaggtgctggccgccatagagctgatgaggtcgagtacccacctgctggagctgatacggaacatggcggttcttctatggcctgggagcatcacaggcagccatcgacgaccaactccattcattctgcgactgag

SEQ ID NO: 163221 - DNA, 2734 bp, Arabidopsis thaliana landsberg
atgaattccgaaattgaaagacctgaatccccctcttttgacaacgccggctctactaacgacctctgcacccggccaaatgacatcgccggtccccactatcaatccacatgcaccttctaatctcttaatcgattgggagagctctgtcagattctggtcgaagtaatgatggattttcagatgccggagcctaccgaatcgccggaggaacaccgtcccgggttcttctgcgtgtacgagatttacttcaaagggtgtggcttgacttttcctctccccgaagccctcgttcgttacttgtcggcccttgaaatcgccttaccccagctaactcccaacctcctccggactattctaggaattattactattgcggctgaagccggatacgccatcagggttctaaaactgaacgaacttctcagtgtgaggagttttcgaacaaagtcggatacttctcggcttatccgaacgccaatagaaatcttatctcgcaccttccgaacaaagaagagaattggcatcacccgtggttcttagttaaaaagagccctgcctcgatccgaaacctcctggacttgctcccctcgaagtggaatactaagcccggtagttgttaggtcatgcatatgaacttcattttatttcttatcttatctgaccaacttctatttttcaattcgcagctttcatcgcaccaacccttccgaccgtcgaattcagcgaattcttcaagattgtcattgaaggagaaaccctttggaactcctttactctcgaccggttcatagaggccaaccacaaacttaggatgagccccctggacatctcctccagctgctactgccccctcccttacctaaagggaatttgctccggccatcgcagctcgacgcaagaccctgtccaagtcgattgtggaggcttgcaaagtgaacaaatcattcctccaatccacggtcgacaagaaggtatatagcagaaccttgctagtcgatgatggcagcgccgaaggggcaagatccgccggtgcttacagacccactcctcaccgcgaaggtcataacggccggtcatcccacaaggagcgatcccctcgacgtgactcaccccggcccacttcccgaactggactcagcagcgagccaattgctgacctgattcggaagaagagagacaaaccatcccgcagtagctcctcccccaaaagagacaagacgagggcccgaactgaccgctctcctcgaccgtcgccgccacccgatctatgggtcctcctcctccagtcaccgtatctccttcgtccggatcaggaggtgaaaaggcagagcggagtgctaaccctcggcgggatgaaactgaggtccgagatgccggaactaaagttgttttggttcctcagaccaagtcgctcacgggttagaaatttcctcccattttttgttatcacatttttaccatttcgccttattgactcagcattgttcgaccggtccgaccttttttaacagcgatggaaacggagggaaacgtctttcgatgtttcaaaacccgaaaagacaccatcctgccagccttcgatagatggcgtcctgcaattcgcatgcaattcctactccacgcccatcactcatctcgggttagttcctttttcccacaatagatcttttaatctttgcttctttaccctgtcgctaaccccttcttgttattatctgatccaggcgaacagtgaactcaatgacatgattgagtactatgaaagggtactgcttgacagagaaaaagatgttatggcgtggaaggataagtcttcatcccttgagtccgatctccactcttcaaaggatgccaggctgaaattggagggtcagttgacaacctctccaccaaactcatgaagtccaacggcgagctgcaggagcagtaccaaaggtacgacaagatccaagaagaactctcaacttcccgggacagactttcggaatgcgaatccagtgcctacgagttgtccaaccagctatccgaattgcagcttaagtacaaagcggtggccaactatcgggatgctgagttggtgaagtcggcgtcaaaggccaggaaagaggtgaaaggtcgtgggatggaattgatccaaggggcaattgtcttcatccagactgagatggttagagcggagctggaatctgacgtcaatgagtaagagagtaatctcctccttttggaccaaactcatgaagatgatttttccgaagaacgagagagggacgagttgaaagccgtcctggaagagaagcgaaatcgtttagcttcccttccttcctcgtcgttcaacccccagcagttcgaggagttcttcactgaatcgcctcctttgagtgaatccggtttagactgggctggtaaatcccaactcttctccctttttctttaaaaaatcgatccacagtgaactactcttatattaatccgagataattgcctcaggtgtcagcggttccgtggaacccaaagtgcctattgccccggcatcagttccgcggcgataatcacgttgcctgaaattcctccatccacgaactcggagatagtggttatcgaggatgatgatggctcagagtccgtggttcctggcgagcagcctgctactgatgagccgggtgagactgagacagctgccgcagatcctgagtcagttcgaaccgaacccgagatacccgagaactcgtag

SEQ ID NO: 163222 - DNA, 3742 bp, Arabidopsis thaliana landsberg
  unsure (1)..(3742): unsure at all n locations
gcagacagggagtgtcgatgagtatcgtgaaagatttgaagagcttgtggtagacttacctcatgtgacagctgatatcttggaatctgccttcttgaatgggttgaggagaagcctcaaggaccaagttgtccgttgcagacctgtaaacctcaccgatattgtggagatcgcaagactcaatgaggcacaggagcgtaacaacccgagctaccaggtgaggactcaaccgcgagtcaccttgcctcctaacccaaccactgcagtggcaaggccgtttgaaagagcacaatctagaccatcttttgtgcctactaaagacacaaacaaagcttcgggtagcggtacttctggaggcaatagtaacccatgtcgtcattgtggtgaccgatggtttacagggcatcgctgcaagcagcaaagactcaagagcctagaggttacagaagaggaacaagaggaaagtcccctcattgaagagctcaatgagccattaacagaagaaaaaggtgaacttgaagaaggttttcaggtaatgtcattaggctgcctggttgaaaaagaaaaagaacactccatgagaatgagaggctacataggcagaactaaagtagtgatacttattgattctcgcgccacttgtaacttcattagcgaagatttggtgagagctagagactggataatcactcctacccgtagttttggtgtgcgagtgggaggtggcaggataattagaagtagtggcaaatgtgtggatgtcagactagaggtccagggcatcgaattcagagaagatttctacttgtttgatttgggggagctagatgtagtacttgggttctcttggttagcaaagttaggagaaacaaaagccaattggggacagttgaggctcagctggcagataggcagaacatgggtttcgctgtatggagatccggatttgagtactcatcaggtttcgatgagagccatgaaacgagtggtgaagtatacaggagttgcttatcttcttgagctagcttccctgtttgataaccaagcgcaagaggaacagacttccatcactcctatgattcaacaaatcttggaccactatcaacatgtatttcagatgccacaggccttgcctcctacacgtaacagggaacacgcaatcacgttaaaggaaggtacctctccggttaatctcaggccatacaggtattcctttgaccaaaaggatgagattgagaagcttgtcactgagatgctgagaagtcaagtgatcagacctagtgtcagccctttttcaagtccagtgttgttggttaagaagaaggatgggggctggaggttttgcgtagattacagggcgctgaatgaagcaaccataccagacagatacccaattccggtaatagaagagcttctagatgagctaaagggagccacagttttctccaaattggatttgaaatctggatatcaccaaatcagaataaagatgagtgacgtggagaaaacagctttcaagactcatcaagggcattatgaattcttggtaatgccctttggattaaccaatgccccctctccctttcatagtgttatgaatgacctctttaggccatacttaaggaagttcgtgttagttttcttcgacgacattcttgtctatagcccggatatggagtctcacctgaaacatttagagatagttctgcaactgcttaaactccaccgattctacgcaaatttgaagaaatgctcttttggcagtacacagatcgcatacttaggccatataatctcagctgaaggtgtctctgctgatcctgaaaaggtagaggcaatgttgtgttgnnnnnnnnnnnnnnnnnnnnnagagttgcgtggatttctaggccttacaggctactatcgtcggtttgtcaagaactacgggcagatagcaaggccactaacggatcagcttaagaagagcgggttccaatggaatgaggcagccacaaaagcgtttcaggcactgaaggaagcagtcacgaatctgccagtattggtcttacctgactttaatcaagagtttacagtggagacggacgcttctggggttggaataggggttgtgttgtcccaaaacagaaggcctatagcgttcttgagccaggcatttttaagtcaaggtcggattaaatcagtgtatgaaagagaattgttggcgattgtgagagcagtgactaagtggaaacattatctgtccagcaaggagtttgttattaagacagatcagagaagtctaaggcatctcttggaacaaaagtctgtatcaactattcaacaacgttgggcttctaagctaagtgggttgaagtatcgcatagaatacaaacccggagtcgacaacaaagtggctgatgctctctctaggaaaccaccgcaggaaaggtttgctcagttcaccttaacggctccacaaacaatagatattggcgctttaaaagaagaaatcatggctgataaagagttgcgtcagttggttgatacttggcaacaagggcagagtacagaatctgaattttcagtgaaagctgggttggtttacaggaagggagccttggttatccctacaggatctcccttcattccaaagctactagagaagtttcacactagtgcaatgggtggccacgaaggagcgttgaagactttcaagagactcactagtgaggtctattggaagggcatgcgaaaagatacagtggaatacattcgaggatgccaaatctgtcaagagaacaagtactccaccttgtcacccgcgggtttgctctccccattccccattccacaacagatttggagcgatattagcttggattttgtacaaggattaccgtcttcgaaaggattcaactgcatcttggtggtcgtggataggctaagcaaatacagtcactttattccgttgaagcacccgtttactgcaaaggtggtagcagaggcctttataagagatgttgttaagttgcatgggtttccaactacaatggtgtctgatagagacaaggtcttcctcagcaccttctggtctgaattattcaagatacacggcactgaattgagaaagagtactgcctaccacccccaaacggatgggcagacagaagttgttaataggtgcttggtgtcatttttgagatgctttgcaggccgacgaccctcttcttggatgcaatggctaccttgggtcgagtactggtataacacctcttatcacactgcaacaaagacgaccccattcatggcggtctatggaagagagcccccagcaattctcagatatggggacacacctacagcaaatgcagtcgtcgaagaattactcaaggacagagatgggttgttgctagagctgagagaaaacttggagctagcttagaaacaaatgaagaaagccgcggacaaacacaggagagatgttgagttcaaggagggcgatttggtctacttaaaactgaggccgtatcgacaagggtcgttggtacacagaaaaaacgagaagctctcgcagcgatactatggaccctaccaggtgattagcaagattggtaaggtcgcatataaactcaggctaccggattacagtcaaattcatccggtgttccatgtgtcccagctgaaaccagcggttcctccctctttcactgctcaagaactgcccaagattgtgactccttctttagagtgggcgacggag

SEQ ID NO: 163223 - DNA, 4745 bp, Arabidopsis thaliana landsberg
cttagtgataccacattttagacactgttggagtccgatggggacctctttgatgaacctacatggttacctccttttaggaaaggcttcgattactagatactagttgaagaaggggcaaacctagtgattctcagaccctaccgctacaactctatgtagaaagatactattgacaaaatggtgcaagagatgcttggccaaagaattatccggattagctctagtccttatgcctcacctagtggtgcttttcaagaaaaagatggtttatggaggctgtgcgtcgattatagaggcttgaataagcagacaattctagataaataccttattccactcatggaggatctgttagatgagttaggaggctcaatgtacttctccaaacttgattttcgcgcagggttccaccagatacgaatgcatcctgatgttatataaaaaataaactttaaaattcatgttggtcactacgagtaccttgttatgcattcgatttaactaacgcttcttgttcatttcagagtctaatgaatcaggtgtttagtcacattaacacaaaacttctacttgtctttttgtaatggtatattggtgtatagtccaacttgagaacaacatctgcttcatctagaggaagtatttgcaatcctcaagcaacatcatctcctcttgaaaccgttgaatgtacttttggagccacaatagttgagtgtatggggcatttcatatatgcggctggagttagtacagatccaagtaagatcaaggcagttgaacagtggcctactcctaccacgcagaagcagctaagaaatttcttaggccttgccaattattacagaaggttcattcaaggttacatcatcattgctaggctattgactaacctactaaagaaagatgggttccactggtgttcggaagctgctacagcctttgatgcattgtaatctgccctgacatcatccccagttctggctctatcagattttggtaaggattttgtaatagaaactgatgccgctaacacaaggattggtgcagttttgatgcaagagagtcacccaatctgctatatcagccgggcacttggtccacgccactaggccctatcagtttacgagaaaaagttgatagatgtggttcatgtagtacaagcttggagtgcttaccttactcatatgccattcattatcaaaacagatcaaaaaagccttaagtacctgttggatcaaaaggtaactactcatttccaacatatgtggttgtctaaactcatggactacacttatgagatacagtacaagcaaggaaaagaaaatcatgtacccgaagcattgtcaagagtgaccagctcccgttgctctccattactttatttcacgttcacaaaagtctggttgatagtatccagctgcttttgcaatcagacccgcgtcttagcaaatcatctctaacattaatagtaatcatgcctctcgtcctgcttactcctttatcaatgacgaattgaggagaaaaagaaaactggttgtaagagttgacgctactgtcaagctcaatatacttaaatggatgcatgattctgttagttggggtcactctagaagagacgctactttgtagcgcatcaaggcactgttttactggtaaaagatgagtccgaaggtgcaaaattatatttgtaactgtcaaatctgccagaagaacaagtatgatctagttgcttctccaggtctgttatagcccttgccagtcccaagaggagtttaagaatacattaacatggatttcatagagggcctcccatcatctacgggtaaatactacatattagtggttatcgatatgctaagtaagagtgcgcatttcattgacctatctcacccctacacggtaattgaagttgttcaagcttacttagataacgttttaggctacacgaaataccacaggacatcgggaccctactttcctgagtgaagtgtggagagaattgtttcgggttcatggagttgatcagtgtttttccactacttaccaccctagacagacgggcaaactgtggtaactaacaaaacccttgaaactttttttgcgatgcatgacatcggacgcctcaaacttggagcaaatggttacctctagcagaatggtggtactacaccacgtttgattcctctattaaatgcattccatttgaatttgtgtatggtcagcaaccccaagtccacttaccataccttccaggggaaagctcttcagttgtcgttgatatgagcttgcagaaaaaggaagaactgattgctatgctgaaatttcatcttttaagggcacataatcgtataaagaagtatgttgattctcacaggtcacaaaaagagttttaggttggagactttgtgtacttaaaactgcagccttataggcaacaatccctaaaaaccagaggagtccctcgatagcttagcacacgattttatggacatttatgtgtcatagacaaggtcgcatttgttgcttacaagctcgagctgccacaaggaactactagtcacaatgtcttactcaagttgtgcccaaaccctcctactaacgcacctgttctaccacaatacttaactgatgtgggtaatgccaaggaaccagaagctatcttggaaaagaaaatggttaatcgccaaaaccaagcggtcaccaaggtacttttgcagtggaagggcgagccaccatcgaaagctacttgggagtttatgggttctgaaatccacactagagatttgtaaatagatttatgagaaaggagggctagatctttacaagaactttgagatttatattgctaagaacgaatggacttttgtattgataacaatagagcttttacaatgtagaatgggattacaaatgtaaaagtataagtgtaagtgttaaagatgaatgaatgtctcttccaagtcgtccttgcttccttatataggtctacgcacgtgagtatatccattcgagatccgcggggattctcctggatattcggcaggtcatttccgcaatatcaggtcggctccgcgaacatttcttcatcagttcccaaattgttattcgcatatctcccttcagcaaatgattaggcccataaggcccaacatacctagttcgcatgtgggcttcagagttgcgcatgtcctcaacgtcatgggcttgctgggcttattgggttggactggtattttcgcaggtggattcctggagggaaatcctgctccaacatttgccccccagcccattgagtgagtaggcgaactcgatgagcggagatctaatttaggtgatattgcgaaaatatcgttgataaggtggtatcatgataacatcaatcagttttgaggataaactcattaaaatcggtttaggttcggattacctgaatcaaaagatatcgagccgatacgcgaggtagatttctgccgacttggacagtcgagatgacgcgtcccttcgttgcctcgcatccaacggctcagattcgacgcggggaagagatctctgcaatctcgaaaatcgtggtgatgatggccctttaaataacttctcacgtctccactcggtttcacatcaactcacacaacttccaaggtaacttctttcttctcctaatatttactgcgtttaatttctttgttgagatagaaaattttcatctttcctctgttatctccatcgtgtttctctgctaatcctctttttccgatctgcttttctcttctttccttcacctccatcacttttccttcttcgaaactaaaagatgagcgacttggaggattctcagaaccagagcaaccacaactacggtgacaacgagatacgtcggagtcaaagtcggcgtcgtcgcggcaagaaccagacgacgtcggaaccctaggcgggcggagccgagtccaaaagccttcgttgaaggcgaatcaaaccaaaaagaagagccttcccaagaagaagaaaggtgatgggccgatgagaccagacgacctagtcgatctccggaggagatgccaagtcccactggaggtaaacatgattctccagaggtcaccgctcactcccgaaaacgttctggagggatggtgctgtgcatacgctaacttcttcgagaagtgcaggctgttcttcctgattccggcgtgtatccttgagatgctctattgcctcggactcgcctttcccagatgtgcccgaattttgttcgccacgtgttagggttgttcacttgagcccaggaattgaacagagagttcggctgccacgaattgctgcagtactgtcaggtcaaaaccaacgcttcaagcgacctggggacctactacatcagcgctcgtcccggatctctaattataggtggcttgaaggcgtgccgagatactcactagcgagccaaatatttcttctttaaagtggaccgtcactccgtcggcgagttcgaccaaacgaggaggataaggacctggaccaccaccattggtcagaaggagatccgatacctttatttccagtttagtatatataagttgtttgctctttgtattaattgtgccgttaataacgttgttccttttttggttgtttgcagcaaaaaccaaagaagtgactctctcagaattggagctcgagctgctaaccctgttctaccgtggccaaactgactggtcgactttcaccagggatcccatcagaactgctct

SEQ ID NO: 163224 - DNA, 3868 bp, Arabidopsis thaliana landsberg
atggtgggcaattataattatagcggcggtaatggcggtttttatcgggagtggatgtacaagaggttcgacgaaatgacgggaaatctgacaccagaatacatcacaggggtggaggaattcatgaactttgctaatagccagcctatcgttcaaagtaatcggggtaaatttcactgtccttgtagtgtatgcaaaaatgaaaaacatatcgtctcgggtagaagagttagtagtcatttatttagtcaaagatttatgcctgattattatgtatggtataagcattgggaagaattcaatatggatgtaggaacgagtaattacgtagatagaacttatctaagcgatcagaatcatgaatatatgggtaatactgtagaagatccatatgtggatatggtgaatgatgcatttgcttataatgcggggtttgatgataactataatgaggatggtagttatcagaatgtggaagaaccggtacgtaaccattcacagaaattttatgatttgttagacggtgcaaacactccattgtacgatggttgtcgtgaaggtcagtcacaattatcgttagcttctcgagtcatgcaaaataaggcggatcataatatgagtgaaagctgtgtggattcggtttgtcaaatgttgacagattttttaccaaaaggaaaccaagcttctgattcgcattacaagacagaaaaattgatgtgcaatttaggtcttccttattatacaattgatgtttgtattaacaattgtatgcttttctggaaagaagacgaaaaggaagatcaatgtcggttttgtagtgctcaaagatggaagcctatggattacggcgttcaaagacgaagaaccaaagtaccatatagtcgtatgtggtatctacctattggggaccggttgaagagaatgtatcagagacataagacagctgcggcaatgcgatggcatgctgagcaccaatcaaaggagggagaaatgaatcatccttcagatgcagctgagtggagatatttccaagggttacatccccagtttgctgaagaaccccgtaaggtttatctcgggttgtgtactgatgggttcaatccatttggcatgtctcgtaatcattcgttgtggcctgtgatcctaactccttataatttaccccctggtatgtgcatgaatacagagtacttatttcttaccattctgaattctggttcaaatcatcctcgagctagtcttgatgtcttcctccaacctcttattgaggagttaaaagagttgtggtctactggagtcgatgcgtatgatgtttcattgagtcaaaattttaatctaaaagcagtactactgtggacgattagcgactttccggcgtatagcatgttatcaagatggactactcatggtaaattgtcttgtcctgtctgcatggaaagtacaaagtctttttatctacccaatggaaggaagacatgctggtttgattgtcatcgtagatttcttcctcatggtcatctatcccgtaggaacaagaaagactttctgaaaggaagagacgcttctagcgagtatccacccgagtctttgacaggggagcaagtttattacgagcggttggctagtgtaaatccagcaaaaacgaaggacgttggtgggaacggtcatgaaaagaagatgtcagactatggaaaggaacataattggcacaaggaaagcatcttgtgggagttgtcttactggaaagacctcaatcttcgacataatattgatgtgatgcatatagagaagaattttcttgacaacatcatgaacactctcatgagagttaagggtaaatcaaaagataatatcatgtcaagattggatattgagaaattttgttcacgcccaggcttacatattgatagtagtggcaaagctccatttccagcgtatacattgacagaagaagccaaacagagtttattacaatgtgtgaaatatgatattagatttccagatggttattcttcagatttggctagttgtgtagatctggataatggaaagttttcaggcatgaaaagtcatgattgtcatgtatttatggagcgactacttccatttatctttgctgaactgcttgaccggaatgtccaccttgcactatcaggtacaatatatacttactatattttttccaatatttttttaatctaatcatttaacttgcacatatattttaggaattggagcatttttccgagatctatgttcgagaactttacagacaagtcgcgttcaaattctcaaacagaacatagttttaatcatctgtaacttggaaaggatttttccaccatcattttttgatgttatggaacacttacctatcgatcttccacacgaagctgaattcagtggccctgtccaatataggtggatgtacccatttgagaggtttttcaaaaagttaaaaggaaaagcaaagaacaaaagatatgctgcaggctcaattgttgagtcttatatcaatgacgagatttcttactttttagagcactattttgccgatcatatacaaacaaaatcaaggtaaatacatttatttattcaactattttctatacttcgatcttcattcaattacctgaatcaggataacaagattcgatgaaggagaagttcatgtatatcatgtccctggagtacctaacatatttatgcacgtcggtcgtccaagtggtgaactgcacgtggaatggctttcagagaaagactacaaaagcgcacacgcatatgttttaagaaattgtgactattttcaaccatttgagaggtattttaaatcactccttaatttaaaattttcattatgataactttgatttatttatctttggttgtaaatatagtatgttcgaggattttctttttgtgaaatatccaacctcgtccgaaaaagaactctacgcgaaaagagctaaaaaatattattaatgggttaaagaatatgtaagtctacatcattttagtaatttttaaaagtgatcatttaaattatgttgatattgttattgtttatttattatgtaggtaacatattggaaccctacttttccatttcctacttgggttcaagagattgtgcatgggcctttgaacaaggttaaaacttggccaatgtatttcacacgaggatatttgtttcatacgaaaaatcatgacgttagacgaaaaacatgtaactatggggtatgtgttaaaagagaaaattacgtggattcatctgatgaagcggatttctacggtaccttatatgatatcatagaacttcagtatgagggtatcgtcaatttgaggatcacactttttaagtgtaagtggtatgacccaaagatcgggagaggcactcgacaaaaccatagtggggttgtagacattctatctacgagaaaatacaataaatacgcgccatttattcttggtacgtaattattcttaagtccaaactacggtgcttttttaattattaataatctatctttgatatatgtatacaggatctcaagcagatcaagtttgttatattccgtatccatatacgaagaaaccaaagaacatttggctcaatgttttaaaagttaatcctcggggaaacatttctggagaatatgaaaacaatgatccgactcttttgcaaacagaaaatgatgaagctgtgttgctgactacaattgaagatcgggtactagacaatccggtagaaagcttaaacccaatcatactcgattatgatgtcggagatgctgaaccagaggatgaatttcgatgtaatttatcgtcttcagatgatgatgaaatcgaagatgatgaagagttctaa

SEQ ID NO: 163225 - DNA, 815 bp, Arabidopsis thaliana landsberg
atgataactcttcttttattggctcagacatcaaagtcttaaaagcatactcaaggaaagtatagtgtccgcccaagttacgtcactttttgtggcaaattttagcaagatgtgtaccagtaacagataatctacgaaaacgcggtataaactgtgagatatgatgtagcagaagtggtgctctagaagaaaccattaacctcacgcttttcttatgccatcatgcacgtcagatttgggcactttcacagatacctacggtcccatgaaaatttccttatgcatctatttatgcaaatttagatcattttttcggcacataccttcggaattcgaatcatcttcatttccatggataatttggtatatttggaaagcaaggaatgaaaaaatctttggaaatgtggataaaaatcctgtacaaatctgacatttggtggaaaaagagtcagactcgtggaagtccgctgaacttgagcttcacaatgaaactcatggttctttcaatggaaaatcataatcgagtgcgacattttccattagacaacaattattcaggatatcgttgttttgtgaatggatcttagaaagataacgacaagttttccggcttaggatggtattgtagatcatcaaatggagagacaccaaccatgggagttgccaatttcagaagaagtctatctccattacatgcagaggtggaagctctcctctggacgatgaagtgtatgattgttgtcgacaaccaagatgtagcattttttacagactgttcagacctggtgaagatggtgtcttttccaaccaaatga

SEQ ID NO: 163226 - DNA, 3459 bp, Arabidopsis thaliana landsberg
atgtttcaatgcctcgggagacgtcgaagacttatcccgaaccgggccataaaacacctcggagatcgcatcaagaatccataccgaggcgatatcgagaacgcttcagagcattctcgtgaaatggtcccccgacccgacctcggaacgcctcggacataaaacctggcaattcatcccgaggcgggctccaagacgcctcgggaacgcatcctcgaaaatcacggtccgagctgcccgagcacgacccaaggtcagctaaattccggctcggaaaaagttcgggttagatgagaaaaccttcaaaaaggacttagccgatataagatcaaacgtatcatttccgaaaaccccggaagagataatcttcaaagatatcaccgaatacagaaattcacagaatctttggaagataaggacaatctccttcaccaacttaaagataaagagaaatcttccgagaatatcgcgaggggcgatattccaaagctctataaaaagcacctcgaaggacaaacaaaggggacacgcacaaaaacgctctcaacttcaggttatcaaaaacgctctgactttgaaggcaaaaacacttattttcatattctagaacacttgtacgatcaaatcattactttctcattaatacaatcaagaacaccgtccgcggtaattgagaattctgttgttctttgagaatcttacaaagattcgttctttgaagaaacccttaaaactatttctattgtgcgagttttgactctcacaatttggcgctagaaggaggggacttgagatttctcttactcccggaacacaaaactaaccacccaattcacaatggtcaacaatcaaatccccggtaacacagttgatgcagaggggaacccaatccctccaatccagacagacgttcctgaagccgctgctcctgtgaccctagcggaactaagaagtatgatggctcaacttcagcagaaggtgaacgatcaagaacaggcaaatcgatccttggcacaacaactcgaagcagctacttcccaaggatagatcaggactactcgtttcggcgcgaggcatcttcaggatcgacgagcagcagcagatctcaaccccacacggctcgtgttccacacgcctggcaatactacaaggcccgtccgccgaaccgcaccggaaatcggaagagaccgaaccgagccaacgattttgggaaatcgggaaacaaagcgaacagaaagaaacgaaccacagctccctcctccccgagcagaggttaccgaggccgatcagatcgatgcctcggacaatgaagcttccgaagagaatattaggtgggctgaagagtacgccagagaacaggaaactagcgccatcaagctacccttagccaaggcagagaacgagatgaagctcgtgagatcccaaatgcataacttagtctcctcggcaccgaacatcgaccgcattctggaggaatcccacaacatgccgttcacacacaggatctccaacgccataatctcggatccaggaaaactaagaatcgagtatttcaacgggtcttccgacccaaaaggacacttaaagtcgttcatcatctacgtggcccaagccaaacttagacgccggtcttagtcacctgttcgtagagcactctgaaagggccaactctggattggttctcgagactcgaaggaaattctgtggacagttctcaggagctatcgacacttttgctgaagcaatattcggtgctaatcgatccctggacatcatacgccgatttatggtcactatctcaccagcctaatgagccacttcgtgacttcctcgcgacattccgatccaccctagccaaagtcgaaggaatcaacgacgtggcggctctctctgctctgaagaaagcactctggtacaaatccgaatttcgaaaggaattaaatttgccaaaccactgacaatccgagacgccttgcaccgagcctcggataacgtatctcatgaagaagaaatggaactattagccaaaagacacgaaccgtccaagcaaacgcctcgcatcgataaatcccaacccagtgctcgaatcacaaaaagggtgctcaaggcgggacattcgttcaccatgaagggcaaaatttctccggagcccataattaccaggctgatacaccctgaggcgaagccgcctgaggccgaggacgaggccgcggtcgaggacgcggtcgagaatcctacacttggacaaaggatcaacccgcaggaaacgagcaggaatattgcgagttgcataagagttacggccatcatacttccagatgtcgtagcctcagagcaaggttgtcagcaaaattcctagccggagagatcggtggaggtttgaccatcgaagacttagaagcggaaaaaggaaaaaccgagcaggtcaacgctgtggccaatcccgagcaggcagcccccgcggcgaattccgaaggacctaaaagaggccagggtaatcgcgaaacagacgacgatgaaccagaagctgctcggggaaggatcttcacaattttaggggattcagctttatgtcaagatacggcagcatcaatcaaggcatatcagacgaaggccgactcaaatcgtaactggacacgaccgtttaacgaaccagatgacgaagtgactttttatgagagcgatactaacggcttggaccgtccgcacaatgatcccttggtcattccactaattattggtgatttcaacgttgaacgagttttagtcgacatggggagcacactggacatcatttttctcacgaccctacgagaaatgaaggtcgatatgacgcaaattgtacaaactccgcgacatgtgctcgggttctctagggaaaccaccatgactctcggcaccatctagttaccagtccaagccaaggggataacgaaaatcatcgatttctctgttacttaccagccgaccgtttataatgcaattattggcacgtcatggttgaatcaattccgagacgtcgcctcgacatatcatctttgcatgaagtttcccacgagcaacggcgtgaagaccatctggggaaatcagaaaaatgcccgaatttgtttcatggcagcacacaagctcagaaaccccgtcaccgagtcgacagccgacgcgaaacataagaaggctaaactgggctgagccgaagcaaaagccatctccgagcagtgatagcaactaaagatcgaggaggctcgagaatcaacaagaccagtccccgacccggtaatctttgtctggtccccagaagacttgcccggagtaagcgtcgaaatcgtagcacacgagctcaacgtcgacccaacttttaaactcgtcaagccaaagaggagaaaattgggtcgggagcgaaaagaagctgtgaaagccgaggtagagaaactgttaaggatcggctccatcgcgagtcaa

SEQ ID NO: 163227 - DNA, 2178 bp, Arabidopsis thaliana landsberg
atgaagaagaagatccacactaaggaacatattgactttggaggatactattctgaagtgaatgagtggattggtaaaaattcactatatgctatatcgtttaagacgagtagtttggagaagattagctattcgatgttagttgacaagatcatgaagaaggttgcgattgatgaagcttctgtcaagttgaaactgagttacaatctgtctaaagttaggagagagacatatattgtagatgatgaggatgtcttcatatttttaacagaatctgatgaagagagatcggattcctgttttgcatgtggaggaattaaatggtataggagttgagaggagagaggaaatttctgtaccggagcgtcgaagttcagttggtgtaaatgttttaaatgaagtatgtgagatggtgcatgatggatatgataatgatgtgaatgattgtgagaatgtagtaggtacggagatcgtggctgtcgaaaggccgatggaaaggccggtgaattctgttgaggaagaagatgaggatgataggattgattatgatgacattcacgatattccacgaaatgtagaagttactccgcaggttatagaatgggatgatggtacaggtattgaaattggtcaagaattttgtccaagggaggctgtgtgggaattggttaacagagctgcaaagaaagaagtttttggagtctatactattaagtcagacccgttgagacttatgctacgatgccgccaagcttctaaagggtgtacttggtatctaagagttgcgagaactaagaaatctcatttttggagtgttagagtgcatagaaagatgcatacatgctctcggggtgttgagattacaagcaacagtatacagtgaggcacaccaagattaatagcatcagttttgcattgtgattatcccagaaatttagagaccccaactccaaaaaacattatgtcgattgtaagaggaagacttggggtgcattgttcatactccacagccttaagaggcaaaatgctacatgttagtgatgtgcgagggactccggaaagaagctacacgatgttattttcttatctttacatgttagagaaggtaaatccagggacagtaacttatgtggagttggaaggagagaaaaagttcaaatatcttttcatcactttaggcactatcatcgaaggttttagggcaatgcggaaagtgatagttgtggatgcaactcatcttaaaactgtgtatggtgggatgttggttattgcaacaactcaaaatcctaagcatcaccattatcctcgtgcatttggaataattgataacaagaagaatggtagttggatttggtttttaaaaaagctaaaaaatctgtaaattttgatgttcttggattaatgtctataagtgacaggcatcaaaggcataaaagaagaccgttaggactgtgtacctgaaggcgcttcatgcaagttgtatatggcatttgactcaaaacatgagacttcatgtgaagtttgacaaggagagagatattgataaattcaggaattgcgtgagactgaattcaacaaagagtttggttattttactagtcgatggcataaacccgctacctttctagttgatgtagggtttgagaaatagacgaggtgccattttaaaagagacaattataacatagacactagcaatgctatatagtccatcaacagtgtatttagaaaagagaggaagtatctcctgttaccactgattgatgcgatgtttcataagttctctttatggttcaacaaacataggaaagattcaggttcttcctcaagcacatcagaagtgggtgtgtaatgtggagaacatattgcatattcgatttccagttgcagccaaattaacagggattgagcttaacagttacaaccaagaatacaacgtgattgatctcaactcggtaagcttttaggtggatttgaaaatgaaaacttgttcttgcaaacattttgatatagacaagatgccgtgtgtccatgccatagccgcaacaaggcacctcgctcgcaaagaaggtagaaatgctaatatctgaatctatggactctgctttatatattatgttgatagagagttgggcattggcctattacatgttgtatgtagtgccacatgagtcgaaa

SEQ ID NO: 163228 - DNA, 3247 bp, Arabidopsis thaliana landsberg
  unsure (1)..(3247): unsure at all n locations
atggatcgtggtgaaaataattcggtagttcatacgatgaatcaaaagagaaaggtacaaaaccatcgctttccagtttctgaatttactctctggtgatttaattgaccagtataaactttacatgttaaagtactgactttttctttcgaatataaaacttaccatgattgtagatctggtaaacaacttgttaggatttacaaaaattaaaccgtgaatcacgatttttgttttagtccgaaattaatgtttacactaaaattaattggaaaactgtcattatgggttgagatttataattactttttattatgttctttgtaatacctaatgacctatttccttacgcaatgtagacggcaggacaagatgaagtattgttggtgattggcgagtgggtcagggttgataatttagcctggcagtttgaacctaagactgtcaaaggagcgtccttcatctgcctcaggaccaacatgacgtacgaagagctagctcagaaggtgaaagataaatttggctttcgtgcaagagacattacaatcaaaatggcataccaatatccagagtggatggttatagattaagggaacgactctcctcctcaataaattagtgaagatagttatgttacaatgttcattcaaatgaggcggcatatagaggaggtgaatctctatgtcactgtcgtccaacatactatttcaagttgtcatgttgatgtagctgacaagaacttcaattcagaggacactgacgagtcagattatgactcagaggaggaacgtcaccaatttgcacttgatagtgccttggttgggcctactcaagagcaaacgtctgctacaacagagacagaacaacgacgtaggaccaggggggaacttttcccaacaagagggatcagtattagagagcctaaagactgcatccgaatgaaaagccatgaatgttgacctactgacaaagggaaaggaataatggacccaattgggaagacagggaaggctggtccaaggagagccagtgtgacagatagctctagcgacaatgactatgacttgctacttgttccattcaccatgccacctatccacccgctatcaccattcgggaaaatgcagatatcgaaggcgtagattccttaaggggagcaatcatgtttctcctattacaaatgatgtggaagaaactgcaattcaaaggcataacattcttttttggggtcgagcacaagaagcattaaacaccatactatctgatttcagtgatgatccaatcctattcggtcgagacgccccaccagtatttaatgatggaaaaggtgaaggtatatcctgcaatccgtctataaatatatacatgctttgctgatttatctgaatgcattggaagttgatagttcgtttacgtagtttatgttttctataccattctatgtagaatgattggttctatttcagtatcgtttatcatacatgtgctgaatgatggtcattgtgtttcaagtgtagactctgcattctttgatgttaaatatgaaggagacaagctgtttgttggcagagtattcaagtccaagtttgattgcaagattaagatagctatacacgccatcaactgcaagtttcacttccgaactgcgagatcaactccaaagtttatggtcttgaaatgcatctctaagacttgtccatggcgtgtgtatgcttctaaggtagattcttctgacagctttcaagtacggcaggcaaatcagagacacaccttcaccattgatcaaagtcgtagataccaccgcttagcaacaacacaagtcataggcgaacgtatgcaatctcgatttctcggtattaaacgtgggccaaatgctgctgttattagcaagttcctgcttgatgactaccatgttagtatatcatacttgaaagcttggcgtgctagagaggttgccatgaagaagtcattaggatctatggcaggcagccatgcaccaatccccgcatacgctggcctacttgagcaagtgaacncaggcagtctgtgctttacagagtatgatgatgatccaacttgaccacgacgtttcaagtaccaattcattgccttcgcagcatccattaaaggttatgcatttatgcagaaggtcattgttgttgatggaacctctatgaagggccgatatggtggctgactaatatcagcatgttcccaagatgggaatttccagatcttcccacttgcttttggcattgtcaacagcgagaatgatagtgcatatgaatggttttttcacaagctcagcattatagctccagacaatccggatttaatgttcatatcagaccgccatgctagcatctacactggattgagcaaggtgagaaagacaatagtttccattcagccttttatatattatacaagtaatgtctgatttgttgactatttcaatcaggtatacacgcaagccaatcatgctgcttgcactgttcacctttggcgtaatgtcagacatttgtataagcctaaaagcctttgccgtctaatgtctgaagctgcccaagcgtttgatgtcactgagttcaataggatatttctcaagatacaaaagttaaacccggatgtgatgcatatttagttgatttgggtaattttgtttactctcttcataatattgttcagcttccatatagttatagtaaattggttgacaggattgtagattacataaccatgtatattgtaatgtgtatagggttttcagaatggaccagagtgcattcaaaaggtcggcgtttcaatattatggatagtaacacatgtgagtcgtggaacaacgttattaaagaggcacgcgagtacccacttatttgcatgctggagtacataagaacaactttgatggattggtttgctactagaagggctcaagctgaagactaccactttagctccgagagtgcatgaaagagttaaggaaaactatcaagccgccatgtcaatgtctgttaagccaatttgcaacttcgagttccaggtccaagtttagactggtgaatgttttattgtcaaattggacaagtctacttgttcttgcttggaatttcaaggtttagggataccttgtgctcacgcaatacaagttgctgctcggcttggagttcctacaaattctttgacagcaatcggatattttaatgagttagtgaagctaagttatgaggagaaaatctatccaatt

SEQ ID NO: 163229 - DNA, 2891 bp, Arabidopsis thaliana landsberg
atggaaggactgaaccatgcaatcttggaacttcaaaaaatggttacaggctacaccagttttgaatttgaggattggtcaaaggaacttggttcagaagaagaagactactctgctgctcagaaaaagcttattttgaagaaaaatcaaatgagtactcatcctaccatatctcaagagaggatgcagagtatgactcaagcactgaaaattcaaccactgaagatgaggacttctctgttcctctcttcaacctcttttctgactaagctctgtaagagtcaagcttagtgacttaaaacaagctcacttgggaggaagtcccatgtctatccatgtatataactttctatttttcttgttatttttgatgtttttgtttaagtgtttcaggtttatttcattgaccattatggagtcaacggtcgagtaaattcaaaccatgtcaagaaagatctcaaccgttgatcgagtagaatgaggaggagtgttttgagccgttgatttgaatgaccaaatgatagaagcatcaccaccgtttgatcgagtgatcaaaagcaaagaactctcaaccgttcgatcgagtattgcgcatttcaagaggatgctcgaccatttactcgagcttgaattatttggagaccaaggtataagtcgcgtgaccccacttgttcccccatcactccattactctatggacaaaacaattacccacaccctcactgtttccaactcgcttttctatcctttccaaaagaaaccaaagaccagccgccttcacccattgaaatcgccaaaccatctttgaaactctctctttcatcatctcatttttgcaaatcctctatctctcatcaatcatcaaaatctctattgcaaactctccctttcactcctcaagaattcgttcacatcttcaccatacctcaccaaacttactcgatcattcccaattccatccccaaattttcaatcggtttttaatctcaaactccagtcaccaagagccaaatcctttccactttgatacctcttggagaattgttcctgattgtcctgtagaagctcatcaccaaactccatggattcaagaagaaaggattcatctcggggtaaaagatcctttgttgatagcgaagaagtagcagcgatcgacatgggtagcatgactgagcgccaaattcgccaagctcgctgtgctcaaagatcaagcttgattcaatgggaaagttcaaatcgctcagccatgcaaagagaggaagtagctaggtgcaagaggattgttgaggctgcggaagaacaccaagaagaggcagtctttgaagaagcagtttctgaggaagaggttgagatcatcggggatgatacaccaacccctgttgggagaagaaaccggccaagaaggaagagagagccaaccccaagcgagtactatcaatacttgatggaattgaagtttgagggaactagataccctcataaggaaacaatgcaagagattggtattcgtggggatgtggaatacttaatagggttggccaatctcgcaacattcatgagctgccaatttgggggatttaaagaggagcactgccaactccttgcaaccctcaaggtccactttcatgttgatgactcggagaaagaagaaaggggaggtctcggttacattacctttaaggttaagggtgtcgagtatgtcctggatatcagccaccttgatactattttcgggtttccaagcggacagggaatccgccaagactatgaccaagatgagctactctctctttggacaacaatcgccggtccaaagccctactcgcccgccaagagcaagacttattcaattcgaagtcccgtgattaaatacctccaccaatgcatcgccaacaccctttttccaaagaagactaccggatttgttggtgaagaagagctatgcatgattgatcaagctttggtcttcattctgagaaagaccaaggatgggaggaagatggcgggtgatagagcagacacttcgctgactattgttcttttggaccacctattgagctatagacagtatgctgcaaccatccttcgcgaaagtctttgtgttggtggtctcttaacatcaatcctaggagctgtggggatacacttgggaacccctgacatgttccccaagttcctcgacctcgattatctcaggggaaaggattatcttgacaagacaactccggcggatcactacatcttcaagttcaaccatccggagcttggaccttctttgttacccctaccttgcgagaaccaaacttctgttaagacaaggcgcaacatcaacttcatgccatctccctctgccctgaacatcgacatcggaggagctagagaagatgaaccagagtatactcaagctgagtatgagcaacaagagtattatcctgttgagtttgagcaacaagtcgaattcgagcaacatagcgaacaaccggagcaagagaccaacaaattcgagcaagctcactatgaagaagatgctgatcaaggaggagatgagatagctgtagttcacaagaagctcagtgtgcttgaagagcttgggaaccttcataacaaaacgatgaaaggtttcaaaaagaagatgaaaccatgaagaagtcgctgaagggtatggctgctcaaataaaagacttcctgaacaagccacggcccccgtctcccactcccgaagtaagaagaagcggttccacgagctcggctgcaaggagggccgaaaggatcaatcaacctcgagcttcattatttgagcctcgggaagtatctccgagttgagagagccaaggagtaggcagagaagagcatccacacgctcgaccaactactccatcggacaggacaag

SEQ ID NO: 163230 - DNA, 2991 bp, Arabidopsis thaliana landsberg
  unsure (1)..(2991): unsure at all n locations
agagaaaaaatgtgtttgaacactctctttgcaatcctctgttttgtccttaccgttagtttcggcttcgtctctgcccaaaaatgtggggagtctctgtttttcagacctaacggtaattatgacactaaccgtcgtctcgttctatcaactttagcttccaacgtcagttctcaaaacaaccgcttctacaacgtctcggtcggtgaaggagctggaagaatctatgccttaggtctctgtatcccagggtctgatccaagggtgtgttccgattgtatccaactcgcgtctcaaggtttattacaaaactgtccgaaccagaccgactcattctactggacaggtgacaacgccgacaagacgctctgtttcgttcgttactctaacagctcgtttttcaacaagatggctctagagccgacaatggttataggagatctaaatagtggactattccaaggggaccttgcagcttatacaagaacatgggaggtgttcatgaactctatgatcactcgagttggtcgaactcgttacctggccgatatatcccctcggataggttctgctcgtatatatgcgctgatgcaatgtattccggggatatcctctatggaatgtgaaacttgtattcgagataatgtgcgtatgtaccagagttgctgcaatgggttcataggaggaactattcgcaagccggtctgctttttcaggtgggatggttctgaatatcttggtgcctttggtgacacgccatcgctacctccaccatctccagatgggaaaacaatatctacgggagctattgttgcagttgttgtttccgtggttatatttgtagtgctgctcgctttagtattggtcattcggaagagaagacaatcgtacaaaacactaaaacctaaaagtgagtttttttttctctcttaattgttacattgcttttttttggaaccagtaatagaaaccatatataagttattgcagcttgatgatgacatgacaagttcacagtctctgcaatttgatttttacgacctcgaacaggcaactgaaaattttcgaggaataccaagctaggtaaaggtgggtttggtgaagttatcaaggcatttatcaggtgagctctacatatatcaatgctagcttgatttgtcaaaaataatgatcacttaagaagctttgatagccgcttctccgcaactttggtttcatttgtcagtaattctaatattgtatatntgtaggnaatgtnaccaaatnnancanaagttncggtnaagcggctatcgagtaattcaggacaaggcacacaagagttcaagtacgaggttgtgattgtggccaaacttcagcacaagaatcttgttaggcttcttgggttttgcatagaaagagatgaacagatacttgtctacgagtttgtttccaacaagagccttgattatttcctctttggtaataaacaataacacttggtttaatttatgttcatttatcaaactttttttataattatagtgtaattagatccaaaaatgaagagtcaactagactggaaaagacggtacaacatcataggaggggttacacgagggcttctataccttcatcaagactcaaggctaaccatcatacaccgtgacatcaaagcaagtaacattcttttagatgctgatatgaaccctaaaatagctgattttggaatggcaaggaattttagagtggaccaaactgaagaccagacaggaagagttgttggaaccttgttagtactccgataatctctttaaaattgataaacctttttctatttgtttgtttctgattaacataaaactttttatgttgtatatatgcagcggttacatgcctccagagtatgtgacacatggccaattctctaccaaatctgatgtatatagctttggtgtattgatcttggagattgtttgtggcaagaagaacagcagcttctttcagatggatgattctgggggaaatttagtgacacatgtgagcagaaaacaatttaaaattttactttgtttagattgtgaccatcaaggatttggattctgaatatgagtttaatttcttggcaggtttggaggctttggaacaatgattcacccttagatctcatcgaccctgcgattaaggaaagctacgataaagatgaagtcattagatgcatccatattgctcttttatgtgttcaagagaatcctgcagatcgtccaaagttgtcaaccattgtctcaatgcttaccagtaacacaatcagtgtgccagcgcctggcataccgggatttttcttcaggaacagacccaatttagaccccttaacctatggatccgagcaggggcaatccagcagcatgtctgttcctttttctatagatagtgcgtcaatcactagagccactcctcggtgagatgattgcttttgcactagtcagtagcattttacttgtaacacaagcaactccagttttcaaaggtccagttaatttttatggtaatatgggtacatataaaaccaaacttatgtgtagccgtgtaggtagagtattcctttcttgttttttcccatggcaagatgagaatttgtcaaacctcaaatatgatacattaacctctaagaacaaccacttacgaacccatttttttacttcttcagtcatctatgatagtcaccagcttgcttattcagctttttgctctcccagattttctataaagtggcaacaaattttattatttcccctgaaatatccatgcaactacacttatattatgatgatgttccaatgattttgatcaccaacatttgtagatctctaaggtttttatgtttcatcaaactctatctagcagcttcacatgtgctagtatatttgtaacgtctctcatccaagtcctctctttcaaagactggttttcgctatttcaagaggctataaagacttccggaagcacacttaa

SEQ ID NO: 163231 - DNA, 7867 bp, Arabidopsis thaliana landsberg
atggcgttaatacagcatcctcaagtgcttcaaggcatattggacactctccttgctctcctttgcgcagttcctctaccacctcctgaacaaaagcctctgacggtacatcttttccttctctttctaagccagaagactttccactaaggaaacgtttagaaagcttattcagatcagagtattccgctgtatcccctcgactggatgcaagaaaaacaagagactgttataagaaatatggcaattgcgtcaacaaaatgtcaaacagaaacaagggctacggatgcatgtttcttataccaaattgcccatattatctacgatatgttattggatattttatacaacgtcatgcaacagattaagtagccatggaagttaaacccagcaatgtgtatctatactaaataaaaagccagtaaaagccacacctcattactaaaaatgggtgatcacaacattgtctatggtgtgttttctggtgcagaaggagcttatagcgattctactcgaccctctgctctatccaactaggagggaagcagcagagcattctactcgatccattcactcgatccaagctgcctcagaggaggcagcaattcactcgaccctcttactcgatcaagacagccttagaagaagaagcagattgatctactcgacccttctactcgatcctctactcgacccatttactcgaccaagggtgactaactctacaagacttgttgatctatcaaagcgtctttggatcctcctcattccccactcaaccagacatctgagcatacggataggagaggaagaagcatctactcgatcaattgatcactcggagcatagacacaaaggagcagactttgcagcaccctcattactcgatccccaagatcgagcattcgcccaaaccgcctcaagtctcttgttctctagtgaatctaggatttcaacattttactataaatatatcactttggggtttgtccaaaggatcaagcttttatcctttagtttttctttgtgtttatgaatcttcaaaacttaattactcttaatctatttcgtttttgcatttagttgtttaagtaaatttgtttagcttgtttagatctgcattttggtatgatttcagtaatttctgggtttgtgttcttgagaatgttgcttgagtaatgattagggttcttgaggctagattagattagggtaatctctaggttagttaagtggttaagattaggttagaaccttctggatttgcttggctcctatgcggtttttgctagctaatgtggagattcgatcatagacaaccagcgtccaaaagacgtttaaatggatgcctaacctacgaattctagagatatgtagactcaaccaagatattggcttgtctgcctattggctttgatagattgtttcttaaaccctgctctgctatgtttcatcaacgagagtttagattaggaagtggtagagttatgggggtctctgtcacgagagtggattgacccggtttttgaatctatcgtcatggttatctacctttcgcctattagccatttgatgaaccctagagttacccttatcaatgaatccatccttagaacttctattagatttatttgtatcccctcttgattgcacttttatttacctgttatttgtatcctctatttgcatccccttttgattgcattttagttcttaattttgtcacctgttggttctactcgacccaatgatcgagtagggctctaaagttctcatttttacttgtttgaatcctgacctaggattattagtagaaacccaccatcattttaatctggcttgacttagttgtttctgtacacatcttgattgctagcaatacagtggactggattgacaccccctataactgcatcgacaggtttgtgttttaggggacctgaactgaaatcacactcttcagcacataagtagacctgaaaaacctgcttatcaatttggcgtcgttgccaattcattgttgcattgttacattcaagatatcagaaacttttaagatcaagttcttttacatttatcaagttactaactcatattttcgtctgctcgtttttgtggtacatgtactaatctttgtgcatgcaaactcgatctaaaggttctgtgcacctattaccattcagagatagaattgacaaaacagctcgtgagttacaagaaaccaaagcaaaagcagcctgtgatcagaacagaccagctgctatgaatcaacagaacataccagttgatattcaagacccacctaattttgatcaaccaagaaacattggtgctggtgatgccccaaggaatcatcaccaaagacaagggatggtgccagcaccggttcagaacaacaactttgtgatcaagagcggtctgcacctaagggagcgaggaaacatgtttcatggcttacctatggacgaccccctgcaccatcttgacagctttgataggctgtgcggccttaccaaaatcaatggtgtcactgaagatatgtttaagctctggctatttcccttctctttgggagacaaggcacaccagtgggagaagactctaccccagactctatcacctcatgggacgattataagaaagcttttcttgctaagttcttctctaatgctcgcacagctagattgaggaacgagatctaaggcttcacacagaaaaacaatgaaactttctatgaagcttgggagaggtttaaaagctacactactcagtgtcctcatcaccgtttcaagaaggcttcattattgagcacactctacagaggagctttaccaaagatcagaatgctactcgacactgccttaaatggaaacttcttgaacaaggaagtagcagaaggatgggagttggtcgaaaatctagcacaatctgatgggtcctacaatgaagactatgatcgctcagtgagaggaactggaggcactaaggataaatagagcaaagatatcaaggccctgaatgaaatgctagacaaactattgctggcggatcagaagcagatacactacatcactgatgaagagcaattccaaatgcaagaaggggggaatgaccaaacagaagagccctgctatattaagaaccaaggaaggttcaacaagggctacaacaactacaagcccaacccaaacctctcctacagaagcactaatgtagctaacccccaagatcaagtgtatccacctcaacagaatcagtccaagccttttgttcagtacaaccaaggttatgtccctaaacaacagtttaatgaaggataccaacagcagaatccaccaccagggttcactcaacaaccacaacaagccccaacagctcaagatcctgaaattaagcaactcattcaacaaatcattcaaggataagctattggcgctatggcttttgacaagaagatagctgaattacacaactagatcgattgttcttacaatgatctgaatatcaagtttgaagctctaaatttcaaaaatcaagtatgtggagagtcaatttgcctcaacctctgccccgaagcaccctcagcaacttccagggaaagcagtccagaatcctaaggactatgctactgctaatgctatcaccatccaccaagaagatgagtctccaccaagtcatcagactcccaatactgaggacaatatgattcaagaaggggggggggggaattcaactcaaattgatgcacctgccactcaacaattcatctggactatagagcacacacctttgctgaatactcactattctagaaaaaagttcaaaagtgaaaaattcaagaaggatcataatcaagagatgattagtagagtcatcactcaagaaacatacaagaagaaagtcatccaagaaaagcttgatgatcccggttcattcactctaccatgctctctaggaccatggacattcgataggtgccttttgtgatttgggagcatctgttagccttatgcctctctctacagctaaaaggctagggatcatggaatacaagttctaatagctttacttttacctgatggttatgttgcacatccacatggtctaatagaaaatctgcttgtcaagattggaaatgttgagatacctacagattttgtggtattggtccaatactattggacatatatgaagaaggaaaggatcccctgatcctaggcagaccattcttagcatcagctggagcagtcatagatgtcaggaatggaaaaattaatctgaaccttgaaaaaggcatcaagatgaagtttgatatcaaagaagcttcagggaaatcaacaacaggagttcagaattttgggattcagaacatggatgttgatgaagaagtagaagctggaaccccaccaagagttaactatacttctcaactcagcaagctgaagagaacttttgaccacaagaagaaaaccttaaatgggttagctcagactgaagatcgtacagaagatgactggtatgagatgaaaaaaaaaattaaatggcaaagtagagtcataaagggattatcttcaagggtgatgaagctgaaagatcaactatggatgtttgaaaaaagagttaataagtattcaaatggtattgacccacagaagatggaaactgcactagctatcaaagaggacgaagatttcacaacaaaatggtttgcatgagaagatcagaaaggagttcatttagaggaaagtatcttagagagtaagttgttgagtgaggaggaaacccctattccgacttattctccaggagtgcctaaacagcccaccaacccctctgctgaagaagaacacttgattcttgattctgttactgaagaacttctggaactcaggatagaatataaagctcaagaggataccattggaaagttaacttacaagatggaaggactgaaccatgcaatcttggaacttcaagaaatggttaaaggctacccgaactttgaaattgaggattggtcaaagaagcctagtttagaagaagaagactactctgctgatcagaaggaagcttattttgaagaaaaatcaaatgagtactcatcataccatacgtcatgagaggatgcagagtatgattcaggcattaaaaattcaaccactgaagatgaggacttttctgtttcgctcttcaaccttttttctgactaagctcagtaagagtcaagcttagtaacttaaaacaagctcacgtgggtggaagtcccatgtctatccatgtatataactttctatcttttttgttatttttgatgtttttgtttaagtgtttctggtttgttttattgaccctaaggaagtcaacagtcgagtaaattcaaaacaagtcaacaatcatctcaaccgttgatcgagtaaagtgcggaagagagctttaagccggtgatttgaatgaccaaatgagagaagcatcactaccgtttgatcgagtgacttcttgaggtttattctggtccgtttgatcgagtgcttaagaatgaagcattctccaccgtctgatcaagtgaagaaaccaaagagaccaccttcgtagacaccgacgcctcgtgacccgcctccattgaaacgctgttgtccctttgtcttcttgtcccccccccccataatcactttggtcccccccccattgcaattcccgaactcaacatacctcatctctccacctcccataccaaagaattctcgaatccttacaattctctctttatctccttcacttccctttcttatcaaaacctcaacaaaattcatttgtttcctccatcattcgatctcctaacctactgaattttggttttgagtttctcccacttttgttcttgatgacgaacaagcgctcgctcttgtcaaggatccagaacagagctctctccccaccgaagagatatctaacaccttctccgcatgtagcagctcgaggactctctgaaccctcatacatagggtcgagcaggagagaacaagcaagtttcaagatcgatcatagcgtgtcaagccaagaggaggaagtgatgcaagaagaagagactttcagccctctgcaaaggaattctcgaggaacaaggcagatatcactcgaggaaagaagcccgtggggaggaggttggaactggtagatgaaaactccgaggaagaaatggtttcaccagagaaagatgatcaaacagataaaggaggtgatgatttggaattagagaagtgtgcaactcaaaacaagtactacaagctgctaaaacgcaacgagtttttaggaactcgataccctcatcctgagaccatggagagactcggcatctatgatgatgtaaactacatgtttaagcagtgcaacctgaatattcacatgtttcgaccaatggagggatatgaagaagagaccatccagtttctttcagctgtcgaattgttcatatatggagagtaagaggacgacggagtcaggccagacggaagtttgggatacttggagttctgtgtgtatgacctagaatatcggcttccaatcgagcatctagagctgatgtatggatttccaagcgaaaaggacacgagtcatcgttttgaaaagaaagagctccagtcattctgggccacgcttgggtttaaacatggattttcctcctctagaaccaaaagaaaggaaataaggagtctggtggttaaatactttcataggtctttagccagtgcactatttgcaagagacaagaatgggacctttgtcaatggagagctagagttgatggagccagcgctgtaggagctgcttggtttagcatcagatggtaccgttctagctggagattagacagacgcttcggtttcattctacctaatcgaacatctgctgagctacagaggatgggctaagggacttaagaaaccaggaagaatggttgtgggaggagttgtgaccccaattttgagagcatgcaatgtacctatgtattcaaagctgattcctccaagatgaattgatatgcagcaccttatcaattccaagaacttttggtcgcagaagaagaatggcttatataaataaaagttcgatcaccttgaagcaggataatctatttttctcctcccaaatcccgcttccacttcgattagagatggcagcaacatcgagttttgcccaccaatagagaacctctatggttcaggtgatgaagttgtgccaatggaaggagtgaatgatgatgaaacaccaattcgacattcagataatgaggcacaacctatggacgagtcttatgcaacacaacagttttactttgagaagtactccgcgccaaggcaaagtaaagactctgaaagaaattcataagcgccttggttttctccaaagctggtgtaaacttcaagacaaggctttcgcagcactcaacaagaagtttaacactctccaactcaagttcagctgttcttcttctactacggcgatgccacaggacatgccttttaggagaagcggatccactcgacatgaacctatgcaatatgatccgccttcgccaccaagacagacttcatatgagccgagagaacaccatgttgcaccttcaccaccgaggcaatcagactttgaacctagggagaaggagaggaggagtaagataaagaagcgcataaggacagagaaattggatgctggggcaagccactctaccgcaccactcgaggagccacttgatcaacagcccgagcaaagggtagagcatccaactaatccaattccagcacaacccactccctggagctacacaaaggagagcatggatgaccttgtctctgcctacttcccgtga

SEQ ID NO: 163232 - DNA, 1398 bp, Arabidopsis thaliana landsberg
atggcgataaagaaccttcttcctcttgtggttcttctaagtgtccttggagtatcagtctctcaaaagggtcttgaccttaactactacaaaagcaggtgtcctgacgttgaagccattgtccaccgtgtcacagttcaatatgtttctcgccagccgagtcttgctgccgcgcttctaaggctgcattttcatgattgtttcgtcagagtacgtttgcttctttgagactatactaaagaaatatatgtgtggaaaaataccgctaacatttttgatggttcatgtagggatgtgatggttccgttcttctaagatctagagacaatgatgcggaaataaacgctctccccagcctgaccctgagaggttttatagtggtcgatgccgccaagtcagcggtcgagaagaaatgtcccggtgtggtgtcttgcgctgatattctcgccttagtagcgagagacgccgtctcagctgtacataacatttcataatggactgattcttctcattccaaaatcattgaaatcagagtactacaacttccttttgttgccttttcacagatcaatggaccacagtggccagttccattgggtcggagggatggtcgtttctcaagacgttccgaggttaacataccttcgccttttgcccgtatagcttccctgaaacaaggcttcttcgccaagggtcttaacactacagacctcgtcgttctctcaggttctaaaaatactttctttttttgaatctagtgttaaattatattcaaaaaaaagtaacgtttttacaactaatgcacgggaatttgaatttctacacaatgctaaaacttaaaattgatgatgatgatgagattatgatcgactttgaagccaagcttggaaacaagtctcataccgcctatccttcgaccttttgattgttgtgatttgatttcggacttatgaatcaacccatttatttaatataataatagtttcttgagcaggaagtcacaccattggaatctctaattgcggtctcatccacaagcgtatctacaactttacgggcaaaggcgattttgacccgtccatgaatccgagctacgtaaggaaattgaagaaaaggtgcaagcctaatgatttaaagaccccagtagagatggacccaggcagtgtcaaggtgttcaactctcactacttcgacactgtggctcaaaagaagggtttgttcacatctgactcaacacttctcgatgaccctgagaccaaaagctacatagacagacaggttgctaccgctggctcttcattcgccaaagatttctctgagtcaatggtcaaacttggttttgtcgaaatactcaccgggaataagggtgagatcaggaagagatgctccttcgttgaa

SEQ ID NO: 163233 - DNA, 2124 bp, Arabidopsis thaliana landsberg
  unsure (1)..(2124): unsure at all n locations
atggacacgggtttgatccgaaccacaggaagaaaagctatcaccattgggctctcctctgttttactttcgacgttagtttgttccgttatcttcttcggaaacttaagggacgttggaacgaaaaactcagaccatactctcaattcattagagtatgttgtgatttactcaatccaatgtctttcttctttccccgttgttggaaaccttctctttgagctcaggctacaaaactcagagcttggtcgtctagcgatatcttctgctgtgataagtgatttcagcacctcaattctcgcttccgttctcatatttatgaaggagctcaaggacgaacaaacacggctcgggagtgtgtttataggtgatgttattgcagggaatcgtcctttgatgcgagcagggatagtggttctctttgtatgtattgccatctatgttttcagaccgttaatgttctacactattaaacaaacaccttccggtcgtcccgtcaaggcaatctacttaagtacaatcattgttatggtttctggttcagccattcttgccaattggtgcaagcaatctattttcatgggacctttcatcttaggtcttgctgttcctcatggtcctcctttaggttctgcgatcattcagaagtatgagtcggctatattcggaacttttcttccgtttttcattgcttcatcttccacggagatcgatatttcggctttatttggttgggaaggtctcaatggtattatactcatcatggtaacatcttttgtcgtcaagttcatctttactactgttcctgctttgttctatggtatgccgatggaagattgcttcgctctatctcttatcatgtcgtttgaaggcatcttcgagctcggtgcctacgccttggcctaccaaagaggggtatgtaattatgtatacacacataatgaagttcataatcataattaatcatttcaatacaaagtttatcttatgtttatgctttgaacattgcagtctgtccgtcccgagaccttcactgtggcgtgtctttacataacgttgaactccgcaatcattcctccgatcttgcggtacttatacgatcattcgaggatgtacgcggggtacgagaagcggaatatgcagcatttgaaaccaaactctgagctaaggattctgtcttgcatttacagaactgatgatataagtccaatgattaatcttcttgaagctatttgtccgtcccgggaatctcctgtagctacctacgttctccacttgatggagcttgtaggacaagcaaatccgatcttcatttcacataaattgcaaactcgcagaacagaggagacgtcttattcaaacaatgtacttgtctcctttgaaaagtttcgtaaagatttctatggttcggtcttcgtaagcacctacacggctttatctatgcccgatacgatgcacggagatatatgtatgcttgctctcaacaacactacttctctcatactccttccttttcaccagacttggtctgctgacggatcagctcttatctctaacaataacatgatccggaaccttaacaagagcgttctcgacgtggcaccgtgttctgtcggagtctttgtataccgaagcagttccggacggaaaaccatcaatggcacagttccaaacttatcatcttacaatatttgtatgatcttcctaggcggtaaagacgatagagaagcagtgacacttgctacacgaatggcccgtgacccaaggatcaatataaccattgttcgactgatcactaccgatgagaaagcacgagagaacacggtgtgggataaaatgcttgacgatgaacttcttagagacgtgaaaagcaatacattagtagacattttctactcggagaaagcgattgaagacgcggctgaaacatcgagtttgctaagatcgatggtaagcgatttcgatatgttcatagtgggaagagggaacggaaggacgagtgtgttcacagaagggcttgaggaatggagtgagtttaaggagcttggtattattggagatttattgacttcacaggattttaattnnnnnnnnnnnnnnnnnnttatacaacaacaacagcta

SEQ ID NO: 163234 - DNA, 2514 bp, Arabidopsis thaliana landsberg
aaatgctctttcggagttccctcaggagaattccacaggtacctagtaactgaaagaggcatcgaggccaatcctaagtagattacagccttcatcgacataccatcgccaaaaacggcacgggaggtccaacgactgaccgactgtatcgtcgccctcaacaggttcatatccaggtttactgataaatgcgtccctttctatcagctcctccgaaaggataaaaagttcgattggaatgaggactgcgagcaatccttcaaacaattgaaagcatacctgtccgaaccacccatactcgcaaaacccgaagaaggagaaccattgtacttgtacacggcagtctcccgaaccgcgataagcggcgtcctggtgagagaagatcacgaaggacagaaaccgatctattacgttagtaaaacgttgatagacgctgaaacccattattcagcaatggaaaaactggcactggccgtagtcatgtcagctcgaaaaatcagaccatattttcaatcacatcccattgtagtgattacgtctcaaccaatcagaaccattctgcacaatccaactcactcaggtcgacttgcaaaatgggccatagaactaagtgagtacgatatagaatatcgcactagaaccagcttgaaagcacaggtcctagccgactttgtaatcgagctcccgttagcagacctggatggaaccaactccaataagaaatggctcctccacgtcgacggctcctccaatcgacaaggatccggagtcggaatacaactcacctcccccactggggaagtcatcgaacaatcgttacaacttggattcaatgcatcaaacaacgagtctgagtacgaagccctcattgctggcattaagctagctcaagaaaaggggatccgcgaaatacacgcctacagcgactcccaactcgtcaccagccagttccatggggaatacgaagctaaagacgagcgcatggaagcgtacctcgtactagtcaaaaccttggcccagcagtttgaatcgtttgaactaacaagattccctagaggagagaatacctcggtagactccttggcagttctcgcttccacgttagatccttttgtcaaaggaattatcccggtcgaaggcatagaatacccaagcatcgatctaacagtaaaacatgctgggacggaacccccgacaacgtgcaaatttacacgagtaacctgaagcaccaccgccgcacctagagacatcgcagcagctgcggggcaagtgcaacgaaagaggaaccagagtacgaaacacgcgaacaacctgccccgtacaaacctaaaccgtacaatgactggagaatcccaatcatcgtttacatcgaacgagggatcacacctcccgataagtgtgaggccagaaagctcaaagcacagagtgcgaggtactgaatcatggaaggaaggctcatgaaacgcagcgtttctggtccctacatggtgtgcacctatgggcaacaaacaaaagacctcatgaagagcatgcatgagggacaatgtggtatcaactgcagtggatgtaccctcaccctaagaatcaagaagctaggctactcataagtgtgtattttgcatgttttgagcatccatttgtcatcactttagcatcagatcatcactgttttataccatttctcatcatttgtcatcactttgcatgtttaggatagttttgcatgcatgttgcatatttatgttgtttttaggtgattcaaagctgttgacgagctaattggaagaagcggacttgatcattcaaaaccattcaaccccgaggtcgagtagacgcttcacaacctcaacagaccactcgaccccctggtcgagaagaggacatcaccacttcacttcaccactcgatcccgaggtcgagtgtcttcatctccatcacctgaccatcactcgatcacctcactcgaccccgaggtcgagtgtcttcacctccattaccagacaaccactcgatctcaccactctaccttgaggtcgagtctaaccatccccaccactcgactacatattcgattgcgagcttcagagtcttcttcattccacactcaaccagacactcgagcacaagaaagaaaagaagactccagctatccactcgacctcccactcgaccacctgggtcgagtacaattcttaatccgtctcaatactgcgtcgttttaagtattagggtttcagaatattttgctataagtagcatgtacttcacaatttcgcaaaaagtttttatctagtttttccgtacacactctattctagaccttttgtaattcggatttctctttatctattcagtattcagtattcagcatttgttcttgatttcgtttactgttgttcatcctgttatcatcttgctgttacactgttgttatcatgttttcatcctgttcaacgtttttgttctctccaatgatgtctgagtagtgaataggtttctgaggatgggttagag

SEQ ID NO: 163235 - DNA, 6290 bp, Arabidopsis thaliana landsberg
atgtttaggatagttttgcatgcatgttgcatatttgcgttgatttcaggtgatttggagctgttgacgagctatttggaagaagcggacctgatcacgacaaaccactcgaccaagaggtcgagtaggagcttcaggatctcaagagaccactcgacccccaggtcgagcagaggacatcaccacttcacttcaccactcgaccacgaggtcgagtgccctcatctccatcaccagaccatcactcgatcacttcactcgaccatgaggtcgagtgtcttcacctccatcatcagaccaccactcgacctcttcactcaacctggaagtcgagtatcttctaacaccactcgatcacatcactcgacccccaggtcgagtgccttcaccttcactgacagaccactactcgacctcgtcactcaacctagaggtcgagtatcaccatcacaacacttgactgcatactcgatgacaagcttcagagccttcttcattccgcactcaaccagacactcgagcacaaggaagaaaagaagactccagctattcactcgacctctcactcgaccacctgggtcgagtacagttcttaacccgtccaaatacttcgtcgttttgagtattagggtttcgggatatttggctataagtagcatgtacttctcattttcgcagacaagaagttttttacctagttttatttccgcagaccttgtgttctagactttttgtaatccggatttctctttatctattcagtattcagcttttgttcttgatttcgtttactgttgttcattctgttatcatcctgctgttacactgttgttagcatgttttcaacttgttcaatgtttatgccttctgttatgatgtctgagtagtgaataggtttatgaggatgagttagagtagtgtagaattctcagtatgctaggtgattgagtattgattgatagatcccttctggattagttgttcttaatgcctattgctttctgatcaactggaatttgagcccagacatttccgcgcccaaaaggtgttcgatgaaatgtctgaaccactaattccagagattcgtgaccctgtaccaaggtattggttgtagggagcgttttggctttaacttgttgattcgtaatgcctgttaggttagctctcgtcaatggtgattgagtctgggactaggttagcttgagagtctctgttgcggtggcacttagatttggttgatgaacttgttgtctagggttaatttattgagcatgtcaatcacctgtaaactgaggaaacgaaactactcaattaccccatccttaggaattctttgtctgattgattttattgtttactctactgctgtttactgcatcctatcatctgttgcttagtttctgcaattctttcctgcaattctttactgttactcgacctggtactcgaccacccagttgtctggcaaaagactgtgcagtcgagtatccctgtttcattttctgtctgttactcgacctgtcactcgacctcacccagtgctctgcaaagagctgtgttggtcgagtgttttactgtttctgtttgattttctgttttctgcatgttcacttaggactgctagaacacaccaaaatctgttattgcttggcttgacttagtgacttctgatcacatcttgattgttagcatcacacccatttggattgacaacctaaaatactacaacgacatgattggtgttttaggataattgactaaaaacctattatcaatttggcgctgttgccaattgggtgtttgtttgttacatttaagatttcagacttgcttagatcaagttctttttcaattttctttttagttactaactgtgtgtttttcttgttgtcttcttgatccaggtacacctctgctgtatgcgaactcgatcaacaagcaaccagaacctctttttcaacgacaacatcaaccgcacagcccgcgaaatcagaaaaaggagaaccacagtcaacctagtacctcagcaaccactcgttatggctgaagaacggaatcaacaaaatggccctaccaacattggtgctggatatgcaccacgtgatcaccgtcagaggaaaagaggaaaggaattgcacctcctgctatccagaacaacaatttcgagattaagagtggtctcatctcgatgattcaggggaacaaattccatggtttgccaatggatgatccactcgaccaccttgatgaattcgataggctttgcaacctaacaaagatcaatggtgtcagtgaagacggattcaagctccgtgcgttcccattctccttggacgacaaaacacacatctgggagaagcatctaccccatgactcaatcaccacttgggatgattgcaagaagggttttctatcaaagttcttctccaacgccagaactgcaagactcagaaatgagatttctggtttttcacagaagactggcgaaaccttctgtgaagcatgggaacgtttcaagggttacaccaaccgatgccctcatcatggcttcacgaaagcctctctgctcagcactctttacagaggagttctaccacgcattaggatgcttctggataccgccagcaatgggaatttccagaacaaggatgttgaagaaggctaggaattggttgagaacctggctcaatcagatggtaattacaatgaggactgcgacaggaccgttagaggcacagctgactccgatgacaaacacaggaaggagatcaaagcactgaatgacaagctggacaggattcttcttagccagcagaagcatgtgcacttccttgttgatgacgagcagtatcaagtccaagatggggagggtaaccagttggaagaagtcagctacatcaacaacaaccagggtggctacaaaggatacaacaacttcaaaaccaacaatcccaacctctcctaccgcagcacaaacgttgctaatcctcaggatcaggtgtatcctccacaacaacaacaaagtcagaacaaaccttttgttccctacaaccaaggtttcgttcctaagcagcaattccaggggaactaccagcaaccaccactacctgggtttgcacctcagcaaaacaaatgctacaacagctgcttcacaggcaagcctctagctccatggagatggcaaagaagatatctgagttacataacaagctggactgtagctacaatgatctcaatgtcaagatggaaacactgaataccaaagtccgttacttagagggacattctacatcttcttcagctacaaaacagacaagccaactaccaggcaaagcagttcagaatccaaaagaatatgctcatgctatcaccctgcgtagtggaaaagcacttccaactagggaggaaccaaagacggtcaccgaggacagtgaagatcaagatggggaggatttaagtctcgagaaagatcaagctgacaaaacactcgaccagtcactcgagcaaccactcgatccgccactcgacagcattactcgaccaaccactcgacctgttatcccagcagcatcaccaactgctccaaaaccagttgctgtcaaaaacaaggaaaaggtctttgtccctcctccctacaaaccgcagcttccatttcccggccgtcacaagaaagcgttggtagacaaatatagagctatgtttgccaagaacattaaggaggttgagttgcggatacctcttcttgacgctctagcgctaatcccagactctcacaagtttctgaaagagttgattgtggagagaattcaagaagtgcaagggatggtggtattgagtcatgaatgcagtgctatcatacagaagaagatcattcctaataagcttagtgatcctggttcattcactctaccatgcactttaggtccattggctttcaacagatgcctatgtgatttaggagcattagtcaatctcatgccgctctctgttgccaacagatgccttgtctaccaacgaatctggggagccgatcatcccaacttcagatgattggtctgaactcaaggcgccgaaggtggatctcaaaccacttcctaaaggtctaaggtacgtatttcttggtccaaactctacttatcctgtgatcattaatgctgagataaatgatgatgaagtgaacctgctattatctgagcttagaaagtataggagagcaattggttattcattatctgacattaagggaatttcacctagtttatgcaaccataggatccatcttggaaacgaatcctattctagcattaaaccaaagaggacgttaaatcgcaacttgaaagaagtagtgaaaaaaaaaattttgaaactgcttgatgctggtgttatctaccctatctctgatagtattcgggtttctccagtgcattgcgtccctaaaaagggcggaatgaccgtcgttaaaaattaaaaggatgaactgatccctactagagctataactagtcatagagtgagatattgattgtaggatgttaaatgctgcatctaggaaagatcattttcctttaccattcattgatcaaatgcttgaacgcttagctaatcacccatactattgctttcttgatggatatagtggtttctttcaaataccagttcaccgtaatgatcaagagaaaaccactttcacatgtccttatggaacttttgcgtataagagaatgccatttggtttatgcaatgctcctgcaacatttcagaggtgtatgacctctattttttggatttaatcgaggagatggtgaaggtcttcatggacaatttttcggtctatggcccctctttctcctcatgtttgttgaatcttggcaaagtactgaccaggtgcgaagagatcaatcttgttctcaattgggaaaagtgtcatttcatggtgaaggaaggcataatgttgggtcacaagatattagagaagggtatagaggttgacaagggaaagattgaagtgatgatgtagttgcaaccaccaaaaacggtcaaaaacatcagaagtttccttggtcatgctgggttctacagaagatttattaaagactctccaagatagccatgccgttaaccagactattgtgcaaggagatcgaatttgatttcgatgaggactgcctcaaatcctttcacaccatcaaggatgctttggtgtcttctcctgttattcgagctcctaattggaatatccattcgagattatgtgtgatgcatcaagttacgcagtaggagctgttttaggccagaaaatagacaagaagcttcatgtcatatattacgccaatcgaacgttagatgaagctcaaggaagatatgcaacaactgagaaggagcttctagctgttgtatacgcatttgagaagttcaaaagctatttggttggatcaaaggtcgctgtctatacagaccatgcagctttaaggcatctgtatgccaagaaggatacttaaccaacactgttgagatggatacttctattgcaagagtttgacatggagatagtagacaagaaaggcattgaaaatggcgcagctggccatctgtcaaggatgagaattgaagaacccattccgatagacgattcaataccagaaggagctacagtgagaaagagttccaccaactgaatgctgttgaaggagggtctccatggtatgcttatcacgtcaattacttggcatgcggagtagagcctcccaacctgaccagttatgaaagaaagaaatttttcagagacatacaccactactactgggatgagccttatctttacactctatgtaaagataagatctataggagatgcgtcttagaagatgaagtagaaagtatcctgctgcattgccatggctcagcatatggtggtcacttcgcgacgttcaagacagtgtcaaagattcgtcaagcaggattttggtggccaacaatgtttaaggacgctcaggagtttgtttcaaaatgtgattcatgccagagaaagggcaacatcagcagaagaaatgagatgcctcagaatccaatcttggaagacgatctttgatgtgtgggaaattgattttatgggtccattcccatcttcatacggtaacaagtatatactagtcgtcgtagactacgtatcaaagtgggttgaagctattgctagtcctaccaacgatgcaaaagttttgctgaagctcttcaagaccataatcttcccgagatttggagttcccatggtagtaatcagtgatggtgggaac

SEQ ID NO: 163236 - DNA, 1012 bp, Arabidopsis thaliana landsberg
  unsure (1)..(1012): unsure at all n locations
atggttcaacatcacaatctttacgagttgtctccgatggttactggttggaccatctgtgtcatggtattgagaatttacaaaacatttctcaacccgaacgctttcgaactacgtccagtcttggccgatgaatgggtaaacaattttctttaattccttttgcaattagtagaattcttatttactgcgtgtatctctcacccctaaaatgttgttttaacaaggcacccaaatagaagcaacaattggacctcgtttctttgccttctactttgacaggatccaagagaatcaatggaaaacgataactacgtttcttgttcgacctaactgcgaaacaataagaacaactcctcatgagtttcgcattctattcatggatcaaaccattgtcacttcttccacacccagagaaaccggtttactcaacaagttcactccctttgactacattgttgatgatgttgttggcagagatatcttggttggtaagtaatagcttcttcataaactccattcacttttttcaaaaaatttattttgttaaacacatatctctgacatatctcttatagatgttattggtgcactcgttaatgttgggattccgactaataccgcaagtaacgggaaagatatggccggattcaaactgccgttcatgatcatgtataaaaagtacttttcttcaacatcaatttacagtttttttcaaacatatcatgtttatacatttttgtagtaaggtgagtatataatctcataatttttactgactnnnnnnnnnnnnnnnnnnnnntgcgaggcttatggataaattccagtggacttggagaaaagattttgagcatttcgcaagaacaatgttgttattgcacttgcttggtggaaggttgttagatattatccaggttgtaacttgtttaagattgctagccatgcgccaatatcaacagtatatcccgaacctgatgttgaggaacttgaaaaaatcaaaatggttgtcgac

SEQ ID NO: 163237 - DNA, 5405 bp, Arabidopsis thaliana landsberg
  unsure (1)..(5405): unsure at all n locations
atggtggacaaggactaggtgcatctctgcaggtaagattttcagtaggaaaatctggagatcttacctctctttttattctccttttaactcttcactgaagagttgatcatataatgatttttttttattaccctttaactcttctctgaagagttgatcctgcttatgagagaggggctacaaagtttgtgcgagatgtggctgcagctctgggagacgtagatatgattatatgtccctgcattgattgtcgctgtttagatcgtcattcagcctctgttcttgttgatcatcttgtaacaaggggaatggatgagtcatataagaagcggtgtgactggtatcatcatggggaatcaaactctagggctgagaatgataccaaagtgagtcagtggaatgatgaggtacttgggttatatcaagctgctgaatttttggatgaagagtttgcttataaggttggctcttgagtgagattgcagagtgtgatgacaagaaagaatatgagttccttgcaaagcttgcagatgctgaaccaccgttgtatccaagttgtgtgaaccatagcaagctgtcggctattgtatctttgtttagacttaagacaaaaaacgggtggtctgacaagagcttcaatgatcttctagagatattgccggagatgttgccaaaggataatgtgttgcacacatcactgtatgaggtgaagaagtttttgaaatcttttgatatgggttaccagaagatccatgattgctgcctatttagaaagaattacaagaagcttgacagttgtcctaaatgcaacgctttaagatggaagactaacttgcacactggtgaaataaagaaaggtgtcccacagaaagtattaaggtactttccgataatcccgcgccttaagagaatgtttaggtctgaagaaatggctaaggatttaaggtggcactttagcaacaaaagcagcgatggaaaactctgtcaccctgtagattcagtaacatgggatcagatgaatgccaaatacccgtcatttgcagctgaggaaaggaacctaaggcttgggctttctacagatggatttaatccatttaacatgaagaacactagatatagttgctggcttgttctgttagttaactacaatctgcctcctgatttatgcatgaagaaggagaacatcatgttgactttgctaattcctggtccacaacagtgacgtctacttagaacctcttatagaggatctatgccacgtgtgagacaatggggaattgacatatgacgcttatagtagatcaacatttaatctgaaggcaatgttgctttggacgattagtgatttccctgcttatgggaatctagctggctgcaaagtaaagggaaaaatgggatgtcctctatgtgggaaaaatactgatagcatgtggttgaagttcagcagaaaacatgtctacatgtgccacagaaagggtctgccaccaacacatcatttcagaatgaagaagtcttggtttgatgggaaagctgaaaatggcaggaagaggagaatattgagtggtcaggaaatttaccaaaacctgaaaaattttaagaataactttgggagtttgaaacaatatgcaagtaaaaggaaaaggacggtgaatattgaagcagactttgatagtgaagatcaatctagtgaatcagaggaggatgaggaggaccaagtagacgaggaggaattatctagatggaagaaaaagtcaatttttttcaagttaccttattggcaagtgtgttaaacattcctgttatttaaatttgaaattttatcactaatcattgattaaaacttccttagtattatctcagatttcatcactaatcattggttaaaaaattttgttttctttcgtgtgttgtataggaacttcctgtgagacacaacttggatgtcatgcatgtggagaggaatgtggctgcaagtattatatcgacattgttgcattgtgggaaatccaaggatggactaaatactagaaaagatttggaggtgcttgggattagaaaggatttgcatcctaaaaccaaaggcaaaagaacatatcttcctgcagcactttggtctctatcaaagacagagaagaagatcttttgtaagcggctgtatgacttcaaaggtcctgatgggtactgctcagacatatcaagaggcgtctcattagatgagtgtaaggtcacggggcttaagtcacacgattatcacgtgttaatgcaacagcttctgcatattgctcttagaaggttgctacctaaaggtccaagggttgcaatcgtgcgcttatgtactttcttcaaccacttgtgtcagcgagtaattgatatggagcagcttttgaaactagaaactgagatcgttgaaaccctttgcctgtttgaaaggtttttcccaccaagcttctttgatataatggtgcatttgacaatacatttaggcagagaagctcggttaggtggaccaattcatttcagatggatgtatccgtttgaaagatatatgaaagttctgaaggattttatgagaaacactgcaagactggaagggtgtatagctgagtgttatctagctgaagaatgcatacagttttgtagtgaatttttgaagaagacataaaattttcaggaaagtgttgatagaaacactaagtatgagagcaactctatacttgaagggcgtccaatctcagcaggatcttatattaatcttactaaaatggagacaaaaatagcccatatggctgtcatccagaatatggcagtctttgaatcttatgttgagtaagttccaatctcaataggctcttatattacttagctatatatattttacttatccatatggctgtctctgactacttctaatttttccttgtattagtgagcatctgcaacatctacaagactcaaatgtaagatgcagacgtgatgcatcacacttatggaacttgcacactcagaattttgcttcatggcttaaaaaactggcatgtttatctctcacacttgacacttaaacactatactttatcgataagcatataggtgtctgatattttctttttaaattttttagatacctcttgattcaaacagacatgaagaaacacttaaatggttagcttatatatggtcaacggagttgtgcaaggacatattctggttatatagtgaatgggcagcgatttcatacaataacagtggataagaaaactcagaacagtggtgtgtactatgaggcaactgctatctgtaggtctagtgcaaaagacattctcaagtggtcgatttggtttcatattatggctgcattactgatattatcttgctggattataatgtcttttacgttccattgttccgatgcaactgggcagtaaaaggcaatgaagtaaagcaagaggatggttttacacttgtaaacctgaatcatagtcaagactcatttttgagggctccatacatactagcctctcaagcaaaacaggttttttacctaagagaagatggctcgtcaccttggtatgttgcattgagaggttcttcaagaagattcagtcagaaagagtttgtagattcagttgcagcgattggcacattgccaccaaatgttgacatagacgctgacttggatgaagctgagaatgagaggactgattgtgaaggaatttatgtttgtgaaatgtagtttttttttgcttcattttcattccttgttgcattctgaatgtttgatgtctgtttcccatagtgtgttcaatgtcttatttgcattcagtgtacttaaccctttactctttcatttttctcaggtgatttaagatgggacaacagaagcaaaagcgaggtaaaagtaacaaaaaaaaggtcaatgcaaagaatgccaatgatgaggttgagtatattggaacaattgaaccacaagtcaatgatgaggaacatgcacaaccagctgaagttcaagtatcagatgcagatcaagtagcagatccagatcaggtggttgatggagatcaggtagcagatccagatcaggtgaatgatgaagatcatttggaaccagatcaagtagcagatccagatcaggtggttgatggagatctggataaggtcaatgaggaagagcctcacggagagcttgttttatctgttgttgatgattgtgttgagccaaagcgtaagcgacatcgaggaccaactagcctgaaggatattgccaaggatccaaatgtcagagtaagagtagagttcactaacatgggagagcctattggtaaaggctcagttaagctggcatcatatgtaggggcattggtaagagaacacgttccagtcacaattgaacgttggactaagattggtaaagaactcaggacagttctctggaagtctgttcaggtaagatttgtgtaaaatttacaagtttattagatattggtgagtacttgactgttttgtttttgatggcaggcaaggtttgaactagannnnnnnnnnnnnnnnnnnnnagtgcttaggcagatgggatatttgtggaggtcctggaaatcatggcaagttacaaagattagagaagctaagactanccacgagaggatgaacatgcgacctaaaaacatttctccttttgattggcgtaaatttgtgaagctcaaaactagccaagaatttaaggtatgcatttggaatttgtaaatttatctatatacattagaaattaacgttcatctgttaggttataagcgatagctacaaggaaagaaggcgcaatcagattccacatacttgtagtcgcaggggaatggttagacttgccgaagacatggtaacagttgtacacacttatattgttcatattgctcaccctttttccaaagtccaaacacttatgtattaaatgagatcattttttttgtttagaaaactgctagtgcagacccatctgaagtgacaaggctaaaggtttgggttaagtcacgtactaagaaggatggtacaccactgaatacgaatgttgctgaaaagattgtgagttattttgttttgtttgatttgcattttgtcattttgaatcacacttaatattttaaaatgtatcttatgaatttcagaaaaaggcagaagagattgttaacagtgataatccatcaacaaatgaagcacaagattcattaagccaactgttagggcctgacagtcctggtagactgagagcaatgggtcgcaatatgaataagaccaagttatcttgtttctaagtgaagcacaagtgtatggctgaaatgcaagagaatcagcttcatctacaaaagacggtcaatgagctacaagacgtaattgaaaaaatgaagaaccag

SEQ ID NO: 163238 - DNA, 4029 bp, Arabidopsis thaliana landsberg
atgatgatgatgataattctcttgtggtcaataattttcatgaccattctcttcttaaaaaaacagttgagtgggaagaaaggtaagacacctccgtcaccaccgggacttccgttgatcggaaaccttcatcagctcggccgccacactcaccgatcactatgcgatctcagtcgccgttacggtcctctcatgctccttcactttgtacgtgtccccgttcttatagtctcttccgcggacatggctcaagaaatcttgaagacgcacgaccaagctttcgcaaaccgcccacggtcaaaactcttccagaagcttcttttcaacaatcgtgatgtggcctcagctccttatggagagtattggaggcaaatgaagtccgtgtgcgtcattcatctcttaagcaacaaaatggtacgatccttttcggatgtaagaaaagaagaaatcactttgatgatggcaaaaatcccgaaatcgagttctttgccgtttaatgttagcaagggcttggagtgtttgaccaacgatgtgatatgtagagtcgctttgggacggaaatatggtggagaaactgactttaagaagttaacggatagactaagcgagctattgggaacgtttagtatagggagttttgtaccgtggctcgcgtgggttgattggatccgcggttgggatgctcagctagataagatgggaaaggatcttgatgacttcttcgagaaagttgtgcaagatcatgaagatggtgaccgccgagatgggactgatttgattgatgcattgctcagggttaaaagagaaaagagtcccgggtttgagatagagcgagtcagcataaaggcaatcacgttggtgaggaacaattaatactcatttttggatgatacaaattttagattttatgatgttttagcatatataattttagttcttgttttttgttttttcaggatgtttttgtgggtggttcggacacatcgttcacgcttttggaatgggcaatgacagagcttctacgtcatccgaagtctctgaacagactccaagaagaagtccgtacgatttgtaaggggaagtcaagagtatctgaagatgacattcaaggaatgaaatacttaaaagctgtgatcaaagaggcactcaggctacatcctccatttccaatgatggctcctcatgaatcaacagaagatgttaaattaagagactaccacataccagccggtacacaagtgatgatgaatgcttgggcgatcgggagagaggttgccacatggggaccagacgcggaggagttcaaaccggagaggcatttagatacgtctgttgatttccgaggtcaaaactttgagctgcttccatttggagcagggagaaggatttgtccagcagtatcattcgctgtggtattgaatgaggtggttttggctaacttagtgcatgggtttgattggaaactaccgaaggaatctaaagaagacaaaactgatgtcgctgaatcaaccggtattacggttcaccgcatgtttccactcttcgccatggcatcacctactacttgatttagacattacagtatatatatactttgttaagtgtacaataagcatgtaactggtaaagagatctttaagatttgagttcttaagtaactatacactaatagtttgaccataaaaaagtaactacactaattaagaaagccaaatggcacgatcagttcccacgcaattgtcaaaggaatataacagtttatctaaatattaataggctataaaaatataatatatggtgaaattaaaggaagagttttattacaaaagcttgtctagaagacttgaagtattagacaatataattgaggaaaatgaaaggcattaaaacgcttttgttgatgaaatcgaaacaattaccaaatttccgaggctgaaaagagatatgccaatgccttagattagaggtgagttactttttggtgtgttttcacagatttcttcaaagttattagctttaatatttaaatattctagtaaacatttataaacaaataggtggtagaatcacacctaaaattttaaaagttattaatatacaaataaggactatatattttaggagatacatagttttcttggaccttgtagctgtctaaaaatctagcaaaataggtattaaaaaaaagtaaaagatttcttttttgtttggtcaacttacttgtattgtggtgagattttttacctttaatatataggattttgagagaatatatttaatgcaaatttactttcctactatacttgggcaaaacagaagaaaatttgagtggaccctcgttacgtaacgcatagaagaaacttggcttatatatgacgcaagtggcgaagtccacaagaagaacacaacaaacttaagaaactcttcacgagaaaaacttgaagtacttaagaatccaagtttacaaaatatgatcatgatacttttcttaggcttaatattgttcatcataaccattctcttcttcaagaaacataagacagggaacaaaagcatcaactttccatccccaccgagacttccgttgatcggaaaccttcatcagcttggtcaacatcctcaccgatcactatgctatctcagtcaccgttacggtccactcatgctccttcacttcggaagtgtccccgttattgtagtctctacagcagaagcagctcgagacgttttgaagacgcatgaccgcgtttttgctagccgtccacggtcaaaaatctttgataagattttttacaacgggtgagatgtggccttgggctccttatggagagtattggaggcaaatgaaaagtgtgtgcgtcctccatctctttagtaacaaaatggtacgatcctttcgagacgttagacaagaagagatcagcctgatgattgagaagatcaggatatcaagttctttgcgggtaaatctaagcgagatcctggtgaatcttacaaacaatgtaatatgtagagttgcttggggacggaaatacggcggtaaaaccgattttaaagacttaatgaaaaggctaacgaggctattaggcgagtttagtgttgggagttatgtatcgtggctcgcgtggattgactggatccgcggtttggatggtcaacttataaaggtaagcaatgatcttgatgaattcttggagagggttgtccaagatcatgtagatggggatggacacaagaatgattttgtggatgtgttgctcagaattcagagagagaagagcatcggatttgaaatcgaccggttatgcataaaggctatcgtcttggtaaagggataagaagatctcatattcatattcattgatgttttagtatataaccgtagttcttgtttttttggttttgatcgcttttcaggatgttttagttgctggtacggattcatcgtacgcacttatggattgggcaatgacagagcttctacgtcacccagagtgtctgcgcacactccaggaagaagttcgtacgatttgtaagggtaatttgagtgtatcagaagaagacattcaaaacatgagctacttaaaagctgtaatcaaagagacaacgaggctacatcctccacttccattgttggctcctcacgaatcaatacaagatgttatattaggagattaccacataccagccggtacacaggtaatgatcaatgcttgggcaatcgggagagaggctgcgacgtgggggccagacgcagagaagtttagaccagagagacatttagattcgtctgttgatttccgaggtcacaattttgagctggttccatttggagcagggagaaggatttgtccagcaatatcattcgcagtggtcttgattgaggtggctttggctaactttgtgcatcggtatgattggaaattaccggaggattctaaagaaaatcaaaccaatgtcgctgaatcaaccggtatggtgattcaccgtttattccctctttacgccattgcatcatctactacttga

SEQ ID NO: 163239 - DNA, 4126 bp, Arabidopsis thaliana landsberg
  unsure (1)..(4126): unsure at all n locations
atgtatgctgggttctcttcatcaacagggaatcttctcagtaaccattatatacttggatggaggtttagtagaagaaaagaacaattacagagcctggacctttctacacttgctcgggttcctcttcctaaagaggaaaagaagaaattatctccattacttattgggttggtcatcttattagtgattcctgcggtaatgggtcttggaggatgttatctgtacagaaggaagaagtatgcagaagttagagagccatgggaaaaagaatatggtccgcttcgttattcctatgaatctttgtacaaagcaacaaaagggtttaacaaagatggtcgtctaggaaaaggcggttttggagaagtgtataaaggaagcctgcctctagtaggagatatagctgtgaagagactatcacacaatgcagagcaaggcatgaaacagtttgtggccgaagttgtgacaatggggagcttacagcacaagaatttagtacctcttctcgggtattgtaggcgaaaaggcgagttattgctggtctctaagtacatggaaggaggtagtgttgatcagtacttatttcacggtgataaaccgcctctttcttggtctcaaagagtagcaatattgagagatatcgcatctgcgctctgttacttgcatacaggagctagtcaagttgttttacaccgagatatcaaagcttctaatgtcatgttaaatggaaatctccaagggtttttaggagattttggaatggctaggtttgatgatcatgggtctaacctctctgcaactgcagctgtaggaaccataggctacatggcgctcgagctaacgtcaacaggaacttccactagaacagatgtgtatgcatttggtgcattcatgcttgaagtaacatgtgggagaagacctgtggaaccacagttgcaacttgagaaacaaattctgatcgaatgggtttgtgagtgctggaaaatggattctttgtttgatgctaccgacccccggttacgtggaaacttcttatccgaggaagtcgagatggttatgaaactcggtttgctctgctcaaatacagtgccagaatccagacccacaatggagcaagttatcctatacttaaaccagaacctaccattgccagatttctcaccatacactgnnnnnnnnnnnnnnnnnnnnnnnnnnnnnnnnnnnnnnnnnnnnnnnnnngcttcaaggagctggtcagctgcttcgtcggccactaactcaccttaatggggacacacattggaaaactaagaactcccacccaatgtacacgtagcagaaagcatatatattattaggtctcaagatttttatctatctcacttgtcctaaccaatacaagaaactaacagttatccaatttcctagaattgtaattggtagacttttagtcatctccctggtactgtaatcattcataactgtatcatcttgttctcccttaaattctttgttttgctgaagattttaaccgtctgtttagcgattatccacagcaacattctctgtgatccatggtaacaacttgaggctatggtctacgttattgttttggtctgataccaaattcattacatgagtcatcccttccttttggcatcgttgacttcaaatgctttgatgatgaaacttatttaacatgtggataattgaatttaaattttatttttttggtcaatatgaattacattattatcatataagaagaaatcctttataaatgtgattgacagtctgatacacatggttataatacataagaaagatatccaaaacaatagtattttgaggctattatgacatacattgttagaaccagacaagagaccatataattattgtattgaacaacaacataaaataactggtttgaagttattgtcatggttacatttaatcaatttcattttgtatattcaactcaagagatgcctctaggaaatacatttcctgaagacaattgaacttggaatgttgaaacttgtgtttgaagataaatttgcattttgaaactccagaaacaaaaccagacttctctctgtttcattagcaatggcttctgaaagattgcatctgatcttattggtcttctttaatcatctgactttcttgttaagtcaacaagaagaagccggtttcatctacaatggctttggccaagctcaagctggtcttcatctagacggagctgctaaaatcctctttccagatggattgttgcagttgacaaatgcctcaacacaacaaatgggtcatgctttcttcaagaaaccattcaagtttgattcatatgagaagaaactctctttttcgactcattttgtgtgtgcgcttgtgcctaaaccgggagctgatggtggccatggaattgcctttgttgtatcctcttccatagatttcacacaagcagatccaactcagtacttgggacttttaaacatctcaacaaatggatctccatcttctcagcttctagctattgagctcgatactgttgagagcgcagagtttgatgatatcgacaagaatcatgtcggtatagacatcaaaagcctgaattctgtagagtctgcttcagcttcatacttttcaaacgccaaagggaagaatcaaagcatcaagctcttaagtggagaccctatacaaatctgggtggattatgaaggagctttactcaatgtcacagtgagctcctgtaagtatccagaaaccaaaccatcctcttctgtcaagatccattaatctcactgacatcttcccggatcgaaggctgtttttaggattttctgcagcaacaggaacattagtcagttaccaatatatcttaggatggagtttcagcagaagcagaatgttgttgcagagtctggacttctcaaaacttcctcagattcctcatccaaaagccaaacaggagcaaacatctccactgcttatcgttctactcatgttactagtactcataatgttggctgttcttggaggaatttacttatacaggagaaagaagtatgcagaagttagagaagtatgggaaaaagaatacagtccacaccggttttcttataaatctctatacaaagcaacaaacaggtttgataaagacggccgtttaggaaaaggcggttttggagaagtctacagaggaaatctgcctcacgttggagatatagcggtaaaaagagtgtgccacgatgcaaagcaaggcatgaaacagtttgtggctgaagtagtgactatgggaagtttaaagcaccggaatttggttcctcttctcgggtactgcaggaggaaaggagagcttcttctggtttctgagtatatgtctaatggcagtcttgatcaatacttgtttcacagagaaaaactcgctctttcatggtctcaaaggcttgtcattttgaaagatatcgcttctgctctcagttacttacacacaggagctaaccaagttgtgttacacagagatataaaagcttctaatgtcatgttagattctgaattcaatggaaggttaggagattttggaatggcgaggtttgaagattatggagatagcgtaccggtaacagcagctgtaggcacaatgggttacatggcacctgagctaacaacaatgggaacttctacaagaacagatgtttatgcatttggtgtactcatgctcgaagtaacttgtggaagaagaccgttggatcccaagattccatctgagaaacggcatttgatcaaatgggtttgtgattgctggagaagggactctatagttgatgctattgatacaagattgggaggtgaatactcggtagaagaaaccgtaatggttctgaaactcggattgatctgcacaaacattgttgcagaatcaaggcctgacatggagcaagtgatacaatacctaagccggaaacaacccttaccggatttctcaccagattctccaggtattgggggttttatgccagtttcagtggaaccatcatctaccattggtatcccagattcatcaatgcatgttactcactcgatcttggaagggtatggaagatgagatctaagaaactcggtattctctgcatctaaa

SEQ ID NO: 163240 - DNA, 4198 bp, Arabidopsis thaliana landsberg
  unsure (1)..(4198): unsure at all n locations
atggctgacagagtcatcagagctgatgtaaaaggagttttgagagatgaggatgggcaagcctacaatgaggctggtcagagattggatgatcatggactcatcatacctgaggatgccaatgaggatcaggcgcgcctcaatgcgcaattagctgctagagacgcagcagggctcggtgtcgagcgacaccatcgggagcagcatgcggatgaatcggtatcgaacgacacaacagaggtgtcgatcgacaccaacaccagattcctgcatctattcctccagctgcgggaccacgtcgtactcttggggatttcaaaaggccagacctgttctatgctaatcaatcagcgattgtacccccaccattacagaggaacgactatgagctaaagcctggctactttgctttagttggccacatcctttccatggcttatctcatgagcagccaatggaccatatcgagcgctttgaggacttgttctaagcatcaaggctaatagagtctcagaggactacctactgtgcaagctcttcccttattcacttgctggggaagcagcttcttggctgaaacaacttaaagcaggtttcctcaagacttggagaagcatcaagatagcatttttgaaaaatttctacgatgatgctaagtctgtggagttgagaaacaagctgtccaccttcacacaaggttcagctgaagctttcaaggctgcttgggttcctttcaaggagtaccaacgagactgcccacatctaggtaccttcttcagaggagtcgattggagatacctgatggctctagacggattgaacaatggtgacttcaatacacgttacccaactgatgctacagccatgatagagaacctcgcttgcagcaacagtaccaagaatgctgattttgagaggaagaagattgcgggaggtatttcagttaatcaaatggcagaggtgaatgctaagcttgatttggttcacaacttgcttataaggaagaaacatgtccactttgcagctgaggatgagactattgagcctgagcctgagtcagaggaaggagtcttctacatagatggtcagagctacatgaagtttggacatccacaggggaacttcagtggcagcaggtttacagggaaccagagttcctcaaactacactccaaagcctactttccagaagacatttccttagagcaacttccagaagacctatggtaattcagcttaccaagcccccccttccaccctcctcagagaccagaatagaatccatgcttgagcagattcttgatagccaaacaaagctcgttgtggagtttaatggcaagtttgatgctgtctacatatatcttaatgggaagatcgacaatccgagctctcacttgaagaagctagatgttcaggtagctcaaactacacaatccattaagagactagagggctttcttcctgtaatccttatgctaacccaaggaagagctgtaatgccatcttgatcagagaaggagatgatgtgtgggaagaattggacactgaagacgagttcgagctcgcagttgcagagatggtgtcgaccgacaccttctagtgtcgatcgacaccttatggaacactcttctctaagacgattccattcgatggtgtcgatcgacacaactctattgtcgatcgacattgggtctggactgcaccatatgaggtgcgaatcccaatgcacctcgaatctgcttacactcctcttgtcccttatcgtaggaagtgtcgttctaagcaggagattcacgatgctaagtgcacaaccatcatggaaaagatcctcagttctcttcctaatgatgcttatgagacctcttatgcaccactcaacaggtatgtcaagcgacttgttgacaatggtattagctcagatgacgctaaactgctgacattggacatcagtgcaattatgctgcctaaggtcaggaaagagaaagcacagagagtggatattgctgagtacatctccacaagcaggtttagccgcactttgtgtgatatgggatcatgtatcaacctcatgcctaagtttgttgctgagagactaggcatgactaactaaagggagactagaatcactctcctcttcgcggaattttccaaacaaatccctgaagtaattcttgaggatgttcctcataaggttggtaactccctaatccctgctcatttgtggtcctgaactacgagtaggaacccaaggatcctcttatccttgaaagagcattcctagctacagctggtgctaggattgatgtgaagagaggtaggatctctctcaaagtttgttatatggagacagagtttggcatggatggttcagagtttacttagactattagtagtattgcctctagcatagacacacctcctcagaccccttagaatccccagacagagccacacataacgctcccaccagctcagctcgccaatgagagttgcagagcaacgatgtcgatccataccatccnnnnnnnnnnnnnnnnnnnnnnnnnnnnnnnnnnaaaggattctgcacattgcctttagcccacacctcttgcggccctatgcgataagttttcctctatcttttctcctgctttaccttcgattaattctttaaattcttcgaggtctgcttcattcgataacaaacctatagttcttcgaaagcttgtttttcctgttgttcttgcaggtgacgagaagagtgtcgatcgacacaccactgagtgtcgatcgacaacctgcagctgccccatccagatcagtttacacaccgccttggaaggataagaggcagcagcaatccttcaccactccacctacatcctgaaatccgccaagtcaagctattgactcaaaacaagcgcttagtgggaggcaacccactggtttgattttttttttttttttttttttttgatttattttacccgctttctcggatttgaatgctactggggacaatgtcgtttaaacgggtaaaataaatcaaaaaaaaataaagcctagtggatatagttgtggaacttaggtatggaatctaggatgttgtgtgggctagcggggaattacatggtggtcaggattcgagtagaaatgtttagtgcatggatttggttcaagtggtgaaattgttgtttgcctaattaggtttgccaaaatcagtactttcagaggtaatagctaaacaactatcttaaatcgatttaataatatttatgaagaaaaatttacctttaccatgttttacatatttgtttcatatgtaacaagggagaaccagattacaaatgcttttgatgcttcagttgtcgtcattaatccagagtatttagaggtggaagtctttaaaaacatgtaatcactaagcctatactatgtgttttccttataaaaatgatatccacatctaagtatacttaagttggtgatttcatggtcttgttgtatacagtttgccaaaggatggtcttgaactcacaattgccgagactaaaccaaagcttgaattgtctgtttgaagtgaagattacttcgagcactatcctaaaaaatctattacctgcttacttgatttcactgaggtagataaattaactattatagtgtgtttaaagttactctggaattaagattctatcagatgattttctaatacttttgcatgtattcaggctcagaaatgcaagataatgtgcacaatctttaaaatagatggtgatatgggttggttttatgttggatgcaagaaatgcagcaagaaacttgagatgaacaagaataacgataccaccattgctgttaaactaaaaaaagcctcccttctggtgtcctaaatgcaaccttaacgtaacataagtgattccaaggttcgtggtctcattcttgtttaggacattttgctcttattcatacaatttacggtgattaagaaactaaatatccaaacttttggttaaaggttcaagttgcatgttggagtcatgaatcatacaggagatattcaatgtattctgtttgatggagcttccacagagattgttggttattcaacatatgatcttctagatggcgtatatgatgatgatgtgagtaataacaatacagaacaagattgtctttttaaaattttatcaataagttcttatattatgtcattt

SEQ ID NO: 163241 - DNA, 6185 bp, Arabidopsis thaliana landsberg
  unsure (1)..(6185): unsure at all n locations
atggagacaaaaatagcccatatggttgtcatccagaatatggcagtctttgaatcttatgttgagtaagttccagtcagcatgttcattttacttagctatatatattttacttatccatatggctgtctctaactacttcttatttctccttgtattagtgagcacctggaacatctacaagactcaaatgtaagatgcagacgtgatgcatcactgttatggagtatgcacactcagaattttgcttcatggcttaaaaaacaggcatgtttatctctcacacttgacactggaacactatactttatcagtaagcatataggtgtctgacattttctttttaaatttgttagatacctcttgattcaaacagacatgaagaaacacttaaatggttagcttatggtccacggagttgtgcaaggacatattctggttatatagtgaatgggcagcgatttcatacaagaacagtggataagaaaactctgaacagtggtgtgtactatgaggcaactgctatctgtaggtctagagcaaaagacacatctcaagtggtcgatttggtttcatactatggctgtattactgatattatcttgctggattataatgtcttttacgttccattgttccggtgcaactgggcagtaaaaggcaatggagtgaagcaagaggatggttttacacttgtaaacctgaatcatagtcaagtctcatttttgaggggtccgtacatactagcctctcaagcaaaacaggttttttacctaagagaagatggctcgtcaccttggtatgttgcattgagaggttcttcaagaagattcagtcagaaagagtttgtagattcagttgcagcgattgggccattgccaacaacagttgacatcgatgttgacttggaagtagcagagaatgagagaagtgattgtgaagggatttatgtttgaaatgtagaactttgttttaactttgagtgttgattgtctgtctgttgtgtttgttgattgtatgtctgttgtgtttgtcgattgtctgtctgttgtgtttaatttgttgattgtctgtctgtttttagtgttaattgtgtgtctgctttgagtgctgatttaattttatccttttttctcaggtgatttacaatgggacaacagaaaaaaaagcgtggaagacaacctaaaaaagctgctgctaagaaatgcaatgatcaggtggagtatgtgggtacaattgagccaacagctgtagaacaaactgttgttccagcagaaaacattgaggaagttgaagacatcgatggagagacagaaaaagaagttgaagacatcgatggagagacagaaaaagaagctgaacacatcaatggagagacagaaaaagaagctgatgaagacatcaatggagagacagaaaacgaagctgaagacattaatggagagacagaaaacgaagctgaagtgcaagcagctgaagaacctgaaggcgagcttgaattatctggagatgaagatgctgttcaacctaagaccaagaggcagcgtggaccaactaggatgaaagatattgctaaggatccaaatgccagagtgagagtggagtacaccatgatgggagagcctattggtaaaggctcagttaagttagcatcatatgcaggcgcattggtccgtgaacacgtccctatcacaattgatcgctggacaaaaataggtgaagaaatcaggacacttctctggaaatctgtccaggtaacacttcactttttatttttttgtaatatttgactatctttccttatcacagcaataatcactttttctgtaattgattgaaggcaaggtttgaactagatgaggagtatcaaaaggttgcagtgcttaagcaaatgggatgtttgtggagatcctggaaatcaaggcaagtaactaactttagagaagcaaagacaaaccagcagaggatgaatctgagacctaaaaatgtttctccatttgagtggagaaaatttgtgaagagcaaaactaaccctgaatttaaggtatgttgagggagttgttttaactaagtatatttactatgtagaaagttactaattaacaatcattgttaggttataagcgatagctataaggagagaaggcgcaaccagattcctcacacttgtagtcgcagagggatggttagaattgcagaagatatggtaatcttatgtgcctgttaggttatgttttttattgctttgaaattttaaaacacttagcttgctactaatattggcatgttgtgtttttcagaaaagtggtagtgcagacccaactgaagtgacgagggtaaaggtttgggttaagtcacggaccaagaaagatggaacaccagtgaatacaaatgcggctgaaaaaattgtgagtatgttatagtttggaagttgtgacagtttggtttgtgatgattgttaggttagtgatggtttgttaaattggataggttagtgatggaacagaacttggactggtttgtgatggttttgaaatgaatgtgataggcaataaatccagaacttagccagtgattgtgtggactggtttgtgattgtgtgtgatggtttgcagaaaaaggcagttgagattgttagcagtggtcctcaatcaaatgggacgaatgaagcacaagattcacttagccaactcttagggcctgacaatcctggtagactaagggcgatgggaagaaatatgaacaagaccaaactagcttgtttccaagtaaaaagcaaatgtatggctgaaatgcaacagaaacaggaccagctccagcagaaggtcaatgagttacaagaagtaattgacaagataaagaaccatgtaaaaacttgtctacttatacataaagctaatcaatcggttagtacatatatttgactttgttttttttttggtacagagacaatcagctgaagttggtgaaacctcaactgcaagagtaagtcacttttatttgatacttttgacctcttgatacataattagatgataatagcctattgattccttatacagagtgtgaaccaaagatcacaacctaagtgtatcttgatggattgggctggtactgatgcaaccgttgctgagggttgtattatatcttctgattcggatgagatagtcaatggaagtcgcttaggtcctacagatgttaaagtattgattgacactgcgattgtaccagaagcatacctttggagacccgcagttatcatggaaattatggagaaagttgttggtcagatgatagcttggcctgttgctatgtgtgttagcctagaggagaagctcaatccagacgacattgcacaggtaaaatgttatatattgagagtcatactaatatattcagagtcatactaagacattggtttaatgtgtttgacagggaccaagacccacttatggaaacaagtgcaaactactggatttgtcttannnnnnnnnnnnnnnnnnnnnnnnacgttggcagacaaaagaccaatctgcattagttaatgggcttcctctcggacctgctgcagtgaaagtatttgtggatgtaatacttcaacctgagacgttcatatggaggccaacgatggatgtgacataccttgaggactgtttacagtcttttgtagcatggcctgcccacaaagtttcctatgaaaacaccacagattcagcaattcagaaagctcctcttcagagttctcaatcaacttatccaacagcatcagcctcaaaaggaaagtcagcagcaacaagtcaacaaaatggagcaacagagaaatctcttggtgagaagcaacaaaatggagcaacaaaaggaaagtcaggtcataattcttctattcaggtatctgcagccaagggttcagaatctgcaggaacaattgcaaaatctcttggtgagaagcaaccaacagtagttccaaagtctcttgtgaagaaaactcagctagcatcacaaacccctctacggagatctccggtaagtttgtatttggtttgacatattgactaataaaatttctacatgcgtttaatcctggtttataatgtaacatgtcagcgccaaaaaacatctgaaggtttgaaggctaatcagaagtgcaagttaatggatataagtggaaagaagcgggtggttggtgcacgacgagtgcattcaatcgacccagatcaaaaggtacaccatgttcctttgggagagaatgcagctagagtttgggtagatgtagtgaatgtagatgattcagcagtctggatgccatcagatgaaatcgagtatatgagagattcacttggttcatcaattgcatggccaaaggataagtttgtgacctactgactttgcagaatctagggtaagttttgaaattgttgtgatgcttgtgctttggttttatgcaggaactgatatgagacattgttgattattgcagggagtgaagaatctatggtccagattagctagttttcttattaggttaagactagactaatctacttctgttatgaaatttggaatcagacttatgttgttatgtatttggctttgcttaaacttgttttggatgattatgtttaacttttgaatggtgtctcttggattggaatcagacttatttataatataacaactattaagacttatgttatgttgtatgtttatgttatgcaaaacaggtttagaattaatcacaaaagatagttctttgagattggatattatagcaaaaattggttgttgttttcaactatagtagattatattacagcataattaaacgcactaattctgtttactatagcaattcttcgatgtcattgtcaaaaaattatatatgatagcataaaacacaaagctacaaaacttatattagagagcaataattagttgtcctgttaggtgagggtattatgacacgaaattagaaagattagtaatttataacaagaaattaaagtgttatatcaaaactctataatggcgttatatcgttgctatcgtagcaaaatataccatagcgtacaaaacgatgctgtcataggggtgacacctactatagctgccgcaaacatagcatttgtgaattcgctgtgtattacatacgatagcagatggtttgcgctaacgatgaagactttttttgtagtggattccgaataagggaaattagggaattagtattcggtacttatcctctatattaaaacattgcgtctaagtatttatctccatcataccaatcaaaataatcctaaatactctcaaaataattataattttccatttgtcctctgacatgtcttcttacattccttttccattggtttcagacatagttcgtcgaattggaatatctggtttccgtaatctaggtccattaatcgttgttggacctgaatgggtatctattgtattttctgatgaagttttaaaggaggttggtcttgatgagtttattacggtttcctctttatgcatcgaagggtcgccctactagccatttttgcttaggtgtttacagtctggcaacaacacggccaaatacatcgaaggcttacgactagctgctctagttggcccctctgttcaagctctgaatatgcttggcgaagctgcagttcattacttacattcttattttgcttttggtattttttatgttttttgcgttaatccagaggatggtagaataatacttaaaaagtatttggagatgtttagtaatttccaggaagctgttaattgcgccgagcaggtcatgactcagatacaagacatggctccaacaggacagcaactataccgagggtacaggattttgaactctatcctagattgtcatttactatattttgggagtttggatgtttgccccgagtgctttgtcctcacttatttttttaagatccgtgctttgtgttagattaattttcagtttgttggaaattcgctttgtgtcaagctcttaatcaataacgaaaaaaatgttagaccatcatttcctacggtttgtattatgtatgattttgtggatttgtatttatggactacttcaatattcatggatttgccactagtggatttgtatacttgaaaccataattttactttttaggaatggatttgtcactagtggatag

SEQ ID NO: 163242 - DNA, 4542 bp, Arabidopsis thaliana landsberg
  unsure (1)..(4542): unsure at all n locations
ctaaatgcggagatatagctgcttcccaagcatacaacgtcttgcataaaagttccggtgctccagtgacggttttctcatcccggaaattcaaagagcacatcccactctcgctgacttcaacattcaatcccagagattttgcggcggggagtgaagaatggaggacagagttggagattgaaatagggatttggcgacggagggagagggaatcgagcttggagaagacgaaacgagaatcggaatcggaagggaagccggtctgaataggtttcaaatagaggagttttgtggcggaagatgaaggttgctggaggaggaaagaggcggcgatgcctgtagagacgagggttttgccgagagaagtgttggctgaccaaattaagtaggtagggtggttgagtggtaaatggaaaggagaaatagaggtggatttgaatcgaatgcggtggcgtaagtgccggagacggtggcggataagagtggcggttacgggtatcattgttggtaggtgggatgtgatagtgaagtggcggagagagagaggagtgtttagctcgaaactcgaaagagtcgttgtggtttggagggtaaatttggaatctagttatttactacttttttgtctcgcggatctcctaatactaatgggcctggacttagattagtaggctggtcaatatttataaatgttctacttaggtgttaaaatggggaaaaatatcatttnnnnnnnnnnnnnnnnnnnnnnnnnnnnntaaatcaggaactatagatctggtgatttaaatcctcaattttatgttaaattttcaatttaattataaattctctttgactaagccaattgaagcacaagttcttctttttcggtgccatcaatcgacgtagagacgagatattacttcgaattcgaagaagaagaaataattcaaagaagaggagtgaatatgtagaagtagagagaagaaatcaaaaattggttttgaggatctaaggtttgtgatttggggaatttctaaggatgtgccgtaattgctttagtcaactccgaattcgagtaaaatgagagaatccaaagaaaatgagagaatcataagagcatctccattggaagtatctcaatgagatacccaacaagaaaaaaaattaaaaaaaaaaagtatgagagaaaggagaaaaagtaggagagaaggagagttaagtttctcggaggagaaactttgagaaactattctcatccaatatggacaggtgtaatcacactattagttcaactattaaataataattaatgtatctgttttgattaaaatattaattttttttttttttagaaactttccttatttttactgatggagatggtctaaacatcttgtctcaccgccatggtatgaaccatctgctgcccaatctcttccgacatgcaatcgaaagaaaagcgtcctaacaaatacaattatcaaaaactctctaaaaatctgataaatttatgcgtctgaaaaccatttaaaaaattgagagaacaatcttataatagttaccttaaaaagctgagagaaattttccattaataatcttttcctatttgtttaaattttattttttcagacttttggaaattttatgttctgttgtttaatataataatataatttacatataaaatgctaataataaattttttgcctttttgttttttgaaattttattttattgaaaactattattttgtatattctaataattatattatacattttaactatttccatatcttgttgaactgaagagatcacttaagactttcatcaccttctaataattattataactatttgtataataataattactatattgagtttataataattaagacgtcataatgtactggatcacgtgcattgcatgtttaggcgagagtatcatatggcgctgtctgatgattttggtagcaatcatcattgcagctcgtaataagtagagctctagacagatctgccttcgttagcagatggcagctccagcttctggaacaacagatcatcagggttttatctcaaacagccccagattatatagtttgtagatacgaggaagatcttggactaacctgctgtttggatcataatagaaaccgcgcgctgatggatccgtcgctgcaggagaagcatacgtagtaaaatctagctattgttagtccacaatctgtgccaacatttacaaagtattgctctttccatctcttgcaccaccacaaaaataaaccggagtgaatcataggatatgtaagagtaaaggatcatcagaattgatacgaaagcgagagttataccataaatatataattgttaagatccaattgcctgccaccatcagattcaacttgaccctgcagtattaagtccagaacggttgcttgggagatgttactgactatacaaacaatgttactcgagtgttacctaaagaggcgaaaaagacgggaaatttgaccaatgtctcataataataatttaggcctggacattcaggtacccgtacccgttcggttctttttttcgagtatctggtctattcggatagaaagtcgagaaccattagggtattctaaaaattcggtttggttcaagttcgggttcgggtcggttcgattattttagtaaaaatgcaaaagtaatcaaaactacccaaaatattttcgggttctggttgggttcgggtattttacttatatatacccaaatctacccaaaatacccgattatccaaaaatatattggttacttttatccaaatataaccaaatgtaaccaaaatacttaaattacctaaaaaaaactataacattggttatttttatcccaaatatatccaaatgcatatgaattactaaaaaatctagtatattcggatttataattttaattttgggtgtttgaggtattacaaatatatatatatataactaatatttttaactttacatttgtattcgggtacccacggatattagattcagttcgggttcggttcggattttttcgggtagtgaagtggagaacccattcggataattctaaaagtcgggttcgggttcggtttggttatttttcgggtttttcagttcgggtattcggttccgggtattatgcccaggcctagtgaatatgttcaattttgatatatataaagaaaaattctaaaactccaattaggttaagttaggtttccctagaatagcgttcgaaacgcccgaagaagacaatgaagttgcgtttacggttattgcgcatccaccaaaagaaatttttggctaagaaagggaagcgaaaaaggttaaagcgaagaaactcgatcctctgtgcacatccgggaccgatttacattcctctcgatcttcagatcagtacacttttaagattgcctgtgaagtctttattgagatacggtgcgttctccaagctttggtcctctatcaccaccagccaatatttcaaaaaacagcacttgaacattacatcttcctcagctcctccacgtcttctcattgcttttcaggactttcacggtaaaaagcttatgttagtctcgttgcctaacccatacgtatcttcctcttcctcttcctcttcttcatgttgtgtaccttataaagatctgaacgtctttaaaattaatgggaaactagtgtataatgcggttcggggcttgatctgcataagtagactaagtatggggatttgtaaccctagcacaaggcagcttcagttttttccccaactcaagtacaaagaagatccaaaactttttacatgccccaattattttgttgggtacgattctattgaagatcaatacaaagtgctcgcaattgatcgttttcatttgagaatggagcacaagattctgttattgggaagagaagaagcttggagagaggctccatgtgttgcatgtcctcatgtttctcatacctcggggctctatatgaacggtaccctgtactacggggcgtctaggacggatatcgatccccggaataacaattctataattgtgagttttgatgttaggcttgaaacgttcaaaatcatcaatgtaccaagcaaagttctaccaatgggttatgaaaatatgtggcttgctgagaggtggaggaatcttacagataaaactctgatcaactacaaaggaaaaatcggtgtggttgagaatgctcgtcaaggtagttttcgaatgtgggttgtggaagatgctgagaaagaggaatggtctatgaacactttttatttgccccaatctgctgatggccttgacttcaacatcatggatacattttataccggcgagatttgtctggttccgaaagaattgactgatcctttttctcttttctattacaatttggagaagaatagcatgagaaatgtcataattgaaggactgcctgtttgcaagcttaagcgagcccaaaagattagtgtgacagtgtctgatcattatgagaacttcatgtccttagaaacctaa

SEQ ID NO: 163243 - DNA, 593 bp, Arabidopsis thaliana landsberg
  unsure (1)..(593): unsure at all n locations
atgaagcattcgaaggatccgtttgaagcagcaatggaggagcaagaggaatcacctgttgaaaccgagcagactcttgaaggagatgagagagctgtgaagaaatgtaaaacgtccgttgttgctgaagcgaagaacaaagatgaagttgagttcaccaaaaacataactggtgctgatcctgtgactagagccaacaagatgcagaagattttatcacaatttacagaggaacaaatgagcagatatgaatctttcagaagatctggttttaagaaatcagacatggagaagttggtacagagaatcacagggggtccgaagatggacgacactatgaacatcattgtgcgnnnnnnnnnnnnnnnnnnnnnnnnnnnccttgtggaaacagctcgagttgttatgagggaaaggaaggaatcaggacctattagaccttgccacatcagagagtcatatcgaagaataaagcaaacaaggaaaagtcactcaaagatcagttcatcggctttttcgctagtcagaacgacgacggttacaaagtagtgacatggacgaagagtaactatcattctctataccaaacgtga

SEQ ID NO: 163244 - DNA, 1370 bp, Arabidopsis thaliana landsberg
atgaatgaatgtctgttgcaggagatcgacgaggaaacagaagcagtaccacccttgagtatgtatttcccgccctcggaatatgtgaagaaaatcaagctttcaactcggtgctatattcacgaattgttgactacattcgataagttggagccgccgatgagcaagtccgagaggttatggtttgagaaccatcctagtttccaacatatcttccacatgccaagagatccgaaccaccgacttatggggatgtggatgctccttcttcgcacggcgtgcattgaaaggaagaaagaagcgtggttcatcgtcaatggcgttccaatccgatatggaatattggaacatgcattgatatcggagttcaattgcaagaactataaacttggttacaaaaatacggggaatttggatttcaagaggaagcatttcaaggatactgttgtgaaacgcgaagacgtgagagagaagctcataggaatggtaccggagggtgaaagatcaaaagaaaggttgaggatgatggtcttgtatttcttaagcagcattatcatagcgcctatcaagaccggagataaggcacctcaagtggatgaattttgcctcaaggtggtgagtgatctcacgttctgtaggaattttcagtgggggaggtattctttagatgacatgttaggaaccatctcacacacggtgaatcatttgaatggttcagtcaccaccaacgagaagtacatatggccggttccgggtttctgtcttccgatggaggttagttacaacttatagagaataggtgattgtttgcaatactgataatactgtggaatactatttgtgatttaaaatggttttcttattctgtagcttcttgcattcgaggcaatcccacagttgagggaaaaattattgaggaaattgcaggagcagatccgggatgtcctaggatgtgcaaggtgaagttcaagaagaaccatttgaaaggctttcctcttgataccatttatgcagaattgggtacaactcaggttagttgtcttaagatatactgtttcacaaatgatagttattatattttcttataataatccattcatactgtttatctttacaggtcattgattctatcgtcacacctggaattggggagcaaaaactcatgaaagcaatcactgaagaagaagacgacgttgacgtggctgatatggtggttgaaagttgggagaagcgtcgtaaagagggccatctaatcaggtttgatgagctctaccagcaggatattcaagccctgcagatcaccgcaggtccaaagattccgggtgcggaggatattccggatcccgagtttggtttctgtggttgagagg

SEQ ID NO: 163245 - DNA, 8038 bp, Arabidopsis thaliana landsberg
  unsure (1)..(8038): unsure at all n locations
gtcttctagaaaaccgttcggcatgctgaaagacctaccagtcatgattaatggcgtagaagtgcgtacagacttcgtggtgctggatatggaagtagagcataaggatcccttaatactgggagaccctttttagcgtcagcgggagcagtgatagatgtcagggaagggaaaataagtctcaaccttggaaagcatatcaagttgcagtttggcatcaacaaaactccacaagggtcaaccgaagatggaagaacctctggaaatgatagagcgatctcaggagaaggatatgagactgaaagagtgaaagaacttagaaagaagtctgataagcataatgaaactatagagaagctggcccacaccattgaggaacttaggagtaagcagaatcagatgcagaaggaagctcaacctaaaggcgggattaacactatccggagaaaataattcacttcaagatggtctcaagatacagattatcctccagaagagaaggaagcctattttgaagaaagggggattgagtattctgctgcagacctctccagggaggacgctgaatatgatgatggtatcagagaggattatgctgaccctctctacagttcattttcttcttgataagtgtgaggagtcaagctaatgactttaaacaagctcacttgggaggaagtcccacgactatctctgtaaataatttttattttcttgatatttttgatttgttttagttgtgtttgtggttctcagagacaagagaacaacgtggagatagagtaaaaattcaaaacttttactctacagaagacctggagatcgagtgtacagcccgttggagtacaaaattttgaaaatcttctgttgcacctggagactttgcactcgagtacattggtcgagtatgtgtgatgtttaaaacccaaaaaatttttaaatcatcattttactcgaccaacagaagctacagagacttgcagaaatttcctacagtttacagtaggttttctgcaaaattttctcaatcaacagtgtgtggaccacgcgctgaggataagctggagagagaatctaaaattcaacctagaccactcattttgaagcgctactcgaccactccaaatccactcgaccttccacttttcatttcaccactgagaacttcactcgaccccctccctcgccgccgtcactagcccatcgactccgtcaaccgaccaaaccacttcactcgattacttccgtatactcgaccaattcatccgcatcaacagccgtctctttcaaaagaaaccgatcgacctcgcttcccggtctcgtagaggcactcgaccgacgctgtcctagccgacttcaagaaatcactcgacctcctgaaagcactcgacccctgcaataatctactcggcttcttgttcgtgaattcagcagagccttccaacttcagagaagttactcgacctctaggtttcacgactcactctacctccacgatttactcgacctgctgtagcattccaactcgacctttgagaagatactcgatccagttcgtctaagctcaggaacagctcaggttactcgagtacagaattgtactcgaccaattcaatctatttcattgcctattgacaataattttggtttcattgctatctttgatactaacctattgacatttgagctttgagttctaaatctctacaggagaatcatgagcaattacagtggcagttcttctgttgatcctgactacaacatggatgagacagagtcgtcatcttcaaggccagagagagaacagagagaatatgaaagcttcagaaggaaagctgagatagcccgaggaaagagagcgatgacatagaggtatgagcttatagacgaagatctggaagacgagtacatgcctgaacagactcgcagagctaccaaacttctgcacaagccggacgtattgcctgctgaggaatatgttaggcttttcaagctgaatgagttatgtagcacgaggtatccttgctcgacctcacttgcacaactcggattgttggaagatgttcagcacctgttccaaagttgtcatctggacactctgatggcttatccgtatgtcgcgtatgaagatgagacaatacaattcctctccacgctgcaagtagagctctaccaaggtatgacctctgatgagttggattgtgaaggattgggattcttgcgattttctgtgtatgggcatgagtataggttatcaatcaagcgattggaaggattgtttggcttccccaatggagcgggatctaagcccaagtgtgaaagatgaagagttgtatgacttgtggatcaccattggtagctctgtaccgttgaattcttcaaggtcaaagagcaatcagatacgtagccctgtcatcaggtacttccaaagttctatagccaatgtactctactcccgagagatcacagggactgttactaattctgatatggagatgatcgctatggcactcaaaggcactcttcgccaaactaagaacaacatgtctctccaaggtgaaatcaatgacacacctcactctgtacttcttctgatccatcagtgtggatacaagagctgggttgtcagcaataaccacaagagagcacgaggcgctctgtgcataggtagtgttgtgacaccgattctgatcgcttgtggagtcccaatcacatctgatggactctagccacgggcaatggatatcgagcatctacgtcacttcgaattcctggagttcgcaatggttggcgacttgcaccggttcaggtttgagtactctacagacaagagagctagcatccttctccctagccctgaggttactcggataatagagggagctaacattgattttcggccttagattggaagcctctactatgagaacacttcgccattggatgaggatgatcttatagaagaagccgctgatgatgggatggacgaagacagagcagtggagttcgacactagcatgtatcactttggtgaacatgtacctccagcgaggcagagcaagagcttgattgaagctcataaaaataacagtaaactgcagaagtggtgcaagaagcaggacaagctgctcgccaagtgtttcaagactatcaagcttctgacagataagctgagttgttcctcccccaccactgctattccacagggacagcctcctctggagatgccatcgaggagatttgatgagcttgagcacaggcctgagcttagcgagcagagagtatcacatgtcccggctaggcattcgtcgttcgaatcccgggagcacaagagaagaaggaaggctacactcactcgatctagcagcagatcacgcctcattcactcgagaaggtcactcgaccgcggtgctggtcgcagcagaagaagagaggtcgagtatcctcagagcggtgctggccgccaaagagctgatgaggtcgagtacccacctactgaagctgataaaaaacagggcggcttgtctatggcctgagagcaatcacaagcagccattgatgaccaacttcgttcattcttcgactgaggtaagcgccacacttcaccattgtattatatcatctcttgtaatttgttctttattttgtttccatgattggatttgtcctgagtactctcttccaagtttattcacacaatatactgtgtgatttaagtttgggggagggctcaggaagtgtgataagtgtgtattttgcatattttgagcatccatttgtcatcactttagcatcatatcatcactgttttataccatttctcatcatttgtcatcactttgcatgtttaggatagttttgcatgcatgttgcatatttgtgttgatttcaggtgatttggagctgttgacgagctaaatggaagaagcggacctgatcatgtcaaaccactcgaccccatggtcgagtagatgcttcacgacttcaacagaccactcgaccccttggtcgagtagaatacctcagcacctcacgtcaccactcgaccccctggtcgagtaccgccaagagagacactagatcacaccactcgaccccgaggtcgagtgtcttcatctccatcttctgaccatcactcgatcacatcactcgacccccaggtcgagtaacttcatcccattgccagaccactactcgaccacaccactactcgacctcatcactctaccttgaagtcgagtatcaccatcaccaccactcgactacatactcgattgcaagcttcagagtcttcttcattccagactcaaccagacactcgagcacaaggaagaaaagaagactccagctattcactcgacctcccactcgaccacatgggtcgagtacagttcttaacccgtcccaatacttcgtcgtttttagtataagggtttcatgtacttcacattttcgcatatttggctataagtagcatgtacttcacattttcgtagaaaagtttttatctagttttattccatagaccttgtgttctagaccttttataatccggatttctctttatctattaagtatttagtattcagtatttgttcttgattttcgtttactgttgttcatcctgttatcatcttgctattacactgttgttatcatgttttcattatgttcaacgtttatgttttctgcaatgatgtctgagtagtgaataggtttctgaggatgggttagagtagtatagaattctcagtatgctaggtggttgagtttgattggtagatcccttctggattagttgctcttaatgcctattgctttctgatcaacatgaatttgagcctagacatttccgcgcccaaaaggtgttcgatgaaatgtttgaaccactaattccagagattcgtggccctgtaccaaggtatttgataagtgtgtattttgcatgttttgagcatccatttgtcatcactttagcatcatatcatcaatgttttacaccatttctcatcatttatcatcactttacatgtgtaggatagatttgcatgcatgtcgcatatttgcgttgattntaggtgatttggagctgttgactagctatctggaagaagcggacctgatcatgacaaaccactcgacccagaggtcgagtaggagcttcaagatctcaagagaccactcaaccaccaggtcgagtagaggacatcactacttcacttcaccactcgaccccgaggtcgagcgccctcgtctccatcactcgatcgcttcactcgaccatgaggtcgagtgtcttcacctccatcaccagacaaccactggacctcttcactctacctagaggtcgagtatcgccatcacaccactcgactgcatactcgatgacaagcttcagagccttcttcattccgcactcaaccagacactcgagcacaaggaagaaaagaagactccagctattcactcgacctctcactcgaccacctgggtcgagtacagttcttaacccgtcccaatagttcgtcgatttgagtattagggtttcaggatatttggctataagtagcatgtacttcacattttcgcaggacaagaagttttttatctagttttatttccgcagaccttgtgttctagactttttgtaatccggatttctctttatctattcagtattcagtattcagtttctgttcttgatttcgtttactgttgttcattctgttatcatcctgctgttacattgttgttatcatgtcttcaacctgttcaacgtttatgctttctgttatgatgtctgagtagtgaataggtttctgaggatgggttagagtagtgtagaattctcagtatgctaggtgattgagtattgattgatagatcccttctggattagttgttcttaatgcctattgctttctgatcaactggaaattgagcctagacatttccgcgcccaaaaggtgtttgatgaaatgtctgaaccacttattccagagattcgtgaccctgtaccaaggtattggttgtagggagcgttttggctttaacttgttgattcgtaatgcctgttaggttagctctcgtcaatggtgattgagtctgggactaggttagcttgagagtctctgttgcggtggcacttagatttggttaatgaacttgttgtctagggttaatttattgagcatgtcaatcacctgtaaactgaggaaacgaaactactcaattatcccatccttaagaattctttatctgattgattttattgtttactctactactgtttactgcatcctgtcatctgttgtttagtttctgcaaatctttactgttactcgacctgatactcgaccacccagttgtctggcaacagactgtgcagtcgagtatccctgtttcattttctgtctgttactcgacctcacccagtgctctgcaaagagctgtgttggtcgagtgttttactgtttctgcttgattttctgttttctgcatgttcacttagaactgctagaacacaccaaaacctgttattgcttggcttgacttagtgacttctgatcacatcttgattgttagcatcacccccatttgggttgacaacctaaaatactacaacgatatgattggtgttttaggataattgactaaaaaacctattatcactggtttctataggagattcatcaaagacttcagcaaaatcgcaagacaactgaccgttttactctgaaaagaagtcaaattcgagtttacacaagagtgtcatgatgcctttcagcagtaaaacaagccttgatcagcgcaccaattgttcaaccaccaaactgggatcttccttttgaggtaatttgtgatgcaagtgattttgcagttggggctattctaggacacaggaaggataagaaacttcatgccatctactatgcaagtaggacacttgatgatgcttaaaggaattatgcaactatagagaaggagttgttagctgtggtgtttgcttttgagaagttcagatcttatcttgttggatccaaggttatttttcacaaagatcttgttgccttgaagtatttgatgcaaaagaaagatgctaagccaagacttttgagatggattttgcttcttcaggaatttgacattgaggttagagataagaaaggagttgagaatggtgtagcagatcatttatcacgcattaggatcgatgatgatgtccctataaacgatttcttgcctgaagagaacttatacatgattgatacaactgaagaagatgactgcaaacgtgatagcttcagtgttgatcgacactcttactatgtcgatcgacactcacatttcagaggaagtagacatttgaagttgcgcgatggtgtcgatcgacaccactgaacctgtcgatcgacacccttctgaatcaacaagaaattggtcaccaacttagaattgggccatcacagtagtcgagaacgattcagcgtttgtcatgaaactcttcaagtctatcattttccctcgttttggagtgccacgcatagtcactagtaacggaggtaagcatttcattaacaagattcttgcaaaattgcttttacaatatggagttcagcatcgggttgctattccctaccatccacaaacgagcggccaagttgaagtttccaacaggcaaatcaaagagattcttgagaaaacagtgagtaaggcgaaaaaggagtggtcttacaagttagatgatacattgtgggcttataggaaagctttcaaaacaccgcttggaaccacaccttttcatcttctatatggtaaaacttgtcatcttcaagtggaattagagcacaaagcagcttggacagtcaagatgatgaattttgacatcaaatctgcaggagaaaggagacttattcagttgaatgagcttgatgagatacgaattcatgcctatgataactcgaagctctacaaggaacatacaaaagcttaccccgacaaaaagatcctcactcggacctttgagcctaatgactag

SEQ ID NO: 163246 - DNA, 2368 bp, Arabidopsis thaliana landsberg
  unsure (1)..(2368): unsure at all n locations
atgtgggttgactttaggtttgagatggatatttctgaagcacgtctagatagaattgaggtacagagttcagtggatgcgtctcatgaccaactgagaaaaatatacgtcttgatgaataagatatacaactgctttcgctcactcagttcacgaggtttctttcgagccggagtagaagccacgccacagcctatggaagacaccgagcctgtgccagagttctttattagtctcagattgtccgatctttgtgatctccctggtgaatatgtgctaatgaagacggagatgcttagcacactgagtgatgggaacgaagaatggttggagaccttgagaagccatggaacaccactggcatgcctcaagaacgatcaaggagattctattcttcatcttgctgctacatggggtaatctagaactagttaagagcattgtctctgaatgcccatgccttttattggagttaaactcgaaggatcagcttccgcttcatgtggcggctcttactggacatccagctgttgttgaggatcttgttgcgtcggttacattttcttcagctagactggctgaagaagatagggagatactgaatccatatattctgaaggacataaatggagatactgctctgaacttggccttgaaaggacactatacagaggttgctctctgtttggtgaatgcaaaccaacaagcttcctttcttgcgtgtaaagacagaatatctcccttgtatttggcagtagaggccgggaatgtgttgcttgtgaaagcaatgttgggaaatgatggccctgaagggagaaattccaacgtagaatcactgttggaggggagaaaataacttgcacacgcagctttgaagtccaggaggacaggtttgttttactttatattaccaattaggaggacctggatgattcattgtgtnnnnnnnnnnnnnnnnnnnnnnnnnnnnnnnnnnnnnnttgatgttattcttaatgaatatccaagttttgtggatgaacgagatgaagaaggaaggacttgtctttcgtttggagcatccattgggtatcataaaggagtacggaacctattagaccgatcaagaaagggtgtttatgtatgtgatgatgatggatcctatccaatccacgtggcagcagagaaaggtcatattgaagttgtcaaagagatttgcaaacgttgtccagtttcaacgcacctgcgtaacagaaaagatcagaacattcttcacattgcagctgatcgtgggagatttagacttctacgtcaatggcggaatcatgaacatctggctaatgagaaagatgtgggtgggaacacacctctgcatctagccaccataaagtggcgccctcgagctgttcagttccttgcagttagaaaaaacttgttgatacagaactaaatctgcgacccaactacatcttcatggaggtatgtctaatttccttagttaacaacattttctagattattcacagctggtgacctttaagtttggattacagaggttgacactaatggccttagtaaatggtcatgtcgaaagagatagtagactcatggagaccatgaagctatcaagaccatcagtgccattggaccatggtggaatgttacagggaaacctgcgattcacaagaacaatccaaatctccaattatcattcgaaaccaacaatcaatcgatgttcataaaacaccaaatgattcagctagctctcgatgtgagagaaatctagcacttacaaaggttctagagaattctgaagattacagattattcgataatgaaagcatgagcataacatgttgctcttatacaaaaaggtaaagaaagtaaacgttaaccacgttaataacgatcgccgttaacgtccattgcattgccagctcgccagctcgccagctcacaagtactttgcctaacgtccgacttcacattgccagctcgccagctcgtcagctcaccagctcaccacacgttaatcctgtatcatggaaacaaagagtacatcaatgctcttatactagtggcaggtcttgtagcaaccgtaacatttactgcaggttttaccttaccaggtggctataaaagctctgctccgaacttgggaagagcaatgctagtaaccaatctcaatttcaccattttcctgatatttaatgccgtggcaatgcaaagctcagtattagcagtagtatctcttctttgggcgcaattgggggatcctgcactatttcgagcttctttaagtgtggccttgccatcactgtgtattgctctaatatccatggcttatgcattcgtttgcgccatgggtattgcagtaggagaggatgggg

SEQ ID NO: 163247 - DNA, 3011 bp, Arabidopsis thaliana landsberg
agtaagcagaaagaaaagaagaaaagttgcgagaattgatggtgaagttgccaaatttgaatttgaattcaattccaagtttttcttattcgtacgtaccgttacatacttgcatttatggttgccaaatggttgggcaggtcatagctgtctagttcaaatatcgaactatgagtaaataacaacacatgacacatactcaacactcaaaagcctaatcctcagttccagaactcaaatttcggagatacaagtggtatcaaagatggctaaaggcataatactttaccacaattagtcctcactaagagaaaacaaggaaaaatcaagcaccacaagtctgaatgtgtatggcgtgagagagagaccacatacatgtgatcattacctacatacagattttgcacaaaaatggacaaacataaatcggacccacacaccattaacccaacccctaccattcattctcaatctttccttttttatcttcatttcctgtttcttcatatatagcagaaacctttgggaattagacaggaagagcacataatgatgaccaaaaactctatcgaattcgatccttacatcgagcgtaaagctttcgacgaaacaaaacaaggtgtgaaaggcctcgtcgacgctaaaatcactgaagttcctggtatcttccaccaccgtcaagatatcttaaccaacaagaaaccttctgcttcggtatcagacctagagatccctatcatcgactttgcaagcgtccacgcggacacagcctcacgtgaagccatcgtagagaaagtcaaatatgcggtggagaattggggattcttccaggttatcaatcatagtattcctttaaacgttcttgaagagattaaagatggggttcgtaggtttcacgaggaagatcctgaggtcaagaaatcattcttctcgcgtgatgccggcaacaaaaaatttgtatacaacagtaacttcgatctatacagttcttcgccgtctgttaattggagagattctttctcttgttacatagctccagatcctccagctcctgaggagatccctgagacttgcaggtaacgggaatattctttaactttttcttaaaaacttagaagtgagattagttaacaacttaattaggtcgtttaatagatttctaaattgtttattgactcagggatgctatgtttgaatactcaaagcatgtgttgcgtttcggtggtttactatttgagcttctctcagaagcacttggtttgaaatctcagacccttgagagcatggattgcgtgaagactttgcttatgatctgccattattacccaccttgtccacaacctgacctaacgttagggataacgaaacactcagataactccttcctcacgcttcttctccaagacaacattggtggtcttcaaattcttcatcaagactcttgggttgatgtctctcctatccatggagctcttgtcgtcaacattggagattttttgcaggtaaagtaacaatctgtagaaccaaataccttaaacttaaatgtcttgtttaaataattttaggtttgatttgatgcagctgataacgaacgataagtttgtaagtgtggagcatagagtgcttgcaaatagacaaggaccaaggatttcagtagctagctttttcagctcaagtatgcgtccaaattccagagtttacggaccgatgaaagagcttgtgtctgaagaaaaccctccaaaatacagagacataaccataaaagagtattcaaaaatattttttgagaaaggtctcgatggaacgtcgcatctctcgaatatcaggatatgaaaaacgaaaacgacagaaattcttaatgcgtttcttcgcatcaattatactgtttgtttatgtctcttcaataatcaaaccaatgcatgtaccaaatataagaaataattgtgtgtgtgtgtgtgtaaactatgtatatctgtatatttgttgagctactgtgtatttcaatcttatcacttataaaatgttatcaggtgatggaattgcgtcattgaactcatcatttatatgttgcaactgttatcactatttacagggttatatgcgtaattaaaaactaatcagtccttaataaaacaaaagtggcgaagaaaaattcaattacgacaactcataaaagtcagtgtgaaagagagaaagagacaacattagttccggtcagaatcaacaaccgtctattctcagtcgtcctttttatcttcattttgctgttccttagaaggaggtaagaaacagtaaaatggccaaaaactctgtcgaattcgatcgttacatcgagcgcaaagctttcgacaatacaaaagaaggtgttaaagggctcatcgatgctaaaatcaccgagatccctcgaattttccacgtccctcaagataccttaccagacaagaaacactctgtttcagacctagagatccctaccatcgactttgcaagcgtcaacgtggacacaccctcacgtgaagccatcgtggagaaagtcaaatatgcggtggagaattggggattcttccaggtgattaatcatggtgttcctttaaacgttcttgaagagattaaagatggggttcgtagatttcacgaggaagaagaccctgaggtcaagaaatcatactactcgcttgatttcaccaagaacaaatttgcatacagtagtaatttcgatctatatagttcttcgccgtctcttacttggagagattctatctcttgttacatggctcctgatcctccaactcctgaggagctccctaagacttgcaggtaacgaaaatagtcttagcttttctttgttctttttttttaataggccccaatcaagaattagaataatctttatttaacagtattgatttgactcagggatgctatgattgaatactcaaagcatgtactgagcttaggtgatttgaaataaaagcttctctcagaagcactaggtttaaatctagatcctt

SEQ ID NO: 163248 - DNA, 4901 bp, Arabidopsis thaliana landsberg
atgtattctggtgtcagatttcccgtcatttcgtcgaacctcttgtacatccactcccgataaaaaccgccattaccgccgctataattataattgcccaccattataaaaataatataaactaatttgattttgctgttgatatcgttccaaagaagcagtttcagggaggatatcaacagcaacagtaaacaccttgtttcccaccacatcaacatcaagcaccttcgcctcaggattcagacatgaagaacatgctcagcagatcattcaaggcaagccacaggcgcactgacatcgctaagacgcttgctgattaaacaacaaagcgacctacaaggcgttgacttaacagcaagtttgaatcactgagcactaggatgaaatatgtggaggcatcctcgcttcaccatctgttaataacaacccaggccagcttctagggaaagtaatccagaaccctaaggagtacaccactcgtcacgccatcactatctgccatgatcgacagctgccaactcgacatgcctctacctctgtcactagggacagtgacggtcaagaaggggaggattttgttcagaatgaaattccagctgaaatagcaatagaggagcccatactcgatcgcagtactcgatcgcaagctcaagcagtactttcttctgttaaaaagcatgtcgctgctaaaaccaaggataaagtctttgttcctccaccctacaagcctccactaccatttccagggagattcaagaagcaactaataaagaagtatgaagctctcttggaaaaacaattgaagaaccttgaaatcacaatgcctctagtagactgtcttgcactaatatcagactcagacaaacgtgtgaaggacatgattacagagaggatcaaagaagttcaaggaacggtggcgttaactaacaagtgtagtgcaatcatccagaagaacattgttcaagaaaagttggaagatccgggatcttttactctaccatgctctattaggcaacaggctctcagcaactatctatgtgatctagaagcttcagtcaccttaatgccactcaccatcgcaaggaagctgggattcgtccaatataagccatgcgacctatccttgatccttgctgataggaccttaagaaaaccctatggcatgctcgaagatctgcctatcaaggttaatggagtagaagtgcctacagactttattgtgctcgagatggatgatgaacctaaagatcctctgatcttgggaagacccttcttggccacagttggagcagtcatcgatgtcagggaagggaatatgagtctcgaccttggttggcctatcgagttgcagtttggcatcggctcatctccgtaagggtcatccgaagatgaaagagcctctggttatgatagagcgatctcaggtgatgggtatgagtctataagagtgggagcgcttagaaagaagtctaataagcagaatggggctatagaggagctggcccactccaatgaggaacttaggagtaagctgtgtcagatacagaaggaagctcaacctaaaggcggaattaacactatcccgagaaaaaagttcactttaagatggtctgaagagatagattcccctctagaagagaaagaagcctattttaaagaaagaggaattgagtgttctgctgcagacctctccagggaggacgctgattatgatgatgatattagagaggactatgcagaccctctctatcattcattttaatcttgataagtgtgaggagtcaagctagagactttaaacaagctcacttgggaggaagtcccatgtgtatccttgtaaataatttttactttcttgtaatttttgagttgttttagttgtgtttgtggttctaaggaagaaaggaataacgtgaaggtagagtaaaaattcaaaacttttactctactgatggtctagagatcgagtacattggtcgagtgtgagtgatgtttaaaacccaaaaacttttaaatcattactttactcgaccaacagaagctacaaagtcttccagggagtctttcaagttacagaggattgcgggatttcctagagtttttctagtgaacagagaatacagagaagagacaagaagacattctgggacccgccgctaacgcccatgtcctccatgcaacagacttaaggacaggaaatctctcctcatctcttctcctccactcgacgtcaacaccatcactcgaccaccatccctctttactcgacctcatcacctcgttttctcctccacaaccccataaactcgacccatcactctcattcatcaccaccaacaaaccaaactccaaaccactcgaccccatacctcttgaatcaacgctcctttatctcctttactcgacctcgtcacctcctcctcaccacctcataaactcgacttcatttctcccacttctctcccataaaacactcgacctccaaacccatctcctccccacaaccttcactcgatcgccgcttctcaccgcctctccatcatcgctgcctgctcactctctccaaggaaacaactcgagctctccatttcactcactcgacctatgtcagcaagccgccttcaccacttctagctcataaccactcgaccaagggccatctcccaagtccattcatcactcgaccatcgcctcttcacttgatcacgtctacacaccatctaccatcactgacctctttcaaaccgcttcactatctctcgcctctcaaggtcactcgatcgcaagcacactccattcacacaaccaaggaatcacttgacctcgagttcaccaaactggcaaagaaaaaaaaaaaaaaaaaaaagttttttgtacactcgaccagtttactctgttggtttgtgtttttggttttgttgggactaacgtattaacgtttatctttgagttacatttgttttaaggtttcatcatgagtaactatagtggagaatcctcaatggatcctgattataatgtggatgaagctgagtcttggtccactagaccagagagagaaaaacatgtttacgagagtttcagagatgaatttgaacgtccgcagcacgacgtaatcagagaagagctgaaatcgccagaggaaagagagcgatgtcgagtagatatgagcggatcgatgaggacatcgaaactgagtatgagccagagtcatggcgcaaggagacaaagctgctgaacaaacctgacgaggttacagtggaggagtatatccgattctttgagatgaatgacttctggggaacgaggtatccctgctattagactttagcccagttggggttactggaggacgtgcaacatctgttcgagaagtgtcatctggatacactcatgtcttacccttacgctgcctgtaaggaggagacaattgagtttctttccacactgcaagtggagatgtatgaggatctcacggactttgagctggataccatggggttagggttcttgacgttctccgtggctgaacagcggtatcagctttcgattaagaaattggaagaactgtttggtttccctagtggaaagggaatcaaaaccaggtttgacagggaagagcttaaggatttgtgggctactattgggaacaatgtaccgctaaactctacgcggtccaagagcaaccaaatccggagtcctgtgattcgctactttcagcgctcggttgccaatgttttttactccagggagtctacaggcaccgtgtctaacacggacatggagatgatagatttcgcccttacagggattctcggtcgtacaaagggaaagaatgttctgagaggcgatctcaacgacgcctgccaccagtaattcctctgttgatccacctgtgtggatacaggaagtgggcattgacaaacggcaagaaaaaagtgagaggagcactatgcgtaggtggcgttgtgacgccaattctggaagcttgtggagtactgctcaaggaaccagggttagcaccgagaatgatggacttatatcatttgcgctgatgtgagttcttggagtatgacatggttggcgacttccaccgctacaggttcgagcattcattgattagaatcgccaatattcttctcccctgcattgacgctactaggattctcgagggaaggaacattgatttcaagcctgcgcttgaagatgtctatttcgagggcagtccaccaactgaggagattagtcacaccgaaggagttacaacagaagatgttgatgagacagataaaattgatgaggcggagattgacacgagcatgtatcatttcagtgagcatatacctctagcgagggaaagaaagagtttgagcgaagctcacaggaacaacaacaagctgcagaagtggtgcaagaaactggataagttacacgccaagtgcctcagggctatcaagtttcttaaggacaagcttagctgctcctcttccactacagctatcccgcagggacagctccctcaggacatgccctcgaggagatatgacgcgcttgaggcaagtcggcgtaggcctgagcctagtgagcaggagattccgcatgtccctgcgaggcattcatcatttgagcctcatgaatctgggaggaagaggaggaccacactcactcaatctagcagcacgagcaaacgacttctccagtctcgtagtttacgcgaccgcggtgctgtccgcagcagaagaagagaggtcgagtatcctcatagcggtgctggcccccccagagctgatgagatcgagtacccacctgctggagctgatacagaacatggcggctcgtctatggcctgtgagcaacgacaggcaaccattgacgaccaactccgttcattcttcgactga

SEQ ID NO: 163249 - DNA, 1532 bp, Arabidopsis thaliana landsberg
atgtcgctgaatcctaataccaaagcggaggtccgccggaatcagtacaaagttgcggtggatgcagaggagggacgacggaggagagaagagagcatggttgaggttcgtaaaatcaaacgcgaggagagtctgatgaagaagaggcgtgaagttcttgatgagttctcgggtttggttgatacgaagttggagagtttgtcggatatggtcgctggggtttggtcagatgatcttgccttgcagctcaagtacactactcaaatcagggcccttctatctagggcgagagatcctctaatcgacgaagtgatagattctggtgttgttcctcggtttgtagagtttcttaagaaagaagataaccctaagattcagtatgaggcagcttgggctctaacaaacattgtatcaggaacttcaaatcatacaaaggttgtagtagatctcaatgctgttccgatctttgtccaccttcttgcttcttccccaagcgacgatgtccgtgaactagctgtatgggcgttaggtaacattgctggtgattcaccgcaattctgtacatatgttcttaaatgtggggcacttgttccgcttctcaatcagcttaattagcataccaagttgtctacgcttagagaagtcacatggactttgtcaaacttgtgtcgtggtggacaggcgaatcccgcagcgtttcaagcccttgaacgattaattcattctactgatgaacaagtcttggaaaaagcttgttgggctctcaagtatctatctaaaggaaccgatgacaaaatccagattgttatcgaggctggtgttgtaccaagactcgttgaacttctgctccatccttctatacatgtgctaattcctgcgcttctcactgttggaaatatagttactggaaatgatctacaaacgcagtgtgtgatcgacagtggtgctttaccttgttttctcaacattctaactcacaactataagaaagatattaagaaggatgcttgttggacgatttcaaacatcactgcaggaacacaagaacagatccagatggtaatagaggctaatttgattgatccgttggttcatctgcttcaatatgctgaatttgacattaagaaagaagcagcatgggcaatttacaatgtaacttcaggttgtcatgatcaagtcaagtaccttgtggagcaaggatgcataacaccgttatgcgatcttttgttatgtgcagatccaaaaatcataattatctgccttaaaggattagaaaacattttgaaagtgggagaggcagagaagaacttaggtaatacaggggacatgaactattacacgtacctgattgatgatgcaggagggctagaaaatatgatggaacttcaggaccatgacaacagtgagatctatgaaaaagctgtaaaagttatggagacatattgggtgtagaagaagctgacgagacacatgccgggtttcagttcggtgtgaaccaagctccggctccttctgggggattcaacttcacc

SEQ ID NO: 163250 - DNA, 3321 bp, Arabidopsis thaliana landsberg
gtgatcaccatgacttttctctttagtactctccagctgtctcttttctttttggcccttgtaatctttggttacattttcctcagaaaacaattgagtagatgtgaagttgatagctccacgattcctgagccattgggagctctgcctctattcggacacctccatcttttgcgtggcaaagaactcctttgcaagaaattggctgccatgtccgaaaaacatggtcctatcttctccctcaagttaggggtttatagactgattgtagccagcgacccaaaaacggtgaaagattgtttcaccaccaacgacttggctacagcaaccagacccaatatagcctttggtcggtacgtaggctacaacaatgcaagtctgactctggctccctatggagactattggcgtgagttacgtaagattatcaccgtccatctattctcaaaacagagtatagagatgcttggtcacattcgttcttcagaagtaaacacgttgatcaaacacatatacaaagggaatggtggaacttctatagtgaagattgacatgttatttgagtttttgaccttcaatataatccttaggaagatggtggggaagaggattggtttcggtgaagtgaatagcgaggaatggcgttataaaaaggccctgaagcattgcgagtacttggctgtgattcctatgataggcgacgttattccatggttgggatggttggattttgcaaaaaattctcaaatgaagagactatttaaggagcttgactcagtcaacaccaagtggctccacgaacatctcaagaagagatcaagaaatgagaaggatcaagaaagaacaatcatggatctactgctagacatcttaccagaggatattgtgataagtggacacgtacgcgatgtcattgtgaaggcaacaattttggtatgcacatataattttcacctctcgttaatttggatatatatgttagaaaatctcacaaacaaataatttatgaactaatgtagtgtttatatgagaaatatatatgacttaattcaatcatggtttgaaatgaatgtataccaacatatatgttctgtttcttgttgtaggctctcacattaacaggatcagacagcacatccatcactttgacatgggcggtatcgctgctactcaacaatccagctgctttaaaagcagcacaagaagagattaataatagtgtcggcaaaggtagatgggttgaagaatccgatatacaaaacctcaagtacctacaagctattgttaaggaaacgcaccgactttacccgccggctcctctaacaggtcacaaatcaaagaatctttattgtcattataattcttattttatgaccttattaatcttgtaaatattcaacctaattggttataaaaagtgatgaatgattaggaatccgcgaagcacgtgaagattgtttcgtgggaggataccgtgttgagaaaggcacacgcttgctcgtaaacatatggaaacttcatagggatcccaagatctggcctgaccccaaaacctttaagcctgagaggttcatggaggataaatcacaatgtgaaaagagcgactttggatacattcctttcggttcgggaaggaggtcgtgtccgggggtcaatcttggtctaagagttgtacactttctgttggctagattgcttcaagggtttgagttacacaaagtgtctgatgaaccactggatatggctgaagggcctggtttagccttgccaaagattaacccggtcgaagtagttgtaatgcctcggctcgacccgaagttgtatagtttactctaaaccattgtatactcgataattattgggagcttcttgtgatcatgcctttctgattttagacatgtatggtgtcaatggtttaaaaaaacaatttgggaaaggagagacaaccatattggaacaactttttatattgaataatattgtattgaatgctgtataaatcatatacatgcacatattgaaagaaaagttagtaaaaaatttagatgaaagcatatataatggttcatttatttgtttagggaaaaaaagaaagatctttgggagaaaaggaatcacattgtaagatttttgtaactgagaaaaaaacaaaagttaactaagttagggaatacaaacgtaaatgttaactttaattagtttatttcttatcaatataataattttgtaagatatacattattccgatgatcatggtgttaagaacaataatctaacggtggctagaaaagacaaaacaaaattaggtacttggtgcaaggaaacgattgaaccaaaattttgtggggacaactatttttactatcaaaagtaatcaaattacaatgagaatagttttttctaaaacttgactcggggcatgtgcaccgttcttctctcactacgtctgctcatgtatgtatgcgagttgatgagtggagaggtaaaataagcgaagcgcaaaacatttcaaatgcacttcacaaatgattaaatctaagtaagccgattatgttaaatgtcgatcccgactctagaaaatgtataagtataagcataggtctagaacttctatttaaagagaaaaaagtttgcaaacattcgtgttaatttctttttgaaaatagtaaaaaattgtgagtcaccactattaatggagaaaaaagtttgagacaaaatggacaactatccatagatatcctttccttagacataatactcaatttttacccattaaccctaccatgaagttttttcttcgtcattgatgtatatttttgcatatgtcaaataaaaacaaataagaataggtatcaattgacttgctaactgctaagacatgaagtcaaaacaaaaaaagcaacctgaaagtatatatcttgcaaaattctattttcacatcttgcggtttccccaaatatggattagctaaatttagagttttctctaagctctctatatatgaatccacttttctcctaaatcacagaaacaaaggtgtcaagaagaaggatcaacatattaattgactaaaaatgaaggcatggatgataatcttgttggtgatttgtgtcgctgtggtggtggtgcaatcagaggctcgcaaaggtcgaaagtatttaaatccaggcgtgcttgaccggtgccgtggtcctaatcctccagcgggatgtcatcctcacaattcccaccataaacctcgcgtccctgttcacaattatagtcgtggttgtagtagaattacccggtgcagacgagatgcctaggtttaacctcacatga

SEQ ID NO: 163251 - DNA, 1529 bp, Arabidopsis thaliana landsberg
atggcgaagaaagcacttttgataggaatcaactacccaggaaccacggtggagttacgtggctgtgtcaacgacgtccaccggatgcagaaatgcctaatcgagctttacgggttcgccaacaaggacatcgtcataatgatagacacagacaaatcatgtatccaacctacaggcaaaaacatctgcgaagaactgaaaagactcatcgcatcagggcaatctggagattttctggtctttcattacagtggacatggcacgagaatcccgcctgggatagaagactcagacgactctacagggtttgacgagtgtatcactccgtgcgatatgaatctaataaagggtatgagatcaaaagtaatcgctttttgtatgggtttgacgtcttcctttttttttttttttttttttcatgtttctttcttcgagtacatacgcattcatccaaacaaaattcttggttaaaacatagccctcagctgcataaagaaaacagagcgctctgtttcttgaaacagagcaatacgtttttgatcgcaatttcgatttacctcaaatcttttgcgtttttggataagttcatagagtttgaaaataacaagtcttggtcgtttttgtgttaccactggttttacatcgatattatgaattttagtgtttacgattatttttttgttttttctaatcttttttttttttttttttttgcacaaatgtgtttgtagaccagcaatttagagaaatggtgtcacgtgtaaaagaaggttgtcagttgacgataatctcggactcttgtcatagtggtggtctcatccaggaagtaaaggagcagatcggtgaaagccatatgaagccggtcgataaagttaaggagcagatcgaggaaaagccatatgaagcagccaaaactcgggattgctagttacttccttaacattgtgatgaatttgttagcgacttgtggagtctcaaaatctcagagagaccgtggaggtggcgaagaaagctttagaggagagatagaattagagaaagacgaaacgcttgatataaaaacaagatatctacctttcgaaagctacttaagtcttctcaaggaacaaaccgggcaaaccaatatcgaacctgtgagaattagacagacacttctcaaattattcggtgaagacccaagcccgaatcgtcagagaggtttaagtgacctaggaaactgcgaggttgatgcaggtgattctggagcttcaagattgaatgccgttaccgacaatgggattctattaagtggatgtcaaacagatcagagatcagaggatgtttatgtgacaagaactggaaaagcttatggagcattcagtgatgcgattcagatgatattgtccgcgccgagaaaggataagaagaagattacgaacaaagaattggtttccgaagctagagtgtttctcaagaaacgggggtatagtcaacgaccaggcttgtattgtcatgaccgttttgttgataaaccatttatatgctactaa

SEQ ID NO: 163252 - DNA, 8950 bp, Arabidopsis thaliana landsberg
atcccacacgagagaaacgatcaccatcgtgttagatctccatcatcgaccatcttcccttcacaagagagaagtctccgccagcttgtgaggccaccatgggtggcagatacaaagctcaacaccgagtcttgtatcatcttggtattagagcgcagttgcgcttcttttgccaggttttatcgtttctttttgtctgccttactttctgaatctgtttctgcgttagtcttgtttctgttttatttttaaaaaatttaaaaaaaaaattgtatttcagtttcattttattccgtgttaaataatttatttttgagtttcgtaatattaattaatatatatatatatatatatattattgttaactttgtactacatcagcaagtgtattaggaagtgattcaacaagtcctaggtttcttgtttttgatctttcttttctattgctgtggtacgttgatttttttgttgtttttgtctaagcataggtcagttttaggctatactatgggagaggccgcaaaaatttcccaacacgctgtaatgcaaatgatggctactttgatagaggagttaacgggattcaggcaacagataggtcgtttggagcagccacatcctagggttgaattggggcaagaccaggctcgtgggaatgcccgcgaagaggcggaggagtttcctgagttggatgatgatgatgatccaccacccgaccctttgagacgccaacatcaatggagagaagatccattgatgagaaaccgtgcacgaggagtagaactgcgtgaaccgaaccgagatatcaaactaacacctcctagttttgcaggaaaatctaatccagaggtgtacatggattgggagcgacggatggagaacatttttgaatgctatcggtatggagaatctcggaaggtatcctaagcagccgctccgctcaccgaaaatgctttatcttggtggataggacagtagctaataggaggagacaaagatttggtcccataagcacttggagagacatgaagtacctcttaaggttgaggtatgtccctgaccattatcatagatttacaaaaacgttttagaaaattatctcagggaacaaggaccgtagatgagtactttgaggagtttgacaagctcatgaacgtcttggagctagaggaatccaacgaagctctcatggctaaattcatagacggattacaaaggaagattcaacgaaaggtagagagagctcaatataatggactccatgagttgctacacctagcggtacaagtcgagcagcaaataaggcataagacatccttaaacacccgatccagaacaacacgccttggaatgcaagcaacaaccgagccatggaaaaaggcaaggccgtagagagtgatcctaggttcaagaactagtcgaataaggcacctaaaaccccttggcccgaaccaggtaagttccctagtactaatcaatctcgttctcatgacattacttctttcaaatgttaaggtaggggacacatggcgagagaatgtccgaaccaaagggtaatgatcctcactcctggtggtgactatgagtcacaagatgagtaagaggattctgatgagcatgaggacgttcagtatccacatgtaggagagctccttgtgattcgcaggacattaagcgtgtttgtcaaccccgaagagaaggtgcaacgagaaaacatcttccacactagatgcactatcaagaacaaggtatgtaacttgattattgatgaaggctcatgtactaatgttgctagcaagtatatggtagacatgttacgtgttcagaaaacaaagcacccgaggccatacaagcttaggtggctcaatgacgatactgaactgaaaatcgctgaacaaatgactgtatcattcagtgtgggaaagtaccaagatcaagtcgtttgtgacgtagtgccaatgagagcgggacatcttctccttggacgaccatggcagtttgaccgagctacatgtcacaatgggcgtaccaaccattactctttcaccttgaatgaccgtaagtacaatctcgcccctcttagtccctcaaaagttcatgtcctacaaattcacatgaacaaggaggacgaggtaagaagttctagtctttatttaagctctaaagatgtttgtaaaaccatgagtgccaagggcaccgtgctactaatggttttcaaagaatgtcttagtacagggataggtgatcctgagctaccctctgaagtactagctgtgctagatcggtacaaagacttattcccagaggagattccacccggactaccacctattcgtggcatataacatcagattgatcttgtaccaggctctgctttacctaacaagcccgcctacaggatgaatccagaggagtctaaggagcttgagaagcaagtgcgtgacctaatggacaaagggtacatcacagagagcctcatcctgtgtgcagtacctgtcctattggtcccaaagaaggatggcacgtggagaatctgtgtagactgccgtgcaatcaacaatatcaccatcaagtaccgataccccattccgagactagacgacatgttggatgagcttagtagtgccatcatattttccaaaattgacttgaggagtggctatcaccaggtccgaatgagagaaggagacgagtggaagacagccttcaagaccaagcaaggtctctacgagtggcttgtcatgccgtttgggctaaccaacgcgccaagcaccttcatgcacctaatgaaccaggttctaaggttttttattggtaaatttgttgttgtttactttgacgacatacttatttacagtaagagttattctgatcacattcaacacttagagttaattctcaaaacgcttcggaaggaaggcctatatactaacctgaagaagtgcacattttgttctgacaagtgtatgttcttaggttttgtagtgagtaaacagggactacaagtagatgaggagaagatcaagccaatccgtgaatggcctactccaacatctattgcacacgtccgtagttttcatggactagcgagtttctacagaaggttcgttagagactttagtacagtggttgcgccaatgactgttgtgatcaaaaagaacgtgcctttctcatggggagaagctcaagataagtctttcaacacgttgaaggagaggctcggccaagcaccggtcttaaccttaccagattttgaagtaatgttcgaagtagagtgtgatgcttcaagattgggaattagagctgtactacatcagataaagaggcccgtggctttctttagtgagaaactaagtggagcagcattgaattacccaacatacgacaaggagctttatgctctggttcgagctcttgagacttggcaacattacttgttgtccaaggaattcatcattcataccgatcacgagactctcaagcatcttaagggtcagacttggcttaagaggagacatgccaagttgttggagtttgtagagacgttcccatatgtgattaagtacaagaaaggaaaggagaatgtggtagcagacgctttgtctaggagacatgcccttatagctactatggaggctaaagtgatgggttttgagcatatcaaagagttgtacaaagacgaccctgagttaggagaatgctaccgagagcatggtaaaggactttacaagacattctacttgcaagatgggtttctattcaaagacaagcggttgtgcatccctcaaggtttaatgcgagagttgatacttactgaagcgcatggtggaggtttgatgggacactttgatgtagacaagactttggccaaggtaatggagcatttcttttggccccacctcaagaaagatgttgagaggttttgtgcccgttgcattgtttgccacaaagccaaatcaaggtcacatcctcatggtctctatttaccattacctattcctaacgccccttgggtagatgtttctatggactttgttttaggattgccaaagattaaacacaaggattcaatctttgttgttgtggaccggttctctaagatggcacacttcatcccgtgtgacaagaccaatgacgcgactcaaaccgcagagttgttcttcaaggaagtggtacgcctccatgggattccaaggaccatcgtttctgatcgtgacaccaagttcttgagtcacttttggaggactatttggagaaagttaggtaccaagcttctattctcaacaacttgtcatcctcaaatggatggataaaccgaagtggtaatccgaactctctcaactttacttagagctactcttggtaaaaatatgagcacatgactagattacattccttttatcgagtttgcttataatcgtcttgttcactccggtacaaaactatctccttttgagatagtctatggaattaaccccttgtctccattggatttagtacctttgcattagaaagaacaggtttgccaagatggtttgagacatagagaaatcattaagaaaatacatgagaaggcgaagccgaacttagaaaaaaaggccgccgaaaataaacgtaaagctgatcggggatggaaagaaatgttatttaaaccaagagattaggtgtggctacatatgcggcctgagaggtttcctacacaaagagcatccaagctagcaccaagaggcgacggtcccttcaagatcctcgaaaagatcaatgataatgcctatcgttaagatctaccaagtgaggtaaaaatttctcacacttttaattttgctgacttgtttgcttattgatccaggagattcagctttgaggacaaaaccttttgaagacggagggaatgatgtggacatcaaccttacttcacataccgttgaactacatcctgtaacagaagtcccggagggtatcatgacacgttcaaagactaaacaattgaagaaaatgttcaacttagctgtgcaagatattttgagctccctagagctaggagtaaactggtccgtagcaccccataccggatatgatctaatagccgaagaagagcttgctgaagcattcacccaaatgattcttgaacaaattactcccccaggtatgaaatatcgtttgacacgttagaggacctctagaaaccaagagaagactttggagcttcaagagacgaacaattcaagtgtcacatctcaaagtgatcgagagaaacaagatcaagaacaagacatcaaggacatggaagagctcgaagacagtgatcaagctactcaagaggaactccaaaaagacccgtacttcagggaaccagccagcaaacgagcacaagacctgattccagaagtacctgaagaagtactacaggaagtgactcaggcgacatttattgggcctaaaaggcatctaggtaaggtttattcagtttatattatctttgcaagtccacacagcccagacaatggctagaatcgccctcaatcgtgctcctcaagagaatttaattagtttccttattttagcttattttatttcttaaaacaatggtttttgtgttttgattttatttgttttcttgttgcatttttacatttaatttcggccctagaactagctgaaggactcttataaagtccctctgcagcagttgtacgatttttttcacctttgattatcaatcaagaaccgcattttctcacttcttctctttaagtgttcttaatagaataagcctcttctttgtcttgagtgtgcaattcaccaaggccaaattcgtgtactgtatcagagacttatcacatctctgtcgtgtacttcaatccgccagcacttcccctataatagatctcatacgagagaagcgatcgccatcgtgttagatctccatcatcgaccatctttccttcacaagagagaagcgaccaccagcttgtgaagccaccatctctattagatacaaagctcaccaccgagtcttatatcaggttagtattcatcgatcttgactccttattcatacctgatattgagaccaatttgataaaaaaaaagaatgtgttcctctccccttctaaaaaaataataataatgagagattgataggattttcagatagtgtataggggtaggaatatttactatgattccattattatacattatttggaatgatcaattacaaaagtataaaaaaatgccgagggtgtcgatccagtatgcgagttcccctttctttactctctaaaaagaataagtctgggggagagaaagaataccaaaaaataaaaataaaatgaatggtcgatttgttatggtatactacaggaatgagtctggaaggttcttaaacattaacttgattgatgagacccaacaatgataacctagtggatatagctgagtgctttggtatggaatctaggatgtagtgtgggctagtggaaaattacatggtggtcaggatttgactagaactctttagtgcatggatttggtttgtatgctcagggtaataagctagagagattggaagtttctacatttttcaaacctctttcacagattcaatcttttgttttgcttgagggcaaacaaaggcgaaccccaccaatatttaactatacttctcaactccgcaagctgaagagaacttttggccatcagaagaaaaccttaaaaggtttagctcagactgaagatcctacagaagatgactggtatgagatgagaaaaaaatttagatggcaaagcagagtcatagaggggttatcttcaagggtgatgaagctgaaagatcaactttgagatgtttgaaaaaagagttaataagttttcaaatggtattgacccaaagaaaatggaaactgcactagctatcaaggaggacgaagatttcacaatagaatggtttgcaccagaagatcagaaaggagttcacttagaggaaagaagcctagagaacaagttgttgagtgaggaggaaattcctattcgacttattttctaggagcgcctaaacagcccacaacccctctgctgaagaagaacacttgattcatgattctgttgttgaagaactcctggagctctggattggatataaagctcaagaggatacaattggaaagttaactcacaagatggaagagttaaacagcaccattctggaccttcaagaaatggttaaagactaccccaactttgaaattgaggattgctcaaaagagcctggttcagaataagaagactactctgctgatcaaaaagaggcttattttgaagaaaaatcaaatgagtactcatcataccatatgtcaagagaggatgcagagtatgaatcaagctctgaaaattcaagcactgaagatgaggacttctctgttcctctcttcaaccttttttctaactaagttctgtaagagtcaagcttagtgacttaaaacaagctcacttgggaggaagtcccatgtctatccatgtatataactttatatttttcttgttatttttgaggtttttgtttaagtgtttcaggtttatttcattgaccattatgaagtcaacggtcgagtaaattcaaaccatgtcaagaaagatctcaaccgttgatcgagtagaatgaggaggattgttttgagccgttgatttgaatgatcaaatgagagaagcatcatcaccgtttgatcgagtgatttcttgcgattcattttggtccgtttgatcgagtgcttaaagatgaagcatttctcaccgtctgatcaagtgaagaaaccaaagacactctcttcgtagacaccgatgccttgtgaccattgaaacgctgttgtccctttgtcttcttgtccccccccccaataatcactttggtccccccattgcaattcccgaactcaacaatctcatctctccacctcccataccaaagcattctcaaatccttataattctcactctttacctccttcacttccctttcttatcaaaaacttttcgcgattcatttgtttcctccattgtctaatctcctaacctactgaattttggttttgagtttcccccacttttgttctcaatgatgaacatgcgctcgcttttgtcaaggatttggaacaaagctctctccccatcgaagaggtacccaacaccttcttcgcatgcagcagctcgaggactttctgaatcgtcacccttcaggtcgagcaggagggaacaagcaagtttcgagatcgatcacagtgaatcgagccaagaggaggaagcgatgcaagaagaagagactttcagctctcccgctggaaatactcgatcccgaaggtcgagtaagcactctacaagggaattctcgaggaacaaatcagacatcactcgaggaaagaagcccgtggggaggaggttggaactggtagatgaagactccgaggaagaaatggcttcaccagaggaagatgatcaaacagagaaaggaggcaatgatgatttggaatcagagaagtgtgcaactcgaaacgagtactacaaactactgaagcgcaatgagtttttaggaactcgataccctcatcccgagaccatggagagactcggcatctatgatgatgtaaactatatatttaagcagtgcagcctgaatattcatatgtttcggccaatggaggggtatgaggaagagaccatccagtttctttcatccgtggaattgttcttatatggagagtcaaaggacgatgaaatcaggtcagacggaagtttgggatacttggagttctgtgtgtatgacgtagagtttcggcttccaatagagcacctcgagctgatgtatggatttccaagcggaaaagacacaaatcatcgttttgacaagagagagcttcagtcattctgggccacactagggtctaagcaaaaataa

SEQ ID NO: 163253 - DNA, 2500 bp, Arabidopsis thaliana landsberg
aaccttaaccttaaaccttaaaccctgaatcctactttaactttcgggtttttatgcgtttctagtttttatattgaatgaaaaacaaaacatcaagtcgatttggactacaaaaacacaaaccaagcttcttcatgattctcaaagctatgatggtgaagccgaagttcttaaccgtttttggttttgaatcgtataacaaggaagcaatactttactcttcggcatctcgtcgaggttctagttttatattcaatcatacacatgacatctactcatatttccctctgaaatgctaactcagattcttcttgctcttcaaatctttgatggtgtagcctaagtccgtatgattattggttttggatcttctaaatgggaaagataaatttaggttcatagccctggttgtggtgttagccctaaaactcaatcatccacctatcatcttgagatatttgattccaaaacgcttacaaagattttgcttactttttaaagaatatttgctcctcaacactaaacctaaaaccttaagccctaaacataaatcctacacctaaaaatccaaaaccctaaaacctaaacccaaaacccaaaacccaaaaccctaaactcttaaccctaaacccttaaacctaaacccaaaaccattgtccccaaactttataaccaaaatcatactttagcttctggaagcctattgcggttctagttcttatgctcaacgatacacaaagcatctagtcatatttggctataaattccgctaaccaagccacttcttgattctcaaagctttgatggtgaagtcaaagatcttatgagtttttggtttttaatcgtataataaggaagcactactttacttttcaagatctcattgaggttctagttttatattcaatcatacacatgacatctattctgaaacgctaaccaagattcttcttgcttctctaagtatcatactatatttgatcctaaacactaaacctaaactctataccgtaaatcccaaaacctaaaatccaacccctaaaccctaacccctgaaccctaaatcctaaacccgaaaccatacaccctaaacaataaactcttacccgtaaacccttaaacctatatgcagaaccaaggaggttacaacaaaggtttcaacaacttcaaggagaaccatcccaatctgtcttacagaagtacaaatgttgcaaacccgcatgaccaagtctacccttcacagcagcagaatcaacccaaactctttgttccatacaaccaaggtcagggttatgttcctaagcagcagtatcagggcaactatcagcagcaacttccaccacctgggttcacacagcagcaacaacaaccagcttcaacaactcctgattcagacttgaagaacatgttacaacagattctccagggacaagctgcaggtgcaatggatctcgccaaaaagatggcagaaatccacaacaaggttgattgcactttcaacgatctgaatatcaaacttgaggcacttacctctaaggtcagatacatggaaggacaaacagcgttaacttctgctccaaaagtaacaggactttcaggaaagtccatccaaaacccaaaagaatacgccaccgctcacgctatcactatctgtcatgatcgagagctgcctactcaacatgtgtccaactcaatcactgaggacagtgatgttcaggaaggggagtgataagtgtgtattttgcatgttttgagcatgcatttgttatcattttagcatcatatcatcactgttttataccatttcacatcatttgtcatcactttgcatgtttaggatagttttgcatgcatgttgcatatttgtgttgttttcaggtgatttggagctgtcgacgagctaactggaagaagcggacctgatcatgacaaaccagtcaacccagaggtcgagtaggagcttcaagatctcaagcagaccactcgacccccaggtcgaagagaagacaccaccactctatcacatgactcgacccctaggtcgagtgtcttcatctccatctcttgaccaccactcgatcacatcactcgaccccaggtcgagttacttcatcccattgccagacctctactcgacctcatcactctacctggaagtcgagtatcaccatcacaccactcgactgcatactcgatgacaagcttcagagccttcttcattccgcactcaactagacactcgagcacaaggaagaaaagaagactccagctattcactcgacctcccacttgaccacatggatcgagtacagttcttaatccgtcccaatacctcgtcgttttgagtattagggtttcagaatatttggctataagtagcatgtacttcacattttcgcagacaagaagtttttatctagttttatttccgcagaccttgtgttctagactttttgtaatccggatttctctttatctattcagtattcagtattcagtt

SEQ ID NO: 163254 - DNA, 2829 bp, Arabidopsis thaliana landsberg
tggaatatcttttctctcaaaagaggccagaaccggtctgatgtctgctggactgttacgtgcaacatctgcataacccaaacaggaagatcaaccaaacaaaattgatacaggcagttcacggactggaacagaacttatccctcagttcaccaatacttacattcaaggaagggtatcaggtcaactagggctgtgtcatcagcttctagtttgtaaggcttgattggcacgctattttctggctgaagggttgattcaaaggcatttgcgctaacaaacagaatcttcttcggatctctgttcagctttgacagatcctgcagcaggaattttaatagttagttgagaaacagttactcgggcaagtcagaaagtatgctttgacaagataagctagctgcttacgtaccctatagtgctttccattttcatatttagtagcgcctcttgctagcttataacgtatgtagccatttgggtctaatttctcacagaccgggagtacatactacaagtaatgaaacaagcgttagtagtcgcattactatgatattacaagcaaaaaaggagaaaaaagaaaaaccaattgggactttaccatctccatctggtcagaatacacgacaatctcatagaatttcccaagatgctccaagaatgcatcgacacctggtcttttgaatgtcctccaccctctttcccgctagacatttttgtaaatgaaaaggcaggaaaagttaaatacagcactacttaagaaaacaaagtagttcaccagaactgctttgttcataacatagatactctgagtcacatattcacatctatgatgcaagtattttgatgatcagcaaataaatgaaactgttaccttccagtcagtgtaaagcagtgtctcatttaaatcaagaactagagtgaagacatgctgttctgcggggtgcagatccggaagaagcttttccgagagaggttccgtgaagccctataaggaaccagacaaaaaataagaattatagatgaaaaaagaagatgcaagaaaaagaaaagttgtgtctcggtgaaaggacgtactttcacttgttcctccacaatttccctaagctctaaatacttatcaatggctctagcagaacctgatcaaaattcaagcaaaccaactcatgctatgcttaattaaagacatactattagttatgatgacagaggcgcaagaactatacctgtcattgcagcagagtacaacttagtctgatatttctgcagaaagatgagtataaagggtattaattcagagaagcttataaacattacctattcctactaaataaccttgtactaaatgcctattgctttctgatcaactggaatttgagccaagacctttccgcgcccaaaaggtgttcgatgaaatgtctgaaccactaattccagagattcgtggccctgtaccaaagtatttgataagtgtgtattttgcatgttttgagcatccatttgtcatcactttagcatcatatcatcactgttttacaccatttctcatcatttatcatcactttacatgtgtaggatagatttgcatgcatgtcgcatatttgcgttgattttaggtgatttggagctgttgactagctatctggaagaagcagacctgatcatgacaaaaccactcgacccagaggtcgagtaggagctttaagatctcaacagaccactcgacccccaggtcgagtagaagacatcacaacttcacctcaccactcgaccacgaggtcgagcgtcttcatctccatcacctgaccatcactcgatcacatcactcgaccccgaggtcgagtgtcttcactttcattgacagaccactactcgacctcatcactcaacctggaagtcgagtatcacctgaccatcactcgatcgcatcactcgaccccgaggtcgagtgtcttcaccttcattgcaagaccactactcgacctcatcactctacctggaagtcgagtatcaccatcacaccactcgactgcatactcgatgacaagctttatagccttcttcattccgcactcaaccagacactcgagcacaaggaaaaaaagaagactgcagctacacactcgacctcccactcgaccacctgggtcgagcacagttcttaatccgtcccaatactgcgttgttttaagtattagggtttcggaatatttggctataagtagcatgtacttcacattttcgcaaacaagtttttatttagttttattccgcagaccttgtgttctagaccttttgtaatccgtatttctctttatctattcagtattcagcattcgttcttgatttcttttacggttgttcatcctgttatcatcttgttgttacactgttgttatcatgttttcaacttgttcaacgtctatgctttctgctatgatgtctgagtagtgaataggtttctaaggatgggttagagtagtgtagaactctcagtatgataggtggttgagtattgattgatagatcccttctagattagttgttcttaatgcctattgctttctgatcaactagaatttgagcccagacattttcgcgcccaaaaggtgttcgattaaatgtctgaaccactaattatagagattcttggctctgtaccaaggtattggttatagggagcgttttagctttaacttgttgtttcgtaatgcatgttaggtaagctctcgtcagtggtgattgagtccgggactagtttaacttgagggtctttgttgcggtggcaattagactactacaaaaaaattgccatttaccgacttcagt

SEQ ID NO: 163255 - DNA, 6001 bp, Arabidopsis thaliana landsberg
  unsure (1)..(6001): unsure at all n locations
atgtatactgggatcgatcaatccgactccgagatcgatcaatctgagtaagtgatttattctcttgaacgggaaattgccaattaaccgaactcaaccagattgaaccggagtcgccagttaaaaacggaatcgataaaaaacactcgattttcacaaacttggtgtctgttccactcggttttcggtccttttattaaatattgtgttggttttcttgatctacaaagatatgtgttcgaaatcccttttttttattccatttttacaaggtgaaaaatgtctaattcttgaaattccttgatgtttatgagttgtttgatgctagattcttgtctaggatagtttggggaacctatttgtgccttaaattgctggattaaggtcaaatttgaagattgaatttctcaccattgttgcaaattgataataggtttttaagatcaattaaacctaaagcactatcatgtcgttgtagtgctgaaggttgtcaatccaaatgggtgtttctctaacacccggaacacggaaccaatcacccaattcacaatggtcaacaatcaagtctccagtaacgtagttgatacagaagggaacccaatccctccaatccagacagatgctcctgaagccgctgctcccgcgaccctagcagaactgaggagtatgatggctcaacttcaacagaaggtaaacgatcaagaacaagcaaatcggtccttagcgcagcaactcgaagcagctacctcccaaggacaaatcaggactacccgtttcggcgcgaggcacattcatgattgacgggcggctgcagatctcaatcccacatggctcgtattccaaacacctggcaatactgcaagacccgtccgtagaacggcatcggaaatcggacgggaccgaaccgagccggcaattttgagaaatcgggaaacagatcgaaacgaaccacaactccctcctctccgagcagagattaccgaagccgatcatatcgacgcttcggataatgaagactccgaggagaacgttagatgggctgaagaatacgccagagagcaggaaataagctccatcaaactatccctagccaaggctggacacgagatgaagctcgtaagatcccaaatgcataacgcagtttcctcggcaccgaacatcgaccacattcaggaagaatcccactacacgccgttcacacacaagatctccaatgcgataatctcagatccagggaaactaagaatcgagtatttcaatgtggtcttccgatccgaaagggcatttaaagtcgtttatcatctctgtggcccgagccaaattcagaccagaagaaagagacgctggtctctgtcacctgttcgtcgagtatttgaaagggccagccctggactggttctcgagactcgaaggaaaattctgtggatagttttcaggagctatcgactcttttcctaaagcaatattcggtgctaatcgatcccggcacatcagacgccgatctatggtcactatctcagcagcctaatgagccacttcgagatttcctcgcaaaattccgatccaccctagccaaagtagaaggaatcnnnnnnnnnnnnnnnnnnnnnnnnnnnnnnnnnnnnnnnnnnnnnnnnnnngaatttcgaaaggaactaaacttgtccaaaccaccgacaatccgagacgcccagcatcgagcctcggattacgtatcccatgaagaagagatggagctactagctagaagacacgaaccgaccaagcaaacgcctcgcagcgataaacctcagaccggcgctctgaaccacaagaaaggtgcccaaggcgggacattcgttcaccatgaaggattaaatttttccggagcccataattaccaagccgattcaccccgaggcgaagccgcccgaggccaagggcgaggccgctgtcgaggtcgcggtcaagaatcctacacttggacaaaggatcaacccgcaggaaacgagcaagaatattgcgagttgcataagagttacggacatcatacttccagatgtcgtagcctcggagcaaggttggctgcaaaattcctaaccggagaaattggttgaggtttgaccatcgaagatttagaagcagaaaaaggtaaaaccgagcaggtcaacgctgtggccaatcccgagaagaccgcccccgcgcgaaccccgaagacctaaaagaggccggggtaatcgcgaaaaagacgacgatgaaccagaagctgctcggggaaggatcttcacaattttaggggattcagctttctgtcaagacacggcagcatcaatcaaggcatatcaaaggaaagccgacgcgaatcataattggacgcggccatttaatggaccaaatgacgaagtaacctttcacgaaagcgataccaacggtttagaccgtccacacaacgatcccttagtcattacactgaccatcggtgatttcaacgtcgaacgagtcctagtcgacacgggaagcacactggacatcattttccttacaactctgcgagaaatgaagatcgacatgacgcaaatcgttctaactccacgacctgtgctcgggttctcaggggaaaccactatgactctcggaaccatcaaactgccagtccgagccaaaggggtaacaaaaatcgtcgatttctctgttaccgaccagccgaccgtgtacaacgcgattatcggcaccccatggctaaatcagttccgagctgtcgcctcgacgtatcatctatgcttaaaatttcccacaagcgacggcgtgaaaaccatctggggaaaccagaaaaatgctcgcatttgcttcatggcagaacacaagctcaggaaccccgtcactgagtcgacggccgacgcgaatcataagaaggccaagcttggccgagccgaagaaaagtcaatctccgagcagttatagcagctaaagatcgaagaagctcgaaaatctacgacaccaactcccgatccgatcatctcaatttgccttgacgacgcaaagcccgagcgatgcgtagaaatcagcggagatgtgggagaagaactaacaactgaactcaccactttcctcaaagaaaacgtcaatactttcgcctggtccctagaggatttgcccggagtaagtgttaacgtcgtatcacacgagctcaacatcgatccaacttttaaacccatcaagcagaagaggagaaaattgggtcgggaacgagcagaagccgtaaaggccgaggtagaaaaattattgaagatcagatccatcaccgaggcgaagtaccccgactagatcgcaaacccagtcgtggtaaaaaagaaaaacggcaaatggagagtctgcgtagatttcacggacttaaacaaagcttgcccaaaggatagtttcccattaccacacatcgatcgcctcgtagaatcaacttctgaaaacaagctactgtcgttcatggatgcttttgctggttacaaccagatcatgatgaaccccgaagatcaagaaaaaaccgctttttacacagagcaaggaattttttgctatcgagtgatgcccttcggactcaagaacgccggggcgacctatcaacgcttcgttaacaaaattttcgccttacagatcgggaagacgatggaagtctacatcgacgacatgttggtaaaatccatggaagagaaagaccacatagcccctccttctagcgccaaattgtgagagtcgcacaatagaatttgttttaagggtttcttcaaagaacggatctttgtgagattctcaaagaacaacaaaattctcaattaccgcggacggtgttcttgattttattaatgagaaagtaatgattttatcgtacaagtttgatagaatatgagaaataggtgtttttgccttcaaagtcagagcgtttttgatagcctgaagttgagagcgttttttgtgcctctccctgtgaggtgcttttttatagggtccgagaatatcacctcttgcgatattctcggaaaatccctctttatctttatcttgttgaaagagattgtttttatcttccgaagattctgggatttctgtatccggtgatatcttcgaagattatctcttccggggttttcggaggtgaagtgttttgaacttacatcggctaagtcttttgaagtttttcctcgtctaactcgagacctttccgagccgtgattaagctggcctcgggtcatgatcgggatgctcggtccgcggtattcgaagacaagctcccgaggtgtcttggagcccgcctcgggannnnnnnnnnnnnnnnnnncccgaggcgtttcgaggtcgggtcgggggaccactttatgagtgctccgaagcgttctcgacatcgcctcggtatggattcttgacgaggcctccgaggtgttttgtggtccggttcgggataattcatcgatggttcccgaggcggagatgtggtcggctcgcttatcctgggtgaaatccgaccctaacaaagttcgaggaagttagagcggcaatattccgagctcgaaatcgtatgtggaaaagcgtcaccaaactacgagtcgcccgcattatgggaaaagtcaggaaatcttttgtcaacttcgcctccaggcttatgaatctaccgcctcctcaagctcctgtctgagaagaaaatcctcttccttttaacgcatcagccctggcgctaactaccacaacccccggttcttctgatatcaatcaggttctcgacgagaaccaggtcgctcaagatacccagaacctgctacttattgaaggggcaaaagatgctcaagttctagtgatcgttgacaatgatcaggctcaagttctgttgttcaggtagtcgcacctcaagctgtacaggtcaatgcgggtgactgacctgttgttgctcaagtcactgcgcctgagaatacacaggtcgacgttttccagaccatctcttatccaaccagagatgaaactcctgcgaaacacgagaatacaaggaagtcccgtgaagagaaaggaaaaggaatggctaatcaggccaagaagagatcaacctctgatgccgttttgaccgacgaagctccgccacccaagaccttctgcttatctaggggtgaatctatcaaccctgatcaattttcattcaagtatgttggagatcggttcctcatgagggaccaggaagcggccagtcacctatggcgcaacttgatgctccctggggcgaatgcgcttcccaatcctgacgacttggtcctaagagaagagtaccatcagtttgccagatcatccttagaggtttatttctaacatgaccatctgttatacattttgtatattttttcatggtttctgatttaatcttgttgcttctttctcagactgccacgcttgccaacaacctgatcgccacctacgattgtaagctgaaactaaagcttgcggacatagacgccttcttcaatttaaagaaaagcgtcgaccagacgaggatcaggtatgacgtagacatgaaggagatggccactctaaaggtggctgctgagacaaataaggcgaaggtcgattcattgaatgattagatcgcctggctcaacaattgtgaggccgagctctcataggaggtcgagaagctgcagatcgcactcgttgctgccaaggagtacatggaaaaggaatgcaacagacttcagggtgactgagccgccaaggtcgcgcgtattacttggaaggctcaagctcgactcgacaaaatgaaggctatctcaccgagcaagaagaggttgttaagccaaaggtggacgctctgaatcaggcccatggtgcagaagagatagtcagaatccggatgaaaagaggcgaagtgatttcagaatttgaactggatgacctcaagaatttaacctgttacgatctcatacggaagaccgtgttgacatatgatgttttccagataaatgcgatgaccgcaggcgactggacttcataa

SEQ ID NO: 163256 - DNA, 1050 bp, Arabidopsis thaliana landsberg
atgtattcttcatcatctgtatcaaaacgcttcgttctagtccctattgtggtcgtggtgaccacacaactcctcctggtacgtaacgtttcttcactaaaccttaccaattcgtatcttcaccacaaatgcgtagtcaatcaaggaaaatacaagccaggaagcaagtacgagaaatccctcgatgatatcatccaaagcttttcgaataaagataaagattcgtatggttttcgtaccggttacagcatgaaggcctacggtaaagaacctgatatggtctccatcacctaccagtgccgtatcgactctcgtgggcccaagtgccagtcctgcgttgtcacggccggttatgaggtaacatacttgagtgttactaataaggtagctttcacataatgtataaatatgcgtgcagagtctaccgacacacactatatttatgtttagatctaacacaaatataaacgcgagaaactatatcttatatatgaaattagtccatgcaatgttgatattagttatgggcctgtgggcctgtggcgttaatatgctaaatgtctatgacagcttcttcgtaagagatgtccgagatataaagaggcaataatatggtacgaccaatgtcttgtggagttttcttcgttagatacttctgggcagatcaattacgacgacaacttctgtatgcctagcgcgaagaacctgatcggcaattcaatctctcttgaagaaaggttgcatctcctcaacaatcttacaaagttagccgtcacgaaaatagataaaaacatagaaggtataagaaaaccagtactgtatgcggcgggggagaagagactcgggacgaaaagtctatacggaatggtgcaatgttcggctgacttatctgttcagggttgtaatgagtgtatgttatattatatagtgcattttcaagagtgctgggaaagtaaacaaggagtaagagttttgagtagaagctgtaactttaggtatgagctttacccttttattagccccaagggtccttactataccaagttctaa

SEQ ID NO: 163257 - DNA, 1642 bp, Arabidopsis thaliana landsberg
ctgtcagtctcaccgcccggtgactcgatgcaagaaattccatagaggagtgaaccgaaagttcaagaggtgatgtccgatgaagagctcactgtgccggatcccgattggggtatggtacctgtcagagacccacaccgccaataatcgaaattgaggacgagactccatcgtcagcggatcgggttcagaagcctaaaccaaagggtccagaggctgctccttctcagccatctgtggcatctcgattgcgtaatcagaagcaatccgctactggtcagagtggaaagcggatgaagtaggacaagggcaaggggatcgccgcttcatcttccttcgttggaatccgattcgtctctgcggaggctgaaaaaaggtatgcccaattctctcaccgcaatttcattggggaagtagaactgtctaggaagatagatgaggcggctagggagtttattgagaaggcggggctgattcgaacggttattggtttcaaaccgttcacggaggaactggtgtttgagttctgggcaaatctgccaacggtgaaggtcgacacgtataaggtcagtgtccttgtgcggaattgggagtacgaggtctcacctgagaagatcaacactctgtatggtcttccttctatcaatgcgagacaacagcgaatggatatggctggactgtttgatgatcgagtggctgcttttctgactggtgggaaattcagttctctgagcaagattcaggtgagtgccttcacaactctgctgctccaattggtctccaacatcgaatgatagatatgcgcagcctgaccgagtcaagcttgtatacatgatcatgcacaaaatgtcatttgactttggaaggatggcttttgatcacattcttcagctggctctgaaaccagacaccaaactcttcctaccgttccccaacctgatctatcaggttatccagacgcaacgcccggttcagattcccgtcaaccctcatgcctccgcaacgtcgaccaagcagaagaaggtgaagcagagtgcagtagtacgtcgcaaggaatcagccaaccgcagggcaatgaaaattgccatcgaaattctgcagactgctctcgatacaggtaagtgttctggttgaatatgtctggttgcttacatgatttttgactaagttatctactcaagcggggagataaggttcctttggattttgaggatgctgggggagattaatttgtggaggagctttgttatttgtttaacacattgctcatctttagactaatcgcgttatactaattatgctagatggtgtttctacaatatgtctattggctgtgtgttaggttccccacttgagtttctcatatcaattgagagatgcttgagtatcaaactcagtcaaaaagggggagattgaagatgtagagttcaatcaatcagctgatgacgatcagaacgttgatggatttcagtaagctgcatcgagtcccatctgacgcttgagttgcagacatgaattcaagagcagacgtggcaagctgaaggcggatgaagtggagagccaaggatggaagctgacttggcatggtgtcaaagacaagaatcaccgagaagatatggaagatattatctcgaagatttag

SEQ ID NO: 163258 - DNA, 3441 bp, Arabidopsis thaliana landsberg
aatttgtagcgaaagatgctcctttttggtatgaatctgttaaggtgatgttgattgatcttcgaacagaggaaaaggtcagctggcgcgttgtatgacgtggatcccacgatcagccgccaactctctacccgacctgacacgtgtcttctcatctacggacgaaccggcatttatctctcggcccatttaattcctcttaatgggcttttccttttcggcgcacaagttgtgatatctcgactctgttttgctagcattgtttcttcattctctctaattgcaagtttcagtctttgaatccgatgaaactcagatagctattggagctctgttttagcataagattgcttaaaatagtgagtggctatttttatccagaaaatgagctatgaatctgatgagttggtttaaactacattgatggctcttgtttttattttctcttatttgcggacattaaggcgccagtttaggggctaatcagaggaatgaatgattctcaatttccaaggtatctgtgacagagtcaaaaaagtgtgaaaacccctaaaaaagtgaatttttacattaataaccaaaacactactgaaatgagaaaccacaacaaccacccactcctccactcaccaaatccattgacaactttgggatttggaaaaattcacaaaaggtctgagacagattccatttatcatatttttcttataactcactagcgaaatactttacctaattataatctccacatatccctttttttgactttcaacgactctctcttctcttcccactttctccagtgtccatatacgatacaaccaaaaactcaactctcaactccggaactcccccaaactattcaactcttatcttcttcttctgaaatttcatagctttctgactaaaagttctgattttttttgaagctgtgcacgtgaaagggatttcaatgtattctaaactatcatcacctctatgccccgtgattccattatgtcttttcttcttttcacacagtctgtcttctttctgagctttcccatccaactttctccagtcccagacaccaccaagttatgaggttgtctctatggggatctctcctgttcttctccttcttcgtcaagcatctgacgagcctagatcccaacaccgacgcttatcatctctctagcttcttctccgcaatgagattacccaattctccccaagctcatacgttttcttccttgtgttcatggccaggagtggtcgtctgtgactctagtgagaatgtgttgcatatttcggcttctgggttggacctgtctggttcgatccccgacaacactattggcaaaatgagtaagctccaaactttagatctcagtggaaacaagattacgtctctcccctcggatttgtggagtctcagcttgcttgagagtctcaatctctcctccaaccggatttctgagcctcttcccagcaacatcggcaatttcatgtcgcttcacacccttgatctttctttcaacagcatctctggcaaaatccctgccgcaataagcaaccttgtcaatctaacaactctcaagctccacaacaatgactttcagtttggcgtccctccagaacttgtccattgccgatctctactctccatcgacctctcatccaaccgcctcaacgagtctctgcctgtcggttttggttcagctttcccactactaaaaagcttgaacctttcacgaaatctgtttcagggttcattgataggagtcttgcatgaaaacgtggaaacagttgatctcagtgaaaaccgatttgatgggcatatcttgcagttaatacccggccacaaacacaactggtctagtctgattcatcttgacttgtccgataatagctttgtcggccatatattcaatggtttgagttcagctcacaagctgggacaccttaacctcgcgtgcaatcgattcagggcacaagagttcccagaaatcggcaagctttctgcgctacattatctgaatctatcaaggaccaatctcactaatatcattccgcgtgaaatctcgcggctgagtcatctgaaggttcttgatctctcctccaataatctcactggccacgtgcctatgctgagcgtcaagaacattgaagtacttgatctctcgttgaataagctagacggagatatcccaaggccgcttttggagaaactcgccatgatgcaaaggtttaacttctctttcaacaatctaaccttttgcaaccccaacttctcccaagaaacaatccagagatccttcattaatattacaaacaactgccccttcgctgcaaagccaattattacaaaaggaaagaaagtcaacaagaagaatacaagggcttaagattggtttggggttagcaatctccatggcgttcttacttataggactactgctcatacttgtagccttgagagttagaagaaaatcaagaacttgggcaacaaagctagccataaacaacacagaacccaactccccagaccaacacgactcaaccactgatatcaagcaagcaacgcaaatccctgtggtaatgatcgacaagccattaatgaaaatgacgcttgcagacctaaaggctgcgactttcaacttcgacagaggcacaatgttgtgggaaggcaagtctggtcctacttacggagcagtcttacccggtggattcagagcagctctaaaagttatcccaagtggaaccacattgactgatactgaagtctcgattgcatttgaacgtctcgctaggatcaatcacccaaatcttttcccgctctgtggatactgtatagcgacagagcaaagaattgcaatctacgaggacttagacatggttaatttgcaaagtctactccataacaacggagatgattctgcaccttggagacttcggcataagatagctttggggacagcgagggcattagctttccttcaccatggctgcattcctccaatggtccacggagaagtgaaggctgcaacaatcttgttagactctagccaggagccacgcttagcagactttggtttagttaaactcttggacgagcaatttcccggttccgaaagtttagacgggtacacaccaccggaacaggagcgaaatgcttctccgacattagaatccgatgtgtatagctttggagttgttttgcttgagctcgtgagtgggaagaagccggagggtgacttggtgaattgggtgagagggttggtgaggcagggacaaggattgagagccattgatccgacgatgcaagagacagttccggaggatgaaatcgcggaggcggtgaagatagggtacttgtgtaccgccgatctgccatggaagcgacctacgatgcagcaggtggttggacttctcaaagacatttctcccaactactagtgg

SEQ ID NO: 163259 - DNA, 2850 bp, Arabidopsis thaliana landsberg
atggggaagcaaaagcgcctcaagtcgttctctccttcggggagctcgtctccctcggtctcttccgccgcctctctggtggctatctcctcgccgtctcctccgccttctcctgtcgcaagtgcccctgccgccatctcctccgcggccatctcccccgccgcctctttgtctgcagtttccagatctgcgcctgtcttagatcccagatctacaattgatcctagatccacggcggatctagcatcctccggtcacgtcgatgtgcagctagcggctacaagtgtacctgcttcagctccatctgtgcctcctacaattacagtgattccatcgaatccctctaaagtctctgcgaaagctgcacctgtcatggttgctgcagcaaacccagtcattgtcgcgcctattgctcctccccccgtggatagctgggtcgatatattcaaaggtacaacatctaaaaggctagagaagaaaggttccgcttttactctaccctcaggagaagcatgtgtggcgattcccaattcgcttattgagaagcatcagaagtcttgggactcgttcatcctcgggcaattttactctgatccccctgctcagggtactgtccataccattgtcaatggaatttggagcaagcagtttcgtgatgtctcagtctcgaagatggagggaaacgcgttcctgtttcgcatcccaaatgtgcaaacccgtactcgcgtgctcaaccaacggctttggcagattgatggacaaaccatgtttgttgccaaatgggaacctgggctccgcccagttaagccagagctcacctctgccccgatctggctggagctccgaaacgttccttttcaatgcttcaatgatgacgggttggagcacattgctagtctcgttgtgaatgttcaattccagtctggagagattagaagagtggaagtgtcaagcccgtggatgcctcctatttgtgcccactgtaaagaggttggccacagcttgcggcggtgtaaagcagcaccgatcacctgtaaagcctgcaactctacacagcattctgctgatgcttgccccagggcaaagtcccaagcagagaagaaaactccaagacgtcggcgatctaaaacgccgaagccgatgctcaaagaaggtgactgggcggctgtagggttgggcaagcggacactgcaagacaagccagttcccttaattaaccctgatgctgccacctcctctcgggggaagcgggtgacagatgctcctaagcagaaaggctctgttcccaagcctattgggcgcgaaagcaagcagaagaagcaagttgcccgaactaaagatgtggcccctatttccgaggaggatgacgactcttctgatgtcccatcgtcgccctacgattcagatactgatttggaagatgaagagcagttcactgaagtgttgtctcagcgacaacaacgcagtgcgaggggcaaaggtcccaaatccctttagtttcttaatgtgtatagacattttttgttggaacgtccgcggctttaattcttcctcgcatcgtagtgggtttaagaagtggtttaaatgccaccaacccctttttggaagtctggtagagactcatgttaaacagccgaagcagcagaagtttatcaataagctgttgccaggttggtcttttgacaataattatgatttctcggagctgggaaagatttggattttatggcaccccagcgtaaagcttttggttctctctaagtccctgcaaatgatcagttgtgaagtgcaggttccggactacccagagacttttgtggtttcttttgtgtatgcttcaaatgacgagactgttaggcagactttatgggatgagcttgtggccctttcttcagacagtcgtgttgtgggaaaggcctgggctgtgatgggtgacttcaaccaaactctgcacccaagcgatcactctgccaccattagtcagaatgtggaccgggcaacaagggtcttcagggaaactctgcttgatgcctctcttgttgacctgaactttcgtggaagcacttttacctggtggaacaagagagccaactcacctatagcaaagaagattgatcgtgtgttagtaaacgatatgtgggctgatatttttccctctgctttgggcttctttgggaagccgcacttctctgaccatgcttggtgtgggatcctgtttgattcagctgcgccaaagacaaagaagccttttcgtttttacaactttctcctgaagaacccagactttgtgcctctcatcggtttcagctggctttctctaaacgtaactgggtctgcaatgttcagagtatcctgtaagctcaaagcgctgaagcatgtaataagagagtttagccgctataactattctgatctggaaaaaagaacgcaagagtccctggattgtcttttggaggcccaaggtagagtcctcgaaaacccaaccatccacaatgctgagcgggagatagaatggcaaaggaagtggcagactctctctctggccgaggagagtttcttcttacaaagatctcgtgtcacctggttaggagagggtgataggaacaccgcctactttcacaagatggcctcttcccgtcaggctgtgaatcacatacactacctctttgatgttaacgggtcccgtctggattccctaagcgccattcagaaccattgtgttgactattttgagaaccttctgggagggattcaaggtcctaccatgtttgctcaagaagatatttctgctttgcttagtgccagttcgcaagctcctattcagcatggtcttgactcccctttcacggc

SEQ ID NO: 163260 - DNA, 5782 bp, Arabidopsis thaliana landsberg
gtttaagttctagacagaaaaatccaaggaaaagaaaagcagttgtgatccgtaagaaattggactctctggagcctagtgagaaagctattgatacagaggttagtaaaatctttgaatttcctaatgttttcaaaaggaaaaaggatttggttgcttctgttaaatctgaatgtagcaaggatgttaaggaaacggtggttcatgatgaaccaccgcagtatcagtaaggcatccttagctggaattgccaaggcttgaggaatccttggacaattcggtatctaaaggaaatgaagaaagatcatttcccagacatgttattcctcatggagaccatgaattctgatcagttcattatgaaaatattcagatggttaggctatgattattttcactctattgaaccgattggaaagagtggtggtttggcaatcttttggaaacaacacttggagatagagtttttgtttgaagataagaatttactggatatgaaggtttctcaggatagtaaaagctggtttgtttcttgtgtttatggaaatcccaaacagcatcttagatatacccttttggacagattaaaggagataggtttgacaagaaaatcagcttggtgtatgatcggagattttaatgatattctatctaacaaagaaaaaataggtggtcctaagagattagaatcttcctttcaggattttcaggatatgatttttgcttgtgatctacatgtgatggggagtacagggaatagttattcctggggtggaactaggaataatgaatggatccaatgtaaattagttcgatgttttgggaactcataatggtttgctttgtttccaaactctcaccaatggtttcttgaaagactaggttctgatcatcgaccagttctggttaaatttgtgaatgatcaggaagtcttcaggggtcaattcagatttgacaaacggtttattgaggatcctaattgtgctgcagctattctcgtttcttggaatgagattgtttcttcagaagtgtcgtcatcaatgatgggattagtggagtgcaggaaagccattggtaaatggaaaaaggggaataatttcaatgctcagaacagaataaaatgtctgaggaaagagctggatgaggaaaaaagttttcagtttccttcttggcctaaagtctcagtgttacaagatcttttaagtgctgccttttatgaagaggaatctttctggaggttaaagagtagagacaaatggttagatggaggtgataagaattctaaatttttccaagcttctgtcaaggctaatagagttaagaactcactaagctttttagttgatgaagaagggaatgaacatactgtagctaaagagaaaggcaacattgctttaagctttttcaaagatctctttacttcgtcctatcctgctaatatgcaatcaatcttacatggattccaagcaagagtcacttctgaaatgaatattgacttgactaaagatgtatcagagggggagatttacaatgcggtattctctataaatgcagagagtgcaccaggtcctgatggtttcactgctctattctttcagtctcattggtctttagttaagaagcagataatggaggacatcttgggcttctttcaaacgggaatcatgccagatcaatggaatcacacacatctatgtttgattccaaaaatttcacccccaagaagaatggcagatattagaccgatcagcttgtgttcggtattatacaagatagtgtcaaagattctatctgctcgtctgaagaaacatcttccagagttagtctccccaacccaatctgcatttgttgctgagaggttagcttctgataacattctcattgctcatgagataattcataatttgagaactaatgataagatttccaaagagtttttggctttcaaaacagacatgtccaaggcctatgatagggttgaatggccttttttacaaggaattttaacagctatgggctttaatatcaaatggatttcttggattatgagttgtgtgacttcagtctcttattctgttctgataaatggtcaagcctttggtaaattgtttcctgaaagaggtataagacaaggggatcctttgtccccttttctttttgatctgtgcacggaagctttggtgcatattctaaatcacgcgaaagagatgggagagtaacaggaataaggtttaatgaggcgggggcttcaatcaatcatttattgtttgctgacgatactttgataatttgtaaagctacaaagaatgaatgtgaagagcttatgcattgtttatcagagtatggacatatcttaggacaagtgattaacttggaaaagtctgctgtcacctttggagccaaaattgacgaggacacaaaagattggattaagaatagatcaggaatccaattggaaggtgggtatggaaagtatctgggactaccggaatgcttaagaggttcgaagaaggatttatttgagttcttaaaggaaaaattacaggccagactcacaggttggtacgctaaaactttatcccaggggggtaaagtgattctattgaagtctattgcgatggctctccctgtgtatgcaatgacttgttttaggctacctaaatctctatgctcaaggttaactggtgctatgattgacttttggtggaattcaatgcagaatacgaaaaagattcactggattggggctcaaaaattaattttgcctaaatctctaggaggttttggttttaaagaccttcagtgctttaatcaagctttattagccaaacaagcatggagaatctttaagaatgaagatagtcttttgtccacgatctttaaaagcaggtatttcctcaatactgatttccttaatgcctctaaaggaacacatccttcgtatgcttggcagagtattttgtatggtcgtgacttattgcagaagggtttaaaaaagattattggcaatgggcaacaaaccagtgtttgggttgataagtggctttttgatggtctgaatagaagaccttcgagtattcattctttgatggatattagcatgaaagtgaatcaactcattgaccccatttctggaaactggaatctgaatcttatgagtcagttatttccttggacggatattctgataatgcttaatcaaagaccgatggtaaatcgaaatgattcttattgttggtctggcaataataatggcatttacacggttaaatcagggtatgatctgattagtcgacaagctcatcaaaagatttatcaagaggctgcagtgaacccttcagtaaaccctcttttttgcagtatttggagtcttcatacggcgcctaaaattaaggtcttcttatggaaagtcttaaaaggagctgtagcagtggaagacagactaagaactcgtggtatcaaggcaatggatggatgcttaatgtgtaatgaggagaatgaaacaattaaccacattttattccaatgtccattggcaagacaagtctgggcgctgtcccttatgcaatcccctgaaaaaggttttggatcttcaatctttactaatatggaccatgttttgaactattgtcagaaattgagtagttctagtaatgtgagttatgttagtccttggataatctgggtcttatggaaacataggaataaaattctgtttgagggagttacttctgtgactcaaagcattgtagacaaagcttatgtggattgtaatcaatggtgttcagcccaacaagatgtctgtatcaaggaatcaaagtcaaagttgaattggagtcctcctcctcagaatgagattaaatgcaatattggtgtggcctggtctaatcgtttacaagcttctggtgcatcttgggttgtgagagatgctctgggaaaggtgttacttcatagtaggagatcttattctcatgttcattctatgttggatgcaaagattagaagttgggaatgggctcttacaagcatggcacaacatcattttgacagagtcactttcggagcctcaacacatgacattattaaagctctatacaaaccagaagaatggccatcattattaggccatacaagtcaactcttgaagttatcacaaaagaaaagtggttggttcatggctttggaaccaaaacactgtaataaaggagcttttgagattgctaagagtgttattactgggcacagatggcaatcttatgtctctcggggttttccccattggctaggaaatctctttgcttcagaaatgactcagctagggagattgtgacagtgttcattggaggcttgatttggttacaggtggtttagatcagattatcaaatcagtcggaggtgtcatctttgggaattagatgctcagattaattgctgagttgttaatcaaatagaatgttaggtgtggaggtggattagtttttgtccttttctaatgattattttcttcagtcaaaggtttagtaagtttaggatttccacttaggttcttcgagtctagtttttttaataatttcttttttcctaattttttcattaaggttagagtctttatattataagtgtttactcctttacgtcattaggtctcagtctttcttgttccttttctcttttcaatcttacctccatggcagatgaattgtgggatgaaattcaaggcctggatctaggtcctgaggatccagccctcttcattccccatgaagcttatgtgtatgttgaagagttcaatcgactgagtataattgcaagacctctcaacccaagagtccaaaatttgaacgcggtgattgcagccttacctcggtactggggaatgacggtgcatgtccatggaagaattctggatgcaacttatgttcaatttctcttccaaaatgaagttgacttgcagtcagtacaaagaagagaaccatggattttcaacaactggttcgtggctactcaaagatgggaacctgctccggctcttaactttgttacttctattgatctttgggtgcagattagaggaattcccctgccctatgtgtgtgaagagacggctctagagatagcacgtgacttaggagaagtcatcatgctggatcatcatgacgcaacatctactcaaattacttatatccgagttagagtgcgttttggcatcacagacaggctcagattcttccaacgaatcatctttgattcgggagaagtggttaccatcagatttcaatatgagcgcctcagaagaatctgtagcagttgcttcaggtttacgcacaacagagcttattgtccctatagaccacgtccccacagcatagccagagaaagagctgtcttcagagacagtgttcataggtcaagcttgaactctcaatcgcagatgacggagacttcatttcctgctcctgtgacaccgcctcctagaattgctcatccaccactgaatcctgaagaattgagagctgcgtatccatactatgcatcagttagagatactcatacattacatgttggagaatctagtactgcaagacaacaatggtcatcgagttctagtaccactccaacaagagcagacactcctaatcatgataacaacagagtctttgaagtcggtcaatcctcaagaagacaggaagtaagaagagaagcagaggatcctagacttcaaactcgtctacacagtgcttcaagaatgggagagagtctgaaacctcccaaaaagagataa

SEQ ID NO: 163261 - DNA, 1394 bp, Arabidopsis thaliana landsberg
gctaaagattcatcagccgttaaaattatcataattgattggaatatggctggttctgtggttggtgagggtcggttgtgttcaacagaccgactagaacttgtgaacaatatgcctcttggtccttctgcgggaattgttaaggttgagaaattgtttaacaaagacgcatatttgtggagaccaagtccaggaaagtttgtgatgggagatgtactaaatgagaacattgcatggtcacttcatagtataaaatatgtgaattcatctcctccacagtatgaaacagcatcagcagataaaagaccatcaccaccatcagcagataaaagaccagcatcagtaaatttctgcactttaacttacagcctttaaaatcacttaagtattatttctgcttgaatgcttggtattatttctgcatgaatgcttggtattatttttgaatctggtagagcttaagtaacagtactgctagcaccagcaaatctgccaagaagaaatacatcatgttagattacaagaacggaagacaaagagttgcacaaggaagagtatgtacctctaaccgttcagacacagtccaccatatgcccctaggtccaaatgcgagcaaggtatgtgtagaagtttcaaagattaaagatgttgttgtatggagaccaaactctaaaattcaaaccattgccgatgcagtaggtagtattgtggcttggcctactgataaaatcatgattgtgtaaacattatatgtttttttttgttaagtactttgacattgaaatgtaatttgggatcttgaattttatataatatgaatttctttctaaattttgaatttatgatatctaaataatatgaatttctttctgaatttgggattaaaaattaatttatgaactggaattaattgaagaaatattgcataattaaaaatgccataatatataaatattgcaattaactaaatgctattatctaattatatgtagcaaattaaatatgctatgtataacagttatttatatcagaaacaaatcgctattaaataattaaagattgcagcagaaaaagcgctgtaataaaggaaataatgataccagaacaaaaaagcgctacaatatgtctccgacctattatgacggacgatgatagagcgcttctaataacgctatggtataataacatagcgtttttcgggcgctacaaatgttccatattcctgtagtggggtcaacgaagatggcaataacatgggcagcgatgtcagagtcaagcaataccaacttccaaaccctaacaacaacgacaacaacaacgacgacgacagcaacgacgacaacaacgacgacaacaacgatgacaacaacgacgacaacaacgacgacaactaa

SEQ ID NO: 163262 - DNA, 1994 bp, Arabidopsis thaliana landsberg
atggcgatggttgttaggctggtaaggggagagtggaaacgagatgcatccggatgctatgagcacgtagccgagttggatgggttatgcttggcggtcaagctccgggagagagatacgttggtcaaagtgattgaagctgttaaggaaagagtgaatctacagacagaagatgaggtggaagtattgtatcaatggccgcaatggatgatgggtccagattggcagcgtgcaaaccctatccatattatcgatgacgaagacatgacgttgtttatggcaattcggtctgatctagatgaggttcacttgaaggtcaaaaccataagcaggaatatggggaccccgacagttaattcatactgaatcgtcttagatataggaggtatgacttcggaagcgatatccgataagtattggaatagcagtgaaacaagagcagcctgggattcggcagtaacaagaatgttattcggtaacgtctcaagttatggtccggctggagttaccgggcaaaacaagaacggtgtcggtgctcccttcggcaggcgtgggggaataaatattcgataaaatacaggggagacgggtgtaggaagcgtcgacccgttaaacctaatccaagcccacccaagtgcaacagctaaagggaaggaacgtgtcttggacgatgagagcattaagggcttggagtttgcactttggaggaaaacacaacatggagaaatgttgagagagatgcaggaaagagagattcgtctggctggctcgctgggtggacaactggacagtactacggctaatgtccaggataacatggttatcgggcagacaagctccaatccagaggagtcaatacgtctaacccttggaagcgtagacccagctcgtcccgatgtctcagtagtggcgctgtcttcaactgactcaacatttaagacaccattggaaagtgtgagcttctgtactgaagagctgatggacgaggatgacttatctagtgatgtgatcatggaaagcacaaaggacttggaatttgatcaagagcttgtagccgaggaagagcttgaagcagaggagcagcttgaacctgaggagcattttgaaccagaaaacgagcttctagcgaagaaagagtatgggaaagatgttatcttaacctcgttggttttgatacatgatcatcaaatgggcatgtgtctcatttgtactctttttcccttgtcaagttttgtcccaatgggttttcttaacaaggtttttaatgaggcaaatgattcacattcaaatcacccatttgatgatccaaaccatggtataacattcaaaagttggttagaatatatatgaagtccagccaattttatgaccatcacaagcccaagaagagcccaaaccaagtgagtaatttgctggtcaagaggagtgacgaaaatagcatttcaagagtcattttggagccaagaagtggaagggttatttttaaactttcaaactagtctttatttctttttattttccaaggtagtcttgtgagtttgttccaagacttccttcttctttataaacctcttgtaatctcttatgagaattcatctatctttttatcaaaaactctctcttaaaaatagatcatgggtccattttcgtatgccgaattttgatctttctcgacttatcaaaaggcttttccgcatccttttgtggcgtcattcaatccatcatctcgtctttgagtcgtgtgtcgtctctatttcgacaatatccactccagatcttccaagtgccgaaattgggattcattcctcactaggatcttatcagaacttctctcgatccatgtaaaattggaccaccacactgtctaatccgaaattgaaatgtcttccaactaatatcagggaataatcaaaccacctataatttaatttgtaattttggtagttaatcattttaaatataaaacaaatcgttttttctcctatatcttttcg

SEQ ID NO: 163263 - DNA, 1056 bp, Arabidopsis thaliana landsberg
  unsure (1)..(1056): unsure at all n locations
attttggtgaaaggatttgaaatggcggtgtcgcttttatcgaaactacggtgtataacagtagatgttactggtacacttatagcttacaaaggagagcttggtgattactattgtatggctgctaaagccattggtttgccnnnnnnnnnnnnnnnnnnnnntcatgaaggttttaagctagcttatacagatatggcacaaaagtatccttgtttcggtttccatgccaaaatgccaaacattgtttggtggaaaacttgtgtgagagattcatttgtcaaggtatttgatttgaatgttatattcttcgatattcggtgtgtgtgtattgtgtgttacttactttgatgagtggtggttgattaggcaggatatgagtatgatgaggagccatttgagaagatatttaggcgaatctattcgacgtttggttctgctgcaccttactctgtgtttccagattctcacccgtttttaagatgggcacgcaggacaggtcttatagtcggacttgttagcaatgcggaataccgatatcaagaagttattttaccttccttcggtttgagcaaggtagtgaagagtgactcattgtgacggtgtgtggttcttaggttctttaaactttactcaatttgccatttgactctttttaggcagagtgggattttggtgtattctctggaattgaagggatagagaaaccagatccgaggatttttacgctcgcgctagagagagccgggaataatattgcgcctgaagaggttttgcatattggagacagcatgcgcaaagattatgttccagcaaagagtattgggatgcatgctttgttggttgataggtttaagacggaagctgctaaagactggannnnnnnnnnnnnnnnnnngcttccagatttggttgctgttcaacaacttttggagtctgataagttgaaatgttaaaatgcagacctctctttaagtatgaaatctaatgtattgtagtattgcacatttgagtaaaataaccctcaacggcttctttggttactataacaataag

SEQ ID NO: 163264 - DNA, 2398 bp, Arabidopsis thaliana landsberg
atgctaatgattcaagacccaagtctcctcaaacctttggtaaagaagatttctgccccaattatcgatgctatcctcagaaacgacgtgtcaactttactcattctcgccgaggagaaaccgtcggtattgtgggaaacatatcactgggagactcttggtgggacggttttgcacctcgcaactaagcttgggcataaggaaattgtggagacaataatcaagctttctccttctcttgtcgttgtcaccaacctcaatggtgacactcctcttcatgttgctgctcgttggggacatggaaccatagtgactcagatattggcagcagaaaataccgagttcacggcgcacaacgaacgaggagaaacagcctttctcgtggcttgccgctacaatcaccctgatgctgctagtctcattctcgaagaattacctttgattacgatcggtgaattttgtgcgaccatttttggagaatacacaggttagtgtcgagaaaataaacatatactgtaccttttaactacaatgaaaaaaaaaaaaaaatttaaagttacaggactagttttttttttttttttttttgtttggtaaaagttataggagtagttaataactgaaagcttaaacttctagttaaattcttaggaaaattaatttgaaagccgaaacagaggaaagtttgaaagagaaaaagggacaagaattgagctttcgcataaaacattataaaaaaaaatttacttcatatgttaaactcacgaataaagctaagaaaacaaaaattagtattaatttttgttttattttattatatttttgacctttaacaattcgaacgcaacaagagttagcgtaacgaagattttttttaaaaaatgagactattaactctaaaccaatcgctggaataaacatgatctatggtctttgtagtattgaaaaccatttaataatataagctgagttgaatttgtttggatcggcgatgatcagatctggcaacgaaaatcctggcgaggtttccacacatagctaaagaagttgatggaaaactatcctcgccattgcattatgcatgcaatgtagacagcaacgtgatggtaaaaatgctgctagaagttgatgaaggacttgcagaaagagtgaacagagacggtatcacacctttacatctggcgatcatgagatgttcagttgcaatcctggaggagttttttgacaaggctccgacgtcttttaacatatccacatcagcacaagaaaccgtcttccacatagctgctaaacacgaaaacattgaagcattcatcttcatggctgagaattgtattgatagtagttcaattctcctccagctagatagcttggggaacactgtactacacgctgctgccagttccagctgctaccctgtgagttgttttattttcttctttttgctctaagtgtgtatgataagttgtcataagttaagacactaaagcgttaattgggctattaattaaatgtattacaggtgattttgtacatcatttatgaaacaacaatagatctctctgcgaagaacaacttcggttctgaagccgttgatcttgtcagcatagatgaggaaaattatcttgtgatctgcaagtggctcaagattgaggcaaaacgaattcgagaccctgttcaaaatcatagtcaagggaacgtgccgaccaactacttggtaatgtcatcagaaaccgaattaataaatcggataagaaaacttgagaggcggatgatagaaacgtatagagaccctacacaaagcgaacgtgagatgcatgcagaggcattgcaaagcgcaaggaacatgatcacgatagtagcggttttgattgcgtcgcttgctttcacaggtggtataaatcctccaggtggcgtctaccaagaaggaccctctataggaaaatcgactgcgggaaaaatgctagccttcaagatcttttcaataagcaacaacattgcgttgtttgcatcgctatgcatcgtcgttcttctagtcagtatcataccttataggacgaaaccgctcatgaaattcttggttataacacattggatgatgtgggttgctgttatatctattgctattgcttatgtagcagcggcttgggtaattttaccgcgtctaagaggaacgaggtggttgttttacgccattcttgctatctctagcgtgacattagggggtttgtttgtgtacttaggctacaagttgtttagacacatgtcaaagaagacagaatggaggaggaacatgtccacagttcctgtagttcctaatacttctggaacagtcaactggactagtgcagcctcagataggggagccgctggtggggaagggttttacatctactga

SEQ ID NO: 163265 - DNA, 2002 bp, Arabidopsis thaliana landsberg
  unsure (1)..(2002): unsure at all n locations
agaatccgttccccttcaccattactttaccaaagttactcgatcactccaaagtctatcctcaagcattcaatcagtttcaagctccaaatttcatcaccaaaaaaactgattcccttttcctttgatacctctagnagaagtaggntcttgttcgccttgttgaagctcaccaccaatctccatggattcaagaagaaagagttcatctcaggctagaagattttgttgatttcgaagaagttgaggcgtttgacatgagtggcatgactgaacaccaaattcaccaagctcgccgtgctcaaagatcaagcttgattcaagggggaagttcaagtcgctcagccatgcaaagagaagaagtagctaggggcaagagggttgttaaggctgaggaagaacaccatgaagaggcagtctttgaagaagcggtttctgaggcagaggttgagatcatcggggatgatacactagcccctgttgggagaagaaaccggccaaggaggaagagagagtcaaccccaagcgagtactatcaatacttgaaggagttgaagtttgagggaactagataccctcataaggaaacgatgcaagagcttggtatttgtggagatgtgcaatacttgatggaattggccaatcttgcaatgttcatgagctgccaatgtgggggatttaaagaggagagctgccaactctttgcaaccctcaaagttcacttttgtgttgatgatttagagaaataagaaagaggaggtcttggttacataactttcaaggttaggggtgtcgagtatactcttgatattagccactttgataccatttttgggtttccaagtggaaaacgaatccgccaagactatgaccaagacgagctacactctctttggacaacaatcaccggtccaaaaccctactcgcccgccaagagcaagacttcttcaattcgaagtcccgtaattagatacccccaccgatgcatcgccaacacccttttccaaagaagaccggatttattgatgaaggagagctatgcatgattgatcaagctttggtcttcattctgagagagaccaaggatgggaggaagatggcgggtgataaaggagacacttcgtagactgtcgttcttttggatcacctattgagctatagagagtatgctgcaaccatccatcgctcggggattcgcggaagtctttgtgttggtggtctcttaacgccaatcctaggagctgcagggatacaattccgaaccgctgacgtgttcctcaagttcctcgacctcgattatctcaaggggaaggatattcttgacaagacaactccggcggatcactacctcttcaagttcaaccatccggagcttggaccctctttgttacccctaccttgcgagaaccaaacttctgttaagacaaggcgtaacatcaacttcatgtcatctccctctgccctgaacatcgacatcggaggagctagagaagatgaaccagagtatactcaagctgagtatgagcaacaagagtattatcctgttgagtttgagcaacaagtcgaattcgagcaacatagcgaacaaccggagcaagagaccaacaaattcgagcaagctcactatgaagaagatgctgatcaaggaggagatgagatagctgaagttcacaagaagctcagtgtgcttgaagagcttgggaaccttcataacaaaacgatgaaaggtttcaaaaagaagataagaaccatgaagaagtcactgaagagtatggctgctcaaatcaaagacttccagagcaagccaaggccaccgtctcccacccccaaagtaagaataagtggttcaacgagctcagctgcaaggagacctgaaaggatcgatcaaccctgagcttcatcttttgagcctcgggaaatgatcttcgagttgagagagccaaggagtaggcagagacgagctttcacacgcgcgatcgatagaacgagcaaaaccctcccg

SEQ ID NO: 163266 - DNA, 670 bp, Arabidopsis thaliana landsberg
atgtttaggataggtttgcatgcatgttgcatatttgtgttgatttcaggtgatttggagctgttgacgagctaactggaagaagtggacctgatcatgacaaaccactcgacctagagggcgagtaggagcttcaagatctcaagagaccactcgacccccaggtcttgtagaagacatcaccacttcacctcaccactcggccacgaggtcgagtgtcctcatctccatcacctgaccatcactcgaccacatcactcgaccctgaggtcgagtgtctttaccaccattacctgatcatcactcgaccccatcactctacctggaagtcgagtatcaccatcaccaccactcgactacacactcgatggcaagcttcagattcttcttcattccgcactcaatcagacactcgagcacaaggaagaaaagaagactccaactattcactcgacctcccacttgaccacatgagtcgagtacagttcttaatccgtcccaatactgcgtcgttttaagtattagggtttcagaatatttggctataagtagcatgtacttcacatttttgcaaacaagttttttatctagttttattctgcagaccttgtgttctagaccttttgtaatccggatttctctttatctattcagtattcagaattcagct

SEQ ID NO: 163267 - DNA, 5084 bp, Arabidopsis thaliana landsberg
caaaccaaacccccattcacttgacctgtgggccttctctatccttaaaaagcactcgacttctccctttcttttcatcccaacaacactggacctcatcaccatcctcttcatatactcgacctcgtctttctccaaacgccaaacttttcgcaactctctcatctcccatcgttgctcattgcaattcaagtcctcaagtattcgtcaccatcactcgacctctacctcaagaccatcactcgaccgccgcagctcatttcttcaccaaagccaccaccgtcttctcttcttcagcgagttcaacatcactcgagttcaacatcactcgagttctcatcaccattgtcattctcacaagcttcactcgatctcttcacctccatcttcataaccgagtcactcgattcagcaaacgcactcgaccgcttcaccaccttctcctccgtccaagccgcaccactcggccgcttcatccagcccatacttcactcgaccgcttcaccactttctccttcatagccacttcactcgattcactgcatctctctcatcatcgctcactccaattctcaccaagtactcgattttaaatcatcaacaacttcaccgctttactcaattcactcgacttcacggcaagagcacatccgcctttcaagctcacattcgccactcgacctcgccaagacacaccgcctcaccactaaaccgaaaaaaaaaaaaaaaaaaaaaattttttggtacactcgaccagttcacttgattggtttgtgtttttggtttgctgttactaacatattaacgtttatttttgagttttgtctgttttcaggtttcatcatgagtaactacagtggagaatcctctatggaccctgattacaatgttgatgaagcagagtcctggtccgctagaccgagagagcaaaatgtttaccagagcttcagggatgaattcgaacgctctgcagcccgacgtaatcagagaagagctgaaatcgccagaggaaagagggcgatgtcgagtagatatgagctgattgatgaggacatcgaaactgagtatgagccagagtcatggcgcaaggagacaaagctgctgaacaaacctgacgaggttacagtggaagagtatatcaggttctttgagatgaatgatttctggggaacgaggtatccgtgttatgagactttagcccagctggggttactggaggacgtgcagcatttgttcgagaagtgtcatcaggagacactcatgtcttacccttaccctgcctataaggaggagacaatcgagtttctttccacgctgcaagtggagatgtatgaggcactcacagactttgagctggataccatggggttaggcttcttgacgttctcattgtatgaacagcggtatcagctttcgattaagaagttagaataactgtttggtttccctagtggaaagggaaccaaacccagatttgacagagaggagcttaaggattcgtgggccactatagggaactatctaccgctaaactcggcgcggtctaagagcaaccaaatccgaagtcctgtgatccgctactttcagcgatcggtcgccaatgtcttttactccagggagtctacaggcaccgtgtctaacacggacatggagatgatagattatgcgcttacagggattctccgacggacgaaggggaagaatgtcttgagaggcgatctcaacaacgcaccaccagtaatgcctctgttgatccatctgtgtggatacaggaagtgggcgttgacgaacgggaagaagaaggtgagaggagcactatgcgtgggtggcgttgtgacgccaattctggaagcttgtggagtaccgctcaaggaactaggtttagcaccgaggatgatggacttggatcatttgcgcagatgtgagttcttggagtttgacatggctggtgactttcaccgctacaggttcgagcattcatcgattaaaatcgccaacattcttctcccctgcattgatgctactaggattctcgagggcaggaagattgacttcaagcctgcgcttgaagaactttatttcgagggcagtccaccaactgaggagatcagtcataccgaagaagctacaacagaagatattgatgagacggatgatatagatgaggcggagtttgacacgagcatgtatcatttcagtgagcatatacctcctgcgagggaacaacagcaagctgcagaagtggtgcatgaaataggacaagttactcgccaactgcctcagggctatcaagtttctgaagaacaagctcagttgctcttcttccactacagctattccgcagggacatctccctcaggacatgccttcgagaagatatgacgcgcccgagccaagtcggcgcaggcctgagcctagagagtagaagattctgcatgtccgtgcgaggcattcatcattcgagcctcgtgaatctaggaggaagaggaggactacactcactcgatctagcagtaggagcggacgacttctgcagtctcgtagtttacgcgaccgcggtgctggccgcaacagaaggagagaggtcgagtatcctcagagcggtgctggccgccagagagctgatgaggtcgagtacccacctgctggagctgatacagaacaaggtggttcgtctatggcctgggagcgatcataggcagccattgaggagcaactacgttcattcttcgactgaggtaagcgcctcacttcaccattgtattatatcatccgttgtgatttgtttcttcattttttttgtttctgtgattggatttgtcctgagtactctcttccaagtttattcgcacagtggactgtgtgatttaagtttgggggagggctcaagaagtgtgtgttgcattgtatatattttggagtctgtattcatctaaggcatagaaaaaccaaaaaaaattgaaaaatttcagaaaatgatttcacaaaaaaaaaagagtgttcatgtagttgcattacatttaggatcgagtctagagtgtttcatttaggattgttgcatatgcataggggatgatgatgagatagccttgtaagcattttgattcaccggataaactcaatgccctcgttgctagctgtctgttgcatagtcaatgaaattgaaataaaactgaaccatgcctagattgctctattcgaccacactgtcatgatctgataccattccctatcaatttgaacctgaatcttatctttaattatcatgtctgcatcaaatttgcactcatcgataccctaaaatacttggattttcttattcattttgatcactcttgttaatccaagtacctgactctccttattagagcagttaacccaaacccaaacctagactttctttcaagccctatataacttgtgagtgtttgtgaggtcttattccgattaagcttggtagaaagtgttaggttcgtaacgacagagatagtgtctcatgtagttctagttcgcatttttcggactagataggactaggtgggcgcttatactttgggttgggatgtgtttaaaagaaaaaaaaaaaggggttgattcaatgataagaaaaggtagaagactctaggtgaagtaagctaaagaagcagaaaaagtctagtaaaggttttgggatttgtaaagaaaagaaagagttcttgttagctattggagatgggcaaaagcccttggctttaaaatgttaaaaacaggaaccttagttgttaaagaaatccaaatccgctagatgtaacaaagtgttgagaaagcttctcctagagttaagagaaaagaaaagaatgattagaaaaagtgcttaaaagattcatgaatgcaaagggtagagtttagttcttgtattgggattggaggtgggattaccattagagcttcatttgatgtactctgggtagatgggatcttatctctgtatgcataggttggcacttacctttagcattctactaaagcttaatcattttttgagagatcccctattactgaagcctattctgtaagggaccatctttgtctcttgaccttttaccttagccaaatgagttctttgatgatgcattgcttgattcacgttccagaactaatgaatgttaaagggatttgtagatttgaaaacatgtgtaggtcgagcatatgagtcggattgattgataatatggcatggctaacgtttttgagtagaattcgaccacatcgcagcttataactatcaacttggacattgatttcatctggtttatctggtgctttggctctgagtcccagccttcaaacctcacctccagcttgttcttaattgtttgcttgagggcaagcaaagactaagtttgggggagttgataagtgtgtattttgcctgttttgagcatccatttgtcataactttatcatcatatcatcactgttttatatcatttctcatcatttgtcatcactttgcatgttaaggatagttttgcatgcatgttgcatatttgtgttgttttcagatgatttggagttgttgacgagctaaatggaagaagcagacctgatcatgtcaaaccactcgaccaccaggtcgagtagacgctttacgacctcaatagaccactctaccaacatggccgagtatcaccatcatcattcactcgaccaatcactctaccacatggtcgagtatctccatcaccttcactcgatcactctaccaggaagtcgagtaccaccatcaccatcactcgactacatactcgactgccagcttcagagtctttttcattccacactcaactagacactcgagaacaaggaagaaaagaagactccagcttatcactcgaccactcactcgaccacctgggtcgagtaccgttcttaatccatcccaatactgcgtcgttttgagtattagggtatcaaaagtatttcgctataagtagcatgtactttacattttcgtttatctaagttttattccgcagacactgtgttcttgaccttttgtaatccggatttctctttatctattcagtattcagtattcaata

SEQ ID NO: 163268 - DNA, 2517 bp, Arabidopsis thaliana landsberg
atgacataacgtccacgtgtcacagaaacaagaaaaaggaaaaggacacgtgggcctaccttttcgcgcgtggctcgttgtccctccctcaccggacacccaatttctttcccaatcatttgatgcgattgcgattctgcttttctttagctacttagggaatgacgtttatacccttgggcatccatcatccactcatgagcttatcaaagcctcaatcattcaatatgatagcttttgcctttgtgtgtgtttacatatttacagctatactcagcgtgactcgcacgtgacctcgtctctaccctttaatagaagaaatttccctctttgggtttgagtaaaccagatatgtaaacaaaaggaaagaaagctggttacactcgtggccactaggatttcatcaaatcaaatcttgttcgatttaagacactaatgtcgaggacttttctttgggcctgtatcagcccactaaaataaaattgtactgaaaatcccttaaaaccattttttctttttccagttcaggttatatataaaataaaaaatgaacacatcaactatcttaaaataagatgttgtataacgcatctaaagattgtgcgtctagagatattttagtcaattttcactgctgatcataagggggatttaaaattcgtctggctaaacatgaaaattcactaaccaacttcatatacccattaacggtcaacaccagaataaacactccatcaataagcagaaccaaaagaatgtagatgatgattgcattgagtttttggtaccaaaccataaccaggtttcgaattccgcatacaaattggcaacatttatgcaaaagcaatctactctctactccaccaatctcggttaaccggtacatttctccacggttattcctggtccggttcatttcttattttatttgattcgaaccataaatggcaaaacagcaatttcatggaagttccgaggccattttgctaacggtatagacggcacgggaagagaaagaccaccggtggagaaaaccctaatcccccaaattcgaccatgttcatggttcgattgaaattcgcatcgatctctcataatttcagtacggtggcggcgaaacatagaagagtgccgtcgaaatacaagtctctagccatcggaaaagcccagcaagccattacagactatctccacaccaccaggtctctctcctacactcacgctgaacaaattgcctcaaacgcctccgtttcgattcgaaacctcatcctgaaactcgatttctctgttcctaccttctccaaatctcttcggaagcatctcagttaccatcctattaacgaattcgagtttttcttcgagagcattggcattgactacagtgaggttagcgagtttttgcctgagaagaaattcttcttctctgaggatcggactgtgttggatgcagcttttgctttatctggatttgggtttccttggaataagcttggtaagttgtataaagaggaaaggttggtttttgtgcagcgtcctggagaaattgaatccaggctacttaagtttaaagatataggattcagtacagttgcggtgattggtacttgtttagcgattcctcgtactctctgtggaggtggtgaattgggttcggagatacgttgtttgtttgttaagctgaaaagactttttgatgagtttgattcacatcatctttttgaagaaaatgtggattcttggctcgccgttagcaggaagattaggatcttttacgatttgggttgtgagaatgaagagatgtgggagttgatgtgtagaaataagtcactttttctggaatattctgaagaagctctgatgaataaggctggatatttttgtaggtttggtgttagcaaagaagatgctgctcttttgattcttcgaaatcccgctattatgaattttgatctagagaaaccggtgatctctgttacaggaatgctaaagcattttggattgagacaggatgaagtggatgctgttgctcagaagtacccgtatgtttttggtagaaaccaattgaagaatctgccttatgtgcttagagcaatagatttgcatgaaaggatctttgatatattgaagaatgggaaccatcatttactcgctagctataccttgatggatcccgatgaagacttagagagagagtatcaagaaggcttggaggagcttcaaaactcaagaaccaaaagacacaacattcaaaagttggatttccttcatgaaatagggtttggcgaaaacggcatcaccatgaaggtactacaacatgtacatggtacggcggtagaactccacgaccgattccaaatcttactaaacagtggcatcattttctcaaagatatgcatgttgataagatcagcaccaaagatcttgaatcagaaaccacatagcatacaagataaactaaggttcctctgtggcgagatgggagattctatggaaaacctagaggttttcccagcttat

SEQ ID NO: 163269 - DNA, 1975 bp, Arabidopsis thaliana landsberg
atgatcactgaggacttgtccttcgtgtgtacagataaacagcccaacgagttaagagtaagcaactgaaactagacgctaacggtacaaagtaaaagggggtggttgagttagtagctagtagaagcggaatgaagacaaatatgagtgcacaagctgaaatgcatcataatgaaaaggatcattctacataataatacatggggggaaaaaaggctcttaccaatagaaatagatgcattggctcctagtttgtccctgagttggctggagttttgtataacagcagccttcttgctagtcacctaacgtaagaagcaaatccatttaggcattagactcaaaacacatgatggatacttttgtcagcacgctcatccagtagtacctccttaaaatcaagttccacatagagattgggcccattcccctcatcctacaaaatgagaagagaagaagcgagagatccctggaataagccgaagaatggtgaatttggtaaaagctaacaaaaaggagaagaaaaagaagacgcaccagcaactgaaaataggtagtatcaaagccagctccgagagacagtatctgtttcttagaacttgtcccgcttagaagaaactgagacataagctttcggaaggcagcccaacgggaaaagtaacctcgattaatgatgggagatcttcgaacaggtcttttcacaaagagatgaacatagtcgtctttcatatatccctttttgacacaagacctttaaccgtattgttttcgttcaaggatacacagcgtcttcttgatagaaggtacagccataatcactcatatgggctgtgggtaagccatcaaagctctgagaagcacgaagaagcttggagcgtgatccgccgccctataggagttaaagtcatgtgtatgattgagtataagaacttaaaccgcaatcttatcctaaaagcctaagtagtgtttccttgttagaagatacaaagacaaagactcatttgaacttttggctaaaccatcaaagctttgagaagcaagaagaagcatgggtagttttttggagtcgaatatgacttgatgtcatgtgtatgtgataagtgtgtattttgcttgtcttgagcatccatttgtcatcactttagcatcatatcatcactgttttataccatttcacatcatttgtcatcactttgcatgttgaggatagttttgcatgcatgttgcatatttgcgttgatttcaggtgatttggagctgttgacgagctatctggaagaagcggacctgatcatgacaaaccactcgacccagaggtcgagtaggagcttcaagatctcaagagaccactcgaccaccaggtcgagtagaggacatcaccacttcacttcaccactcgagcccgaggtcgagtgccctcatctccatcaccagaccatcactcgatcacttcactcgaccatgaggtcgagtgtcttcacctccatcatcagacaaccactcgacctcttcactcaacctggaagtcgagtatctcctgaccaacactcgatcacgtcactcgaccccgtggtcgactgccttcaccttcactgccagaccactactcgacctcatcactctacctagaggtcgagtatcaccatcacaccactcgactgcatactcgatgacaagcttcagagccttcttcattccgcattcaaccagacactcgagcacaaggaagaaaagaagactccagctattcactcgacctcccattcgaccacatgggtcgagtacagttcttaatccgtcccaatacttcgtcgttttgagtattagggtttcggaatatttggctataagtagcatgtacttcacattttcgcagagaagaggtttttattctagttttatttttgcagacctggtgttctagacttttgtaatccggatttctctttatctattcagtattcagcttttgttc

SEQ ID NO: 163270 - DNA, 3549 bp, Arabidopsis thaliana landsberg
cactacaagaaaacaagcaatttgcgagggaaatttgcggtggaaaacatccctcgcaatttgctacggatttgcaagtgtattgtgagggaagaagagaacttcgcgaatccctcgcaaaatttgcgacgaatatatccctcgcaaatctgcgagacgtttgcgagaaatctgcgtggaccgcaccaatcccagcaaactcgtcgcaaaattgcgagggagttacgggtaaacagaatccctcacaaattgcgagacgtttgcgagtaatatgcgtggaaagcatcaatcctcgcaaactcgtcgcaaaattgcgagggatttacgagtaaccaaaatccctcgcaaattgcgacgagtttgcgaagatcgattattctgtcgcaacttttgcgacggagtagcgagtcttggcgggttaggtgagcatgtttttaattatcttaccagtctggttggtaggtgggattccctcgcaaatttctagcaaaatcctagcaaatccctcgcaaatgccttgcaattccctcgcaatttttttttgggacatctataaatagccaatgaaatgtgtaagaaatcataactcaaatcccaacatttacttacaaacaaaaaaaatattttcaaaaaaaaaacttcttacaaaaataataatgtcttggggtggagagcatgagatttacacattacaaagttggatgtacaatcatagagatcaagcgaccggtgaggtgacgagagagtattatgacggactgcgcactttcatgtatcaagcgacaaacgaaccatttgctcgtgagaacggtacaatattctgttcatctcgtaagtgtctcaatgaaaaatatttggaatttaatgtagtgaagaagcatctttataatagaagatttatgccaaactagtatggttacgtcatggagatggttgtagagatagcgcaggaactagttatacaaattgtggtgccgagcaacctagtaattttaataatgatgcgaattatggtcagcaaatacctgatcaatttggttatgggcataaccaggaaaatagatttcatgatatggttacggatgcatttcatgaaactattgcttcattttctgaaaatattactgaagaactcaacgtagatgctcaacacttttacgatatgttagatgctgcaaatcaaccactctacgagggatgtagagaagggcattctaagttatctttggcatctaggatgatgactattaaagctgataataacttaagtgaaaactgtatggattcatgggcagaattaattaaggaatatttgccaccggataatatatcggctgagagttattatgaaatacagaagttggtttcgagtcttggattaccatcagaaatgattgatgtatgcattgactattgcatgattttctggggagatgatgtaaatctgcaggaatgtcggttttgcgggaagccgagatatcagactactggcggaaggacgcgagtgccatataaacggatgtggtacttgccaataagtgatagattgaaacgcttatatcaatcagaaagaactgcggcgaaaatgagatggcatgctcaacatacaactgcagaaggagaaataacgcacccatcagatgcaaaggcgtggaaacactttcaaacggtatatcctgactttgctaacgagtgtaggaatgtgtatcttggcttatgcacagatggatttagtccattcggtttgtctgggcgacaatattctctttggcctgttatcttgaccccatacaatcttcctccagatatgtgtatgcaaagcgaatttctgttcttaagtattttagtgcctgggccaaagcatccaaaacgagggcttgatgtcttcttgcaaccgctgattcatgaactcaagaagttgtggtatgaaggtgttcatacgtttgattactcgagcaaacaaaatttcaatatgcgggcagtgctaatgtggacaattagtgacttcccggcatatggaatgttatcgggatggacaacgcatggaagattatcttgtacctattgtatgagtcgtaccgatgcgtttcaactaaagaaaggcagaagatcatgttggtttgattgtcaccgtcggtttcttcccctgcatcatccgtatcggaggaacaagaaactctttaagaagaataaagtagtctatcttccttcgccatcttatgtttctcgaaatgatttgtttgaccagatcaatttttatggtgctcaggaaacatgcaaacgtggaggtaattggcacatcccgacaaatatgcctgatgaatatggaagcactcacaattggcacaaacaaagtatctttagtccaagcgttagaaccaaaaagactcgtcctcgacgatatgacgatgaaggcgttgcacctacatataacgttcctgatgttccagatacctatgcccaaattggtagactcgcagggaagttgaaagaagtttggtgggacgaccatgcgctttctcgcgcagctcacaattacatacttagttgattacattcaaaaatttgaaaggtataaagcaacctagttttattcataatttttatatttaataattagtgtgatattaattaaggaagctaattaaacagctacattttaatttgtaggttatttgattcacaaatccgtgaagcatgtcctggattagaagaaaaagagtatgaaacttacaaagatcgtgattttgctagatggttaaaatactatgtaagtataagaatatttgaaagtaaaaattctattacttatttacttttaaaaatgacaaatttaatattttctatgtgtaggttataaatggatgtggaaacgaaccattaccactttggttgcatgagcttgttcaagaaccaagatctaagatcagaactgctctgatgtacttcactcgcggctatacttttcatacgtatccatatggaagtcgaagggcaactgcaaattattgaatccatgtcgaaggtgaaactgagttttatgggattctactgcaaattctagaagtcggatatccaggacttttgaatttgaaatgcgtccttttcaagtgtgattggtttgatccggtgatcggtcgttgggtacggaaaaataacttaggcgtggtcgatgtcaatgcaaacaagacttatgccaagttcgaaccatttatcctagcatcacaagcagggcaagtaagctttctatcttacccgcgtgtaaggtcacggcctgaagtgtggttatccgttattaaagtgaatcccaggggccgtatagtcggcttagttgatgatgttgtgatgtaacaagaaagcattagagaagtttccattccagacataacaacagaagatgttatccacattgacctacaaaacagagagttagaagacatcaccacagacagttccgaagaagaaaaacaagaagacgaattcggcgaatctgatgaaaacgttgagtcagaaaatgattataatgattcagaaaatgaatcagaataa

SEQ ID NO: 163271 - DNA, 4631 bp, Arabidopsis thaliana landsberg
gaggggagtccctccgagagtacatccgacggttttcgaagcagcgcaccgagctgcccaacattaccgactcggatgtcatcggggctttccttgccggcaccacttgccgagacctggtgagaaaactggggcgcaagactcccacccgcgcgacgaagctgatggacgtcgccaccaagtttgcctcgggtcaagaggcggtcgaagccatcttctagaaggacaagcagcctcagggggagccaaagacagacgcccccgaggcgtccgtccagcgtggctcgaaaaagaaggccaagaagaaggcgcaagcaaagcgcgacgccgttgacgcggatctcgtcgctgctgcggagcacaggaatcctcggaagcctcccggaggagtcaacacgtttgacaagatgctcaaggagtcatgccccctatcacaggtgtcccgtcaagcacacccttgaggagtgcgacatgctccggcgttacttcatcaaggcgggaccctcggcagaaggtggcaaggaccaaggcaacaacaagaaggggggcgacaaggaagaggagttctcggaggtccgcgactgcttcatgatctacggcggacgggtggcgaatgccttggctcggcatcgcaagcaagagcgccgggaggtctgctcggtgaaggtggcggtgccggtctacctggactggtccgacaagcctatcaccttcgaccaagctgaccaccccgaccacgtgccgagcccggggaaatacccgctcgtcatcgaccccatcgtcggcgacgtcaggctcaccaaggtcctgatggatgggggcagctgcctcaacatcatctacgccgagaccctcaggctcctgcacgtcgatctgtcctccgtccgagcaggcgctctgcccttccacgggatcattcctgggaagcgcgtccagcccctcggacgactcgaccttcccgtctgcttcggaacaccctccaacttccgaagggagattttgacgttcgaggtggtcgggttccgaggaacctaccacgcggtgctggggaggccatgctacgcgaagttcatggccgtccccaactacacctacttgaagctcaagatgccgggccccaatgggtcatcaccgtcggccccacgtacaaacacacgttcgaatgcgacgtggagtgcgtggagtacgccgaggccctcgccgagtccgaggccctcatggccgacttggagaactcttcaaggaggtgccagacgtgaagcgtcatgccggcaacttcgagccagtggagacggttaaggccgtccccctcgaccccagcggcgacgctccaagcagatccggatcggctccgggctcgaccccaaataggaagcagtgctcgtcgaatttctccgcgcaaacgctgacgtcttcgcgtggagtccctcagacatgcccggcataccgagggatgtcgtcgagcactcgctggatattcgggtcggagcccgacccgtcaagcagcctctgcgccgattcgacgaagagaagcgcagagccataggcatggagatccacaagctaatggcggcagggttcatcaaagaggtattccatcccgaatggcttgcaaccccgtgcttgtgagaaagaaaggggggaaatggcggatatgtgtagactacactggtctcaacaaagcatgtccgaagttccctactctctgcctcgcatcgatcaaatcgtggattccactgctgggtgcgaaaccctgtctttcctcgacgcctactcagggtatcaccaaatcaggatgaaagagtccgaccagctcgcgacttctttcatcacgcccttcggcatgtactgctatgtcaccatgccgttcggtttgaggaatgcgggcgcgacgtaccagcggtgcatgaaccatgtgttcggcgaacacatcggtcgcacggtcgaggcctacgtcgatgacatcgtagtcaagacaaggaaagcttccgacctcctctccgaccttgaagtgacattccgatgtctcaaagcgaaaggcgtcaagctcaatcccgagaagtgtgtcttcggggtaccccggggcatgctcttggggttcatcgtctccgagcgaggcatcgaagccaacccggagaagatcgcggctatcaccagcatggggcccatcaaggacttaaaaggcgtacagagggtcatgggatgtcgtcgggccctgagccgcttcatctcacgcctcggcgaaaggggtctgcctctgtaccgcctgttaaggaaggccgagtgtttcgcttggacccctgaggccgaggaagctctcgggaacctgaaggcgctcctcacaaaggcgcctatcttggtacccccagctgatggagaagccctcttggtctacgtcgccgctaccacttaggtggtcagcgtcgcgatcatggttgagagacgagaagaagggcatgcattgcccgtccagaggccggtctacttcatcagtgaggtactgtccgagaccaagatccgctacccataaattcagaagctgctgtacgcggtgattctgatgcggcggaagttgcgacactacttcgagtctcatctggtgactgtggtgtcatccttccccctggggagatcatccagtgccgagaggcctcgggtaggattgcaaagtgggcggtggaaatcatgggcgagacaatctcatttacccctcggaaggccatcaagtcccaagtcttggtggactttatggctgaatgggtcgacacccagctcccggcagcttcgatccaaccggaactctagaccatgtttttcgacgggtcgctgatgaaaacaagggcaagcgcgggcctgctcttcatctcgcccctcgggaagcacctccgctacgtgtgcgcctccatttcccggcgtccaacaacgtggctgagtacgaggctctggtcaacgggttgcgcatcgccatcgagctaggggtcagacgcctcgacgcccgtggtgactcgcagctcgtcatcgaccaagtcatgaagaactcccactgccgcgacccgaagatggaggcctactgcgatgaggttcggcgcctggaggacaagttctacgggctcgagctcaaccacatcgcctgacgatacaacgagactatggacgagctggctaagatagcctcggggcggacaacggttcccccgaacttcttctcccgagaactacatcaaccctcagtcaagaccgacgacacgcccgagcctgagaaggactcggccctgcccgaggcaccctcggctcagcacaaggcgccctcggctcagcccgaggcaccctcagcccccgagggtgaggcactgcgtgtcgaggaagagcggaatggggtcccgcctaattgagactggcagaccccgtacctgcaatatctccaccgaggagagctacccctcgaccgagccgaggctcgcggttggcacgacgtgcaaggtcgttcgtcttgctgggagatgggaaggagctctaccaccgcagcccctcaggcatcctccagcgatgcatctccatcgccgaagtcaggaactcctacgagagatacactcgggggcttgcggccatcacgcagcacctcaagcccttgttggaaacgccttccgacaaggtttctactggccgacggcggtgcttacgccactagaattgtccgcacctgcgaagggtgtcaattctacgcaaggcagacccacctgcctgcccaggctctacagacgatacccatcacttggccttttgccgtgtggggtctggacctcgtcggccccttgtagaaggcacccgggggctacacgcacctgctggttgccatcgacaaattctccaagtggatcgaggtccgacccctaaacagcatcaggtccgaacagacggtggcgttcttcaccaacatcatccatcgctttggggtcccgaactccatcatcaccgacaacggcacccagttcaccggcagaaagttcctggacttctgcgaggatcaccacatccgggtggactaggccgccgtagctgaccccatgacgaatgggcaagtagagcgtgccaacggatgattctgcaaggactcaagccacggatctacaacgacctcaacaagttcggcaggtggtggatgaaggaactcccctcggtggtctagagtctgaggacaacgccgagccgagccacgggcttcacgccgttctttctagtctatggggccgaggcatcttgcccacagacttagaatacggttccccgaggacgagggcgtacgacgaccaaagcaatcgaaccaaccgagaagactcaccggaccagctggaagaggctcgagacatcgccttactacactcagcgcggtatcagcagtccccgcgacgctaccacgcccgaggggttcggtcccgagacctccaggtgggtgacttggtgcttcggctgcgacaagacgcccgagggcgcacaagctcacgcctccttgggaagggtagttcgtcatcgccaaggttctgaagcccgggacatacaagctggccaacagtcaaggcgaggtctacagcaacgcttggaacatccgacaactacgtcgcttctacccttaa

SEQ ID NO: 163272 - DNA, 1213 bp, Arabidopsis thaliana landsberg
atggctcggttggccgaccttcaaaagaagatcgacaaagctactgaggaagtgcgtcatcttactcaagatgatcacgaccgaaggcctcaacaccgggagcttcgtcaagagggctcattcaacgaagatgaatggtacgatgattttaatcatggtacctttacttttgatgatgggtctcccttgacagcagaattgcaggctaccccatggcccccgtcatacaagccacctcagcttcccatgtatgatgggcactcagatccaaagctgtttctgatgagctacgaagcaactatatcctcgtatggaggcaatacagcagtcatggcgaagtccttcgtcatggcattccggaatgtaggccaaacatggtattcttctcttcggccagagacctattacgtcgtggcagaagcttaaggacatgctggttaccagtttccaaggctttcaaatgaagccagtcacagctcaggccctattccaatgcacgcaagatcacgaagaataccttcaggcgtatgtccgaaggttcttgcgtttgagggcacaagcaccaacagtgcccaatgaaattgtcattgaggccatgattaagggacttcggccaggacctactgcttagtactttgctagaaagcccccacagactctggagaagctgctccagaagatggacgagtatattcgtgccgacaatgattttcgtcaaagaagggaggaggctttcaggttttctgaaatgaccaggggcttcggaggaagattttatccgaagcatgttaggtcaattcacaactctactcaaaatgatgataagggaagtcagcagcaaaggccacagtactcctcacaggcttcggggcagcagcagagttatcctcggcctccagctccaaggggcagaggcgccaggggtttcagaggaagatttggggatcagccaaggaaaatttattgcttattctgtggtgaggacaagggccataccgccaggatgtgccatgttaccatccagaaacaaaaagaaatagcagaagctgcagcccaacagacccagccgaagcaggtcatgcatactgcttcgtaccactcgccttatatcccagagtatgtgggtaatcacactgcaacttatgttgcttcggcaagtcaatctcaggcatcttggcaacagcttccacctccaccaccaatgcaacgaggt

SEQ ID NO: 163273 - DNA, 5786 bp, Arabidopsis thaliana landsberg
tctaactggagaatccatgtgaaaacactaactaaggctctacaacaatgcgcagaattcacaaagctaagcgaaacgaccagagtgtcaatcgacaccaacatggtatcgatcgacaccactctcaggtggcaactcacgttctctaactttctacttttgcttacttctctttcgattcctctaacttaataactatggggacagtgttatctaagtctgggggtgtctgtgactaacttcatctgcttttttcttatgagtcagttgtgtcattttaacttatatagtcgttttattgagtcaaaacttttgtctgaaattatgatctatctctcgagtttattgcctggattgcttaagtactgcacattcaaatcaatccgactaatggaaaatccagaaagcaaatcaacaaacttaaggacatccattcccatcataatccacaaaggctggagctaatctcactgctcttccttttacctcatcaaatcggttagtgctcataggacttggctccttgttcatacctaataaatcgactaatgtgttaaaaagaaagtgttcctctccccaaataaagaaaaaaaaaattaattcaataataaattatgagagattgataagactttcaaatagtgtataggggtaggaatgtttcctatgaccccattattatacattatttggaacaatcaattacaaaggttggaaaaatgccgagggtgtcgatccagtatgcgagttcccctttgtttactctctaaaaagaataagtctgggggagagaaagaacaccaaataaaaaaatatatataaagaatggtcgatttatcatggtatagtacaggaatgagtctaaaaggttcttaagcatttacgtgattgatgagacccagcgatgatagcctagtggatatagttgagtgctttggtatggaatctaggatgttgtgtgggctagcggagaattacatggtggtcaggatttgattagaactgtttaatacatggatttggtttgtatgatcaaggtaataaactagagaaattgggagtttctatgtttttcaaacctctttcacagattcaaccttttgttttgcttgagggcaagcaaaagctaagtctgggggagttgatatgtcctggtttttactgatttctaacatagtttcagcagtgtttttaaagtctctctagtctttttcgtatgttttgagtcatttcaggtatatttacacatctgggaactatggagcacaatacggaattttggaagcttttcagcaatgaagattatcaaagacgttttttcacgcgatggtgtcgatcgacactacgcatatgtcgatcgacaccctattcggctaagggaatttctgtcttctatgaagtctttgagaagccctgaagttctccatctttgcaaagtagtccctgcacgtttttagacacgaatatacctaattatttggtaattgttagacctaagttttgttttagtgattgagatacattttgaaggaagaatccaatcactgtagagaggattctgaactccttttccttctattctaattcatcaatgcaaactattcagattatgatttgtgtttcttttatcatgtctgagtaatcaccttgttgggtttagggagtcttaatagggatttagatggattagtagatcgaaaattccttaggattattcttagagttcttcatcttgattattcttattgctagttttagattgatcacctagaactggatattaaataataggtatgcccgccatatgtatttgttatttgaaccatcatagatgagcctaagcatttaagaaagaacaggtaggattaatcatgctcatagaagggctctggtttagatactaggtgaactaatcaagcttattaacaatgcatgctttagcataggatttctcggcttctccggttatcttagttgtaagtatagagtgtttcgcggaacgccagcggttactctagaatgatagtttgagtttgagaacggtgcgataacaatcctgatattagctagatctacaatttatttatctcccgagacaattccttagacctgacgctttaatcacttgaatctacaactcatttacatgcttatttgtctttaatattcaattacttcatttagcttattcaacaacatcataagtctattgtgtgaacatcgagagcttagtggaattcgacccgtaaatgctaacgacgatctcttatttgagggagtaagtgataacactgtattttactcattttaggtttatgtttatcatcatttagctttgcatttgctcattgtatcatatcattttgcaccattttagcttgttttgcatacttaggcatctaggatcatcttgcattcgcattgcatgttttggtgtgttttcaggtgcaaaaggagcttaaaaggactctactcgatccattcactcgatccaggcagctacagaagaggcatcattctactcgacctctttactcgatccaggatgctacaaatgaggctaaagtttactcgaccctcttaatcgatcaaggtaaccttagatgaagcagcaaattgatctactcgcccctcttattcgatccactactcgatccatatactcgaccaagggtgaccatctctacaagacttgttgagctatcaaagcgtcttcggatcctcctcattccccactcaaccagacatctgagcatacagataggagaggatgaagcatctactcgaccaattgatcactcggagcatagacacaaaggcgcagactttttgcagcaccctctttactcaatccccaagatcgagtattcgcccaaaccgcctcaagtatcttgtcttttagtgaatctagggtttccaacattttagtataaatagatcactttgggatttgtccaaaggatctatgctttatctttcagtttttctttgtgtttatgaatcttaaaactttaattactcttaatctatttcgtttttgcatttgattttttaagtaaagttgtttagcttgtttagatctacattttggtatgatttcaataatttctgggtttgtgttcttgagaatgttgcatgagtagtgattagggttcttgtggatgaattagattagggtaatctcaaggttagttagggggttagtgtttaggtttatacccttctggattcgcttggccactatgcggttttcgctggctaatgtggagattcgataatagacgtctagcgtccaaaagacgttcaaatggatgtctgacctacgaattccagagatttgtagactcgaccaagacattggcttgtctgcttattggctttggtagattgtttgttaaacccttctctgctatgtttcatcaacgacagttgagattaggaagtggtagagttatggaggtctctgtcacgacaatggattgacccggtttttgaatctatcgtcaagggtatctacctttcacctgttagccacctgatgaaccctagagttgcccttatcgatgaacccatcctttgaacttctattagatttatttgtatcctctgttgattgcacttttatttacctgttatttgtatcccctgttgattgcattttagttacttaaattcgtcacctgttggttctactcgacccaatgatcgagtagggcttttaaagttctcattttcgttgtttgaatcctgacctaggattgttactagaaacccaccatcattataatctggcttgacttagttgctcctatacacatcttgattgctagcactaacagtggactcaatggacaccccctatagcggcatcgacatgttagtgtttaaggggaattgaactgaacctcacattcagtaaataagtaggcctaaaaacctacttatcagccatctagtcatatttgactctaaaaacttaaccaagcctcttcatgcttcctatggctttgatggtgatgtcgaagtcggtatgaaccatacacctgatatcaagtcgtatttgactccaaaacactaaccaagcttcttcttgcttgtcaaagctttgatggtgtagccgaagtccgtatgagaatttggctttgtatcttccaacaaggaaacacttcttgggctttcaagatctggttgtggttcgagttctaatacttaatcatacacatgccatctaggcatatttgactccaaaacactaaccaagcttcttcttgcttctcaaagctttaatggtgtaagcgaactccgtatgagtcttaggctttgtatcttctaaaaaagaaacaatacttaggctctttaagatccttttgcggtttaggtttctatactcaatcgtacacatgacatcaagtcatattcgactccaaaacactaaccaagcttcttcttgcttttcaaagctttgatggtgtagtcgaagtccgtatgagtctttggtcttgtatcttttaataagggaacaatacttaggcttttaagatcccgttgcagtttaggttcttatactgaatcatacacatgatatcaagtcatattcgactccaaaacactaaccaagcttcttcttgtttgtcaaagccttgatggtgtatgataagtgtgtattttgcatgttttgagcatccatttgacatcattttagcatcatatcatcactgttttataccatttcacatcatttgtcatcactttgcatgtttaggatagttttgcatgcatgttgcatatttgtgttgttttcaggtgatttagagctgtcgacaagctaactggaagaagcggacctgatcattacaaaccactcgaccccaggtcgagtagaagacaccaccactctatcacatcactcgacccccaagtcgagtgtcttcatctccatcccctgacctccactcgatcacatcactcgacccccaggtcgagtgacttatccccattgcctgacctctactcgacctcatcactctacctggaagtcgagtatcaccatcacaccacttgactgcatactcgatgacaagcttcagagccttcttcattccgcactcaaccagacactcgagcacaaggaagaaaagaagactccagctattcactcgacctcccactcgaccacatgggtcgagtacagttcttaatccgtcccaatacttcgtcgttttgagtattagggtttcagaatatttggctataagtagcatgtacttcacattttcgcagaaaagaagtttttatctagttttattccgcagactttatgttctagactttttgtaattcggatttctctttatctattcagtattcagtattcagcttttgttcttgatttcgtttactgttgttcattctgttatcttcctgatgttacactgttgttatcatgtcttcaatttgttcaacgtttatgctttctgttatgatgtctgagtagtgaataggtttctgaggatgggttagagtagtgtaggattctcagtatgctaggtgattgagtattgattgatagatcctttctggattagttgttcttaatgcctattgctttctgatcaactggaatttgagcccagacatttccgcgcccaaaaggtgttggatgaaatgtctgaaccactaattctagagattcgtgaccatgtaccaaggtattggttgcagggagcgttttggctttaacttgttgattcgtaatgcctgttaggttagctctcgtcaatggtgat

SEQ ID NO: 163274 - DNA, 945 bp, Arabidopsis thaliana landsberg
  unsure (1)..(945): unsure at all n locations
atgattatccctgaaactgacagtttcttcttccaagagcaaccgcaacatcagccattgtatcccgacgaagctctttcaccgtctctcttcgggtttgatcactatgatcatttctacgagtcgtttcttacacctcaagaaatctttcttcctagccctaagaccagagtcttcaacgagtcacaggaattagattccttccacccgccaaaacaccagaaactcattgactccagcttccattttaacagtcacgaccctgagtcacaggaattagattccttccacacgccaaaacaccagaaactcattgactccagctcccatttcaacagtcacgaccctttttcccctagccttaattctaattacctattggattcttacatcacagaagctactaacatttccgagtttagagctcctgatttctcatcgtcgttcaaggttgggtggactgaacaaggcgataccaagaagcgagagctatctgctcagagcatcgcagcacgaaaaaggagaagaagaatcacagagaagactcaagagctcggaagccagaaacataacactgccgaaatgttcaatgccgcagctaaatatgtcaagttcttgcaggctcaaattgagattctccaactgaagcagaccaaaatgcaggtataagataaaccgtaaatccaaatggttccatgcagaaattttccttcctttttttatacgatacttgtttaaattttgcaaactatgaatagttcaaaggnnnnnnnnnnnnnnnnnnnnnnnnnngcttctcaagaaatccagaagaagctatctacataaaaagtgtgtgtggttccaaggaaaatggttcaagtcctaaaagccgaagaatgcatcttgacaaaccctaagatttctcaagacattaacaaattgttgtcaacaaatatgatgaat

SEQ ID NO: 163275 - DNA, 1338 bp, Arabidopsis thaliana landsberg
atgtctcaatctctcatacgaatcttgaagccccttgtctacacaaatgtccttgtaagttttttctttctaattcttatattctactataattggggatttattttagggttttactagttaatttctttttgtatgattagttcaacgtacttacattttgacagagaaaaaacaacttggttagatggtgttcgtctacgccaatctacccttttttgttaattgaccacctccttaagatcggaggttcttcaaatggtagcagctcgatatctagaaggtccggatcagagggtgaaaacgaaatcataattaagagcaagtttttggctggggaagtctgcgaggcaatgagtatgggattgaatcaaagtggagtgaatattcacatgaaggaaaacacatccctccgtgatatggacaacgttcgtctaaacatctattacaagccctctgaccctaaatcaaaatctgtttctgttcatctacctcctcttccaaaaggctctcaaatccaaaacattgccatgacctctcttcctgacctaaaaaatgatgattgggtcgttgctatcaagttttcggtatctcagcttatgctctataggcataaagacttaaggtggatcaatatcgaaaccacgcatgggcatgagtgtatatgcccatactcaagtctcacgtactctaagaaagagcaaagattttacacttcaactcctggaagcgattggatgtgctcatttggtctcaacttcaaagagaaagacgagcccacgtatcatataattgacaaaaaagatcttcctcattatatgttgtatgagttggaggagatgaattcgtttaccaggacagatcatctagtggagtcaccttccggggaacaattcctcatctcatggtacactacatatatactttcttgttctttaatttcttttataagtagacacctattagctgattccttaatggctctctcatgtgtttaaaggtactacggggacgcctttgagtccgacacagtcgtgcacaaaacaaagcggttcttggtgtttaaagagcaagaaaatgctaaaagacacaaagatatgtattacactgaaaatattggagatctttgtatttttcttggacatggtgaacctatgtgtgtcccagcaagctcgtctccaggtcttaagccaaattgcatctatttcgcgggacataactttggtgtttacgatatcaccatgcagacaatctctctcttctacacagaggaaggtccattaagatccactgcatttccttactggcctcatccattttcactcactcgtacctagt

SEQ ID NO: 163276 - DNA, 1361 bp, Arabidopsis thaliana landsberg
  unsure (1)..(1361): unsure at all n locations
aacgagggtacaactctcataggtcccgatcttacaacgttaaaagcgtatatttggaaagtgcagtgtccacctaagttacgccattttttatggcaaatattatcgggttgtgtaccggtatcggagaatttacgaaagagaggtatactttgtgataagggttgtgttagttgtggtgctccagaggaatcaattaatcatactctttttcaatgccaccctgcaaggcagatttgggcactatcacaaattcctacggccccagggatttttccctcgaattcaatttttacgaatttggatcatttgttttggagaattccttcangcgtcgatgcggctccttacccatggataatttggtatatttggaaagcaagaaatgaaaaagttttcgaaaatctggataaagatcctttagaggtcttatgtttggcggaaatggaagcaaaatcttggcagttagctcaagtcgaacttcatgctgaaaaccaaggtttctcaaacttgtaaactcggattcgagtacgggattttttacatgataccagtttttctggatacctttgttatgtggatggctcatggaaaggaagtgaaaaaaattcgaggttaggatggtactgtatatcatcaagtggagagatgccaaccatgggagctgccaatattaggaagaatctgtctccccttcatgccgaggtggaagctcttatgtgggagatgaactgtatgattggtgccgacaaccaagaagtagtcttctttacagactgttcagacttggtgaagatggtgtcttcctcaaccgaatggccggcgttttcagtgtatttggaggagttgcagagtgatagggaagaattcacaaatttctctttatctttaatttctcgtagtgcaaatgtaaaagcggataagttggcacgaaagattcgtaccgtaccgcatcatgtcacgtatgtaaacaatatccctcgggattagctcttttgagttttaatttatatcggttgacaaaaaaaaaaaaaaaaaagatagcgcacctgagaaaaaaaggtaaagagatggcgcatctgaaaaaccttccatgggagttgattgaagagatactctctcgtgtcccacctaaatctctcgttcgcttcagaaccgtatcgaaacaatggaacgctcttttcgacgacaagacgttcatcaacaaccacaagatgacgtttcgtttcatcttagcaaccaaatccaagatttattcggtaagcatcgatcccgtgatagtggtacgtgagttacccttaggtactccaggtttagaatctttgggacttaataacttggttgattgcaatgagttgttg

SEQ ID NO: 163277 - DNA, 1810 bp, Arabidopsis thaliana landsberg
atggtggtgacaaggtcaagtcaggaggaggatgtgaaagggaaaggggttgagaaggaggatcttatcgctactcgtatgacaaagcttgaagagatggtggctgagcagcataaatcgatgctgaagcacatggctgacatgatgagtgcgatgagtagaacgacggcgaagagggtgacggaaggtgagaaggtgttggatcggagtgtaccacgttcgtcaacttcttcgatggccagatctgggtttgttgaacatcaacgggactttcaacgggattttcgacctgagatggtaagacaggaggtgaataatcaatatggtaatcttactaggttggggaagattgattttcctagatttgatggaagtagaatcaatgagtggttgtttaaggtggaagaattttttggtgtggattttaccccggaagagatgaaggttaagatggttgcaatacactttgatagtcatgctgctacatggcatcactcgtttattcagtctggaattgggttagatgtgttttttaattggccagagtatgtgaagttgctgaaggatcgctttgaagatgcttgtgatgatccaatggcagagttaaagaaacttcaggagactgatggaattgtggagtatcatcagcaatttgagttgattaaggtgaggcttaacttgtcggaagagtacttggtgagtgtgtatttggcagggctgagaactgatacacaaatgcatgtgagaatgtttgaaccgaaaacggtgagggactgtttgcgtttgggcaagtactatgagagggctcatcctaagaagacagtttcttcaacttggtcgcagaagggtactagatcaggaggttcatacagacctgttaaggaagtggagcagaagagtgatcatttggtaacaagagttcttataagccagttagccagcaacctaagcagctatctcaacaagagatgagtgagagaagagcaaagggactttgttacttttgtgatgagaagtttactccggagcattatttggtacataagaagactcaattatttcggatggatgttgatgaagagtttgaggacgctgtggaagttttgagtgatgatgaccatgaacaaaaaccaatgcctcagatctctgtaaacgcagtttctggcatttctggttataagacaatgggggtgaaaggaacagttgataagcgagaccttttcattctcattgattcgggatctactcataatttcattgactcaacggtggctgctaagttgggttgtcatgtggagtcagcagggttaactaaagtggcagttgcagatggtaggaaattgaatgtggatggacagattaaagggtttacttggaagctgcagtctactacctttcaatcagacattcttttgattccattgcaaggggttgatatggtgttaggtgtgcagtggttggagacattgggacgtatttcttgggagtttaagaagctggaaatgcggtttttctataagaatcagagggtttggttacatggaattataactggttctgtgcgtgatattaaagctcataaacttcagaagacgcaggcagctcgtattcagttgacgatggtgtgtgatatgtaggttgtgagtgataaagagcagtacagtggctcgattagtgcgttgaccagtgatgtagtgcaagaatcagtggtcaacaacattgtgaaggaattgtcggatgtgtttgcaccgccaacacccttgccaccattcaggtaaaaaaatgtccataaaattcagttattgcaggg

SEQ ID NO: 163278 - DNA, 6117 bp, Arabidopsis thaliana landsberg
  unsure (1)..(6117): unsure at all n locations
atgacggtgatataaagagaacaacttgggcaattcgcgatctcttcgccgagccggagatcttcttttgtaatctggaacaaatcaccacaaggacaaggatacgtgtacgcttgaatctcttcgttccactccatatcctctatctcaacatcgtcgtacgacatcgcttacgcttccgattgagaagcgtcgtatgtatagattggaagcgtttccagcgttagctatgttcggaaaaaaaaaaataggaggaaacggcgattaggtttttttagggggaagaagaaagaagaagatgactcctcgacgaaaattacaaatttaccctattcgttttaagtacataaaaaactaattcgtgcggagatactcgaactagccacctgagaagaattaaattagtgttattttcgattaattacattatataactctaacgtttagattttgaaattagttttcaactaatttatgattttatgtttgatatgtatatatatttacgcttctaacacgtacctgcttcctaaattttttcaaaaactcgttgttacgcttccaaacgcttccgcttctatcagagagtgttggtttatttatgtggtttagttcattatgtatttcgattatattaaccgtttgtatagtcatagtatatatacttgtacaaatacattttacagagttaatgaaaaaatatcttcatctatgtctaacaaactttctcatctctctcaatcgtaatatggtatcagagccatccaagctcaaattccattgttactcgatctgaaatcttcgttttcaagctcagaatcgacttctccatggctcaagctcaagatccagtggtgacagtagctcgagtgacccggacatcaactcgatcgaagtcaggaacaagttcagctcgcagacagtcgcgatccaccgacattgatgattctcctccgaattctcctccagttgctagatccaagacttctagagcttcgcgagtcatcgtttcaccgaaatcaagtgatccgactcaatcaccgttcttcttgcacaatgccgatcatccaggtttgaatatcatctctcatcgtcttgatgaaacgaactatggagattggaatgttgcaatgctcatttcgttagatgttaagaacaaatctggatttatagatggaactctgcctcgtcctttaaaaacggataagaacttttgtctatggtctagatgtaatagcatggtgaaatcttggcttctcaattctatgtctcctcagatttacaggagtattcttcgtatgaatgatgtttcggatatatggcgtgatctcaatagtcgattcaatatgactaatcttccacgtacatataatcttactcaagagattcaggatttgcgtcaaggtactttgtctttgtccgagtactatacttgtctcaggacattgtgggatcaattagatagtacagaggagttggatgatccttgtacatgtggtaaagctcttcgtctgcaacagaaggtagaaagagctaagatagtgaagtttttagctggtttgaatgaatcttatgctattattcgcagacaggttattgctaagaagatacttccgagtttagcagaggtgtatcacattgtggatcaagacaatagtcaacaaagattttcaaatgtggttgctccaccagctgctttccaagtgtttgaagtcactgttgctaatatcattgatcctactatcttctatgttcagaatggtcctaataaggggagaccgatgtgttctttctataatagggttggtcacattgatgctataagaagcatggttttcctccaggctttactcctaaggataaggttggtgataaaacacataaaccaaagcctgttgctgctaatgttgctttggctactacataatctgatgatactcattctggtctggagagtttggtgggcaatttgagcaaagaataacttcaacagttcattgctatgtttagctctcaacttcagcctcaacctcacagtaattctgcagtagctagctcatttcaagctgataacattggtatttctttctctccttccacctatagttttattgggattttgactgttgctcaacatactctttcctctaaaacatgggtgatagattcaagagctacacatcatgtttcacatgatagagatctgttttttgactttgaatacatttgttttgagctcaatgaatttactagctggtcccattgtgaagattagtggagttggtactttgagactcaaagatgatattcttttcaagaatgttttgttcatacctgaattttgtcttaatctgatcagtataagttcattgacagatgatattggttcaagagtgatatttgatcaacatgcttgtgaaattcaggatcttatcaagggcggatgcttggtcacggtaggagagtggctaatctttatgtcatggatgttgaagatacaaatgtttcagtgaatgcagttgtggatatcagtacgtggcataacagactcggtcatgcttctctacaaagactggatgttatttcagaaccattggaaaatactaaacacaagaataaaggatcagattattgtcatgtttgtcatctagctaagcagagaaagttgtctttcccttctcagaataatgtttgtaatgagatttttgagatgttacacattgatatttgggggcctttctcagttgaaacagtggatggttataaatatttcttgacaactataatagttgatgatcattctcgtgcaacatggatttatttgctcaaaactaagtctgaagttcttacaatatttcatgatttcattcagcaagtggagaatcagtataaggttaaattgaaagctgtaagatctgacaatgctccagaattgcgttttacaagtttgtatcaacagaaagggattatggcttttcattcttgtccagagactccagaacagaactcggttgtagaacgtaaacatcagcacattcttaatgtggcaagggctctcatgtttcaatctcaggtaccactttctttatggggtgaatgtgtcttcacagctgttttccttatcaacaggacaccttcacagcttctttcaaataagactccttatgagatgctcagtggtactgctcctcaatatggacaactcagaacatttggttgcttatgttacagttctacatcaccgaagcaaagatataagtttcagcctcgatcaaaagcttgtatcttcttgggatacccgtttggttataaaggttataaacttatggatttggagagtaatgccatttttatttccaggaatgtggtgtttcatgaggaggtgtttcctttggctggtactaaaaagtcagcagnnnnnnnnnnnnnnnnnnnnnnnnnnnnnnntgtgccttcaggtattcaacaacaatcttctttctcttctcttccatcacaaatttctgatctaccaccacaaatttcttcacagagagttaggaaacctcctattcatctgtcagattatgtttgcaacaatatgcaatctgatcaaaaatatcctatatcttctactatctcttactctcaaatttctccatctcacatgtgttatatcaataatatcacaaaaattcctattcccaccaattttgctgaggcacagggcactaaagaatggtgtgaagctgttgatgttgagattggtgctatggaatctacgaatacatgagagattacaacattaccaaagggtaagaaggcagtgggttgtaaatgggtgtttactttgaaatttttggcggatggtagtcttgagaggtataaggctagactggttgctaagggttatactcagaaggagggtctagattatacaaatacattttttccagttgctaagatgacaacgatcaagttgatgttctgcttctaagaaatggtttctgaaacagcttgatgtgtctaattctttcttgaatggggagttggaggaagaaatatacatgaagttacctgaaggatctgctgagagaaagggtatatcttaccatcaaatgcagtttatcgtttaaaaaggtccatttatggtttgaaacaggcttctcgacaatgatgtaagaaattttccgcatctttactcagtttgggattcttcaaaacacatggagatcacacattgtttctcaaagattgtggaggtgagtatgtggttgtgttagtgtatgttgatgatattgtcattgctagtacagttgagtcaggatttacataatcttttcaagttaagagatcttggagatttgaagtattttttgggattggaaattgctagaactgaagcaggaatctcattgtgtcagcgaaaatatgctttggagttgttggcatctactggtatgataaattgcaaacctgtttcagttccaatggttccaaatttgaaactgatgaaagctgatggtgagcttgaggatagagaacattatcgtcgaattgttggcaagttgatgtatttgactataactaggccggatatcacgtttgcggtgaacaagttatgtcaattctcttatgcacctaggactgcacatcttcaggctgctcacagagttcttcaatacattaaaggcactgttggtcaagacttattctattctgcttcttctgatcttactttgaaagaattatcaaactcggattggacatcttgtcctgatagtcatcattccactactggtttcactatgttcgtcggtgattcccttatatcattgagatccaagaaacaacatgtggtttccagatcttttgtagaggctgagtaccgtgcattggcattggctacgtgtgaactggtttggcttcacactttgctcatgtctttaaaagctagctacttggttcctgtgttatattcagatagcacagctgctatttacatagccacaaatcctgtgttccatgaaagaacaaagcacatagagctggattgtcacacagtttgggagagactggacaatggcgagctgaattactccatgtgcgtatagaagaccaagtagcagagtaaattcatttctgttgataaacgaagaaagacttagtctttgggtaagtttagcttttgtgttagcatctataagttatattttcttgtttctaatcccacttctcttgatgttttcttattgcagttacatggaacattacttgcacatattcgcagtttctagcacggaaaactccgacttgttgtgtctcactctcagccttctacaatgaaactatagtaccatgtccaacttgttcttgtggatgtcaaaatagttctcaagctggtacatgtgttgagtaagttcctatactcttagaaactccatcttggttttgttttcttatctcttttctgattcatttcttgtgacagccctaaaatagcttcagtagtaccagccttagggaagaacaacctcgaacctctcttgcaatgtacgcaacatatgtgtcccattcgagttcattggcatgtaaaaactagctacaaagagtactggagagtgaaggttgccatcacaaactttaactacaatatgaactactctcagtggaacttagtcgttcagcatcccaacttcgacaatctcactcagcttttcagtttcaactacaaaccgcttaatccttacgcgaacataagtaagtttctcattcagattctttctcttgttcttaagaaatgtttggtttctaataatataatgttttggatcatatattgaagatgacacggccatgctatggggaatcaagttctacaatgatctttttaaggcaagctggtctagtaggcaatgtacagtcagagcttctcttccaaaagaacccattggagttcacattcgagaaaggatgggcgtttccgaggcgcatttacttcaacggtgataactgcgttatgccacctccagactcttatccatggcttccaaacgctagtccaaaattgcaacctcaccatttgtcatacttctcatcactttcttttctgttttgatcctactatattatttggga

SEQ ID NO: 163279 - DNA, 897 bp, Arabidopsis thaliana landsberg
atggattcaccaaatccatatcatcatacttcaagctttataaaccttttgaacagtcaagatgacagtcacaatctcccaccaaatccatatgaatgctttgaacttggatcagcaaatgtccctgtgtatagcactgagtggtctgatgatgatccaagtgaagatgaagcactaattgctgggaagaaagggaagaaagccaagaaaccaaggaggaattggtcatcaactgaagatattgttctcatatgtgggtggctgaacacttccaaagatccgatagtgggcaatgagcaaaagggggcagcgttctgaagtccaaagctcaaaggtgtggagaaaagaggccacatacgttgtaaacacatgtgatcaaaagtgaatgacaccgtgaacaagtttgtagggagctacttggccgcaagcaaacaacaaactagtggtcagaatgatgattctgtggtgtctttggcacatcagatcttctcgaaagattatggctgcaagtttacttgtgagcatgcttggagggagcttagatatgatcaaaagtggattgctcagtctactcatgggaaagcaaagagaagaaaatgtgaagctgactctgactctgttggcgttgaagacaaggaagctcgtcccattagtgttaaagctgccaaagccgccaagcaaagtccggttgaaggtgaagaaaccaatgctttgaaggagatacaaagtatctgggagataaaagataaagatcacgcagcgaaagagaagctaatcattattaaagagaagaaaaataggactaagttgcttgagcgtctgttagggaaaacagaacctctatctataatagagattaatcttaagaacaagttaatcaatgagttgttggcttga

SEQ ID NO: 163280 - DNA, 1807 bp, Arabidopsis thaliana landsberg
gatttaggatgtgaaaatcggaaacgggtaattaaaggcgggcacggcgcgagctccgggaccttgccggcgatgacggtggctcattctcaccggttctcgacggcggtaaaccccattaacattagcttgctttcaaaacaattacttcagcttggaagaacaagtaacaattccggtaccttctcagagatcagtaatcaaaaagaacttctagtgtcttcactcatctcaaagctcgatgattgcatcaatctcaatcaaatcaagcaaattcatggccatgttctccggaaaggtctcgatcaaagctgttacattctcacgaagctaattcgcacgttaacgaagctcggtgttccaatggatccataccctcgccgtgtaatcgagcctgttcaattccggaacccgtttctatggaccgcagtgattcgtgggtatgcgatagaaggtaaaattgatgaagctattgctatgtatggatgtatgaggaaagaagagattacgcctgtttctttcactttctctgctcttttgaaagcttgtggatcaatgaaagatttgaatttgggtcgtcagtttcatgcacagacgtttagacttagagggttttgttttgtatacgttgggaatacaatgattgatatgtatgcgaaatgtgaatctattgattgtgcgcgtaaggtgtttgatgaaatgcctgaacgagatgtgatatcgtggactgagcttattgctgcgtatgcgagagttggaaatatggaatgtgcagcggaactgtttgaaagtttgcctacgaaggatatggtggcttggactgctatggttacgggatttgcgcagaatgctaaacctcaggaagctttagagtattttgataggatggagatatcgggaattcgagctgatgaggttactgtcgccggatatatatcggcttgtgcgcagcttggagcaagtaaatacgctgatcgggctgttcaaattgctcagaaatctgggtattctcctagtgatcacgttgttatcgggtctgctttgatagatatgtactcgaaatgtggaaacgtagaagaggcagttaatgtgtttatgtcgatgaacaacaaaaacgttttcacttatagttcgatgatcctaggtcttgctacgcacgggcgtgctcaagaggctttacatctttttcattacatggtaacacagacagagataaaaccaaatacggttacatttgttggtgcgcttacggcttgcagccactcgggacttgttgaccaaggacgtcaagtatttgattctatgtatcaaacatttggtgttcaaccaacgcaggatcactatacttgtatggtcgatcttcttggccgtacagggcggttacaagaagcccttgagctgattagaactatgtctgttgagccacacggaggtgtctggggtgcgttgctcggtgcctgcaggattcacaacaatccagacatagcagagattgccgctgaacagttgtttgaattggaaccagacattatcggaaactatatcttgctctctaacgtctacgcgtcagctggagactggggcggcgttttaagagtgaggaaactgattaaagaaaagggtttgaagaaggcacctgcttttagttgggttgtagataagaacggtcagatgcataagtttttcccgggaaacctgaaccatccaatgtcatataagattcaagacaagttagaagagcttgaagaacaattaacggtattagggtatcaaccggatttgagctctgtgccatacgacgtgagtg

SEQ ID NO: 163281 - DNA, 831 bp, Arabidopsis thaliana landsberg
  unsure (1)..(831): unsure at all n locations
gaaatggcgatgaagctatatggagatgagatgtcagcgtgcgtggcacgtgttcttctctgccttcatgagaagaacactgagttcgagcttgtccctgtcaatctctttgcttgccaccacaagctcccttcttttctctccatgaacgtacgcgctgcgcatatttctcaacacattactatcatgcacacatatctgtatgtatgannnnnnnnnnnnnnnnnnnnnnnnnnnnatgcagccctttggcaaagttccagctctacaagatgacgatcttaccctttttggttcgtataaatttgttttacataatgattttagtttagtttaacaaatatttgtctactgaaaacagagtcgagggcaatcactgcatatatagcagagaagcatagagacaaaggaacggatttgacaagacacgaagaccctaaagaagcagcgattgtgaagttatggtcggaagtggaggctcaccacttcaaccctgcgatctccagacggatccaccagctcatcggcgtgccgcttcaaggtgagtcttctaatgcagccatcgtggaggagaatctggagaatctagggaaaatacttgacgtgtacgaagagagacttgggaagacaaaatacttagccggagatacttacacactcgccgatctccaccacgtgccttacacttactacttcatgaagacgattcatgccggtttgatcaacgaccgtcctaatgtcaaggcgtggtgggaagatctctgttctcgtccggctttccttaaagtctctccaggcttgaccgttgctcccaccacaaattgatctcaa

SEQ ID NO: 163282 - DNA, 1185 bp, Arabidopsis thaliana landsberg
  unsure (1)..(1185): unsure at all n locations
gtcatgggaaaacggccgaagcagcaagtcaccgcccgtccaaggaagtgtccaatagaaaaaccggaggagataccagatgatctcttgattgatgttttctcaagattgtccattgaagacgttgcaaggtgtcgttgcctgtcgaggttttggtcttccatactacgtcgtcgatatttcacggaactgttccacaaaatgtcatcgacccggcctcgtatactattcaccttcctttactatggtaagcgactcttttactccatgcctcaagatctagaccccagcaaccactactcgcctctaccttatttttcgatatcatactctcctatatctgcccattaccagatgcatttccctaaagttctgggtgcttcagcaaaggtgtgtccccctatacttggcttgatctgttgcaaatctagtaagacgatgatttttaaccctagcacaagagagtcaaagttcatttcaacaacgaagagggttggcgtgaagagtacttcatttgggtatgatcctatcgacaagctattcaaggtattgtccatgtccgatgattttgtgtgtcgagtttcaacattaggaacggaagtagtgacttggagaacggtcgaatgttcggtaccccatcaccctttacatagtgagatatgcatggatggggtattgtattatttagctaggcgtgtgggcgatgaaactccaaaaccttatatggtagcagcctttgaagttagattagagagattcaagtttctaccaatggatctcagatgtaaacacattggttgttcagcagtcatagattacaaaggtaagttggccgtagtatggctaaatgtggatcgtgacaatcacgacancatagaaagttttgagctgcgtgttctaaatgatgttgatgaagtgaaatggtctcaaattatttacgaattgccaaattattggaataatctacctgcggatatcgacgtatccattgttgggatgactagtgcaggtgaaattgtgttggcgacaagccatatacggcatcctttctacatcttctactacagtaccgtgactcttgctatagtacaacttcgaatcgatttcggaattgaaggttcggaggctaatcactgctcaacgatgtcgacatttgtaaaccatgtggagaatgtagagctagct

SEQ ID NO: 163283 - DNA, 3983 bp, Arabidopsis thaliana landsberg
  unsure (1)..(3983): unsure at all n locations
tcgccccaatggtactcgagaacagagacccagacacccgcatccagtgcccccatagcccagtcactctacgcatcttcggacctccatggctaaaccgacatccgtgcaccggataccataagaattacctctataacagtccccaagcacgggttgatccgcgccacgccgtgaacatggcaccattctgcaattacacagctcaaacaaacgcaaacatggttcaaatgcattctcaaatgcacctagcagtgagcgatgctcccgacatagattgcgagatcgaagaaaacaggtgcaccccattcacggataggatcgctcgttttcgcatccgagacgtcgagagcctctgtttcccggaatacgacggaacgagcgacccaaagactcacctgagattcttccgtacctgacagacgaagaaaatgaagcaggtcattgccgtttcttcgcagaaaacctcgtaggtcacgccctcgaattgtttgctaacctagaagggaactctattgataccttcgaccagctcgccgccgatttcttaaaacagtattcggtacttatcgaacactggacgtctgaagccgacttctggagtctcacccaacttcagaacgaatctctgcgatcttacgtcgaaaaattcaaaacaatcaaatcaaagattgcgaacttcgcaacggtctgtggttttcctctaggttcggtgaggaactcactgttaggcaaccggtctctttagacgatgcccttcacaaagctctccactttgccaaagccgaagaggagctcgctgtgctggccttaagattcaaagaatctaaaacgcaaaacgctccccttgcaactaaaaaaccctttaaaaaggaaaaccaaacgcaagggcagcataccttactcgcaatagaagaggcagctgaggacgagagtccagaacttgacctcgaaaaatattgcaagtaccacaaaaaaaaggacattccaccgaggagtgtcgcgccgttaaaaaattaatcgcaactgggggcaaaactaaaaaaggttcaaaccccaaagttaaaacccctcctcccgacgaacaggaggaggagcaaactcccaaacaaaagaaacgggaacgaacaccggagggaggtgactctcctccacccgctaggagagaacgcatagacctagtctttgcagaactcgatctgggtggcagaacaagaagtactaattatagaagacaaactcgcggaaatgaaaacagtcagatcctctgatccttctcaacgcggacctcgaaaatcattgattacacaggtctgcatagacgaatcagatcccaaacgatgcgttgggataggtcaagacctcgacccagcgatacaagaggatctcataacctttctcaagtgcgaacctccgaggaataagcctcgaggtaacctcacacgaactcaacgtcgatccgacctaccgacctataaagcagaaacgtcgcaagctaggtcctgaaagggctaaggctttgcacgatgatgtcgactgattgctcaaaattggatcgataagggaagtaaaataccctgactggcttgccaacccagtcgtcgttaaaaagaaaaacgggaagtggagagtatgcatcgactttacggacctgaataaagcatgtcctaaagacagtttcccattcccgcatatcgaccgactcgtcgaagccattgtaggacacgaactactgtccttcatggacgcattctccgggtataaccaaatacttatgcgcctagatgaccaagaaaaaacagcttttattactgaccgaggcacctacttttttaaagtaatgccctttggtttaaaaaatgctggagccacctaccaacgattggtgaacagaatgttcgctgaccagataggtaaaacgatggaggtctacatcgacgacatgctggacaaatcatgtcagctcgcaaactaagaccatatttccaactaagaccatatttccaatcacaccccataatagtgatgacgtcccaaccaatctgaactattctgcatagtctgacccaatcaggacgacttgcaaaatgggacatagagttaagcgagtacgatatagaatatcgcaccagaaccagcttgaaagcacaagtcctagccgactttgtaatcgagctcccgttagccgacctggatggaaccaactctaataagaaatggctcctccacgtcgatggctcatccaaccgacaaggatctagagtaggaatacaactcacctcccccaccggggaagtcatcgaacaatctttccatctcggattcaatgcatcaaacaacgagtctgagtacgaagccctcattggtggcattaagctacctcaagaaatagggattcgcgaaataaatacttacaacgactaccaactcgtcaccagccagttccacgggaatacaaagctaaagacgagaacatggaagctacctcgtactagtcaaaaccttggcccagcagtttgaatcgtttgaactaacaaggatccctagaggagaaaatacctcggtagactccttggcagttctcgcttccacgttagatccttttgtcaaaannnnnnnnnnnnnnnnnnnnnnnnnnnnnnnaagcatcgatctaacagtaaaacatgctgggacggaacccccgacaacgtgcaaatttacacgagtaacctgaagcaccaccgccgcacctagagacatcgcagcagctgcggggcaagtgcaacgaaagaggaaccagagtacgaaacacgcgaacaacctgccccgtacaaacctaaaccgtacaatgactggagaatcccaatcatcgtttacatcgaacgagggatcacacctcccgataagtgtgaggccagaaagctcaaagcacagagtgcgaggtactgaatcatggaaggaaggctcatgaaacgcagcgtttctggtccctacatggtgtgcacctatgggcaacaaacaaaagacctcatgaagagcatgcatgagggacaatgtggtatcaactgcagtggatgtaccctcaccctaagaatcaagaagctaggctactcataagtgcgtatttgtcatgttttgagcatccatttgtcatcactttagcatcatatcatcactgttttataccatttcacatcatttatcatcactttacatgtttaggatagatttgcatgcatgttgcgtatttgcgttgatttcaggtgatttgtagctgttgacgagctatctggaagaagcagacctaatcatgacaaaaccactcgacccacaggtcgagtaggagcttcaagatctcaagagaccactcgacccccacgtcgagtagatgacatcacaacttcacctcaccactcgaccacgaggtcgagcgtcttcatctccatcacctgaccaacactcaaccacatcactcgacccccaggtcgagtgacttcatctgcatcttttgaccaccactcgaccacatcactcgaccccgaggtcgagtgtcttcatcccatcacctgaccatcactcgatcacttcactcgacccctaggccgagtgtcttcaccttcattgccagaccactactcgacctcgtcactctacctggaagtcgagtatcaccatcaccaccactagactgcatactcgatgacaagcttcagagccttcttcatttcgcactcaactagacactcgagcacaaggaagaaaagaagacttcagctatttactcgacctcccactcgaccacatgggttgagtacagttcttaatctgtcccaatactgcgtcgttttaagtattagggtttcggaatatttggctataagtagcatgtacttcacattttcgcagacaagtttttatctagttttattccgcagaccttgtgttctagaccttttctaatccggatttctctttttctattcaatattcagtattcagct

SEQ ID NO: 163284 - DNA, 974 bp, Arabidopsis thaliana landsberg
attcagaaaaactctctcatcattttcctcttcaccttagtcgtcatcgcccagaccgctacctctcagaactgcctcaccattggttgtcctggcattaaagagtgttgtagccatacgggttactgcggcaccaatgtagagcactgcggcttttggtgcctcagcggccccttgccaactttctaagagttccagctcttacaggctcaatgatggcccacgcgggaagatcgaaagcattgttacacctgcattattccacagactcatgcgtaaagtcggaagtaattgcacgggaaaaggtttctacacccgtgaggctttcatcacagcagtcaaatctttcgaaggctacaagggaacggtagctaaacgcgagattgcggccatattggctcagttctcttacgaatctggaagtaagttagttactatactaaccattaatttattttttcttaaaatgtataataatgttaagaaattgtgttatcttaattaattaatgtgacacattcgagtagctgagccaatgccattggactaatccatttttttcatgtacagatttttgttacaaagaagaagtaacgagtgagacatattgctcgtcaagcaagacatacccttgtcaatcgggaaagaagtactatggtcgcggtctcttgcagtcaatcaaatggaacgagttctatggtgaggcgggaaagtaccttggcctccctctattgaaagatccagatatggtggctcgtagtccggaagtggctttcaaatttgcaatgtggttttggaagaccgaagttggtccatcactaagactaggatttggagcgaccacgatgaggatcaatggcatagagtgtggtggtatgagttggaatgctgaggctatgcagaacaggattaaccaatacttggagatctgcaagtggtttggggtgaatcctggtaaagatctatattgctaa

SEQ ID NO: 163285 - DNA, 744 bp, Arabidopsis thaliana landsberg
  unsure (1)..(744): unsure at all n locations
atggtagatcactgtatcttctactcctccaggatgagtactctgtcttccaacggaagaggcgacgcttatacttgcaaaaaagctcttcacttgactctgaataaacctaatgttgttaaagcatgttcggatttgaagaagaacgaacatcagatatctcgtgattttgcggcagagactaagaaaaagactgagtttttggtgatgaagaagaacaacgatgagagatgtaagactcgtgaagtaactagagagaagaagcaatcggctctacctctgaaactttctaaaaaccctagatgtggaacgggagagatcaagaaaactttgaagaagcgtggcctttccaagtctgttccagaaacatcgaggctgatcaagttgaagaagcagccgcctgtgaaagtatctgaaaaacctaagagttgtcctgtcttgacgaacaacgacacggatacgttggaactgttcgagatcgccaaaaaatctgctgattttgccaacgcaaagggaatactcgcgtctgaagtagagacatcaatgtgcgtagataccctcactctgctcttggagtttcccatcagcgcaagagatatggaaacaaggaagctcatggttaggctagagcatcttacaaaacacaagaaccgaaaaatatgcaactctgcttcaannnnnnnnnnnnnnnnnngggagagtatcagagatcaacaactcagagagtcccgtaaaactcaaggc

SEQ ID NO: 163286 - DNA, 2481 bp, Arabidopsis thaliana landsberg
atggatcacgacggagaggaacgtgtccgtgccaaacaatctgatgacgaagttgattggctaagagatttgccagaatctttgttttgtcatattctcttgaatcttccgacaaaagatgttgttaagactagtgtcttgtctagcaaatggagaaatctttggaggttagtacctggattagacttagacagtcgtgatttcacggaaaacaatacttttgtgagttttatcgataggttcatgagttttcacagtgacttgtacttgaaaaagtttaagttaagattcttttgcaatattaatggggatgaggtgagtgaaaatgctcatattgcgcggtggatcaacgatgttgttaagcggaaagttcacaatctcgatcttacgtggggtgcagtagagatacctccaatcctatacttgtgtaacagtttggtgtctttaaagctttgtggcgtaaccttgccaaatcttgagcttacgtctttaccgtgtgtcaaagttatcgttctagaatgggttaagtttgcaaatgatttggctctggaaatgcttatctcaggctgcctagttctcgaaagcttaactttatgcagacgtcccaatgacaatgtaaaagtattacgtgtgagatctcagtctctattgagcttcaactataatggccctagttcccgtgatcttcattttaaagatctagtggttactattgatgccccaaagcttgagatcctcaagctctctcatcaagtaacttcaagtttcataataaagaaatcgagttcccttgtagaggcaaatatcaaggttgagtttaacttttgtgtggggaaaaagtttaatccttatgatctgtcaaagagaaaaatgattcttcattttcttgtcgccatctctcgtgtcaaaaatatgaccatcgctcgctgcatctactcttgaggtaacgtttgttgaatttgctatatttattgttttactttatcctctataagtttatttatcctgatacttttcttgtttttggtggttgttgtagatcttttatgattactcaagatgtgaaccggttcccttatttcgtgacatatctttgctgcgtgttgaattctatcaggacagatgggaaatattgccattttttcttgagagctgcccgaatgtgaaatctcttgtcgtggtaagtttacttaaaacttaagtactttctttggtataacaatgcaaatggggaaagtatcataattactccaacttgtttcgttcacttggttgtaatatcaggaatctgattattatacaaaggagagaactagtatcttatctgaacctcggtgtctcctatcatctctcgagtatgttaagatagaatttgcatgggacaaggggaagatggaattagtgagatacttacttgagaactcaccaatcctcaagaaactcactttatcattggatcattcttctagaaagaaatcttgtgtcatcctcagagaactcattacaattccaagatgctcgacctcttgccgagtcatcgttctctaatcctcgttgaagaacatacaaggtttgcatttctgtacttttattaatgtgaactgtgtggtttccttctctattatggtgactttgttgtgtagtagatctgtaagaagatcatatgtttgtcttaaatgtttcaattgaaccaaaaatgtaataaggttcgtgtaagaaccaaggattcaaattttcagaaactctttatttatgtgaactatttgctttctttttcattgtggtgactttgaatgtcttgtagatcttaagagatcttatggttggcctaaatgtgtaatgctgttacttcttttgactcaaagacatgtttttgctcattagtaattcagacttcgaatagaaaaatagataatggattacaaaaacgaaaaataaaataaagatgcttcaaatttaacctaaaatagtattagatctttgtaagacactaagacccaaggattaaacattctaggaactaaattataattaaactcttggaaaatttagatctatttgtttaggagcttttaagatatacatgtctaggctttaatgagctttacgaccgaagaaaattagagagcttgtgattttgatcatgatctgagtgagtctcaaaaactaaaggaggacaataaggaagattcggattgaattctttaaactagttaactaggttaattgttttatgggcctgttatgttaagttaataatttttggggccttttatcttcaacatataaagggctcttctattgtttttttccaactccaacaactaaaaaacaaacaaattttggaccttttaatttgtggaccgtaggcagatgcccatgtttccatgggtgagagacggacctgaggtggtcgcaactcgcaaccgacgttcagagggagaagcggaggtggtggtggaagcaaagagagttagatga

SEQ ID NO: 163287 - DNA, 1143 bp, Arabidopsis thaliana landsberg
atgaagaagatgtacaatcttccaagagatttgttggaggaggtactctgtagaattccggtaaagtctatagcagcagtgagatccacttgtaaaaattggaactctttaacctacggtcagagcttcacgaagaagctctatggtaaaacaatggcaacaaaggaaaaggagtttctggtggtcatgactatggatttggaggtttatttaatgagggtcaatctccatggaattcataaagatgataacaatgttaaatcatctatcatgcaaaaagctaaactcattaggctaaatgatgatcgagttcgagtcgatgatatatgtaaagtctttcactgcgacggtttattgttatgcatcactattgggatcaggcttgtggtttgtaatccttattgtgggcaaacaaggtgtatcaaaaccagaagagattaccatataaccgacaattacgctcttggacacgagaagatgaagaacagcccacttcgtaactacaaaatcttggtgtttcatgataaatccttcctcccaaaattcttggtttgaaatctacaattttaactctgattcatggaaggttttatatttcacttgtgactggaaattaccgttttctcaacttggtgtgtctctcaagggaaatacttactggtttgctcgagagatgtatatacacggaccaagaatagatcttcatctgccgtttcactctcgttgtgttgatactgtgactctcgctagtgttagagaagagcagcttgcggtgttatttcaggactcaaaaactttgatcctagaggtatggataacgactaagattgagcctaatgcggtctcatggaggtcgttcttaacagtgaatgagaacactcaccttgctttggctttggctttcaatttgcggttacaggtggaagtttctttattgacgaggagaaggaagtcgcggtggtttttggtaaagtctacaaagacgaaaatggttatacaaaccaccgctctcatgacttagcttacatagttggagtggatggttccttgaaaaaagtgtatgttggagaatctccagaccgaaattgttatccacttgtgtgctcttatgttccaagtttagtgcaacttaattagtccatt

SEQ ID NO: 163288 - DNA, 4664 bp, Arabidopsis thaliana landsberg
  unsure (1)..(4664): unsure at all n locations
gctgaaattcatctagattcaaaggatctccttgatactattaaagatggtaatcaaactccaagcagagaaaaatcaaaagctatnnnnnnnnnnnnnnnnnnnnnnnnnnnnnatctcaagaatgagtacctcagtgtgaaagatccacagatcctttggaacgatctaaaggataggtatgatcatcaaaagacagtgatcttacctaaggcccgatatgattggactcatctgagactccaggactataagtctgtaagtgagtacaactcagccttgttcaaaataacatccaaattggagttatgtggagagaaaatcacggatgcagataagttggagaaaacattctctacttttcatgctaataacattgtcctgcagacacagtaccgtgaaaagggattcgtgaagtattcccaacttatttcttgtctccttgtagctgagaaaaacaatgagttgcttttgaaaaatcatggactacgcccatcaggttctgctccattccctgaagcgaatgtgacatcctatggtcaagaaagtggttacaaccgtggccgtggccgtggtcatggtcgtggtcgtggtcgcggtcgtggtcgtggacgtggatacactggaggacgaggcagtggagttcattttaaaaactcaaactctcacaagaagtgggaaaacaaagatggtaacaaacaagtgaaaacaccatatgcgaatatctgttaccgttgtggagcgaaagatcactggtctcgtacgtgccgtacaccaaagcaccttgttgagctctatcaacaatcagtcaaaggcaaggggaaggatgttgaaacaaatttggtgtatgaagacggagttgatgattttgactttgatgatttcactcacttggacattgacgattttcttcctgaagaagagacaaagtgatcaaactacaactatttgaagaactatgttttatttctttatttatttcttttgctttcagttatttgatttttatttatttggctttcagttattttattttacgaattattattcaagttgatttattttaattattggattcattatcttatttatgatattaatttattttattttatttatttgaagaaacaatgaatggtggtgatatttgcttggcagacagtgcaactagtcatactattttaaaaaataagagatatttctcttctttgacaatgaaagaagcaagtgtaactaccgtaacaggtagtgcaaagataattaaaggctctggaagagcgaatatttcaatgcctatgggaacacaattagaaattgtggatgctttatactctcctaaatctcaaagaaacttattaagttttaaagacatccgcagaaatggatatcatattgagactatgagcgaaggtaatatcgaatacctccaaatcacaagtaatatccaaggctctaaaaatattctggaaaaactacctgctttctccactggtttatattatactacaattaatacaattgaagtaaatgctacagtaaaccagaagtctacagaaaacattaaagtttggcatgaccggttaggccatcccggtacaataatgatgcgaaagataatcactaattcatgtggacattcattaaagaaccagcagattcgtcctaatgatttctcatgtgttgcttgttcacaaggcaagttaattatacggccttcaccagctaagataaatttcgaatcaatcaattttctggaacgaatacaaggagatatttgtgggccgattcacccatcatgtggaacctttagatactttatggttttaattgactcatctagtagatggtcacatgtaaccttgttatcaactcgaaacctggcgtttgcaagattgcttgctcagttgattacattacaagcacattttccagattttcctttaaagaaaattcgtcttgataatgctggtgaattcacatctcaagcttttaatgactattgtatgtctattgggataagtgttgaacatcctgtagcacatgttcacacacaaaatggtttagcagaatcactaatcaagcgtcttcaattaattgctagaccattactaatgaaatcaaaactcccaatatcagcttggggacatgctatattacatgcagcagcattagttcgcatcaggccaacaagtaatcataagttctctccatctcaactggttctcggtcaggaaccaaatattttccatcttaaaatttttggatgtgctgtatatgttccaattgctccaccacagcgatctaagatgggacctcaaagaaggttgggagtatatgttggttatgattccccatcaataattaagtatctcgagccatctacaggagatttattcaaagctcgatttgcagactgtcattttaatgagtctgttttcccaacattagggggagaaaataaacagtcgggaagtgatatactttggaatgaattatcaatgtcttatcttgatcctcggactaaagagtgtgaattagaagtccaaaagataattcatttacagagtttagcaaatcagctgccatatgcattcactgacccaaaaagtgtgatcaaatcacatataccgggtgcaaatgctccaataagaataaatatcgcagaaggacaaaatcaaactacaaatgagtctaaagcacgtttaaagcgtggtagacctattggttccaaagataaaaatcctcgaaaaagaaaaggggcagaaattggcatagataaaacagagcaaataattacaaatgaagaatctccagaagagaccttagacatgacacagaaagaaattcaggtacctgacaatgaagagatctcaattagttatgtcatgtctggattaaaatggaaccgaaagcaaatcgacgtcgatgatatttttgcatgcaatgtagcagttgatgttatggatgaggatcatgaaccaacatctattgaagagtgtacacaaagaagtgattggccaaaatggaatgaagcaatagatgcagaattaaaatctctggcaaagagagaagtgtttggaccagtagtccgtatacccaaaggtgtaaaaccagtaggacataaatgggtctttgtacgaaagaagaatgcaaatggtgaaattgtgaggcataaaacacgtttagtcgcacaaggattcccacaaagacccggaattgactatgaagagacatactctcttgtggtggatgcaactacattttggttccttattagtctagcagtaaaagaaggacttgatttatgtttgatggatgtagtcacaacctatttatacggtccactgaaaaatgacatttatatgaaaatcccagaatgatttaaaatgtcagaagcagtacaatcaaattctcgagaacaatactgcataaaattaaatcgatccctttataaattaaaacaatcatggtgtatgtggtataatcgccttagtgacttgctaaaagaatatacaaaaaaagactatgttagtccatgcatctttataaacagatttgggaaatgatttgttataattgtagtttatgttgatgatttaaatattatgggaacttctgcagagatctccttcacagtagaatatttaaagaaagaatttgagaagagagattttggaaaaacaaaattttgtttgggactacaaattgaacacctaaataatgtaattctggtgcatcaagagacatatacagaaaatgttctcaaaagattctatatggatggagcactccccttgagtagcccgatggttgtaagatcacttgatgtggataaagatccattccgccttcgggaaagcaatgaagaagttcttagtcctgaagtaccatacttaagtgcagtaggagcactgatgtatcttgctagtcatacaagacccgatatatcatttgcggtgaatttattagcaaggtttagctcatgtccaactcgaagacattggaatggaattaaacatatacttcgttacctccaaggtacgaaagacatgggtctgtttttttcctaaccaatccaaggaagatttaattggttttgcagatgcaggatacttatctgatccccataatggtagatcgcaaacaggatatgtcttcacatgcgggggtacagctatttcttggcgctctatgaagcaaactattgcagccacatcttccaatcatgcagagattttagcaattcatgaagctagccgcgagtgtgtatggctaacatctgtagttcaccatatacaagaagattgtggtatgtatgcagggaaaaagactccaacaattatgtacgaagacaatgcagcatgcatcgcacaactcaaagacggatacatcaaaggcgatagaacaaagcacatcctaccaaaattcttcttcacacacgatctacaaaagagcggcgatgtacgagttctacagatccgttcgaatgataatctggctgacttattcaccaaggcgctacctactgctattttcaagaagttagtctatcgtatcggattacgctgtctcaaatatctcgatgaatatactcataagggggagtaattgtatgttgcactctttttttcttaaccatggtttttctcattgagttttcctgg

SEQ ID NO: 163289 - DNA, 668 bp, Arabidopsis thaliana landsberg
atgtttaggatagatttgcatgcatgttgcatatttgcgttgatttcaggtgatttggagctattgacgagctatctggaagaagcggacctggtcatgtcaaaccactcgaccccgaagtcgagtaggagtttcaagatctcaacagatcactcgacccccaggtcgagtagaggacatcactacttcaccacatcacttgaccctgaggtcgagtgtcttcatccccatcacttgaccatcactcgatcacatcactcgatcccgtggtcgagtgtcttcacctccattacctgatcatcactcgaccacatcactctaccaggaagtcgagtatcaccatcaccaccactcgactacatactcgatggcaagcttcagagtcttcttcattctgcactcaaccagacactcaagcacaaggaagaaaagaagactccagctattcactcgacctcccactcgactccatgggtccagtacagttcttaatccgtcccaatactgtgtcgttttaagtattaggattttggaatatttggctataagtagcatgtacttcacattttcgaaaacaagtttttttctagttttattccgcaaacactgtgttctagacctttgtaatccggatttctctttgtctattcagtatccaacattcgttc

SEQ ID NO: 163290 - DNA, 704 bp, Arabidopsis thaliana landsberg
catgaaaaggttatgatttatgctaatggtcgatatgaagcatttgaaggggaaaaggaagaatagatgctcatatgaaatccaacggacgtatagcttgttggccacattggttgtgatggaccggatgataatgccactgcacctagctgggtactactctgatgctgtactaccggtcatttcacacatatgtacgtatattagaaattaacgtcatgtcataaaacctgtggaagatgaacgatttcaagagttctcctgctatggagtctaaacaaggatattgagtatacgattactcagtgaaatgtcaatcagagtttggtggtcggactagagatttaccaaaactaccaaaatccacgagaaaatcatcgtctgagaaaggttctccgaccaaagaaagatcagacaagaccaaacgtcggacttcaaacaaaggcacatcatcgtctaggagaaccaaagacgaagattctacctcatcgtctaggagaacaactaaagatgaagattcttctttgtctcaacatagtgctggattaccagaggttccaaagaagtcaaagagaaagaaatctaaagaagctggtaatggagggtcttcgagatcatcacgaatatcagaagctgattatatgtctgatactggttccgctagatctatgcctcaatttgaagacgacagaaatgggttttga

SEQ ID NO: 163291 - DNA, 3675 bp, Arabidopsis thaliana landsberg
gatagcaaggaaggagatttacatttggagactttggggtaccagaagctgttagatgaacacaaagcagttgagaatccaggagagtatgaagatttgggtgaaagagcaaggggggaatatatactcgaccacatcactcgaccaacagcccattcagtctactcgaccgagctactcgaccacaactcctcctctgaagccaacttagtatccgatgactggtctgaactcaaagtgcccaaagtcgatttgaaaccgctaccaaaagggctaaggtacgtttttcttggactaaactctacttatcctgtcatagtgaatgatgagctaattgctgatcaagtaaacctgctgataactgagctcaagaagtataggaaagctataggatactcgttagatgatattaaggggatttcacccaccttatgcacccatagaatccatcttgaaaatgaatcctactctagcattgaacctcaaaggagattaaacccaaatttgaaagaggttgtgaaaaaggagatacttaaactattagatgctggggttatctaccatatctctgatagcatttgggtatctccagttcactgcgttccttaaaaaggaggtataacagttgttaaaaattctaaagatgaactgatacccactaggactataactggacataggatgtgtattgattataggaagttaaatgctgcctctagaaaagaccatttcccattgcccttcattgattagatgctagaaagattagcaaaccatccttactattgcttcttggatggttataccggattttttcaaatccctattcacccaaatgaccaagagaaaactacttttacttgtccttatgggacctttgcttacaagtgtatgcctttcggtctctataatgcacctgctacttttcagcggtgcatgacttccattttctcggatttgatagaggagatggtagaggtattcatggatgatttttctgtttatggctcttccttctcctcgtgtttgttgaacctgtgcagggtacttaaaagatgtgaagagacaaacctggtactaaactgggaaaaatgccatttcatggttagagaaggcatcgttttggggcacaaaatttctgaggaaggaatagaggttgataaggctaaggttgacgtgatgatgcacttgcagccgccaaagactgtcaaggacataaggagttttcttggtcatgcaggattttacagaagattcatcaaggatttctccaagttggcgagaccgctcaccagacttctgtgaaggaaaccgagtttgcatttgatgaagaatgtttgacagcctttaagttaatcaaggaagctttggtcactgccccaatagtccaagcaccaaactgggacttcccattcgaaatcatgtgcgatgcttcagattatgcagtaggagcagttttgggccagcagatcgacaaatagctacatgtgatctactacgcgagcagaacgatggatgatgcacaggtaaggtatgccactatagagaaggaactgctagctgtggtatttgcattcgagaaatttagaagctacctagtgggttctaaggtgacagtttacactgatcatgctgctctgaggcatataaatgcgaagaaggataccaaacctaggctgttgagatggatcttattgctccaatagtttgacatggagatagttgataagaagggaattgaaaacggtgtagctgatcatctgtctaggatgagaattgaagacgaggtccctattgacgactccatgccagaagaacagctaatggcaattcggcaacttaacgagagtgctcaaattcggaaatcactcgatcaagtatgtgcagcagaagacaagcttccatggtatgttgatcacgtcaactacttggttggtggtgaagagcctccaaatctgtcgagctatgagaagaagaatttcttcaaggacattaaccatttctactgggacgaaccttatctttacatactctgtaaagataagatctacaggcgatgcgtctcagaagacgaaaccgaaggcatcctactgcactaccatgggtctgctatggtggccactttgcaacgttcaagacagtgtcaaaaatcctgcaagctggtttttggtggcctattctttttaaggatgctcatagatttgttgcgaagtgtgatgcttgccagcgcaaggggggtataagcaaaaggaatgagatgccttaaaactttattatggaagtagaggtgtttgatgtgtggggaattgacttcatgggaccattcccatcttcatatggaaatgaatacatactggttgctgtagattacgtctataagttggttgaggctatagcatgtcgcaagaatgatgctgcagtggtactcaagttgtttaagaaaatcatcttcccaaggtttggagtcccaagagtggtgataagtgatgggggcagacacttcatcaataaagtttttgcgaacttgttggccaagcaaggtgtcaaccataaggtagcgacaccttatcatccccaaacatgtggacaggttgagctttctaacagagagattaagggaatcttggagaaaactgttggtaaatctagaaaggattgggctgcaaaactagatgatgctctttggacatacagaaccgcctacaagactctaattggaaccacaccattcaaccttatctacgggaagtcttgtcacctaccagttgagttggagtataaggcactatgggctacaaagttgatgaacttcgacatcaagccagcagcagaacgacgtctggttcaactcaatgagttagatgagatccatttgaatgcttatgagagttcccgaatctacaaagagagaaccaaagccattcatgacaagaagatcatcttgaggcagttcacggaaggtgataaggtattcctattcaactcaaggctcaagatttttcctggaaaactccgttcaaagtggtcaggccctttcgtcataaaggaaatgcgtccaaacagatcagcagtactttgggataacaatggagaaccgttttctaccaatggacaaaggctgaaaccataccttgctcattccactcccgaagagggcacggcagtccctctaacggatccagaccaagcctaatcagttcattacggtcaagctaacgaccttaaacaagcgcttcgtgggaggcaacccacatggtattgtacatactttttattctttcttttattttcctttgattttggtttgtttcgctccgctgtggagtttagacttatcggctcaacagtcgatagagtctttatatttgacggtggtgtgagattgtttttgagtgcaggaacccgccaggtttagatcgatcgatcccaacactagatcggtcgatcctgtcgtgacatcgaagctgaaaaaaagtccgccagggtgggatcgatcgatccgatcgtgacgtctagctcagaaacatccgccagaaagggatcgatcgatccagaaatgagtcgtcgggaccaatggcaacagatcgaccgatccaggtagtcgatcgatcggtccgggaagcagctttgcgatttgagcatgcaattgaattggtatcgatcgatcgatccacg

SEQ ID NO: 163292 - DNA, 1791 bp, Arabidopsis thaliana landsberg
atgcatctagacagactgtctgcccctatttaacccccttcaaagttaaaagacccaagtcaagagaaatgaattcctccgacgtcaacttctccctactccagagccaaccaaatgttccggctgaattcttctggccggagaaagacgttgccccttcagaaggcgacctcgatctcccaatcatcgacttgagtgggttcttgaatggcaatgaggccgagacgcaacttgcagctaaggcagtgaaaaaagcgtgcatggctcacggtacttttctagtggtcaatcatggcttcaagtcgggcttggctgaaaaggcgcttgagatatcgagtttgttctttgggctatccaaggatgagaagctaagggcttataggatcccggggaatatctctggctataccgcaggtcatagccaaagattttcctccaatcttccgtggaatgagactttgactttggccttcaaaaaggggccaccccatgttgttgaagactttctaacctcaaggctaggcaaccatcgtcaagagatcgggtaaatctattgcatgcatatattgtagttatagtaacgttatgataaaccctatttgaatctagtgtgtggtggcataatgatgtagagtttagggtcaagggtttaaaatttttacgcgctcatgtttcatttcacatgtaaactttgcccttagaccgcttgatcacttgagttttcgtcaggtgatttagcggtggtgactttatttaaaactatttgccaaaggtttgctcgccccgggattagttgggcactttgacgaaacccgaattcccgttactaaatctgtaaaaaaaatcctacttgatgatgtttacattttaaaatgttaactgttttgttgcttgaaactcttgtttttttcagtcaagtgtttcaagaattttgtgatgcaatgaatggactggttatggatttgatggagctattgggtataagtatgggtttaaaagacaggacatactaccggagattcttcgaagatggaagtggcatcttcagatgcaactattatccgccgtgcaagcagccagagaaagcccttggtgttggcccccataatgacccaacggctataaccgttttgcttcaagacgatgttgtgggcttagaggtctttgccgcaggtagttggcagaccgttcgccctcgtcctggtgctcttgtcgtcaacgttggagacaccttcatggtacgttaccttttaatgaataaggctaccaaattttctcaacaatgacaaaatttattagatacaatacaactttccgaaaaattatgctttaactttttttatgcaaacgccattgttttgacaaaatgggatattacacgacatctactgtttttatattttttggggttgttgaacataaattaaatacacagttttataatatacaatatatatcaaataatgtgaaatgattaatttatagttttttttcttaatattttggatttgattttggaaggcattgtcaaatggaaactacaggagttgttaccacagggcagtggtaaacaaggagaaagtgagaaggtcattagtattcttctcttgtcctagagaagataaaatcatcgtacctcctcctgaacttgtggaaggtgaagaagcttctagaaagtaccctgactttacttgggctcagcttcagaaatttacccagtccggctatcgagtcgataacaccactctccataacttctctttgtggctcgtctctaactccgacaagaaa

SEQ ID NO: 163293 - DNA, 5424 bp, Arabidopsis thaliana landsberg
atgcccttcatccgcttctgggctatcacttcgaaccccgctctaacagcctcagtaagcccatgatcccaatagaacatccgctacatagtacaaataaaagagataagttagcacatatacttagtaaatgagtaacaatatatatttgaaagataaaactgaaaattttaccaggaaactcctgaaatatctctctcggatgttcaaaggagtgaccttccaaatgaagtatggaccatcaaatttcctcctaaatactccaccaatcgccctagatagtttacctttatgcctgttaaacctgtaaaaaaacagagaagagaactaatctctgtaaagacaagaaaaagatgcatctctagcaaaaacagagaagagaactagtctctataaagacaagaaaaagatgcatctctagcaaaaacatagaagataactagtctctataaagacaagaattcatccatctctagcagtaactagtttacctttaatgctaactttttaaactctagaacacatgacaaatcacaagaactaaagtaactagagattgctctaaactctaacagtcgtaaaatgtttgtaagcgctaaatgtttttatgttttgttggggtcggatttcacccaagtacctgagccggtcaaatggataccatcagcacttcgggagctaggcttggtgttgttccggttcgggtgttactcaaggaaacacaccctaagccgggtgcgatgaaacattgtgacccaggggaacaccttagataaacgatacttggctcgggtgttattccagaaaacacacctgagccgagctcaactatatctcggggatcgcttcggttcgagcccaaggtagaatatccacccgaggaggatacttatacaaattcagtgaagggtcaagatatcatttccgaaaaatccggtgaaggatatcaaaaaatcttcgggatattatcgaatatggaagttttccgaaactcccaaagaataaggaagatttccatatagaaaatatcccctatcgccgacccggagataactggaaatcttccaaggaatatcgcgagaggcgggttaccaaggtcctatataaagcgcctcgaggaacgaacaaaggggacacgcataaagacgctctcaacttcaggctatcaaaacgctctgactttgaaggcaaaacacctattttttacttttctaaacacttgtacgatcgaatcatcatctttttcaataataagatcaagagcaccgtccgcggtaatcaaactgttgttctttgagaatctcacacagatccgttctttgaagaaacccttagtacaatttctcttgtgcaagtttcgactctcacaatttggcgctagaagaaggggattgagatttctcttactcccagaacacagaaccaaccaaccaatccacaatggtcaacattcaaatccccggtaacacagttgacgtagagggaaacccgatccctccaaaccaaacagacgttcctgaagccaccgctcctgcggtcctagcagaattgaggagcatgatggctcaacttcagaagaaagtaaaagatcaagaacaggcaaatcggtctttggcgcaacaactcgaagcagctacctcccaaggacagatcaagactactcgtttcggcgcaaggcatcttcacgatcgacgaacagcagcagatctcagtccaacatggctcctgttacacacacctggcaacacgatgaggcctatccgccgaaccgcaccggaaactggaagagatcgagccgagccggcaatcttgggaaatcgagacacgaatcgaacagaaggaaacgatccgcagctccctcctccccgagcacaaaatgtcgaggccaatcagatcggggtctcggacgatgaagattcagaagagaacgttcgatgggctgaggagtacgccagagaacaggaaataagcgctatcaagctctccctagccaaggcaaaaaacgagatgaagcttgtgagatcccaaatgcataacgcagtctcctcggccccaaacatcgaccgcattctgtgaggagtcccataacactcctttcactcgcagaatctccaacgcgataattttatacccaagaaagctaaggatcgagtacattaatggatcttccgacccaaaggcacttgaagtccttcataatttctgtagcccgagccaaattcaaatccgacgaaagggacgccggtctctgtcacctgttcgttgaacacttgaaaggaccagccctggattggttctcaagactcgagggaaatttcgttgatagtttccaggagctatcgacactcttcctcaagcaagattcggtgcttatcgatcctggtatgtgggacgccgatcttttgtcattatctcagccaccgaacgagccagtttgagatttcctcgcaaaattccgatctactctagccagagtcgaaggaatcaacgacgtagcggctctctctgctctgagaaggcgctgtggtacaagtaagaattccgaaaggaattaaatttgtccaaaccacaaacaatccgagatgcattacaccgagcatcggattatgtttcccatgaagaagaaatggaactgctattgaaaaggcacgagccgccgaagcaaacgcctcgtagcaaaaaatctaaacctacaactccgaaccacaaaaagtgcgctcaaggcagaacgttcgtacaccatgaaggacggaatttctccggagcccacaattatcaagctgatatacatcgaggccgaggacgaggccacaaccgaggtcgcggacgagattcctacatctggacgaaggaccaacccgcgggaaacgaacagaatattgcgaattacataagagttacggcgatcatacttccaaatgtcgtagcctccgggcgaagttggcagctaagttcctagccggagaaatcggtggaggcataaccatcgacgacttagaagcggagaaagccaaaaccgagcaggtcaatgctatggaaaaatcccgagcaggcagcccccgcggcaaacatcgaaggatccaaaagaggccaaggcaatcgcgaagcagattgcggtgagccagaagctgctctgggaaggatcttcacaattttaggagattcggctttctgtcaagacacgacggcatcgatcaaagcttatcagaagaaggccgactaaaatcgtaccaactccgcgacctgtgctcggattagatgacgaagtgacctttcacgaaagcgataccaacggtttggactgtccgcacaacgatcctttagtcattacactaaccattggtgatttcaacgtcgaacgagttctggtcgacacgggaagcacactggacataatttttcttacaactctgcgagaaatgaaagtcgacatgacgagaattgtaccaactccgcgccctaagctcggattctctggggaaaccactatgactctcgggaccatcaagttaccagtccgagccaaaggggtaacaaaaattgtcgatttctctgttaccgaccagccgaccgtttacaactcaattatcggcacaccatggttaaatcaattctgagctgtcgcttcaacatatcatctctgcctgaaatttcccacgagcaacggcgtgaaaaccatctgggaaattagaaaaatgctcgaatctgcttcatggcagcacacaagctaaggaacccgtcactgaatcaactgccgacgcgaatcataagaaagctaagcttggcggagctgaagagaaagtaatttccgagcagttatagcagctaaagatcgaggaggctcgggaatccacaagaccaatccccaattcagtaatctctatctgccttgatgacgaaaaactcgagcggtgcgtggaaatcggtggagacctacgagaagaattaccaactgaactcaccgctttcctcagagaaaacgtcaatacattcgcatgaccccataagatctgcccggagtaagtgtagatatcgtatcacacgagctctacatcgacccgacgttcaaacctattaagcagaagaggagaaaattggatcgggagcgagcagtagccgtggcattgttgggaatggcgtcacctcagaacaagcgagaagtgcaacgtctaatggaaggcccttaaccgtatcatctctcgtttaaccgacaaatgcttggccttttacgatgtgcttcggggaaacaagaaattcgaatggacgacccgatgccaagaagcttttcaggaactcaagaagtatctggcaacaccacctatcctcgtgaagcctgtaatcggagaaccactctacctatatgtcgccgtatcagataatgcggtcagcggagttttagttcgagaagacagaggcgaacaaaagtcgatcttttacgtctcacaaacatttacttgcgtagaatctcgttacccgcaaatagaaaactcgctttagcagttgtaatgtcggcttggaaagtgcgacctatttccaatccctctccatcatggtaataagttccatgccgcttcgcgctgtcttacatagcccgagccagtcgggtcgtctggctaaatggacaatcgagctcagcgagtatgacatcgagcatcggaataaaacgtgtacaaaatcccaggtcctagccgacttcatcgtcgaactaccaacaaaggaagctcgagagaatccgctcgatacaatttggctactacacgtggacggctcgttatcaaagcaaggattgggcgtgggcatccgtctcacctcacacacgagcggagttcttgagcagtcgttcacactaaatttcgaggcaaccaacaatgtgcccgaatacgaagcgctcgtggccggacttaatctagctcgtaggctgaagattgcaaaaattcgagctttttgcgattctcagctcgttgcaaataagttcaacggagaatacacggctcgggaagaacgaatggagacctatctggctcatgtacaaaatcaggcaaagcaattcgacgaattcgagttgacaaggattccccaaaagggaaaatacattggacgacgccctagctgctttgaggcctcaacatccgacccgaacatgaggagagtcatcccagtggagtttatcaaaaagccaaacagcgagctcgacaaagaggaacatgccttccccgtgcagggtgccgcgaattacgaagatgcgtcggatgacggctcaggcctgggttgcgattcagaatggatagaacccatctgaagctacatatccaaagggaaagttccctcggataagtgggaagctcggaagatgaaagctcagcctgcgcgttctggtcgaggagaaactcttcaagtggcggttatccggaccctgatcttaga

SEQ ID NO: 163294 - DNA, 3198 bp, Arabidopsis thaliana landsberg
atgatcgaggtagtgtgtcggctgtcagaatggactggttcttctcctctgcgatcgaagtataactggtggactgccaaagtggactacctgggtcgcctctgcgatatagtaggattgcataatggactgcctccgctcctctgcggtcgagtaaaagtgtctggatggactgctgagctgactgcttccctctctgctactggtgatcgagtatgtttggtggaagtgtgactttctgttctgttttccctctttctgagcaccaaaagctccaaaacacctgaaacaactccaaaatgcagaatgtatgcaagactagtcctagactcgactatacaaacaagactcaaaatggtgataaaaggatgtgtaaaacatgcaaattatagacatatcagatggtgtagccaaagtccatatgagtctttgtctttgtatcttctaacaaggaaacacaacttaggcttttaggataaagttgcggtttaagttcttatactcaatcatgcacatgacaacaagtcatattcgactccaaaacactaaccaagcttcttcttgcttctcaaagcattgatagtgtagtcaaaaaccgtatgagtctttgtctttgtatcttctatcaagggaacaatacttaggcttttaagatcaggttgttgtttatgttcttatactcaatcatacacatggcatcaagtcatattcgactccaaacactaaccaagcttcttcttgctttgcagagctttgatggtgtagctaaactccgtatgagtcttcagctttgtatcttctaacaaggaaacactaccttggcttttaagatccggttgcagtttaagttcttatgctcaataaaacacatgacatcaagttatattcgactccaacacactaaccaagcttcttctctattctcaaagctttgatagtgtaaccgaagtccgtatgagtctttgtctttatatcttctaacaaggatacaatacttatgcttttaaaatctggatgcggttctagttgttatactcactaatacacatgacatctagtaatatttgactctaaaacactaaccaagcttcttcttgcttctcaacgctttgattgtgtagctaaagttcatatgagactttggctttgtatcttctaacaaggaaacactacttaggcttttaagatccagttgcggtttaagttcttctactcaatcatacagatctcatcaagtcatttttgatcacaaaacactaacaagcttcttcttgcttctcaaagctttgatggtgtaggcgaagtctctatgagtctttgtctttgtatcttctaacaaggatacaatacttaggcttttaagatatggttgtgattctagttgttatacttactcatacacatgacatctagtcatatttcactccaaaacactaaccaatattcttcttgcttctcaaagatttgatggtgtagcctgataagtgtgtattttgcatattttgagcatccatttgtcatcactttagcatcatatcatcactgttttataccatttcacatcatttgtcatcactttgcatgtttaggatagttttgcatgcatgttgcatatttgcattgatttcacgtgatttggagctgttgacgagctatcaggaagaagcggacctgatcgtgataaaccactcgacccagaggtcgagtaggagcttcaagacctcaagagaccactcgacccccaggtcgagcagaggacatcaccacttcacttcaccactcgaacacgaggtcgagtgccctcgtctccatcactcgatcacttcactcgaccatgaggtcgagtgtcttcaccttcactgccagaccactactcgaccacatcactttgcctagaggtcgagtacctccatcacaccactcgactgcatactcgatgacaagcttcagagccttcttcattccgcactcaactagacactcgagcacaaggaagaaaagaagactccagctattcactcgacctctcactcgaccacctgggtcgagtacaattcttaacccgtccaaatacttcgtcgttttgagtattagggtttcgggatatttggctataagtagcatgtacttctcattttcgcagaaaagaagtttttacctagttttatttccgcagaccttgtgttctagactttttgtaatccggatttctctttatctattcagtattcagttttggttcttgattttcgtttactgttgttcattttgttatcacactactgttacactgttgttatcatgtcttcaacctgttcaacgtttatgctttctattatgatgtatgagtagtgaataggttcctgaggatgggttagagtagtgtagaattctcagtatgctaggtgattgagtattgattgatagatcccttctggattagttgttcttaatgcctattgctttctgatcaactggaatttgagcccagacatttccgcgcccaaaaggtattcgatgaaatgtctgaaccactaattccatagatttgtgaccctgtaccaaggtattggttgcagggagcgttttggctttaacttgttgattcgtaatgcttgttaggttagctctcgtcaatggtgattgagtctgggactaggttagcttgagagtctctgttgcggtggcacttagatttagttaatgaacttgttgtctagggttaatttattgagcatgtcaatcacctgtaaactgaggaaacgaaactactcaattatcccatccttaggaattctttatctgattgatttaattgtttactctactgctgtgtactgcatcatgtcatctgttgcttagtttctgcaattctttactgttactcgacctgatactcgaccacccagttgtctggcaacagactgtgcagtcgagtatccctgtttcatttcctgtctgttattcgacctgtcactcgacctcacccagtgctctgcaaagagctgtgttggtcgagtgttttactgtttctgtttgattttctgttttctgcatgttcacttaggactgctagaatacaccaaaacctgttatgcttggcttgacttagtgacttctgatcacatcttgattgttagcatcacacccatttggattgacaaccttcagtactacaacgacatgatagtgctttag

SEQ ID NO: 163295 - DNA, 1414 bp, Arabidopsis thaliana landsberg
gctaaagattcatcaaccgttaaaatcatcataattgattggaatatggctgattctgtggttggtgagggtcgattgtgttcaacagaccgaaaagaacttgtgaacaatatgcctcttggtccttctgctgcaattgttaaggttgaaaaggtgtttaacaaagccgcgtatttgtggagaccaagtccaggaaagtttgttatgggagatgtactaaatgagaacattgcatggccacttcatagtatacaatatgtgaattcatctcctccactgtatgaaacaacatcaccagataaaagaccagcacctccactggtaaatttctgcactttaacttacagcgtagaaaagaccatcacctgaatgcttggtattatttttgattcttatagagcttaagtaacagtactgctagcaccatcaaatctgccaagaagaaatgcatcatgttagattacaagaacaggagagaaagaatagcataaggaagagtatgtacctctaacccttcagatacagtccatcatatgcccctaagtccaaatgcgagcaaggtatgtgtagaagtttcaaagattggagatgctgctgtgtggagaccaaactctaaaattcaaaccattgtcgatgtagtaggtagtattgtggcttgacctactgataaaatcatgtttgtgtaaacattatatgtttttttttgttaagtaccgataaaatcatgtttggctttgacattgaaatgtaatttgggatcttgaattttatataatatgaatttctttctaaattttgaatttatgatatctaaataatatgaatttctttctgaatttgggattaaaaattaatttatgaactggaattaattgaagaaatattgcataattaaaaatgccataatatataaatattgcaattaactaaatgctattatctaattatatgtagcaaattaaatatgctatgtataatagttatttatatcagaaactaatcgctattaaataattaaagattgctgcagataaagcgttgtaattaatgaaataatgatagcaaaacaaaaaagcgctacaatatgtatctgacctattatgacagacgatgatagagcgcttctaataacgctatagtataattaaatatcggttttcggacgctacaaatgctccatattcttgtagtgaatttttgataaatttggagaaaaccttagaagtagaatagtttctctcagttctattgattacacattaggcttatttatagaacaattcttggcttacatagaaatatatgtaaaaacgattttgaagaagaaggacaaaaaacaaacatgatatccaatgagaagaaaaaacaatcaatatgtgaaaagcctaatgtgtaatcaatactagagatttgt

SEQ ID NO: 163296 - DNA, 1644 bp, Arabidopsis thaliana landsberg
atgagtatgagttttcgtcctgaagtggaagttcacgtcaccaacggaaggaaactctctccatcagaaccaaactcagtcatcatacgcctcaaaaccaaatctgtagagatcattattgaaaaccaaacaaccggtcgccaaaaccgccggactcaggtttcaccaccttttctcatcgatatcaatctccgtagctctagtcacgaccacatccgaacgcttctccacgatcgattagtcggctacccctttgagagttacttgtgcgatgacttagccccaaagatctcaacggctgcaatagacttaggttttgggcacaacggctttaccttgaccatggccgctacagttacttaccggaccgtctccgttatgtcaaacgacgagaaatcattgaggatggttctgctagggagaatgaaagcagaggaattcaagagtttgaagatggaaacagagccgtgttccatatgtctcgagagtctagtctccggtccgaaacctagggacgttacacgcatgacttgttctcatgtcttccacaatggctgtcttttggagtggctcaagcgtaagaacacttgtcccctgtgtcgtactgagatctacgattgaaaacattgaaattagggtttcatgtaaggattagtattaaggtttccaatagaagttagaaattctagttttttgtcacatgctgtaactagttgaagacattgaatgtaatttgtgttttaagggttttactcaattagagaagttttgtgtcacaaatcttgtcggttttaagttcatttgcaaactcttaaatccttaacaatataaccagaacccttcacatcaagctgttgctctgaaatcaaatcatgattcctatgtgtcttcttcaatgtgatttgtttcacctctcacatgaagtccttctgcagtgtctttattatctccttctgcaatttcaactctttggataatacagcagaaatcactttagctacttcagcatatttgctagtcaccaatcaaagttaataaataatgacacttacatagagacattgacacttctcacaaagtataattcttcctaataggtctgggcaaaaaaaacgctaaccgattaaccgaaccgaaaaacatgcttcggttcgggtttggatagcttaaaataaccggctggatattatatgtcttagatttaggttttggtttcggttaggttagtaaccgataaccaaaggataaccaaagcatatatgtatgatagataatatatcacatatattgtatctattgacactaaactatgttcttctcttttttagtttgcaagttgaatttcgtgagttgtgaatcaggtgttttaatgttatagagagtatgggccatatttgcatctttgtgagttgtgaatatgtcttacattctatatcagttattggtcaatttttttggttgtttcggtttttagtcggttatttcggttttggtttatttatggttaccaagtttaatatacgaaccgaactgaaccgaaccaaaattcctcaaatattcaaatggttcttatattactataaccgaaataaccgaaaccatgcacaaccgaaccgaaaccgaatgcccaggcctacttcctaa

SEQ ID NO: 163297 - DNA, 2910 bp, Arabidopsis thaliana landsberg
atggatgagacagagtcgtcgtcttcaaggccataaagagaacagagagtatatgataccttcagaagaaaagctgagatagctcgagggaagagagcaatgacaaataggtatgagcttatagatgaggatctagaaggcgagtacatacctgagcatactcgcagagccaccaaacttctgcacaaacctgatgtgttgcctgctgaggaatatataaggctcttcaaacagaatgcgttctgtagcacaaggtatccatgctcaaccacacttgcacaacttggattgttggaggatgttcaacacctgtaccagagttgtcatatggacactctgatggcttatccgtatgagcatatgaagaagagacaactcaattcctctccacactgcaagtggagctttaccaaggtatgacctctgatgagttggaatgcgaaggattgggattcttgatattctctgtgtatggtcatgattataggttatcaatcaagcgcttggaaggattgtttggtttcctcaatggaacgcgtactaagcccaagtatgacagagaagagttgaaagacttatggatcaccattggcagctttgtaccgctgaactcttccaggttaaagagcaatttgaaatgcagccctgtcatcaggtacttccagcgttctataggtaatgtcctctactcctgagagatcacatgaactgttactaattctgatatggagatgatcgcaatggctctcaagggaactcttcaccaaactaagaatggcatgtctctccaaggtgaaatcaatgacacacctctctctgtacttcttctgatccatctgtgtggatacaagagcttggccgtcagcaataaccacaagagagcacgaggcgctctgtgcataggaggtgttgtgacaccgattctgatcgcttgtggagtcccgatcacttctgatggactcgagccacgaacaatggatatcgagcatctacgtcactgcgaattcctggagtttgcaatggttgacgacttgcacaggttcatgtttgagcactctacagacaagagagctagcatccttctccccagccctgaggttacacggataatagagggagataacattgatttttggcctgaggttggacgcctttactatgagaacgcttcgccattggatgatgatcttctagaagaagctgcttcggatgggatggatgaagacagagcagtggagttcgacactagcatatatcattgtagtgaatatgtacctccagcgagggagagcaagagcttgagtgtaacaacaacaagctacagaagtggtgcaagaaacaggacaagctactcgccaagtgcttcaaaactatcaagttcctaatagataagttgagctgctcctcttccactacagttatcccacagggacaccctcctctagacatgccattgaggagatttgatgagcctgagccaagtcaacacaggcctgagcctagtgagcagagagtctcacatgtccttgctaggcatttatcattcgagtcccgggagcacaagagaagaaggaaggctacactcgttcgctctagcagcaaatcacgccttatacacttgaggagatcactcgaccgtggtgctggccgcagtagaaggagagaggtcgagtatcctcagagcgatgttggccgccacatagttgatggggtcgagtacccacatgctggagctgacacagaacagggcggctcatctatggcctgggagaattcacaagcagccattgacgaccaactccgttcattcttcgactgaggtaagcgcctcacttcaccattgtattatatcatctcttgtgatttgttctttattttgtttctgtgattggatttgtcctgagtactctcttcaaagtttattcacatagcggactatgtgatttaagtttgggggagggctcacgaagggggcagcacatagggtattttttgagactgcatcatctaaggcatagaacaaccataaaaatttggaaaattttcagaaaatgatttcacaaaaacagagtgtcatgtagattgcatttcattttaggactgtatatagagtgcttgcatttaggattgctcatttgcatagaggataatgatgatttcaaacctatgagcatgtaaattcagtgaagtaagttcaatgcacaggttgttagttctctgttgcataaccgattgtttctctgaagtaagaccgcaccccactttgaatttacaacttgactatactacaagaaaacctgcattttgggacggttagttgtgaccttttattcagccacaaaatatagttacttctttgtgacgacgatctccgttacacattcaaatagaattcgtccttcccaatatcagccgacgacacgaccccagaagtcaccaccccaaacgatacaaaccccgactcctgctcgttctcactcgcaatctggctctcaacaaccgcctcttattcgtcgaaagcaacaacaacctcttgcttgtcaacatcagattccttatcttcaagaacagccttctcaggatccaccggagacacagttcataccaaaccatcaaaaccctaataatcatgaagaggaagatgaggaggacgatggggaagaagatggggacgaattcagggaagaagatggggaggaagtcgacgaagaagaacaaaaccctaatgtcgactaccaagagctgttggatcgcttacttgccttgccaagccgacaacatcttatgattctgtcgcaagagcctattccatgagtcgagactctttggtaagctctataattctctccttctagaaacagaagaagattatgaaatggtgataagctaagtatggtctggatctttgtg

SEQ ID NO: 163298 - DNA, 3808 bp, Arabidopsis thaliana landsberg
  unsure (1)..(3808): unsure at all n locations
cccgatcttccattcctgagcagattgagagataatatgttcacatgactcagggtccatccaaatcaaacaaagagcttatcctaaattgaaggtaaacctctatttggtgagtttccaaaatgagcaaacctctcgtggtaagtctctcagacaagagaaaatcgaaatcaagaacctttagacgtacttgtccctgaagaaattgggttatttggttatgaaagaaattggttctgatttaaaccggaaaaagaaatttggttcggtttggtttagagagagaagaaataaactaaaatatttcccgtgaatatgagcgagcaatcaatgagaacagcttttcactcaaaagcacactcccccatcaaagtttcttgcttttcgtctctttccactgttttagattttcatttcaatcatcttttgtttctttatcagcttttatatatgcttcttcttacagatctctcagactctctcttcttcttcttcaaactataatggcgtcttctaagcataataaactctgttctttcttttatctttgcctcttcttgactttagttgcagctgctgagcctcaaacagaatctcttctcactttaaaatctcaactcaccgacaatttcaacagcttaaaagactggttcatcaacactcctgaagtttccgacaatcttgtcgcttgttgttcttggtctggtgtccgatgtaaccaaaactcaacttctgttgtctccgtcgatctctcttccaagaatctcgctgggagtttatcaggcaaggagttcctcgtcttcaccgaactccttgaactcaacatcagtgacaactcgttttccggcgagtttcctgctgagatcttcttcaacatgaccaatctcagaagccttgacattagcagaaacaacttctccggacgtttccctgacggtggtgactcaagtctcaagaatctgatctttctcgacgccttgagcaatagcttctccggtccattaccgatccatctctctcagttagagaatctcaaggtactgaatctcgctgggagttacttcactggctcgattccgagtcagtacggatctttcaagaatcttgagtttcttcatcttggtgggaatttactaagtggtcacatacctcaagagcttgggaatctcacaactttgactcacatggagattggatataactcatatgaaggagtaatcccttgggaaataggttacatgagtgagctcaagtacctcgacattgctggagctaatctctctggcttcttaccaaagcatttcagcaatctcacaaagcttgaatctttgtttctctttaggaaccatctttctagagaaatcccatgggagcttggagaaattacttctcttgttaacttagacctctcagacaaccatatctctggaaccataccagagagtttttcaggtttgaagaatctcaggcttttgaatcttatgttcaatgaaatgagtgggactctccctgaagtaattgctcagctaccttctttggatactctcttcatatggaacaattacttctctgggtcacttcccaaaagcttggggatgaattcaaagcttagatgggtggacgtttccaccaacagtttccaaggtgaaatcccacaaggtatttgctcaagaggtgttcttttcaagctcattcttttctccaataacttcactggaactctgtctccatctctctcaaattgttcaacgcttgttcgtatccggcttgaagataattcattctcaggtgtgatcccttttagctttagcgagattcctgatatctcatacatagacctctctagaagcaaactcacaggaggtattcctttagatatatccaaagctacaaaacttgactacttcaatatctccaataaccctgagctaggaggcaaacttccaccgcatatttggtctgcgcctagtcttcagaacttnnnnnnnnnnnnnnnnnnnnnnnnnnnnngtctccctgtgtttgaatcctgcaaatctatcactgttattgaattgagcaataacaatatatcagggatgttaacaccaactgtttccacttgtggctctcttaagaagatggatttgtcacacaataacttgagaggtgccataccatctgacaaagtgtttcaatcaatggggaaacatgcgtacgagagtaatgcaaacctatgtgggcttcctctgaagtcatgttcagcttacagctcaaggaagcttgtgtctgttctggtagcttgtctagtctctattctgctaatggtagttgcagctttggcattgtactatattcgtcaaagaagtcaaggacaatggaagatggtgtctttcgcgggactccctcatttcacagcagatgatgttttgaggagctttggttcacccgaacctagtgaagcagttccagcttcagtgagcaaagcagttctgccaacaggaataacagtcatagtgagaaaaattgagttgcatgacaagaagaagagtgttgtcctgaacgttttaacgcagatggggaatgcaagacatgtaaatctggtcagattgctcgggttttgttacaacaatcatcttgtgtatgtgttgtatgataataacctgcataccgggacgactctagctgagaaaatgaagacaaagaagaaagattggcaaactaagaagaggatcatcactggtgttgctaagggactttgctttcttcaccatgaatgtttgcctgcaattcctcatggagatgtgaagtcgtctaatatattattcgatgacgataagatagagccctgcttgggtgaatttgggttcaaatacatgctacatttgaacacaggtacttaccatgaaacacaaaatctcttagtacatcatcctttgtttttcctaacattagactctctaaagcagatcagatgaacgatgttataagagtggagaagcaaaaggacgtctacaactttggacaacttattttggaaatcttaacaaatggtaagctgatgaatgccggtggattgatgatacagaacaagccaaaggatggtcttctaagagaagtatacacagaaaacgaagtgagttcaagtgattttaaacaaggagaagttaaaagagttgttgaggtcgcacttctctgcataagaagtgaccagtctgaccgtccttgcatggaagatgcactcaggtaattgtctgaagcagagaataggttcaaataggtaataaggctaaatttctgaatgcacatagtgtctcttcccctatagatatagtaacagggaatccttatatagtattgtattgtaccaaaacgttctctttatttctttaaacgacaggtgtgacttgttagttattttccggatcattgtgttataatgttgttcttgtattactatacattcaacaaaggtatggtctctctgcagttttgatatatatgtataagtttgtcatctaaatgaaatgaagattccaaattcttagatttatatactgacttaccttgtttattatgcgtacgaggacaatgcaaacctctgtgggcttcctctgaaatcatgttcagcttacagctcaagaagcttgtgtctgttctagtagcttgtcttgtctctattctgctaatggtagttgcagctttggccctgtactatatccgttggctaagtcacacttgtagaccacaccagagtgagaaagctagtaaagacaaagaaaacggtgttgtccttgcgctaaataaaaagcatttagctgcggcgtag

SEQ ID NO: 163299 - DNA, 3921 bp, Arabidopsis thaliana landsberg
  unsure (1)..(3921): unsure at all n locations
gctgaatactcaccattttggaaaaaatctcaaaattgaaatttttaagaaggatcagaatcaatagatgattacgagggcctccacccaagaaacatacaagaagaaagtcatccaagaaaagcttgatgatcccggttcgttcactctatcatgctctctaggaccattgacattcaataggtgcctttgtgattttggagcatatgttagccttatgcctctctctacagctaaaaggctagggatcatggaatacaagttctgcaacttagctttactcttagctgatggttctgttgcacatcctcatgatctaatagaaaatctgcctgtcaagattggaaatgttgagatacctactgattttgttgtgcttgcgacggatgaagaatctagggatcctctgatcttaggaagacctttcttagcttcagctggagcagtcatagatgttaagtagggaaaaattaatctgaaccttgaaaaaggcatcaagatgaagtttgacatcagagaagcttcagagaaatcaacaacaagaggttagagttttgggattcaggacatggatgttgatgaagaaacagaagctggaaccccaccaaaagttaactgtacttctcaactcagcaagttgaagagaacttttgaccacaagaaaagagcaatagaagggttagctcagactgaagatcctacagaagatgactggtatgagatgagaaaaaaatttaaatggcaaagtagagtcatatagggattatcttcaagggtgatgaagctgaaagatcaattatggatgtttgaaagaagagttaataagttttcaaatagtattgatccagagaagatggaaatagcactagctatcaaggaggacgaagatttcacaacagaatggtttgcacgagaagatcagaaaggagttcacttagaggaaagaatcctagagagcaagttgttgagtgaggagaaagtccctattccgacttattctccatgagtgcctaaacaacctaccaacccctctgctgaaaagaacacttgacacttgattctgttactaaagaacttcttgaactcaggatagaatacaaagctcaagaggataccattggggagctaacttacaagatggaaggactgaaccatacaatcttggaacttcaagaaatggttaaaggctaccccagttttgaacttgaggattggttaaaggagcctggttcaaaagaagaagactactctgctgatcaaaaagaagcttattttgaagaaaaatcaaatgagtactcatcctaccatatgtcaagaaaggatgcaaagtatgattcagacactgaaaattcaaccactgaagatgaggacttctctgttcctctcttcaaccttttttctgactaagctttgtaagagtcaagcttagtgacttaaaacaaactcacttgggaggaagtcccatgtctatccatgtaaataactttctatttttcttgttatttttgatgtttttgtttaagtgtttcaagtttgttttagtgaccctaagggagtcaacgttcgagtaatttcaaaccaagtcaagaaagatctcaaccgttgatcgagtaaaatgaggaggagtattttgagccattgatttggatgaccaaatgagaggagcatcaccgccgtttgatcgtgactttcagaagttaattttggcccgtttgatcgagtaagcaagaatgagaagttccccgtcgttggatcaaatttttcgcactttaagaggatgctcgatcctttactcgagctctcattatttgaagaccatggcataacttgcgtgaccccacttgttcccccaacactcttttactcgatggacaaagcaattacccatgcccctcaccatttacaatcaacttttctatctcttccaaaaacaaaccaaagacctgtctcctccacccattgaattccacaaaccctccttgaaactctctctttcatcatctcgttttcgaaattctctcacaaagctttgaagtcttcattcaaaacccttccccaaacactccctatcactctttaagaatccgttccccttcaccaatacttcaccaaaaagttactcgatcactcccaagtctatcctcaaacattcaatcggtttcaagctcaaaatttcgtcaccaaagaaactgattcccttccgctttgatacctcttggagagttgttcttgtttgccctgttgaagctcaccaccaatctttatggattcaagaagaaaaagttcatctcgagctagaagatcctccgttgataatgaagaggttgaggggtttgacatgagtggcatgactgaaccccaaattcgccaagctcgccgtgctcaaagatcaagcttgattcaaggtggaagctcaagccgctcagccatgcaaacagaagaagtagctcggcgaaatagggtcgttgaggctgaagaagaacaccatgaagaggcaccctttaagaagcggtttctgaggaagaggttgagatcatcggggatgatacaccagcacctgttgggagaanaanccggccaaggaggaagagagagccaaccccaagctagtactatcaatatttgaagtagttgaagtttgagggaactagataccctcataaggaaacgatgcaagagcttagtatttgtgttaatgtggaatacttgatggaattggccaatctttttgaaaaacaatcgccggtctgaagcccttctcgccaaccaagagcaagagttcttcaatccaaaattctgtgattagatacctccaccaatgcatcgccaacaccctctttccaaacaacgccaccggatttgttggtgaagaggagctatgcatgatagaccaatctttggtcttcattttgagagagacaaaagatgggagaaagatggggggtgatagagcagacacttcgctgagtgttgttctcttggatcacctattgagctacaaagagtatgctgccaccatccatcgctcggaaattcgcgaaagtctttgtgttggtggtatcttaacgccaatactaggagctgtgggtacggaattcggaacccctgacgtgttgcctaagttcattgacctagactatcacaaggggaatgattttcttgagaaaacaactccagcggatcgctacctcttcaagttcaaccatacggagcagggtccttctctgttactccctacccatacgagaaccggtgaagacaaggcgcaacatcaatttcatgtcatctccctctgccttgaacatcaacattggaggagctcgagaagatgaaccggaatatagtcaagctgaatatgagcaacaggagtatttcactcaagatgactatgagcagcaaaccgagtttgagcaacaaagcgagcaaccggagcaagaggcgaacgaattcgagcaagctcaccaaagagaaaatgcggatcaaggaggagatgagatagctgaagttcacaagaagctcggtgtgcttgaagagcttgggaaccttcacagcaaaacagtaaagggtttcaagaagaagatgagaacaatgaataagtcgctgaagagtatggctgctcaaatcaaggacttccagagcaagccaaggccaccatctccgacccccgaagtaagaagaagcggttccacaagctcagctgcaaggagggctgaaaggattgatcaaccccgagcttcatcttttgagcctcgggaagcgatctctgagttgagagagccaaggagtaggcagagacgagcttccacacgctcgaccaactactcgaccggacagaacgagcaaaaccctcccgcctcaacttcagcccctgcttatactcaagagagtatggacgattacgtttccatctacttcacctga

SEQ ID NO: 163300 - DNA, 2567 bp, Arabidopsis thaliana landsberg
agattgcatctccttcttcttctcttattgatttaatttgttaatcttatttctttttcaagtcaacaagacttaagtttcatctacaatggctttaaccaagaccgaaccaatttaatccttgacggttctgcaaaattcctacaagatggacttttgcagctaaccgatgggacgactcaggaaaagggtcatgccttcttcaaccttccattcgagttcggttcagcttcatctcagtctctctccttctttactcatttcgtttgcatgcttgtccctaagccaggagttgatggtggtcacgggattgcttttgtgctatcatcttcaaatgatttcagaaaagcagatccaagtcagtacttaggactcttcaacatctcaactaatggatctccttcttctcacgttttagctgtcgagcttgatacggtccaaagcgcagagtttgatgacatcgataataaccatgtcggtatagacgtaaacagcctccaatccgtcttttctgcttcagcttcctattattccaacagagaagggaaaaacataagcttattactcttgagtggagatcctattcaggtatggattgattatgaagatactcaactcaatgttactttagcacctctaagagaacagaagccaagtaagcctcttttgtcaagaaccactaatctcactgcaatcttcccggatcgaagagcatttctcgggttttcggctgcaactggatcacttataagtaaccaatacatcttagggtggagtttcagcagaagcagagtgttattaaagagccttgacatttctaaaccgcatataacatcatcttttctcttttttttggaaacaagattttatctgcttattttagttcttttggttatactcgccctcatagtaatcgcggttctaggaggatgttatctgtacagaaggaagaagtatgcagaagttagagagccatgggaaaaagaatatggtccgcttcgttattcctatgaatctttgtacaaagcaacaaaagggtttaacaaagatggtcgtctaggaaaaggcggttttggagaagtgtataaaggaagcctgcctctagtaggagatatagctgtgaagagactatcacacaatgcagagcaaggcatgaaacagtttgtggccgaagttgtgacaatggggagcttacagcacaagaatttagtacctcttctcgggtattgcaggagaaaaggcgagttattgctggtctctaagtacatggaaggaggtagcgtcgatcaatacttgtttaatggcgataaaccacctctttcttggtctcaaagactcgcaatactgagagatattgcatctgcactctgttacctgcatacaggagccagtcaagttgttttacacagagatatcaaagcttctaatgtcatgttaaacgaaaattttcaagcttttttaggagattttggaatggctaggtttgatgatcatggagctaacctctctgcaacagcagctgtaggaaccataggttacatggctctggagttaatatcaacaggaacttccacaaaaaccgatgtgtatgcatttggtgcattcatgcttgaagtaacatgtggtaggagaccatttgatcctgagatgccagtagagaaacgacatctggtcaaatgggtttgtgaatgctggatgaaacattctctaattgacgctatagatacacggttgagagataaatttacactcggggaagtcgaaatggttctgaagctcggtttgctctgtacaagcattataccagaatcaagacctaacatggaaaaagtggtgcgatacataaacagagaccaaccattacctgatctctctccagatactcccggaatcggagtttccactctgatggtaatgggaatacctcgcttggcaatcacttcaagttcagtgaccgtatgagtatcaggaccattagtctctcctccctctaccaactcaatgttcatctctcacagcatcttaaatggtgatggaagatgaaatttaacaactttcttcacatttatttgttgtacatgattcagatctcagtaccaaaccaccttatctgtcttattgtctctaatgtttaaactttgtatcaatttaacactcaaatgttttgtaaaacttagtaactaaagacaacgaaagaagaagctacaacagttatgtgataagagactaatgatggtttgtttattagtccaattgatttcgagctttctcttttcctctaaatcagcagcaacatttcatcacagtttcttccaaattcagagaaaaagagaaagctgaatcaacctgggatctgattggatattaccttgaaatcaaattttactttctgatctttgagattcattgtcgaaaaccttatctgaaaattcaacacgaagaatctttcttaaattcaagcaaatttctgaaattaaaaatgaattacgaaccttctcgacttgtgattggagaagaaaatcgccacgggagatacagttgcttgttctatcttagctccgtaaaga

SEQ ID NO: 163301 - DNA, 1475 bp, Arabidopsis thaliana landsberg
  unsure (1)..(1475): unsure at all n locations
atggtgaagtcaatggtgtgcattgtgcttgctcaattctcacttgttgcgctatttcctctatgtatttgttatcaaacacatcaaagcacgagctctgtagcctctctatcccctcagttttacgacaactcgtgcccaaacgcacaagccatcgttcaatcttacgtcgccaatgcatacttgaatgaccctcgcatggctgcctcaattcttaggctccatttccatgactgtttcgtcaatgtttgtcaaaatctagtctattcttcaaatatataatgtttaatataaataaggagaaatgttgtttgatatatatactttggttggtgcagggatgtgatgcttccgtactattggacagtagtggaaccatggaaagcgagaaacgatcaaatgcaaatcgagactctgctcgagggttcgaagtcattgacgagatcaagtctgccttggaaaatgaannnnnnnnnnnnnnnnnnnnnnnnnnnnnattggctctcgttgctagagactctattgttattgtaagtcaattctctaacacaatcattaggattgatatataattgatacaaacactcgttacttttgtaattatctacagtgtggtggacctagttgggaagtatatcttggaagaagagatgcaagagaagcaagcttgattggttccatggaaaacattccttctcccgagtccacgttacaaacaattctctctatgttcaactttcaaggacttgatctcaccgatcttgttgccctcttaggtatatatactagttattacactcgtccaagataacttttatttatttattaatgtggttgaatttataaaagggtcttaaagcaattgtgattttatggaagaaactaattaaaagtgtaaacaaatgttttaaataacgatgtgtgattgtgattggataagaaaagttatcttatctctcataacttctattaaagattaaatgccctataaactaacacattgataaatttaattatcatttctaaaactaataaccatgcatgattcaaatgtagggagtcacacgataggaaactcgaggtgtattggtttccgacaaagattatacaaccatactggaaacaacgatcccgaccagactttgaatcaagactacgcctctatgttgcagcagggatgtccgatttcgggcaacgaccagaacctctttaatcnnnnnnnnnnnnnnnnnnnnnnnnnnnnnnnnnnnnnntacaagaatcttgtgaactttagaggactcttgagttctgatgagattttgttcacgcaaagcatagagactatggagatggtcaagttttacgcggagaatgagggagcgttctttgagcagtttgcgaagtcgatggtgaagatggggaacatctcaccgttgacggggacggatggtgagatccggaggatatgccggagggttaaccatgatgtttga

SEQ ID NO: 163302 - DNA, 2293 bp, Arabidopsis thaliana landsberg
acggatttacgtttaggataagagaattacggatttctatttttggtgggacaattacggatttacgtttttggcagaaaaattacgagtttgcttttttggtgagaaagttacaggtttacgtttttctcgcagggaaattacggggtttacgttttttggcggaaaattatgtgtttacgtttttggcgaaaaaatgacgggtttacttttttggctaaaaaattaagagtatgtttttggcgggaacattacgagtttatgaaaatgttatcatcatgatgaacatagtatgataatgatggtgatagtattatgatattatgggaaactccagtcatatgcccaaataagggaaactcaagtcggcagacaactaaaagtctccaaagacattgccggggcaaaaaagaaattccccggaaaacaaaaccctatcgtcagggaaccagagtaaaatgacactggaaatacaatgcagaaatgatcaaaacacaatcgaaagaggacgactcctaaaactaaaagcagaggcaacaaggcaaaaaccttaagaaaactgatagaactaagagaacagagaagcctcttcttcttttgaaagaccagcaaatgcgacttatcacggctgcccacggccaaaccagaaataatatctaccacctcctatcaagttgagagtcaatctctcgagaaccaaggatatcagaacccggcaagcaaagagaattcatagaaactcattgaacctcgaaaacacttctggatgcgacgaagaccgaagcgtcacttaacgtctagctagaatcctaaaaaaagcgacagatctaaacagatcttgaaagcagggacaaggagtgaggcaaaacctctcaaaaatcaccattctccgaatgagagcgacaaaggattgagacagttaacaaacaccgcaaacaccaaggagaagaaaactctgtaaactatgaagactaccataaccaaccaataaacacgaaacttctgcttagaaaggaagcgatcccaaagggagccaaaggctgagcgagaaatcaaagggagcgaggaaaggcaaaggattagcagataaactacaatccaaaaccaagtaaacttgacggcaaagaaacgttgaaaggctcaagagcagcaacaaactttaaggcaggaaagagcagagaagagacctcattctccgagccatagcgtagatcaaccaaatccggaattactaacatcttctctgaggtcacaaaacccaaaagaaattaccgcaacgaccgcttccacaaacccaaaatcaaaatcgaaacaaaccaaaagacttcctaatcgatggccacaaattctgcacacaaaaactaaacaactaaccctatctagtcaaagaaagaaaacgactagaaggtcagcaaaactgaccagaagataccaagaacccatggccacagaaccgagaacaaccaccgacgagaccctagccaaggcagaatctgacaaaggcagaaaattcatcttctacaacccgttgggggagggagaaggacgctcttgaagagaagaacaccgaacaaacctcactgtgaagacccgtctaactcgccaagcaaactacgttcaacatcgaacactagaactagaagagggagacaagtctacaacaaaaaagaaagaagcagcaggggccctctcacggctacgacgaggagcgccgttcaccggagagggcgatctgaaatctggagatttttgggcggcggctagggcaaccttgtctagagagaaacttttttgttttagttatacacatattatgtgacacaccaacactaaataaaatgactaactaattcaacaccataaaaactctaaaagtctctcctgtgctgacacatcacctttttcaagtgttctcagcatgacaccttttgagagctttatgactggttaacgcatttacgtttaggataagaaaattacggatttttatttttggtgggaaaattacggatttacgtttttggcagaaaaattacgagtttacttttttggtgagaaagttacaggtttacgtttttctggcagggaaattacgggttttacgttttttggcggaaaattatgtgtttacgtttttggcgaaaaaatgacgggtttacttttttggcgaaaaaattaagagtatgtttttggcggaaaaattacgagtttatgaaaatgttatcatcatgatgaaaatagtatgataatgatggtgatagtattatgatattatgggaaactcaagtcatat

SEQ ID NO: 163303 - DNA, 2079 bp, Arabidopsis thaliana landsberg
atgagctctcgagcgggggaggcgaatgggagattgggtgagattgatgttttgctgatggatgtgggggagaaggagcgaccactaggagatccgccggatagtatggggtcgtgggcgtcgaaagtgagaaggagtgttggtggaggtattctgaaaccggagaatgtgattgacgatgcgtttgtatgtgagagggtgaggttggagtttccgaatggggaggatggagagccagttatcaccataggggaagaggtgttggaagccatgaatgggctttggaagagatgtatgatagttaaggtgctagggaatcaaattcctatttcggtgctgagtcgtaagttacaggagttatgaaaaccgtagggggctatgacggtgatggatttgccccgtcagttttttatgattagatttgagttggaagaagaatatttggcggctctaaccggaggaccatggagggtttttggtaattatctgatggtacaagattggtcaccaaattttgatccattgagggatgatatcgttacaacgccggtgtgggtgaggttaacaaatatcccagttaactattaccatagatgtttattggaggagattgctcgtgggctggggaagcttcttaaggttgatctgaatacgattacttttggtaggggacggtttgcaagagtatgtattgaagttaatttagccaaacctttgaaggggacagtgttaattaatggagataggtactttgtggcgtatgaaggtttgtccaagatatgttccttgtgtggtttgtatgggcatttggtgcacacttgtccaagaaatgtgtcagtaaggagtccggctagagcatagccgagtacggagagagcggcggtggtttcatcaccagaagttaaagaaggattcacagtggtgagacagtcggggatacgggtggaaaaatcggcgcaaaagatggtgtttgcggcgggttcctccggtggtcgttcaaatcgcagtttaagggaacttcctaaaaatcagggggtgaagatatcaaatcgttttggtgggttagaagaagatatggtatctgctgagataggggaagttgccattttagaagggtcgaataaggagaatgaatataaagggaagaatatgcggaaggagtcgggtgtcacgcaagttaaggaagctcaagttaatgtgaccttcgaaaaaggaaaaggcgggccaaaatggaaacgaaatggaggattgaaaattatggagcccaatgggccaagacagaaacaagggtctgtaaataagcctgttagagggttaatttttgggcccacgaaaggtgaaagctcaaatctagttggcgatgcgttatcagctaacgggaaaagattgagagttgaacagaggagtgttggtcgacccggtggagtctttgttagtggtcttgagacgcgttcatgtgagatggacatgagcatggagttgccctagaatatgaaccaaatacaacaaagtaaggaattgttgtgcgatacggcgatcgtggtgtaggaaggattggccgtggagagtactggtgtggagatggcgtgacgctattcctcggtagtttggtgtttaaatctacaatttttaatggattgtctattttggaactgccggggggcgaataaacctaattttcgaagagcagttcgctatatgttgaagaattataaaacagattttcttgctatgtttgagactcattctggatggaacagggctgagaggatctgtcgggggttaggcttcgataattcttatagagtggatgcggtgggtcaaagtggtggtatatggttgttatggaggtcgggttttggagacttaacaatcatagagtcatcagatcagtttgttgttgtacggttgcagagtgattctgaagttttaaatattatcgctgtttatgcggctccgtctgcttcaaggaggagtgggttatgggataagttaactgaggtaatagaaaggcttgacggacctgttgtgatcgggggcgactttaataaaatcgttcggcttgatgagagaacatga

SEQ ID NO: 163304 - DNA, 3593 bp, Arabidopsis thaliana landsberg
  unsure (1)..(3593): unsure at all n locations
caagaagttggaagaactgtttggtttccctagtggaaagggaatcaaaaccaggtttgacagggaagagcttaaggatttgtgggctactattgggaacaatgtaccgctaaactctacgcggtccaagagcaaccaaatccggagtcctgtgattcgctactttcagcgctcggttgccaatgttttttactccagggagtctacaggcaccgtgtctaacacggacatggagatgatagatttcgcccttacagggattctcggtcgtacaaagggaaagaatgttctgagaggcgatctcaacgacgcgccaccagtaattcctctgttgatccacctgtgtggatacaggaagtgggcattgacaaacggcaagaaaaaagtgagaggagcactatgcgtaggtggcgttgtgacaccaattctggaagcttgtggagtactgctcaaggaaccagggttagcaccgagaatgatggacttatatcatttgcgctgatgtgagttcttggagtatgacatggttggcgacttccaccgctacaggttcgagcattcatcgattagaatcgccaacattcttctcccctgcattgatgctactaggattctcgagggaaggaacattgatttcaagcctgcgcttgaagatatctatttcgagggcagcccaccaactgaggagattagtcacaccgaaggagctacaacagaagatgttgatgagacggatgatatagatgaggcggagtttgacacgagcatgtatcatttcagtgagcatatacctcttgcgagggaaagcaagagtttgagcgaagctcacaggaacaacagcaagctgcagaaatggtgcaagaaacatgataagttactcgctaagtgcctcagggctatcaagtttctgaaggacaagatcagctgctcctcttccactacaacaattccgcagggacagctccctcaggacatgccttcgaggtgatatgacgcgcccgagccaagtcagcgcaggcctgagcctagagagcaggagattccgcatgtccctgcgaggcattcatcattcgagcctcgtgaatctgggaggaaaaggaggaccacactcactcgatctagcagcaggagcagatgacttctgcagtctcgtagtttacgcgatcgcggtgctggccgcagcaaaaggagagaggtcgagtatcctcagagcggtgctggccgccatagagctgatgaggtcgagtacccacctgctggagctgatacagaacaaggtggttcgtctatggtctgggagcaatcacaggcagccattgacgagcaactacgttcacttcagaaaatgatttcacaaaaaaaagagtgttcatgtagttgcattaaatttaggatcgagtctagagtgtttcatttaggattgttgcatatgcataggggatgatgatgagatagtcttgtaagcattttgattcaccgtataaactcagtgccctcgttgctagttgtctgttgcgtagtcaatgaatttaaaataaaactgaaccatgcctagattgctatactcgaccacactgtcatgacctgataccattccctatcaatttgaacctgaatctgatctttaattatcatatctgcatcaaatttgaactcatggatatcctaaaatacttgcattttcttattcattttgatcactcttgttaatccaagtagctggctctccttattcgagcagttaacccaaacccaaacctagactttctttcaagccctatatcacttgtgagtgtttgtgaggtcttatttcgattaagcttggcagaaagtgttaggttagtaacgatagagatagtgtctcatgtagttctagttcgcatttttcggactagataggactaggtgggcgcttatactttgggttgggatgtttttaaaagaaaaaaaaaaggggttgattcattgatgagaaaaggtaaaagactctaggtgaagtaagctaaagaagcagaaaaagtctagtaaaggtcttgggatttgtaaagaaaagaaagagttcttgttatctattgaagatcggcaaaagccctcagttttagaatgttaaaaaacaggaaccttagttgttaaagaaatctaaatccgctagatgtatcaaagtgttgagaaagcttctccttgagttaagagaaaagaaaagaatgattagaaaagaggcttaaaagattcatgaatgcaaagggtagagttaagttcttatattgggattggagatggggttaccattagagcttcgtttgatatactctgggtagatgggatcttatctctgtatgcatagcttgggacttacctttagcattctactaaagcttaatcattttttgagagatcccctgttactgaagcctattctgtaagggaccatctttgtctcttgaccttttaccttagccaaatgagttcattgatgatgcattgcttgattcccgttccagaactaaggaatgtccaagggattggtagatttgaaaacttgtgtaggtcgagcatatgggtcggattgattgataatgaggcatggctaacgtttttaagtagaatataatcatattgcagcttagaactttcaacttggacattgatttcatctggtctatctggtgctttggctctgagtccccgctttcaaacctcacctccagcttgttcttgattgtttgcttgagggcaagcaaagactaagtttgggggagttgataagtgtgtattttgcatgttttgagcatccatttgtcatcattttagcatcatatcatcactgttttataccatttctcatcatttgtcatcactttccatgtttaggatagttttgcatgcatgttgcatatttgtgttgttttgaggtgattcggagctgttgacgagctaattggaagaagcggacctgatcatgcaaaaccactcgacnnnnnnnnnnnnnnnnnnnnnnnnnnnctcagcagaccactcgaccccctggtcgactagaggacatcaccacttcacctcaccactcgaccgcgaggtcgagtgtcttcatccccatcacctgaccatcactcgatcacatcactcgaccccgaggtcgagtgtctacatccccaccacctgaccatcactcgatcacatcactcgaccccgaggtcgagtgtcttcacctccattacctgaccatcactcgaccacatcactccacctagaagtcgtgtatctccatcaccaccactcgactacatactggatggtaagctccagagccttcttcattccgcactcaactataccctcgagcacaaggaagaaaagaagactccagctattcactcgacctctcactcgaccaccttggtcgagtactgttcttaatccgtctcaatactgcgtcgttttaagtattagggtttctgaatattttgctataagtagcatgcactttacattttcgaggacaagtttttatctaggttttatttccgcagacactgtgttctagaccttttgtaatccgaatttctctttatctattcagtattcagtatttgttc

SEQ ID NO: 163305 - DNA, 1699 bp, Arabidopsis thaliana landsberg
agctgttgacaagctaattggaagaagcggacctgatcatgtcaaaccactcgacccccaggtcgagtagacgcttcatgacctcaacagaacactcgaccccctgttcgagtagaggccttcaccatttcacctcatcactcgaccccgaggacgagtgtcttcacctccaccacctcaccgccactcgatcacatcactttacctggaagtcgagtatctccatcaccaccactcgactacatactcgatgtcgagctttagagtggggtccattccggggtcaaccagacactcgagcacaaggaagaaaagaagattccagcttatcactcgacctctcactcgaccacctgggtcgagtacagtttttaatccgtcccaatactgcgtcgttttgtgtattagggtttcagaatattttgctataagtagcatgtactttacattttcgagaacaagtttttatctaagttttattccgcagacactgtgttcttgaccttttgtaatccggatttctctttatctattcagtattcagtatttgttcttgattttggtttactgttgttcatcctgttatcatcttgctactacactgttgttatcatgatttcattatgttcaacgtttatgttttctgcaatgatgtctgagtagtgaataggtttctgaggatgggttagagtagtatagaattctcagtatgctaggtggttgagtttgattggtagatcccttctggattagttgctcttaatgcctattgctttctgatcaacatgaatttgagcctagacatttccgcgcccaaaaggtgttcgatgaaatgtttgaaccactaattccagagattcgtggccctgtaccaaggtatttgataagtgtgtattttgcatgttttgagcatccatttgtcatcattttagcatcatatcatcactgttttataccatttcacatcatttgtcatcactttacatgtttaggatagttttgcatgcatgttgcatatttgcgttgatttcaggtgatttggagctgttgacgagctatctggaagaagcggacctgatcatgacaaaccactcgacccagaggtcgagtaggagcttcaagatctcaagagaccactgacccccaggtcgagcagagacatcaccacttcacttcaccactcgaccacgaggtcgagtgccttcacctccatcatcagaccaccactcgacctcgtcactcaacctggaagtcgagtatcttctgacaccactcggatcacatcactcgacccccaggtcaagtgtcttcactcccattacttgatcatcactcgacctcatcattctacctggatgtcgagtatcaccatcacaatcactcgactgcatactcgatgacaagcttcagagccttcttcattccgcactcaaccagacactcgagcaaaaggaagaaaagaagactccagctactcactcgacctctcactcgaccacatgggtcgagtactgttcttaacccgtcccaatactttgtcgttttgagtattagggtttcaggatatttggctataagtagcatgtacttcacattttcgacaagaagtttttatctagttttatttccgtagaccttgtgttctagactttttgtaatccggatttctctttatctattcagtattcagtattcagtt

SEQ ID NO: 163306 - DNA, 1969 bp, Arabidopsis thaliana landsberg
gtttttcgtatatgccagctgagatcacgaggaatccaatttctaagttacgaggacagaattgagttgtggaatttggaaaacgagcaatttaaagatttgataattcagccagcattgagttactacaatcagtattttcaacgaggaccatttcaaacagatggcggtttgggatggcacaacatttggcatcgtctacaagaagatgatgttgcttgtttacagttattacgaatgtctcttagttgttttagaacattaagtgaaacattataactgaattatggttcacaaacaacatcgaagagagggtgacaatgtttctacggatatgtggttacaatgaaatttaaagagatattagattgcgatttggacaaaatcaagagacagttaaaaggaaattttttgaggttctaatagcgacagagttacttgcttgtgattatataaagactccaacaaggcaagaactacgccaaattcctgaacgattgcaactagactaaagatattggcaatattttagtggatttgttggagcaatggatgtagttcatgtttgtgttaaggtgaaacctgaattacaaagaatgtattgggatcgacatgggagaacattattcaatgttatggtaatatgtgatttgaacatgtatggaatgaagcactaagattttgtaacgatataacagacaactattatgtagttgattcacaatggagcaacacaatgattctgaatttcctttgcatccaacagacaactattatgtagttgattctggctatccaaaaaaacaagattttcttgctccgtataaattttcacgaataggaatattcagtatcataccttacaatttaaaaatggtcctcctcctagaaataggcatgaactgtttaatcgatgtcatgcatctttacgttctgtgattgagagaacatttggagtttggaagaaaaaatggaggattcattgtgaattttctggatataatactcatgaagaaatgatctcagaactcccttttcgtcaatagtacacctcttatatcctgttttaatctccatatcccctactgaataagtgatatgtgtgttgacgattttaccctctcttcctctttcttattattgatttttaaatgagaaaatggctggaaactccctttttgtcaagagaaaatctcatatctcccctgaaaaaacagaagctattttttatttaatttaaatgcgtaaagttatgattttaccaagatacactaatcgaaatcaaacatttatacactgaacctggatctattcgatccagacccgacccatttatcccaaacggataagtttgctagatctctcattctttcttttgaaaacgaaactcaactctctaaacttgaaaaatctttttgatttctctttcactcaaagaaaccgctctcgatctctttcaatcctctcccttctctcttactcaaattctcaacaagaaccctaattctctctctttttactcagaatcttttcttctccttctttaaccctaacccttatgccgccgaaaacaatgccgcttctaaagaagaggaagagaggagttggaacgaaggagaattcaacgacggaggagcctccgccgggaacgaagccaatcgttgctgtcacgaaggcaacgatggagcctccgacgacgacagaggagccatcaacgacagagcaaaatctggtcctgaccgtagtggaagaaggagagaagtctgacaacaatgatgaggaagaagagagtgaaaaagaagagagtgaagaagaagagaaagaagaagaagagaaagaagaagaagagaaagaggaagaggagaaagaagaagaggagaatgttgccggagaagagtcctcagatgatagtagtagaagcttgggggaagagacctcctccgatgagaatatggacgatgagactgta

SEQ ID NO: 163307 - DNA, 3660 bp, Arabidopsis thaliana landsberg
atgagggaggagagagaggatatgttgtcatggcctctgatcggagagaaagagaagagaagtagatttgtaaaggaggaagtggagaagcagctactgttgtctggaccactaatcgcagtgagtcttcttcagttttgtctgcaaataatctccgtcatgttcgtcggtcatcttggctctcttcctctatccgccgcctctattgccacctctttcgcctccgtcactggtttcactttcctggttcgtgacctctcctctctccctctctctcttctcaatttcagtgtaattgaattgattaccagaaactgaatcgatttttcctaacagatgggtacagcgagtgcgttggaaacactttgtggtcaatcttacggagcaaagatgtatgggaagctagggattttcatgcagagagctatgtttgttctgctgatactctcggttcctctctcgatagtttggttttacacagaggacattcttgtcttggttcaccaaaacaagtccatcgccagacttgcaggttcatacgctagatacatgattccaagcatctacgcctacgctcttcttcaatgcctaaacaggtttttgcaaacgcaaaacaatgtgttccctgtatttgtgtcctctggaatcactacttgtcttcacctgcttctttgttgggtcttcgtgttgaagtctggtttaggacacaggggagctgctcttgctatctctgtctcttattgggtcaatgtcattctcctctcgtgttatgtcaagttttcagcttcttgctcacaaacatggactggtttctctaaagaggctcttagccacatccctgcttttttgaagctaggttttccttctgcggttatggtctggtacattgttctttttccagtaatattttttgtttgtacttacttaatcctgtttatagtgtcatgatctttttgtggtatgcttatggtggacagtttagagctctggtcgtttgagcttttggttctcttgtcaggtttactacctaatccggttttagaaacttcaactctttcgatctggtaagacggattacattcatccttgtcaatttggtttacggggttcttgtttttactgatttctgcaatttttgcctagccttaatacatcattaactgtctggatgatcccggttggccttggtggcacagcaaggtaagcacacaaataaccagagagacgagcatataaactaacatatttcacaaaattcagtactgttactaacattgttttcctcggtcatagcacgaggatctcgaatgagttaggagcagggaatccaaaaggcgcaaagttggctgtacgtgtggttatagccacagtagtcgtagagggtattatgattggatcggttttattggcgatacgaaataaattaggatatgctttcagcagcgatccaaaagttatcaaatatgttgcatcgatgataccaattgtcgctgcaggcaacttccttgacggattccaatgcgttttgtcaggttcttccatctgaaaaaatgatctttatgagagagtaacaactatttgtttctggtctgttgaaaccaaaactgattgtacatttttgattgcaggggttgctagaggatgtggatggcagaagataggagcttgtgtgaatcttggatcatattatcttgtcggagttccgttcggtttattacttggttttcactttcacgtcggtggtcgggtaataattcaattaaccaactctcttaactcatcacaaacttgttcaaaatcaatttaactcaaagttaaaacatgtagtaactaaagtttaatcttaaggggctttggttgggaattatatgtgcactcatcgttcaaggtgtatgtctttccctcatcaccttttttacaaattgggatgaagaggtaaaaccatcaccatgtttagtatatttttgtttttagtagaaatgtaactatagattacggatatcttatagttaagtgattgttattgattatggatttactgattcttcgtttatttattcgataggtcaagaaagctaccagccgagctgagtcttcttcagaagtaaaggaatttgcagtagacaacgggtcaattcttgtatgagattctgagaggcggaaccgacgacccatatatgaagcctaaaacctttaaaaacggttgccacttatttgtagctaagaaaaataaactttgtgtacgtggattttcaaaaatataatcctaaatgttctagaagcttcctacatcattagggcttttctattgttacaaacaccgtcgttttttgttcgtagtttttttttttaataagcgtaatcagccactgttgttgaacgaaaccaaaaaaagttatggtgagactagtttgcagccgaattctcaaatttccaaaaccgtacttatggagtgcgacgcagactacaagccgttgcttcaattcacgagcccagtctcataatctcatcacaaagacgatcacttcgtctcttcaagacgttttaacacgtcccatttggcaaaatcgaagctttgttcaatgcagaagagtctcttcctatgctcagatggttaataatcatcaatctgtgacgattgagacatttgatgctttgtgtaaacaagtgaagataagagaagccttggaagttattgatatcttggaggataagggatatatagtggattttcccaggcttttagggttagcgaaactatgtggtgaagtagaggctttggaagaagctagggttgttcatgactgcatcactcctttagatgctagatcttaccacacggtaatcgaaatgtattctggttgtcgatccactgatgacgctttgaatgtgttcaacgaaatgcctaagagaaactcagagacttggggtacaatgataaggtgcttagcgaagaatggagaaggtgaacgcgcaattgatatgttcacgcgtttcatagaggaagggaataaacccgacaaggagatattcaaagctgttttctttgcgtgtgtttcgataggagacattaacgagggattgttgcattttgagtctatgtacagagattatggtatggttctttcaatggaagactatgtgaatgtaattgagatgttggcagcttgtggtcatttggatgaggcgttggattttgttgagagaatgactgtggaaccgagtgttgaaatgtgggaaacactgatgaatctttgttgggttcatgaatatttagagcttggggataggtttgctgagttaataaagaagctagatgcctcaagaatgagcaaagagtcaaatgcaggtcttgtagcagcaaaagcatcagactctgcaatggagaaactaaaggagttgcgatattgtcagatgatcagagacgacccaaaaaagcgtatgcatgaatttagagcaggagatacttcacatctggggaccgtttctgcattcaggagtttgaaagtgcaaatgttagatataggatttgtccctgcgactcgggtcttgttctgtaacagcggaatgaagaggaaaaagaggaacaacttctttttagaagcaacaagcttgcctttgctcacgcgatcattaattcagaggctcggagaccattaa

SEQ ID NO: 163308 - DNA, 2783 bp, Arabidopsis thaliana landsberg
  unsure (1)..(2783): unsure at all n locations
gactacggacggttgggacccaaggcccggacggtccacagtacaaatgaacaggaccagtccgaagtaaacatacttcggaccccactggaggatcgtggacggtccgcccacatggcccggacggtccgcacatcccaagacttagcaaattttcaaacatgcttttgaaaagatttttaactcttgaaattggaagcattgttagtcctcatgcaaatgcaaccactagatgctctatgaggcactaagtttgacatagacaaacgtcattgacccctcttaatagtacggctatctaacctactaatccggtcaagtatcttctctaaactcctcaagaccggcaaaaacgaaacctatgttatacctttgccttcacttgatccacaaccaatgcttatgaatctccaagatttcctgttctatgtggtccaaccctgcattcttatttctccaagaaccgttagcccacaagcagttgtcattaattaccaaaacatcactaaggggcctagatgattcacagggccttcttcctccgaaggtcctcaaaaacacgactaaccatatgtttctagtgtgacatgggttattttagagtggagcttcgtcttcggatgaaggttttctctcatgacaagatggaaatacaatctgaaggtgattaaaatggacgacgaagcaatagccaaaaagcttcgtcttgaagtgatgacgaagaccaaatatgatgatgaccgaaagaggaaaagactacttagtccttaataacttgtattacgatcatgtgtaaatgttgtagacataaatgtacttttactcgggctgtgtcctatgcctataaatagatgaacagtaacaccgtactgttcacgctggattgtattcactctctcgcgtcctcaccttcgagcaagccaaaggtatcaatgtaatattaacattgttgatatccatacgtgtttgataggatgcaaatataaatgaattaacgagatgcacttatcatatttatccttttgcattcctattcacatattggatgatgaaggtatgtcctttttgaccttcgtctgatgagcattatatccatgagaagataatgctttggaagacgaaggtctgcaataactaacaattgtgttgccttatttttgatacacaacagttgagaacaagtccccaacattggcgcccacctccggtgaactcacttccaccctgagttttttgaacaccttcggcgatcataaaccttcgttatggcgccgaagaaggnnnnnnnnnnnnnnnnnnnnnnnntgcaaccactggaccacaatcaggagacagtctccctgcgggaggcccgaagccagaaaaggaaggctgtcagtccgacaccaccagaggacgagatagatcaagaaatcagagatatggagatgcttcatcaacaagtacagaggaagaaagaaaagatggccaggctagctgaactgcagaggcagatagacgaagcctctgaagaagttcgtcatcttgctcaggatgagcaacaccgaaggcctcagcatcaagaccttcatcaggagggtttcccaacgaagatgactggtatgacaatttccatcatgggaattttgtttttgatgatgcttctcccttgtccgctgagctgcaggctacaccttggcctccgtcctacaagccgcctcagctccccgtatttgatggccattctgatccgaagcagtttttgatgagctacgaagcaacagtgtcttcgtacggtggcaatgcttcagtcatggccaaatctttcgttatggctgtcagaagtgttgctcaaacctggtattcctcccttcgaccaggaacgatcacttcatggcagaagctgaaggacttgttgttaaccagctttcaaggatttcagacgaagccggtcactgctcaggctttgttccagtgcacccaagatcacgaagaataccttcaggcgtatgtccggaggttcttgcgtttgagggcacaggcaccaacggtacccaatgaaattgtcattgaggccatgatcaaggggcttcggccaggaccgtcagctcagtacttcgctaggaagcctcctcaaactttggagaagctgctccagaagatggacgagtacattcgggccgataatgattttcgccaaagaagggaggaggctttcaggttttctgaaatgaccaggggcttcggagtaaggttctacccgaggcacgtgagatcaattcataactctacacaaaatgatgatagaggaagccaacagcaaaggccacaaagctcctcacaggcttcggggcaacagcaaagctccttccgaccaccagctccaagaggcagaggcgcgaggggctttggaggaagatttggagatcaaccgagaagaatcttttgcttattttgcggagagaacaaaggccatactaccaggatgtgtcacgttaccatccagaagcaaaaggaaatagccgaagccgcagcacaacaagctcagccgaagcaggtcatgcatacagcttcgtatcactcgccctacattccagagtatgtgggcaaccaccctgcagtttccgttgcttcggcgagtcaatctcaagcttcttggcaacaacctccgcctccacctccattacagcaaggacagcagccagaagggagccagtatgctccacaccaaagggacttccgagagcagtccgatagctcgtacagtcaacagcaccgtgctagaatcaaagcacatctattga

SEQ ID NO: 163309 - DNA, 1112 bp, Arabidopsis thaliana landsberg
atgaaattacttctctccggtctgcaacgcctggttcaacagaaagccgagtccgaatcttctgcagacatgtacggtgcacaatccagtgattcgctgccagagatttcacatccgactgcagcagaatgtcaagaggtaaaatccgatgaagtgcttactgaacccaatcttgattgggctctcgttctcgtcaaagatccatcgcccccactcatcatcgaggttgaagttgagactctgccttcaatcgacagggttcaaaaccctaaaccgaaggatcctgaggctgctccttcgtaaccctctgttgcatcacgattgcgcaagaggaagtcatctgcagcggatccacgcaacaaaaggatgaagcaggacaagggaaagggagttgccggttcatcttccttcgatggaattcgatttgtctctgcagaggttgaaaaaggtatgctcaattctctcaacgcaatttcattgaggaagtagaaatgtctaggaagacaaatgaggcggctagggaatttatagagcaggcaggtctgattcgaacggttactaagttccaaccgttcactgagaatctagtgtttgatttctgggctaatctgcccactatgaaggtagacacgtataaggtcagagtcttggtgcgcaatcgggagtatgagctctcacctgggaagatcaacgagatgtatggtctcccttctgttgatgctagacagcagcggatggatatcgctggtctggttgatgaacaagtggctgagtttctcactggtgggaaagtcagtgttctgagcaagcttcaggtgagtgcctttacacctccgagtctggaactatttaaactctgctgctcaaattggtctcccacatcccacgctggatatgctcagcctgatcgagccaaactagtgtatatggtaatgcacaaaataccattcgagtttggacgaatggtcttcgatcacattctgcagctagtattgaaaccagacatgaaactcttcctgccatttcctcacctgattgatcagctgattcagacgcaacggcctgttcagattccactccatcctcctgcatccgccacatcgaccatttgg

SEQ ID NO: 163310 - DNA, 5259 bp, Arabidopsis thaliana landsberg
ctcttcttctcctcgtcactctctttttctctcctgcttttgctcttaaaaaggtcctctctctttttttttttatgtaactcactttctatatacattgctcgtaagatcgatatgcattaatttgtttcctactgtgttacagtcctacatagtgtacttgggatctcacgcccatcttcctcaaatctcttctgcccatctcgttgggtgttgctcactcacatcgcacttttctcgcctctttcgttggaaggtaccattactcctatttatgccaaaccaatgttttaaagatttgatcaaatagcaaaccgggaagtatttctaatcaccggatcaatatctaatatgacatattaggttaatgacattgaatattttgcggaagtattttgaattgctggatcatctaatatgacatattaggttaataacattgaattttttgcggaaatatttcaaatcgctggatctctaatatgacattgatgttttttgtaaaaaaatctttgttaaatgtatttgaacaaaaaagtaatctgtgtttagtaaaacacaacttgaaccaaactcaattagaggtaagtaaaaagaaaaattagaataatcatttttaatgttgaatttcaaaccgaaacaaaaaatttaggatttcatttggtacgtacgaggctgttcgtggaaattttgcgggacattgtttttttcccgggtttaagcgagggactaaaatctaggtttaaaaagtattattagtttcacccaaattgagtttagtgcaatgccccggttacttactattggactgccggtttactagtccgaccggccggtttagtccgagttttcttatacacacaccaagaaactaactgccttctctattgcagccatgagaatgcaaaagaagccatcttttactcatacaagagacatatcaatggcttcgccgcaattcttgacgaaaatgaagctgcagaaatcgccagtgagatcatcaaacctcatattctgcttttgatgcttctcaatccttttagtttaacctaacaaattttttaaaataattgtatgcagagcatcctgatgtagtctctgtattccccaacaaaggaagaaaacttcataccactcattcatggaatttcatgctccttgcgaaaaatggtgttgttcacaagtcctctctttggaataaagcaggatacggagaggatacaatcatcgctaacttagacacaggtaaatcccaaacaagggtatgctttggtcatcataattgctttcatagttatgaatgatataaaatatgtatgttgatgaaggtgtgtggcctgagtcaaaagcttcagcgatgaagggtatggagctgttccagctaggtggaaaggtagatgccacaaggatgttccttgcaacaggttctcatcttaatttagttgacttctttctgcaaatatagaaatatccagagaatgtgattattgattcgttacatgtaaccaggaagctcatcggtgctagatacttcaacaaaggttacttagcttacacaggccttccttctaacgcctcctatgaaacctgtcgtgaccacgatggtcacggtagccacactctttccaccgcggctggtaactttgttcccggagccaatgtgtttggtatcgggaatggaacagccagtggcggttctcctaaagctagagtcgcggcttacaaggtgtgctggccccctgtggatggcgcggagtgctttgatgctgatattttggcagcgattgaggctgccatcgaagacggcgtggatgttctctcggcttcagtgggaggagatgctggagattacatgagcgatggtatagccattggatccttccacgccgtcaaaaacggggtgacggttgtgtgctctgctggaaattcaggtcctaagtctggcactgtctcaaacgttgcaccatgggttattacagtcggtgctagctccatggatcgggagtttcaagcttttgttgagctcaaaaacggccaaagcttcaaggtttgatactttgacctcgtcttcttttttttttctttcacttttggttcctttcttgcttgtgctacaagtaattaattttgaaaagcagggaacaagcctctcaaagcctttgcctgaagaaaagatgtatagcctcatcagtgctgcagatgctaatgtagccaatggaaatgtgacagatgcgtaagtaaacgcttgatatctattttttggaatgtgtataattaagtaagtactaattaactagtgatggttacatagattgctatgcaagaaaggtagcctagacccgaagaaggtgaaagggaagatcttggtgtgtctgagaggagacaacgcacgtgtggacaagggaatgcaagcggctgctgctggagctgcgggaatggttctatgcaacgacaaggcgagtggaaacgaaatcatctcagacgctcatgttcttcctgcttcacaaattgactacaaagatggtgaaactttgttttcttacctaagttccacaaaagatcccaaaggttacatcaaagcacctaccgctacgctgaacacaaagcctgctcctttcatggcctctttctcttccagaggaccaaacaccatcacaccagggatcctcaagcccgacatcactgcacccggtgtcaacatcatagccgccttcacggaagccacgggccctacagacttagactctgacaatcgaagaactcctttcaacaccgaatcaggaacttccatgtcctgtcctcacatctccggtgtcgttggtcttttgaaaacacttcaccctcattggagtcctgcagctattcgctcagccatcatgacaacttcaagaaccagagacaacagacgtaagcccatggttgatgaatccttcaagaaagcaaatcccttcagctacggttcaggccatgtccaacccaataaagccgcccatcctggtcttgtctatgatctcaccacaggagactacttggacttcctctgcgccgttggctacaacaacaccgtggttcaactctttgccgaggacccacagtacacgtgtcgccaaggagccaatcttctcgacttcaactacccttcaatcactgtcccaaacctcacgggctctatcaccgtcacccgaaaactcaaaaacgttggaccacctgctacctacaacgctcgtttccgagagccacttggagttcgcgtctccgtggagccaaaacagctcacgttcaacaaaactggtgaagtgaagatatttcagatgactcttcgtcccttgccagtgacgccttcaggctacgtttttggagagctgacgtggactgattcacatcattacgttaggagtcccatcgtcgtccaactttcaagctagcctcattcttcattctacttcatctttctcacttttcttctatgaatcattttatatgtttggataatattttaatgttcaaaaaaaaaataaaaaaaattgaattaaaacacattctttcttaaaacagtttaattttattttgatgttaacaaataactatcggcatcatataattcattacctaaaataaaatgtatagctagtaaaccaaaaacattgattatttttattatctttgtgattagcatatttgatttgcatgtgattattaactttatttttcattaatcatcttctaattacagaatttgtattaaggtaaaaatttgccaagtggacatatggtgctttttgcgtgtcgttacgtgaaagcagtgacagagaaataagaagtgtgtgtggcttggacgaccaaactaaaaaccacactctcgtctcgggcttttgggttagacccggcaacgaagcgatgcagacgagatcctcttcctctccttcggctaaccaccgccgcgaaacccagttgcagatcgcagatcccacctcgttttgcggcaagattatgcctggttggaccgtcgtgaatcggccgcgatctagcaacaacggtgttgttgatacggtaaatatgagctacatcaagcagatgtgaaacaaaatttgagctttttctcagaatttgaacacttagagctgatttatgtcttttgtgcactggatatgtatgaccaaagtgtaatgcttggatcagattagtgattgtgttgccacagagctcttggttgttgcttgagaggtctatgagtcgttctttgggtatatgctcgagttgaagatagatcttgcgggtctcttctgaaaagtgtgatctgtacttgtttttgctttgctatgtgggcagtactttatcgagccagggactggttgacagttttcatcactagaagctattcacagacacttggctggagaagttaatgacagacgcttgactcgagcaggatcctttttccaggacaagacaagggtttatgaaggatcaagaaccaaacaggtcctttgttctgatttgaaattacagaagcatatggttcttcttggatcaaatacttaaaatcagtgtgtttatgcttttgcaggatcaccgcggagttgaatatgcctccaaaggtttccgattgcctagaggatggtccgttgaggaggttccgaggaaaaactctcattatattgataaggtactaatgtagagacttgctatagctattttagaccctatgcataagttactgagtcacataactaacaactgaggtcggttaaatgtgggatgtgagaagagcagaatgtgaaaaggatacgttgaattggtggttttaggattgaatctctggctaaaccgttagtattgttctttgcagtattatgttgagcgaaaaacaggaaagcgcttccgttctcttgtttccgttgagagatacttaagagaatcccggaactctatagagcagcagcttagggttttacagaatcgccgtggccattccaaagatttcaggttacctgatggatggatcgttgaggagaaaccgcgaagaagttccagtcatatagacagggtacatatctgatacttaggtagtttggttatatttggtttgtgtcatatagtccaaacgttcaatgccgttagtactgttgtttgcagtcatatattgagccaggaacagggaataaattccgttccatggcagccgttgagagatacttgatatcagtcgggaacattacacttgactcggtttctatggtgcattcggagcggcttcct

SEQ ID NO: 163311 - DNA, 2729 bp, Arabidopsis thaliana landsberg
tcccaccagctactccctctgttgaaaaactggtagctgcaaaaaccaaagccacagtcttcgtaccatcgccctacaaactaccgcttccattctctggtcgttttaaaaaagttttgattgcgaaataccgtgctcttttggaaaaacagataaaggatcttgatgtcactatgcccttggtagactatttcgcgctgatacctgactctcacaactacgtgaaagacctgatcacagaaaggatcaaagaagtcaaaggaatggtggtgttaagtcatgagtgcagtgcaattatccaacagaaggtcatacctaggaaattgggagatccaggctcattcactctaccatgctcactaggccctttaacattcacaagatgcttatgcaatctaggtgcttcggtcagtctgatgcctctctcagtagccaagaaacttggttttgataaatataaaacttgcaacatttcgctaattctggcggacaaatccatcaggatacctcatggcctgttggaagacttacctgtcaagataggttctaatagaagtacctaccgactttgtggtgctggatatggacgaagagccgaaagacccattgattctgggaagaccagttttaactacagcaggagccatcatcgatgtcaagaaaggaaagatcgacctcaacctcgggaaagatcttcggatgactttcgacatcaccaacatgatgaaaaagcccacaatagagggtaaagttttctggacagaagagacagaattcctaactgacgagcttttagaagaactagcagaggacgaccacttacagagcgccctgaccaaagacagtagagaaaaagacttacatgtggaaactttggataccagaagctgatggatatgagcagggaagtcgatgactcagaagactttgaggagttgagaccactcgaccgcacgaataacccactcgatcacgtcactcgatcgcaaggcgagctacatcactcgatcgcttcactcgatcacgattccatctctgatactgaatcaccacctaacgattggtctgagctcaaggcacccaaggttgacctgaaaccgcttccaaaagggctaaggtatgtttttcttggaatcaattccacctatccagtgatagtgaatgatgaaatagatactgaacaagtgaatttgcttataattgaattgaaaaagtatagaaaaaccataggttattcactagatgacatcaaggggatttcacccactttgtgcactcatagaatccatctagaaaatgaatcatattctagcattgaacctcagaggagattaaatccaaacttgaaagaagttgtaaaaaaagagatacttaaactattagatgcaggtgtaatctaccctatatctgatagcacttgggtatctccagttcattgtgttcctataaaaggaggtatgacagttattaaatattctaaagatgaactactacccacaaggaccataacaggacacaggatatgtattgactataagaagcttaatgcagccactagtaaagatctcttccccttacctttcattgaccaaatgctaaaaagattagccaatcacccctattactgttttctagatggttatagcggattttttcaaatccctatccacccaaatgaccaagagaaaactacattcacgtgtccctgtgggacttttgcttataaacgaatgccttttgggctttgtaatgcgcctgccactttccagcgatacatgacttctattttctccgatttgataaaggagatggtagaggtattcatgaatgatttttctgtgtatggctcttctttctcctcctgtttgcttaatctgtgcagggtactcaagagatgcgaagagacaaacctggtgctgaattgggaaaaatgtcaattcatggtcagagaaggaatcgtcttggggcacaaaatataagaaaaagggatagaagttgatagggcaaaagttgatgtcatggtgcaattgcaaccaccaaaaactgtgaaagatatcaaaagttttctcggacatgcttggttctacatgagattcatcaaggatttctctaagttggctaggccactcaccaggctgctatgcaaagagggtgagttcacgtttgatgaagaatgtctggttgctttcaaatcgatcaaagaagcactgatctttgccccaatagtccaagcacctaattgcgatcacccttttgaaatcatgtgtgatgcttcggattacgctgtgggagcggttctaggacaaaagattgataagaagttgcacctcatctactacgctagcagaacgatggatgatgcacaagtaaggtatgccactacggagaaagaactattggccgtggtatttgcattcgaaaaatttaggagctacctggtaggctctaaagtgatagtttacactgatcatgttgctctaaggcaaatctatgcaaagaaagataccaagccaaggttgctgagatggattttgctgctccaagaattcgatatggagatagtggataaaaaggcgattgaaaatggtgtagctgattacttatcgggaatgagaattgaagatgcagtccctattaacgacaccatgcttgaggaacagcttatggccatccgggaagtgaacaaaaaattcaaaagcagccagttttgggatgagatacttgagtag

SEQ ID NO: 163312 - DNA, 621 bp, Arabidopsis thaliana landsberg
  unsure (1)..(621): unsure at all n locations
tgcatcactctcttcacgaaccctactctctcactcccagccctaaaacttaaccctttccaagacttttgtgtagctgatctccaagctaccccaaccaacagtggttacccttgcaagtcacaagtcacctctgaagacttcttttattccggcttgaacactcctttaaacacctcgaacccaaaaggtattgccgctaatccagccaatctcttgacctttccaggcctaaacactttgggaatatccatgtataacgttgcaattgcacctggaggatacaaccaacctcactctcaccccggtgtaaccgaggcaggggtcgtgatcgaaggctcggtcttggttgggttcttaacgactaactacacgttgtactcgaaggttattggacccggtgatatgtttgtgattcctccgggactcattcattacgaggggaacgttgggaaaacgcaatgccgtcttttgacggtggttgctgacgacttgcctagcgaggttgatgtgcctcacactctgttggctacgaaacccgcgattccaaacgaggtattgatgtcggcgtttaaggcggatagtaaaacaatcaacatgctcaggtcanagtttactgct

SEQ ID NO: 163313 - DNA, 2706 bp, Arabidopsis thaliana landsberg
atggataagagttgggtatggctgccaaggaatagcattgagtacgagaaaggagcaacaacatttgtttacgcatcatcgagacgtttgggagatccttctgaaatgttttgtccatgtacggattgccggaatctgtgtcatcaaccaaatgatactgttttggagcatctggttattaagggaatggatcataaatacaagagaaatggatgctggagtaagcatggggagatacgagctgataagttagaagttcagcctagtagtgaatttggagcttatgagctgataagaacaacttattttgatggagaagaccattctgattctcagaatcagaatgaagatgatagtaaggagccatcaactaaagaagaatctgactttagagagaagttgaaggatgctgaaactccattatattatgggtgtcccaagtacacaaaggtgtatgcaattatggggttttaccgcattaaagtaaagagtgggatgtcagagaattactttgatcaacttttgagtttagtgcacgacatcttaccaggagagaatgtgcttcccacttcaacaaatgagatcaaaaaattcttgaagatgtttggttttgggtatgatatcattcacgcttgtccgaatgattgcatcttatacagaaaggagtatgagctgagggatacttgtcctacatgcagtgcttccagatgggaaagggataaacacactggtgaagagaagaaggggattccagctaaggtacttcgatattttcccatcaaagatagattcaagcgaatgtttagatccaaaaaaatggctgaggacttaaggtggcattttagcaatgctagtgatgatggtacaatgcgacatccagtaaactctttagcttgggctcaagtgaatgataaatggccttagtttgctgctgaaccaagaaaccgtagactaggactttcaactgatgggatgaatccgttctctattcagaacactaagtatagtacatggccagttttactagttaacgacaacatgggtccaaccatgtgtatgaaggcggaaaatatcatgttaactcttttgatacatggacgtacagcacccagcaataacattgatgtctatctagccccattgatagatgacttaaaggatttgtggagtgatggtattcacgtttatgactcattcttaaaggaaagttttactcttagagctatgttgttgtggagtattagtgactatccagccttagggacattggctggttgtaaggtgaaaggaaagcaagcttgtaatgtctgtgggaaagatacaccttttaggtggttaaagttcagtagaaaacatgtgtacttaagcaatagaaaacgactcagaccaggacatccttacacgtgtagaagaggttggtttgacaacactgtagaagaagggacaactagtagaattcaaactggagaagaaatatttgaaacattaaaggatttcaaaaatgattttgggagacgcttggagagaaacagcaaaagaaagagatcagatttgtgtgaagatgatgtatatggtgaagacacacatcaatggagatggaagaagcgatcaattctttttgaattacatattggaaggtaaatacttcaccttttgaattgtatcttgaatttaactttgattgactctaactgcttattgtttgtattgtaggaccttcctgtccgtcacaacattgacgtgatgcatgtggagaagaatgtgtctgacgccattgtgtctactttaatgcaatctgccaaatcaaaggatggcttgaatgcacgcaaagacttggaagatatgggaattcgtagtaacttgcacactcagttaagagggaagaggacatacttacctcctgcggcattttggttatctaaggatgagaaaaagagattctgcaaaaggctggctaggtttagagggccggatggatattgtaccaatatctccaactgtgtttctgtggatccaccagtcattggtggtttgaagtctcatgatcatcatgtgctccttcagaacttgttacatgttgctttgagaggattgctgcctaaaggacctagagtcgctataagtagattatgccactacttcaacaggctgtgtgagcgggttattgaccctgagaagctaatctcattggagtccgaattagttgagactatgtgccaggtggagtggtagtttcctccatctctgtttgacatcatgtttcatctgccaattcatttggctagagaggctcgcttaggtggaccagtccactttagatggatgtatccctttgaaaggtattgtctataactttttctattaagttaattacttatataaaatttggatattgatctaatcttattaacttgcaggtacatgaaaactctaaaggcttatgtgaagaattttgcaacgcttgaagcttgtatggctgagggatatttagctggagaatgtatggcattttgcttaaagtttctacaaaactcattatcagttccagaagtcgttaaccgcaatgaagatattcaaagtgattcacttgttcttgaaggcaaaccactagagaaagctacacaagtaactcttacgagtaaagagcgagacattgctcatagatatgttctaatgaacatggccgttatggatccatatgttaag

SEQ ID NO: 163314 - DNA, 1014 bp, Arabidopsis thaliana landsberg
tcccacgtgcgggttctgcatcacaaattcttgggaaaaggtgtttatggttctgttgatctcatcagatacactaaaaccgatggttcctcgttacaagccgccgtaaaaacatcttacgctgaagatctcgaagaatacgacgcgctcaaaagagagatacagattctgtctgaactcaagggatatcccaacatcgttatttgctatggagacgatttggaagaagatttcaacgaacacggacacaaagtttacaaattgcttcttgaatacgcaaacgaagggagtttaagttcattcatggagaattatcccgacagaaagttaccagatccgatgatcagagacttcacgcggatgattctcgaaggattggtctcaatgcatagtcacggttatgttcattgcgatctcaaatccgataaccttcttatcttctctcggaaagattctgcttcgtgcgagttaaagatttttgattttggaaactgtagacaagtcggagaagttccggatcactggaaaagtgattacccgtatgtgggaacgcctgagtctttcttcgacggtgttgccaagaaaaccctagatttgtggtcgttagggtgcttagtgttgaagatttatacaggtgagcagccatgggaaagagttactagtgtcgatttcgtgaattttcttagtgatggtgaagctccaaatattcctgaatatgtgccttgtgatgcaagagagtttattgaaacgtgtttcgcaagggaacatgagaagagaggtaccgcgtctgagttgttattgcatccgtttttgtgtcagaagcaacccttgctggtgaagttgaaattgagaatcaaacaagcttcgaagataacaatgggtattagagagaagcccctgacattgaagatgtttctatctaagcctccacaacttaaaaaacttttgagtaaacttttgaggttgaagaagatgattcatccgaaaccattggaattggattctagtttccgt

SEQ ID NO: 163315 - DNA, 1543 bp, Arabidopsis thaliana landsberg
atgcccaagtatgatagagaagagttgaaagacttgtggatcaccattggcagctctgtaccggtgaattcttctaggtcaaagagcaatctgatacgtagccctgtcatcaggtacttccggcgttctatagccaatgtactctactcccgagagatcacagggattgttactagttctgatatcaagatgatcgctatggctctcaaaggcactctccgtcaaactaagaaaaacatgtctctcgaaggtgaaatcaatgacacacctctctctgtacttcttctgatccacctgtgtggatacaagagctaggctgtcagcaataaccacaagagagcacgaggtgctctatgcatcggtggtgttgtgacaccgattctgatagcttgtggagtcccaatcatttctgctggactcgagccgcgagcaatggatatcgagcacctacgtcactacgaattcctggagtttgcaatggttgacgacttccacaggttcaggtttgagcactctacagacaggagagctagcatattgatttttggcctgaggttacacggataataaagggagataatattgattttcggcctgaggttggacgcctctactatgagaacgctccgccattggatgaggatgatcttctagaagaagctgcttcggatgggttggatgaagatagagcagtggagttcgacactagcatgtatcactttggtgaacatgtacctccagcgaggcagagcaagagcttgattgaagcttataagaataacagtaaattgcagaagtggtgcaagaagcaggacaagctgctcgccaagtgtttcaaggctatcaagcttctgacagataagctgagttgttcctcctccaccactgctattccacagggacagcctcctctggagatgccatcgaggagatttgatgaccttcgcacaggcctgagcttagagagcagagagtctcacaggtccctgctagacattcgtcattcgagtcctggaagtcactcgacccccaggtcgagtagaagacaccaccactctatcacatcactcgacccccaggtcgagtgacttcatctccatcttctgaccaccactcgatcacatcactcgaccacgaggtcgagtgtcttcacctccattaccagaccactactctaccacaccactcaactttgaagtcgagtatcaccatcaccaccactcgactacatactcgattgcaagcttcagagtcttcttcattctgcactcaaccagacactcgagcacaaggaagaaaagaagactccagctattcactcgacctcccactcgaccacatgagtcgagtacagttcataatccgtcccgatacttcgtcgttttgagtattagggtttcagaatatttggctataagtagcatgtacttcacattttcgcagacaagaagttttttatcttgttttatttccgcagaccttgtgttttagaccttttgtaatccggatttctctttatctattcagtattcagtattcagct

SEQ ID NO: 163316 - DNA, 5089 bp, Arabidopsis thaliana landsberg
cggtccgtaaccattcaaataagttctacgacttgttagaaggtgcaaataatcctttgtacgatggttgtcgtgaagggcaatcacagttatccttagcatctcgactcatgcacaacaaggcggagtataatatgagtgaaaagttggtggactccgtttgcgaaatgtttacagattttttaccaaaaggaaaccaggctaccacttcacattaccagaccgataagtcgatgcgcaatttaggacttccatatcatacgattgatgtttgtcagaacaattgtatgcttttttggaaagaagatgaaaaagaagatcaatgtcaattttgtggggcacaaagatggaagcctaaggacgaccatcgaagaaccaaagtaccatatagtcgtatgtggtatctacctattggggaccggttgaagagaatgtatcagagccataagacagctgcgtcaatgcgatggcatgctgagcaccaatcaaaggagggagaaatgaatcatccttcagatgcagcagagtagagatatttccaagagttacatccccagtttgccgaagaaccccgtaaagtttatctcgggttgtgtactgatgggttcaatccgtttggcatgtctcgtaatcattcgttgtggcctgtgatcctaactccatttaatttaccctcttgtatgtgcatgaatacagagtacttgttggggtcggatttgacccaagatagcgagccgacctatgagtcaccgcctcgggagccatcggagaattatcccgaaccagactaaaacacctcggagttctcgtcaagaacccataccgaggtgatgtcgagaacgcttcggggcagtctcataaagtgatccccgacccgacctcggacgcctcggggataagacttggaaaatcatcccgaggcgggctccaaaacacctcgggagcttgccttcaagtaccgcagaccaagcatcccgatcatgacccgaggccagcttaatcacggctcggaaagatctcgttttagacagaaaaacttcgaaagacttagccgataatcttcaaagatatcaccggatacaaaaatcccagaatcttcggaggataaagacaaatctctctcaacgagataaagataaagagggattttccgagaatatcgcgagaggggatattctcggaccctataaaaagcacctcggagaacaaacaaggggcaggcacaaaaacgctctcaacttcaagctatcaaaaacgctctgactttgaaggcaaaaacacctatttctcatattctatcacacttgtacgataaaatcattactttctcattaataaaatcaagaacaccgtccgcggtaattgagaattctgttgttctttgagaatctcacaaagatccgttctttgaagaaacccttaaaacaaattctattgtgcgagtttcgactctcacaatttggcgctagaaggaggggatagagatttctctaacacccggaacacggaaccaatcacccaattcacaatggtcaacaatcaagtctccagtaacgtagttgatacagaggggaacccaatccctccaatccagacggatgctcctgaagccgccgctcccgcgaccctagcagaactgaggagtatgatggctcaacttcaacagaaggtaaacgatcaagaacaagcaaatcggtccttagcacagcaactcgaagcagcaacctctcaaggacaaatcaggactacccgtttcggcgcgaggcacattcacgatcgacgggcggcagcggatctcaatcccacacggctcgtattccaaacacctggcaataccacaagacccgtccgcagaacggcaccggaaatcggacgggaccgaaccgagccggcaatttcgggaaatcgggaagcagatcgaaacgaaccacaactccctcctctccgagcagagattaccgaagccgatcatatcgacgcttcggataatgaagattccgaggagaacgttagatgggctgaagaatacgccagagagcaggaaataagctccatcaaactatccctagccaaggcggaaaacgagatgaagctcgtaagatcccaaatgcataacgcagtttcctcggcaccgaacatcgaccacattcaggaagaatcccacaacacgccgttcacacacaagatctccaatgcgataatctcagatccagggaaactaagaatcgagtatttcaacgggtcttccgatccgaaagggcatttaaagtcgtttatcatctctgtggcccgagccaaattcagaccagaagaaagagacgctggtctctgtcacctgttcgtcgagcacttgaaagggccagccctggactggttctcgagactcgaaggaaattctgtggatagttttcaggagctatcgactcttttcctaaagcaatattcggtgctaatcgatcccggcacatcagacgccgatctatggtcactatctcagcagcctaatgagccacttcgagatttcctcgcaaaattccgatccaccctagccaaagtagaaggaatcaacgatgtggcggctctttcggctctgaagaaagcactgtggtataaatccgaatttcgaaaggaactaaacttgtccaaaccaccgacaatccgagacgcccagcatcgagcctcggattacgtatcccatgaagaagagatggagctactagctagaagacacgaaccgaccaagcaaacgcctcgcagcgataaacctcagaccggcgctccgaaccacaagaaaggcgcccaaggtggtacgttcgttcaccatgaaggacgaaatttctctggagcccataattaccaggtcgatacaccccaaggcaagccacccgaggccgagggcgaggccgcggacgaggacgcggtcgagaatcttacacgtggacgaaggatcaaccctcagggaacgagcaagaatattgcgaattacacaagagttacggccatcacacgtccagatgtcgtagcctcagagcgagattggcagcaaaattcctggccggagaaattggtggaggcttaaccatcaaggatttagaggcagaaaaaggtaaaaccgagcaggtcaacgctgtggccaatcccgagcagaccgcccccgcggcgaaccccgaaggacctaaaagaagccggggtaatcgcgaaacagacgacgatgaaacagaagctgctcggggaaggatcttcacaattttaggggattcggctttctgtcaagacacggtagcatcaatcaaggcataccaaaggaaagccgacgcaaatcgcaattggacgcggccatttaatggatcaaatgacgaagtaacctttcacgaaagcgataccaacggtttagaccgtccacacaacgatcccttagtcattacattgaccatcggtgatttcaacgtcgaacgagtcctagtcgacacgggaagcacactggacatcatcttccttacaactctgcgagaaatgaagatcgatatgacgcaaatcgtgccaactccccgacctgtgctcgggttctcaggtgaaaccactatgactctcggaaccatcaaactaccagtccgagccaaaggggtaacaaaaatcgtcgatttttctgttaccgaccaaccgaccgtgtataacacgattatcggcacctcatggctaaatcagttccgagctgttgcctcgacatatcacctatgcctgaaatttcccacaaacaacggcgtgaaaaccatccggggaaaccagaaaaatgctcgaatctgcttcatggcagcgcacaagctcaggaaccccgtcactgaatcgacggccgacgcgaatcataagaaggccaagcttggccgcgctgaatagaagtcaatttccgagcagttatagcagctaaggatcgcggaggctcgggaatctacaacaccaactcccgatccggtagtcttaatctgccttgacgacgaaaagcctcgagcgatgcgtagaaatcggaggagatctaggagaagaactaacagctgaactcactgccttcctcaaagaaaacgtcaatacattcgcctggtccccagaagatttacccggagtaagtgttgacatcgtatcgcacgagctcaacatcgatccgactttcaaacccatcaagcagaagaggaaaaaattgggtcgggagcgagcagaagccgtgaaagccgaggtagagaaattattgaggatcggatccatcaccgaggcgaaatatctcgattggatcgcaaacccagtcgtagtaaaaaagaaaaacggcaaatggagagtctgcgtagatttcacagaccttaacaaagcttgcccaaaagacagcttcccattaccacacatcgatcgcctcgtggaatcaacttctagaaacaagctactgtcattcatggacgctttcgccggttacaaccagatcacgatgaaccccgaagatcaagaaaaaaccgctttttacacagaacaaggcattttttgttaccgagtgatgccctttggactcaagaacgtttggcaacctatcaagcttcgtcaacaaaatcttcgcattacagatcgggaagacaatggaagtctacatcgacgacatgttagtgaaatctatggcagagaaagattacataccccatttaagcgaatgtttcaagcagcttaacctctacaacgtcaagctcaatcctgcaaagtgtcgctttggagtaagatccgacgaattcctcaggtacctagtcacgcaccacggcatcgaggcaaatccgaagcaaatcgaggcattgttgggaatgacgtcacctcagaacaagcgagaagtgcaggggatgaagtaagaatcaataccaacattgatcttactagaactgacaaacttgctgatggattcgctgaaggaccaactgaaggtttcgctgaaggactccctgaaggacttgcagaagtacttttcgtacaagattattcgatgccaaataaggaaagggacattacccttattaatgatccgtctaagggaatcaagaagacactccaaactttctataag

SEQ ID NO: 163317 - DNA, 1348 bp, Arabidopsis thaliana landsberg
  unsure (1)..(1348): unsure at all n locations
atgnnnnnnnnnnnnnnnnnnnnnnnnnnncagatagttatgagagagtgcagaaaagggaattggacagtgagtgagactttggttctcatagaagccaagaagatggacgaccagaggcgtgtacggcgatcggagaaacaacctgaaggcagaaacaaaccagcagagctccggtggaaatggatagaggagtgttgctggagaagaggatgttaccgcaaccagaatcagtgcaacgataagtgggacaatcttatgagggattacaagaagatcagagagtacgagagatcaagggtagaatcgtcttttaacaccgtcacttcttcctcttactggaagatggacaagactgagaggaaagagaagaatttgccgagtaacatgttgcctcagatatacgacgcgttgtctgagcttgttgacagaaaaactcttccttcctcctcctcctccgccgccgccgccgtaggaaacggtaacggtggccagatcctaagagtgtgccaacaaagtttaggatttgtagctccgatgatggctcagccgatgcatcaaatcccgactactatagtgttatctcttccgccaccaccgccacaatctctaagcttatcacttcctttgacgcctcaacctccaccatcgtcctcatttcacgctgagcctataccgcccacagtaggtaccttccgtttgatctctcttcttattcttaaagcctaattaaatgaccactaaagttagattttatattaaatctataaagtgaatttcgacattccaacaaacacccacaagtcaacttgttataaattataatcaatctaattatacatttaaaatcaaaacttatacaattactatgaaggaaaaaatgtaaccctaaatttgcttgtgtgtgcatagacaattctttacaataaagttcttgagtacattaagattaaagtagtaattaaacccgcattttggtcgatgaagagactgataagagtgtgtacattcaggtacatcatcgacaaagcgaaggagaacaacgccgggagaaaccaccgctggaggagagagggaggtagaggaggatgcggttggggtggcgttgtctagatgcacgtttgtgatcacacgagtgataagagagaatgaggagggacaagacaggaggcataaggaagtggtgaggctacaagagaggagactatatattgggggatcaaatactgaaataaatagacaaggtatgaatggtttggtagacgccattaatcaactcgcatgctctattcttgctttggcttgttcttcttgccataataatcgcaatcatcaaggaggtccacca

SEQ ID NO: 163318 - DNA, 2752 bp, Arabidopsis thaliana landsberg
agagcggaactggagatctgtacaaactgttttctagggttgatccaatttctgagggaatgacactgggagtttttatgtcagcgatttcgaaagagttcggaatgattggtgtaaatcctttgttgagttatgctgcaccggataaggatatgttcacaacaaaggagaagactcctccagttttggttacaagcgaggttggccttctgtactatctaagtgcacttagagaaaacagaggtcttaatttgtttgtgaagtttgaagaaatggaggaagatttacaaagttttgatacacgaggagatagtagcactaaacgaccgcgtcaaagcagtttggaggaagagtgtggttcaaaaacgcctaaaagtggtgtcacatctgttcgcgatatatcgtctgtgggttcaaaaactcctacaattgtgttgactcctcgtgatgacgaattcatggaggaattggaacaagcagaagcaaacataggaagtaacagtgggcataaatcgtcacggaatgatactgataacgaaggttttaacaatgatgttgaaaagttgtttttcgttgataacgatacagaggaagttgaagcagtcacggaaaaacctgaagatagtatgccctgtggcggttatgataaggagttttggtcaaatttcttaacagatgattatggtggctccaatgctaatgagttgatggcaacatgaggtttagatgtaaggtacgggtctaacaataaggttgtgggctccaatccggatgaagtggttttctgtactggcagcggagtctttgatcacgctatatatgtgaatggggctggcgaaagtataaagacagagcatacaaaaaagaccccacaagttatgaaaggaaagatggtcggtggagttggaagctctcagggaacgagtaatgaggtcaaaaagttggaggaagtggatgacgaggagtttgacatcccacctttgtttgaggacatcgagtatgaagttgataacttacctgatttggacattgatgatgatggtaaaggtatataccagggaaaagtgtatgcgagcaaagaagattgccaaataggattggctatatttgcgataaagaatcagtttcatttcaagcaaacaagaacaaaatggaattattttgttctcagttgctcagatgagaaatgtgattggagaatattggccactgtaatgaatggcacaggttactatgaaattaagaaagcgcagcttcaacacacatgttcggttgatactagaaggcagtacatgaagaaagcaacgtcaaaggtgattgcatctgtatttaaggcaaaatacagtgaagcttctgctggtcctgttccaatggatcttcagcaacttgtactagaagatttgagggtttctgcgtcatacaaaaagtgttggagagctagggaatcagctttaacagatgttggcgggagtgatgaagagtcttatagcaatttggctgaatatttgcatcttctgaagttaacaaatccagggacgataacacatatagaaaccgaacctgatattgaagatgaaaggaaagagaggtttttatatatgtttttagcttttggggcttcaatacaaggttttaagcatctgagaaggattttggttgtggatggaacacatttgaaaggaaaatacaagggggttttactcacagcaagtggtcaagatgcaaacttccaagtgtatccactcgcatttgctgtggtggatagtgagaacgatgatgcatgaacttggttctttacaaagttggagaggataatagctgacagcaacacactcactatattatcagataggcacgaatcgataaaggtaggggtgaagaaggtatttccgcaagcacatcatggtgcatgtattattcacctatgtaggaatatacaagcaaggttcaagaacagaggattgacgcagttagtgaaaaacgctggatatgagtttacgagtggaaagtttaaaacgctttataatcagattaatgccattaaccccctttgcataaagtatctacacgacgtagggatggctcattggacaaggctatatttccctggccagcgtttcaatctgatgactagcaatattgctgaaacgttaaacaaggcgttgttcaaggggagatcgtcacatattgtggaattgctaagatttattaggtctatgttgacacgttggttcaacgcgcgtcggaagaagtcacaagcacattcaggtccagtacctccggaggttgacaagcaaatttcaaaaaacttgacaacatcaagtggaagcaaggttggtagggtaaccagctggagctacgaggtagttgggaagctaggtggtagcaatgttgttgatctagaaaagaagcagtgcacctgcaagagatatgataaactgaagataccatgtggtcatgctttggtggctgccaatagcattaacctctcgtacaaggctttagttgatgattatttcaaaccacactcatgggttgcgagttacaaaggagcagtattccctgaagcaaatggcaaagaagaagacatacccgaagagctcccacaccgttccatgcttccaccatatactcggagaccatcagggaggcctaaggtagcaagaataccatcaacaggggaatataaggttagataaatattttgtaaatctcgtacattgtctaagcttttgaaaaactaaccaaacta

SEQ ID NO: 163319 - DNA, 6566 bp, Arabidopsis thaliana landsberg
ttccctcctaatacatcaaaggatctaatattcgtattttccaatttttcagtagagattctcatacttgcaggttacagaaaatctcaacaattactgtcattaacataattagctcatgaatctataatttttaaacgcaataagattttattccatttcagttaataagtagaatattttcttatcattcctcactaattcgtaaacctaatgtgtaccagtatgtatataggtattgtgacctaatcattcaccatcattcacctcccttaatggttttttagctgccacatttgattaccttactgatgtcaggccttacaagacctcctggagagtgcaagtgaagactcttcatgcttggcgtcaatacacagccaacaccggtgaaacccttgaagttgtgttttctgatgaaactgtaagagatcattgcatcagtcataattttttttaatcagtttacatatagtacacgaattagctaaatagattaaatttctttttctatatatgcagggcaaaaagattcattgtttagtgaggaaagatttggttagcaagtatgctaacatgctaactgttggtgattgggttttcattgagacttttagtctcaactatgccggtggaggttttcgcccaacgtcccatctctacaagatgtcctttgtcaatggaacttcaatatttccaagtcccccaaagtcaatttccaactatctgactttagccagttttcaaaagatccaaagtagggagcttaatcccaccatgttggatggtaacttttcgttgcataacactaatatctattttttgtattaagttatgattcacagtctggatctttgtttttatgtagatgccatcggtcatattataattattggtgagttagaagaacttgagactaataataaattcacaaccaaaactgattttgatatccgagatgaagcgtgagtttactcttctaattttttgtactatatccaacaatttatcttatttcaattagtaactattttagtaaagtttaaaactaacatttaaattaactattatagtgatgagcgcattggagttaccttgtggggtgcatttgctgaacaagtttatagacggtgtaacgatgctggtgctcgacctgttgtttgtgtgctcaggtttgtgaagatcaaatcatacaaaggtaaactcaccaatccgttgtcttattttagttttgtataatgcaaaaatattaacaggtaaacattattctaatggcaggtgtacgtaatttgtctaactcttttgatgcatcaaaagtttttgtgaatcctcaatttcctgaggttgatgctttcctaaggacgtaagtttagtaatatgattctcaaaaaggatatctttatatgtaacacgtttgaattattaacaattgtcttttctaaacagactaccatttgatagtatactcttgacgtaccgtgagagaatcccaaagatggagattgttgtttctaaaaatagtgatagtcgtcttaagtatccctcaaacacaattcttgaactccttaattctggtgatgtatgtgttatatataacctaaatgtctttctatgcacttaatctataatatagactcatttatgctaatacacagtatttaggacgatgatctcatatactctctactctcctaaaatgagtctaaatactctcatataatctaacatactcctatactcttaataaattttaaaaatccttgtttacccttacccaacaaaccggaaccggacggacgaaccaaaccaaccaattacggttaagtctccaaaccaataccatttaattcacaaaatattaacctatcagaaattcccagaatttcttttcctccctcacaaaatctaaatcgacgactgcaactatcgtcgaatccttcgacgttgaatccaatcgaccaagctcgtcgtcgttttgcttctgttattcacagtgagctttaccattcttttcttatactttggacatcttcattcatcaagtattgtgttgttgtgtttgaattttgtagatttcaattagatttgatagatttgaaattggtgttggaaattaatggacattatgttggtaactatatattctgggtctattaagacattttaatgtactgtaatggttgattcgtagttaatcttaggcagattactgtttttggtccgaaaatctttggtagaacagaataatctaggtatacctaagaaacgtggtatagctgtgtgaagcactatttatggtataactggtatttctgaaaatgagcgtgatatagctgtttgaagtactatttatggtataactggtatttctgaaaatgagcgtggtatagctgtttcaatagtataactggtatttctgaaaatgagcgtggtatagctgttcgaagtacaatttggtagaacaggaaaatctaggtatagctaacgttttttttttgtttttttcaggataatgggcataatcatatattttgattatgatggatattattcaaaaaccggagaagcatatcaatggaatccaagagtagttggtttgtatggtatattgtttaggacatcatcaatggaggagattacttattcgtggttagtggataagatatgcacaaagataaagatagatgaatctacgatgaagctgaaattgagttacattccaacgggtgttaaacctcctacatatttatatattagggatgatgatgatgtatatgtttatctaaccacgttggatgaagagaaaagtagaagtgtcttgcatgtagaagtcggtaatgagttggaaatggttgacgtaaacgagcaacaatcgagagtacaaagaaagagttcagttggtgtgaattatgaagaggagaatttcggtggtctagataatgatgatagagctaatgttggtgctataactctttacgcaaatgagccactaggagaacaacttgctgagcctttggagacattggagcctttagagcctttggagcctcttagagatgtggataatggtgttgatagtaatctgagtatgactaaggagaatgatggtattcgtgaatatgttgaggaaccacgtgacagccaacattctaagtttaaaggtccatgggatgatggtcttgatctagtaataggtcaagaatttgaaaatagcgatgatgtgaaatatttagtagagacaggagcaaatacgaattgttttggactaacattactcaactcggataagaagcggtatgtggtaaaatgtgctgaagaagggtgtgaatggtatatacgattttcgaaggctaaggattcaactcgcttctcggttcgaacatataggaagttgcatacatgtgtacggtcgaatactgctacaggcattaaaaagagaggtacaccacatttagttgcaaccgtactgcatgaagattatccaggtcagtacaagaccccaactcctaaaagtctcattggccttgttcagggaaaacatggtacaactgtgtcatactcgactgctattagggggaaaaaactagctgttagtgatattcgtgcttgtcccgaggagagtttcaagatggtttatcaatatttgtatatgttagagaaggtgaatcctggcacaaagactagtgtggtattagatgaagaaaaaaggttcaagtacctatttgtcgctttgggggctgccattgaaggatttaaagtcatgagaaaagggattattgtggatgcaacatttttgaagactatatataaaggtgtgctcatttttgccacagctcaagacccgaatcatcaccattatcccttagcgtttgctgtagctgatggcgaaaaagatgttacttggaagtggtttttcgaaactctcaaaactgttataccagacagttcggaattggtctttatgtctgacagaaattctagcctcatcaaggcagtggctgaggtgtacccgagctctcaccatggaaactgtgtgtatcatttgtcacagaatgtgagaacgaaagttgcatacaacaaagaagaggttgctaaaacgttcagaagaattgcatccatttgttcagtgtctgaatttgaacatgaatatgcagagtttagaagaaggcaccttaaggtagccacctatcttgatgaaaacactgatttggaaaaatgggcaagatgtcattttccgggagtaaagtacaacgttaacactagtaatgcggttgagtctatgaatggtgtgtttagggatgtgagagggtatgcgctattacctatgatagatgcaattattgggaaatttgcggaatggagctgcaataataggaaggaagccttaagtggatcaaatgcacatagacttgttccttttgtggagaacgagatacatgaaacatgtgaagttgcacaaaaattaccggtgatagagcttaacacctacgagcttcaatatagtgtcattggtcgcgatggtaagacctatgtggtggacttgaggaataaaagttgttattgtcgttgttttgacttggacaagtatccttgtgtacacgcaatagcggctgtgatgactcacttgaaacagaaaaatagatccgaggaggtaaaaagtttatatgatttgatcacaaaatattactttgttgagatgtgggttatggcatatgttagaaccatttatccggtgccgcataagtcagagtgggttattccaagtgaaatccaaggattgttagcatatcctccggttcatgatgttaaaaagggaagagttcaagaaactagacacccatcagttggagaacgtcgccctaagaataagcatgtgaaaggcagaaacttggagagctggttttttctaaaccacgaaagtgttagccaaaacacaagcgaaaattaatgtactcgtgtttttaagtactttcagattttgtaaaactcggttaaacttaatttttaaatggtagaactatgtatgtctctaaattcgtgttttttgtactctctggttttgtaaaacttgattaaacttggttttgtaaaggtacaactatgacaaatgtaacaaatgtgcttaatttgcaacaaaatttgatgtaatgttatttcttatacaaattataccacttatgttgagtattaaaactgctgattgataaaatcataatttaatgaaacttcaaaaaattagtcgttaccaaattcatttgttatacaagaaacaccttacactttgaagatgactttataattattatcatcataacattgcaaaacacacaaaattgaattttccagacatattttcctatgaaaatatgtggaatgtttataaaacatcaaaactctttggtataactaaatttgtttagtttaaaattaagtatatctaataaaattataaaacccccaaaagtcaaactgtgtatacacaggtacaacctgttaacttggaatatctgtgtgcaaagagtttgcgggccccaccttttttgttccgaacaactcgtacgcgggtcccacggttaattccttttcacactataagaaacgtgttcacattacttttcacactatcaaaaaattttcacccaaaattttcgtttccccccaattcgcagaatttttttaaaaccctattataaattaaaatcagaaaatcaaatcgaaaaagaagaagaaaagacaagaagagagaagactcagaagagagaagaagagagaaaaagagagaagagtggaattatttggtaagcatttcgtttttctgggtacatttttcattcaattcacgtttcacttatagatttctcatatgcaattgacaattttcgatttcggagattgaagattcatattgtacaacctggtttatctattaaatattctagaatttctaaatccaaaactcagggaattatgagccacctctcaggagcatcgaactcgtgtggaacctccgtttcccgaccaagaccaatggttcctagaattccaaagcagtgttggtgtggcgatgaaatcgttgagaggatttcaatatcaaatccaaatccgtaccgtcgttattaccggtgtggtttagctgcagaaaaaaaggtatagataaacctaatttgactagtcactaaaatacctagatatacctaatagatatacctaatagatatacctaatagataaacctaatagatatacctagtttatacatagatatacatgtgatttaacaatttttacaatttcaaaatgtagcttatgaacgacaatcatgtgtttaagtgggtagatgaggcttttacacatgagattgaacaattagaatttcaactcggtgttcttgaagaagaagtaagagtgatgaagatggaaaggaaccaagagaggatggaaagagatccgatggaaaagaacaaaaaggggaaggactttaatatggtaatcatttttagttctggatgtttaataaccatggcaattgttggcatgttgtgtttgtcgtagaaattcaagcgtaa

SEQ ID NO: 163320 - DNA, 3381 bp, Arabidopsis thaliana landsberg
atgtacattgattataagaagctaaatgctgcatctaggaacgatcattctcctttaccattcattgatcaaatgcttgaacgcttagctaatcatcccatactattgctttcttgatggatatagtggtttctttcaaataccaattcaccctaatgatcaagagaaaaccactttcacatgtccttatggaacttttgcttataagagaatgccatttggtttatgcaatgctctttcaacattttagaggtgcatgacctctatatttgcagattgaatcgaggagatggtggaggttttcatggacgatttctcggtctatggctcctctttctcctcatgtttgttgaatcttggcaggatattgactaggtgtgaggagacgaatcttgttctcaattgggaaaagtgtcatttcatggtgaaggaaggcacagtgttgggtcacaagatataataaaagggtatagaggttgacaaaggaaaaattgaagtgatgatgcagttgcagccaccaaaaacggtgaacgacatcagaagtttccttggtcatgctgggttctacagacaatttattaaagacttctccaagatagctaggccgttaaccagattattgtgcaaggagacctaatttgaattcgatgaggactgcctcaaatcctttcacaccatcaaggaaggtttggtatctgctcctgttgttcgagcgcctcattgggactatccattcgagattatgtgtgatgcatcaaattacgctgtaggagctgttttaggccagaaaatagataagaagcttcacgtcatatattacgccatccggacgttggatgaagctcaaggaagatatacaacaactgagaaggaggttctagctgttgtattcgcatttgagaagtttagaagctatttggttggatccaaggtcactgtctatacagaccatgtagctttgaggcatctgtatgccaagaaggatactaaaccaagactgttgagatggatacttctgttgcaagagtttgacatggaaatagtagacaagaaaggcattgaaaatggtgcagctgaccatctttcaaggatgagaattgaagaacccattctaatagacgactcaatgccagaagagcaactcatggttgtagaattcttcgatgggagctacagcgagaaagagttccaccaactgaacgttgttgagggaagatccccatggtatgctgatcacatcaattatttggcatgcaaagtggagcctcccaacctgaccagttatgaaaggaagaagtttttcagagaaatacaccattactactgggatgagccttatctttacactctctgtaaagataaaatttacaggagatgcgtctcagaagatgaagtagaaggtatcctgctgcattgccatggctccgcatatggtggtcacttcgcgacattcaagacagtgtcaaagattctacaagcacgcttctggtggccaacaatgttcaaggacgctcaggagtttgtttcaaaatgtgattcatgccagagaaagggcaacatcagcaaaagaaatgagatgcctcagaacccaatcttggaagttgatatctttgatgtatggggaatcgattttatgggtctattcccatcttcaaacagtaacaagtatatactggttgtcgtagattatgtatcaaagtgggtctaagctattgccagtcctaccaacgatgcaaaagttatgctaaagctgttcaagaccataatcttcccgagatttggagttcgcaaggtagtgataagtgatggtggaaagcatttcatcaataaggtttttaagaacctcctgaagaagcatggagtaaagcacaaagtcgccaccccttatcacccatagacaagcaggcaggttgagatctccaacagggagataaaaacaattctggaaaagactgttgggattacaagaatagactggtctgcaaagctcgatgacgcattgtgggcttataggacagccttcaggacccccattggtacaactcctttcaatcttctctatggaaaatcatgtcacctacctgttgagctcgagtacaaagccatgtgggcggtaaaacatctgaattttgacataaaaaccgctgaggagaagcggttgatccaacttagtgaccttgatgagatctgtttagaagcttatgagagctctaaaatatacaaggagaggaccaagcttttccatgacaagaagatcatcaccaaggatttccaggttggtgatcaggtgctgctattcaactctcgcttgaaactctttccaggaaagcttaagtctagatggtctggtcctttctgtatcactaaagtccgtccttatggagcaatcactctagctggtaagagtggagatttcacagtaaatggtctaaggctcaagaaatacttagtagatcaaatcctcccagaggtgacgtcggttcatctccaggaacttcttgatgattaaaggagtaaaggagtcaagttaatgactttaaacaagctcacctgggaggaagtcccatgactatctctgtaaataaatttttctttcttgttatttttgatttgtctcagttgtgtttgtggttctcagaaacaaaggagcaacgtgttgatagagtaaaaattcaaaactttaactctacagaagaactggagatcgagtgtatagcccagtggagtgcaaaatttttaaaactttctgttgcacctggagaccatgaattcgagtatatcagtcaagtatatgtgaggtttaaaacccatattttttaaatcatcattatactcgaccaacaagagctacagagacttgtagggagtttatcaaatttacagaagatttcctaaagttttcccagtcaacagggaacaaagtccaaagacaagtcaacagagtgtggaccacgcgttttgttcctgaagaaaagatggagagagaatcacataatcaatctccaccacaccttttgaactcgaccacacattccctaaaagtaaaacctactcgacccatctctcttcgtctctccaccgacactccaatttctctactccaccacgaatcgccatccctcaccaaagagtcagtcgactcaacttcactcgagttcgtcgctatactcgaccatttcacttcgccgttcgccgtcactttgttctcgccatactcgaccttctcttagtcgccatagtcgagttccccacctcgttcaccgtcgaagtctcatgaactactccattacaaccacaggactcgaccgtcgacttatggtttcgtccctaccaattctgactcaccgaagaagtactcgacctctggacttcaccggctga

SEQ ID NO: 163321 - DNA, 723 bp, Arabidopsis thaliana landsberg
ataccggtgcggaagtcttgacctttaatgtctatcaggaggcctcaaatccctcggcttcttcttcaaaacgtctcttgcatgagaaacgcgcagcagattctaagacacgtgaatgtatctcttcatgacggtggtgcacttgtcttaactggaacaaacggatccggtaaatcaactttcttgagaatgttagctggattctcaaaaccctctgcaggagaaatcctttggaatggtcacgacatcacacagtcaggaatctttcaacaatacaaactccaactcaactggatctctttaaaagacgccatcaaagagagattcacagtactcgataatgtccaatggtttgagcttctcgagaataaaatcggcaaagctcaacccgcgttggagctaatggggttagggagactggtgaaagagaaatcgagaatgttatcgatgggtcagaggaaaagattgcaacttgcgaggctcctcgctatcgatagaccgatatggcttttggatgaaccatccgttgctttggatgatgaaggtgttagattgctcgagtatattatcgcagagcataggaaaaaaggagggattgtgattgtcgcgactcatcttccgatagacattgaagatgctatgatcttgaggcttcctcctaggtttccaaggaaaatgactttgattgatatgcttgatcgtgcagacatttcttagtagaag

SEQ ID NO: 163322 - DNA, 9857 bp, Arabidopsis thaliana landsberg
agctccactgctccgccatcaagagctccaagatctgaaatgagatcgaatcagagctcaagttcagctgaagagtcaaagaaagagaacgacgtcgctcagcttaacaaaggaaaagggttattgggccactcaccaaacaggcccaatgacaacacaaccaacacaacagtgaagcccaacaagtcttcttcctcttctcaacagacaagaccaccacctgtgcaagaaaacaaaaacagagtgaagacaaagaagaagaacgtctgtacggagccaatcaacacaaagaacagatttggttgtttggtgacctgcgaagcttgataagacagagacagctgtcagtttacaatcattgaaatcctagtattgtctagctataaaaaggaactaatattgtaacctaaagaccaagtgaaataatacaaagcaaagttcactcaaaacattacctaaagtagccgtcttgctcttactttcatggtatcagagcacagcggtctatgatggatcaatctatccaactctattctgctcctgttcttcacatctcaaagtgtgtcacggttaagctcaatgagcaaaactattctctttggaagacacagtttgagtcttttctgtcaggccaaaaccttctaggctttatcaatgggtcactaaaacctcctcctgcaacaactccattcaacaacattgatggtcttactactgaggtaccaaatccagagtatcatacttggaacagatctgaccaagtagtccgagcttggctgttgggatctctgaatgaagatatcatgcgggaagttgtcaactgtgccacctcctatcaagtctggaatgctttggctcaacactgcaataaggtatcatcatcacgcctttttgagctacagagaaagctacaaaccatagataaacaggataaacccatggaaacttatcttaaggaaataaagagggtctgtgaacagttagcttccataggtagtcctgttagtgaacaaatgaagatttttgctgctcttcacgggttaggtcgagagtataagcccatcaagacatctgtagagggttctatggatactcagccaccaccaacgtttgagagtgtgattccaaggttgtcaggctttgttgacagactaaacagctatggtccagacactgaaacctcaccacacatggctttcagcacttcaagatctgactcttctggttactacaacaacaacaacagagggaaaggcaactcaagatttggcagtggcaaaagcaaggattcattctcaacccgtggtagaggatttcatcagcaaatatctcagaactctaatggagaaagaattgtttgtcagatttgtggtaaacctggtcatcatgctctgaagtgctggcacatgttcaataacaggtaccaggatgaagatctgccagcagctcttgcagcattgaggataactgatgtcacagatcaatctggcagtgaatgggttggtgactctggctccactgctcacatcaccaatgctcctcacaagctcacacagacatagttgtatgaaggaagtgactcagtgatggttggaaatggcaatttccttcccataactcacaccggatcaggcagtcttccttctacttcaggtaacttacctttaaatgatgttcttgtgtgtcctgacatttctaaacccttgttgtcagtttccaagctcaccaatgactatccctgcgtatttcaatttcactgtgatgatgttcgaatatatgataaggcaacaaggaaactgttgacaaagggaaagcacagtaaggggcgagtgaagatatatggcatcaaaggttggggcatcctcattcacaagttctccatgtgttatctccaaaaaaagctatcagtatcgggaataagagtaccaagatggtgtgtgaatcttgccagcttgggaaaagtgttagacttcccttttctgcttctactttcgtagctagtagacctctagagagaatacactgtgatctctggggtccttcacctgttaaatcaaatcaaggattcagttattatgcagtgttcattgataactactctagattttgctggttctacccattaaagctcaaatcagattttgctcataccttttctgtgttccaagctttggttgaaaatcaataccaaacaaagattggtacatttcagtgtgatggaggaggagagttcacaaacagaaagctgacagatcacctacaacaatgtgggatcaaacagctcatctcctgtccctacacatcgcaacataatgggttagctgagaggaaacacagacatatcattaagcttggtctctcagtgatgtttcagagtacctgtcctcagaagttttgggttgaagctttctacactgcaaacttcttaatcaatcttcttcccacaactgctttggatatgaagtgcagtccttatgagaaattgcatggcaagccaccagactactcagctctcataacctttggttgtgcctgttatccaacattgagagattatgcttcgaacaagtttgatcctagatcactcaagtgtgtgtttctagggtataacgagaagtacaaaggctacagatgttacttaccatcaactcgaagagtctacatcagtcgccacgttatatttgatgaaacagtctttccttttgctcagtctcactcaagacctaagacaggaagtctcactccactaatgctagcttggacaaaaggaatcaacaatgttaacaaagctccaccaaaacaagatgatagtctattttcagaagaagattttcctcctatacctgtgaaaactccaatcattctacagacaccaatctccattgttgtacctgctgtggaaggagaaagaagttctgggtgtacggcaggctccgatcctgttcctataggcaacagcttctcttcttcttctcacaatcctggtatctcaatagaaacatcaagtcaggctacaaaagaaatcacagaacagtccacaacaagatcagaaaatgagagacaagatgacatcttagctagtcagatacctgtccaagagtctgcacaagaatctgcagaagtcaagtctacacaccctatgaccataagacaaaagagtggaatcagaaagccaaatccaagatatgctttactgacacacaaagtgtcttacccggaaccaaagactgtagctgcagctcttaaagaccctggatggacaggtgctatgggagaagagatggggaactgtaaagaggctgaaacatggtctctggttccttacactccagatatgcatgttttaggcagcaaatggatctttcgaaccaagttaaatgctgacagatcactacaaaagctgaaagcaaggttagtggctcagggatttaatcaagctgaaggcatagactatctcgagacttacagtccagtggtgagaacagcaacagtgaggggagttctgcatcttgcaaccataatggagtgggacatcaaacagatggatgtacaaaatgccttcctccatggtgatctaactgaaacagtctatacggctcaacctgcaggttttgtagatccagacaaaccagatcatgtctgtaagctacacaagtcactgtatggtttaaaacagtcacctagagcctggtttgacaagttcagcacatacctcttggagtttggatttcattgcagtattccagacccgtccctctttgtcttcagcagaggaaaggatatcattccgctcctcctgtatgttgacgatatgttgatcactgtaacagctcagattcacttgccttattgcttgcagaactaaacaaaaggttcaagatgaaagacttcggttaaatgcactatttcttgggaattcaagctcaatttcattcagagggacttttcttatcacaacaaaagtatgcagaagacttactgattgctgcttcaatgagtgattgtgccccaatgccaactcctctgcctcttcaactaaacaaacaaaggagacagaatcaggatacctttgagaatccaacatactttcgcagtcttgctggtaagttacaatatctaacacttactagacctgacattcagtttgcagtgaattatgcctgtcagaagatgcatgcgccaacaactctggacttcttacttctgaaaagaatattgaggtatgttaaaggtacaatgactatgggaataaactttcgaaagcagtcagattgtacactacgagcttagagtgatagtgattggtctggttgtcctgaaacaagacgttcaactggtggttactgcacgtatttgggactcaacatcatctcttggtcgtctcacaagcagaactctgtatcgaagagctccactgaagccgaatacagaacgctatctaaagcagcctctgaaatcacctggctcagctcaattatgaaggagctgcgagttcctcttctcaaagctccaaccctctattgtgacaatctctccgcagtctacctaacagtaaatccggcgttccacaaaaggaccaaacactttgagaaccactatcactacgtcagagaaagagtggctcttggattgttggaagtgagacacatacctggacatgagcagaccgcagacatcttcaccaaattgcttccgttcaatgcgtttacttcactcaggtacaaactcggtgtagttgagccacctacaccggtttacggggggatattagcaagagctccactgctccgccatcaagagctccaagatctgaaatgagatcgaatcagagctcaagttcagctaaagagtcaaagaaagagaacgacgtcgctcagcttaacaaaggaaaagggttattggccactcaccaaacaggcccaatgacaacacaaccaacacaacagtgaagcccaacaagtcttcttcctcttctcaacagacaagaccaccacctgtgcaagaaaacaaaaacagagtgaagacaaagaagaagaacgtctgtacggagccaatcaacacaaagaacagatttggttgtttggtgacctgcgaagcttgataagacagagacagctgtcagtttacaatcattgaaatcctagtattgtctagctataaaagggaactaatattgtaacttaaagaccaagtgaaataatacaaagcaaagttcactcaaaacattacctaaagtagccgtcttgctcttactttcatggtatcagagcactacggtttctgaaaatggatcaatctatccagctctattctcctcctgttcttcacatttctaactgtgtcacagtaaagctcaatgagcaaaactacatactttggaaatctcagtttgaatcctttctttctggacagaaccttctaggttttgtcaatggatctctcaagcctccgcctgcaacaacaccattcaacaacattgatggcctaaccacagaggttccaaatccagagtttcatacatggcatagatctgaccaagttgttcgtgcgtggctgctggggtctctaactgaagacatcatgcgtgaagttgtcagctgtcctacatcatatcaagtttggatgtccttagctcagcatttcaacaaggtatcatcttcccgtctctttgagttacaaagaaagctacaaaccatagaaaagcaagataaaactatggaagcttatcttaaggagattaagagggtgtgtgaactgctagcttcagtaggaagtcctgttagcgaacagatgaagatctttgctgctctacatggtctaggtagagaatatgaacccattaaaacctctgttgaaggatctatggatgctgtgcctcctccaacctttgaaagtgtgattccaaggctcaccgggtatgcagatcgcttagagagttatgctccagggtctgaaacatctcctcacatggcgttttacacctccaagcctgattcctctggttactacaacaacaagggcagaggcaactcaaagtttggaaatggcagaaacaacaacaagaatcagttcacaacacaagggagaggttttcatcaacagatttcacaagactcaaatggcagtacaagagttatctgtcaaatctgtggtaaacccggacatcatgctttgaagtgttggtacagattcaacaatagttaccaagatgaggacttacctaaggctctggctgcactcagaattacggatgtcacagaccatgcaggcagtgaatgggtaggtgactcaggctccacttctcacatcaccaacgctccacacaagctgcaacaatcaaacatgtatgagggaagtgagtcagtaatggtaggagatggaagcttcttacccatcactcacaccgggtcaacaagtcttgctactacttcaggtaacctccctttgaatgatgtacttgtttgccctgacattgctaaaccattgttgtctgtttctaagctcacaaaagactatccctgcgtgtttcaatttgattgtgatgatgtgcgtgtgtatgataaggcaacaaagaaactgctgacaatgggaagaaacaataatgggttgtacgtgttgggaaagccacctgttcaagctatgttctcttcacgtcaacaaggagcaagtgaagatatctggcacagacggttgggacatcctaatgctcaagttctccagttgttgtctgcatcaaaatcgatctccatcaccaataaaagtaccaagctgctttgtgaatcatgtcaacttgggaagagtattagattacctttttctgcatcatcttttgtatcttctagacccttagagagaattcactgtgatctctggggtccttcacctataaaatcagtacaaggattcagttattatgcagtttttattgataacttttctcgcttctgttggttctatccacttaagtacaagtctgattttgctcataccttcaaggtgtttcaagctttagttgaaaatcagtatcaaactaagattggaacgtttcagtgtgatggagatggggaatttataagcaaacagtttatagagcacttacagaaatgtggaatccagcagctgctctcttgtccctacacacctcagcaaaatgggttagctgaaaggaagcatagacacattgtggaactaggattatctatgatgtttcagagtaatgtacctcagaggttttgggttgaagcattttacacagcaagcttcctgattaaccttcttcctactacagctttagcaacaaaatgcagtccctatgaagcccttaatggtaaatctcctgactactcagctctgcgtgtgtttggttgtgcgtgttaccctacattgagagattatgcatcaagcaaatttgatccaaggtctctaaaatgcgtgttcctcgggtacaatgaaaaatacaaaggttatagatgctacttacagtccacaggcaaagtttatataagcagacatgtcatatttgatgagactgttttcccctttcctcaatctcactcaaagatgcaaggtaataagctcactccactgatgactgcctggtacaagagtcaaccacaaacatcaagctcgccaaatcaatcagttcaagaagaaacattgtttaatgatgcagacttccctccactaccaacaagaagatctcagactgtagaagaacaacctgcaactctacctgtgtctactgtggaagaagagagaagttctgggtgtacggagggcttagatccttttcctataggcaacagcttttcttcttcttttaccagctcagacacatctgaagttcaagatacagctgcagaaagtttgaatcaagacatgcctgcttctatcagctcaagctcagaacctgcagtgacaacacaagaagctcagccaactcatcctatgattacaagacagaagagtggaataagaaaaccaaatccacggtatgctttgctaactcacaaggtctcatatcctgaacctaaaactgttacagcagctctaaacgatgaaggatggactgacgctatgaaagtggaaatgggaaattgcaaagaagctaacacatggtctctggtgccctatactccagatatgcatgtgttaggaagtaaatggatatttcgtaccaaattaaatgctgatggatctctacagaagctaaaggcaagacttgtagctcagggatatgatcaagctgaaggcatagattatctagaaacttacagtccagttgtgagaacagccacagtcagaggagttctccatcttgcaacaatcatgcagtgggatatcaagcagatggatgtgcaaaatgcatttctccatggtgatctcacagaaactgtctacatgagacaacctgcaggatttgtagatgagtcaaaaccagatcatgtgtcatctccataagtcattatatggattgaaacagtcaccaagagcttggtttgacaagttcagtacctatcttatggaatttggctttacttgcagtattcctgacccatcgttgttcgtttatgcgaagggaaaggacatcatactgcttctactctacgttgatgatatgttgattacaggaaacaactcagaaactctggcttcactgctcatagaactcaataagcagttcaaaatgaaggatttgggtcagatgcactacttcttgggaattcaagctcagtttcacttagatgggctgttcttgtctcagcagaaatatgcagaagacatgctagctatagctgccatgagtgattgtgctcctatgccaactccgctgccactgcaactcaacaaacaaagaaatcagaaccaagaagctttcccaattcctacctatttcagaagtctagctggtaagctccaatacctcactctcactagacctgatatacagtttgcagtaaactatgtgtgtcagaaaatgcacgcaccaacagttctagacttctccctgttgaaaaggatactgagatatgtcaaaggcactattactatgggtatcaacttcagaaaggagtcagattgcacattaagggcttacagtgatagtgactggtcgggctgtcaggaaacaagacgttctacaggaggttattgtacctattttggcttaaacttcatctcgtggtcgtcacagaagcagtcctcagtgtcaaagagctcaacagaagctgagtacagaactctgtctgaagctgcttcgggtatcacgtggatatgtcagcttctgaaagaactcacatgtccacatcgtcaaacatcgcagttgcacggggatgatatgtcatcggttttcttcagcacgaatccgccatgtcacaagaagagcaagcacttcgcgtaatctatcgccactacgttcgggacacaggtagctctgggaactgtccgggtaactggcatctcgaatcaatttcgaccttcagatatcttcaccaagtctctgcctcatggtctgtttgcttctctccggtttataacttggcgttgatgttccacccactccaggtttgagggggactattaatggagatacaaagagatcgatggagaatgagattgaaaggtcaacaaaaggtgaagataacctaatcgagcaaaaggacaagagacttaggtcaaattcagacacaactctaaacggtgtagttccaccaatgttgtctaaagattcagataagcccaagcccaataacatggtctggaagcccaagacgaaacaaatgtccagtcagcctgttagtgtgcaacggtcatctacaaaagaacaagaagacaaaatgtgtgaagcttgtggctaa

SEQ ID NO: 163323 - DNA, 850 bp, Arabidopsis thaliana landsberg
atgtcatcttacgaaatctctcacattgatttagaaaatggttccggcgagcgtcaataccgtccaagtgacgtcagcggagaagatagttcttcttgtgattacgactacgattttcactcagctgttcgtagcttttgcggcgagtttgagattgctgatgatttggacgacgaaacagatacagaatcagtagcctctggatcaatcagagggtctccggagaaagattgccggatttgccatttgggtttagagagtagtcgtcatgaatgtggagatccaatggttcttggatgttcttgtaaagatgatttgggttatgttcataagcaatgtgccgatacttggttcaagatcaagggtaataagtaagcaaactaaaaccaatcattcttttcattaatcttttaaacatttgttagattttacaaagaatcgtaacttttattttaggacttgcgagatttgtcgttcgatagctcaaaacttttttaaagttgacaatgagattggtcaaacaacggttgaaaccaatgtagatgacgtagaggccggaaatacacccacgatggtggctacaagcgattccgatgatcggagattatgtagaggaaatagattccttaatttccttttaacatgtatggtctgtgcatttgtaatctcatggttctttcactttaacttgccttcacacaaatgaaaactgagaaagaagattaaaatcctctgttttttcttttctcaaaatcttatttcttttgctttgtgtggaatttgattcctgttttagctttttgcacgagtgcaatcatatcaaacaattggaaagaacattcataattga

SEQ ID NO: 163324 - DNA, 1989 bp, Arabidopsis thaliana landsberg
accgcaaacgccatgactgagaatgtacgtggacacgagcatcttgtatccgtcgttaaccaaggtgatggtatggactgcgatgcttgcgatcaattgcatgttggtggctactcatgcagcgaatgcacagttaatattcacaagaaatgtgtgtatgtgttcacggcaagagagatattcgaccacccatctcatgatggacattgtcttaagcttctcacaaccgagctcctgatcacaccgatcccaaatgtcatctatgcggtaaaaacaccaaacgccttctttatcattgctctgattgcaaactcaatttggacattggttgcatagctgatcacagatctgccccattccatctgaatatgtcgtggcatcaccatcctctagtgcttggtctttcatattttgataggtgcagcttttgtcacaagattggcaacgaagacagcaagggctatcgctgccttcgttgcgggttggtgattcatacaagatgtaccttcatatttgactcaccagagatcactcaccctgcacatgttagacaccctcttaagcgtctcaccgatggagctccaaattacacagaccatagatgtcatatatgtggagaaaacactgggaacttactctatcattgtgatatttgtaagctcaacttggatatgcgttgtgcgattgaaagacctccaccagtcgctctttcaaatctcaaggtccatgagcatacactcacactcatgccaagattgatctccttcgtttgtgatgcctgtggtacgaaaggtgatcgttctccttacatgtgtgttcaatgtgatttcatgaccttccatcaaaaatgtgctcgtttaccgcgtgtcattcatgtcaatcaccatgatcaccgtgtatccttcaagtatcctcttggtcctggagaatggagatgtggagtttgttgggaagagattgattggtcatatggggcttattcatgttctctttgtcctaattatgctattcattcattgtgcgccacaaggaaagatgtgtgggatggaatagaactcgatggagtacctgaagaaattgaagacatcgagccattcaagaggaatgatgacagcacaattactcactgcgctcatcaacataacctcatgagcctcaggaaagacggtgaagaaaacagcttgtgtggagcatgtgttcgtcccatcggttcttacacattttacaaatgttcagaatcagaatgcattttcattctccatgaaatgtgtgctaatttacgtaagaagaaacgacattttctgagcccagaacctctccatcttttctgtattggaacagtctgatgactcgccaacagcttgttctgcatgtcttcaagtttgttctgaaggattcgtctatgaccatgatacatatgggacttttgacttgctatgcagttccattgatgtgccttttatccatggaagtcatcctcatcctttactctaccttaaactacaacacggtcactttaagacttgtcagagctgcggcatcgatcatactaaagtcgtcataggttgcctcaagtgcaattattttttggattttcgttgcgccactctaccattaacggttagccttcctaggtatgatgatcatcctctctcactatgctatggagaaaaatcgagcggcaaatactggtgtgatatttgtgaaagagaaacgaatccagagacttggttctacactggttcagaaagcggggtcactttgcatattttatgtgtacttggagatatcaggtatgccaaaccaggaggaaatatctgtgaggggggttttgtgctacctaacaatagttctacacgaccaatttgctacaattgtcattgtcgttgcccaggtaccttcattgttttaggttgggtcgactatgaccccgagttcttctgttctttttactgtttcaaatctcacctaaagttccattttgacgaa

SEQ ID NO: 163325 - DNA, 1975 bp, Arabidopsis thaliana landsberg
tcgcttatatctcacaaaaaagaagctcaaagtgaattcagaaagcagttgtatcaaaatataaaaaaggaagaatctggcacctttgggatcaacttcacgagagatcttaatggcatcagatgttgcaagatcctgatttgcaggggaaatagcaagtatgatgcagttgggctgtcaaaaggtgaatgatcaatctttgttatttgcttgaacacacgacctttagaggatagtagcatcatctttccacaattgaattctgctacatacttgtaatttctttcaaatcatagttaccttctcaataaacgatctgaccatgttctcgatgtcttgaacaatgctttcaggctggccatctacaacataattggcaccatatttcattaatctttcactaaagaggacttggggtgtgggatatcatccgatactttttccggcgccgatgattcttctggccttacacttgagcagggggtacctggaacatcaaccatttgctatcatttctccaagcgtaacctcgccgtctgctccgagagggtcacaaaagcaaaatgtatgtttttttcttctttcttttagttgattgcttgtcatgttgtttcccccattaagggttttgagattttgaattgattttgggatggaaattacagctgaaggaaactgctacgtaccattgagtgagctcttagtagaagaatcatggcttaaagctcttcctggggaatttcataaaccctacgccaaatcactttctgatttccttgaacgtgagatcatcactgacagtaaaagccctctgatttatccaccgcagcacttgattttcaatgctcttaatacaactccttttgatcgagttaagactgtcattatcggacaggtacatacaacatttggaattagctttggtttcttttctggattctgtttttatgctttgacaagtttttttactctctttgatttaggatccttatcatggacctggtcaagctatgggtttgtccttctctgtacctgaaggagaaaagcttccttctagtctgttgaacatctttaaggagcttcataaagatgttggctgttccatcccacgtcacggtaatctacagaaatgggctgtgcaggtaaatggatcatctctacttgtttgtgcaatcaattctcagtttacttggagaaggtaaagcaattcacttttttttttttttttagggtgtgttactcctgaatgctgttcttacaggtaatgtctcctatcgtgtgatgaccttatatgtataaaactgtcaaagtcctgcaattcttctcacaaatatgtcggttaacttgctttctaattcagtaaggagtaaacagcctaattcacatgcaaagaaaggatgggaacaattcactgatgctgttattcaaagtatctcacagcagaaggaaggtgttgtttttcttctctggggaagatacgctcaagagaaatccaagtaggtttggttttatgaatgcgatacagctgataagaaaatgagtaactgaaattctgtttatgacttgcaataacactagaacctgctagacttgtagatattgcagcatatgcatcttcattgttttttgtcttttatgaatgcaggttgatagatgcgactaaacatcatatactcacagcagctcatccatctggtttgtcggcgaatagaggcttcttcgactgcaggttagcttaagcttaataaaccttttcgtctctcctgcctatttacatgcataatgtaattattgcttctgtggtctgcaagatatggcacgacctgcagttatatgagtgttgtgcttatgttgtaccaactgctgaatatatgttctacctttggacaggcatttctttcgcgcaaaccagctactcgaggaaatggggattcctcccatagactggcaactttaacttgttaaccgtagtctt

SEQ ID NO: 163326 - DNA, 7752 bp, Arabidopsis thaliana landsberg
  unsure (1)..(7752): unsure at all n locations
atgccaactcgaccaacaggcaatcagaacctccttttcaacgagaacatcgaccgaatagctcgcgaactcagagaaaggagaaacacagtcaaccttgtacctcagtaaccactcgaaatggctgacgaacagaatcaacaaaatggccctaccaacgttggtgctggagatgcaccacgtgatcatcatcagaggaaaggaattgcacctcctgctatccagaacaacaactttgagattaagagtggtctcatctcgatgattcaggggaacaaattccatggtctgccaatggaggatccactcgaccaccttgatgaattcgataggctctgcaacctaacaaagatcaatggtgtcagtgaagacggattcaagctccgtttgtttccattctccttgggagacaaagcacacatctgggagaagaatctgccccatgactcaatcaccacctgggatgattgtaagaaggcttttctgtcaaagttcttctccaatgccagaactacaagactcagaaatgagatttctggtttctcacagaaggctggtgaaagcttctatgaagcatgggagcatttcaagggttataccaaccaatgccctcatcatggcttcactaaagcctctctgctcagcactctttatagaggcgatttaccacgcatcagaatgcttctggataccgccagcaatgggaatttccaggacaaagatgttgaagaaggctgggaattggttgagaaccttgctcaatcagatggtaattacaatgaggactgctataggaccgtcaaaagcacaactgactttgatgacaaacacaagaaggagatcaaagcgctgaatgacaagctggacaggattcttcttagccaggagaagcatgtgcacttccttgttgatgacgagcagtatcaagtccaagatggggagggtaaccagttggaagaagtcagctacataaccaacaaccagggtggctacaaagggtataacaacttcaaaaccaacaacaccaacctctcctaccgcatcacaacctttgctaatccacaagatcaagtctatcatccacatcaacaacaaggtcagaacaaaccttttgttccctacaaccaaggtttcgttcccaagcagcaatttcaagggaactaccagcaacaaccaccacctgggtttgcacctcagcaaaaccaaggtcttgctgatcctgatgcttaaatgaaacagatggtacaacagctgctacagggacaagcatctaactctacagaaattgctaagaaattatctgaattgcaccataagctgacctgaatgccaaaatggaggcattgaataccaaagtcagatacttagaaggccaatcaacatctacctctgcacctaaagttacaagacttcctgggaagtcaatacagaatccaaaggagtatgcaactgctcacgccatcaccatctgccatgatcgagagctaccaactcgacatgtccctgatttaatcattggggacaatgatgttcaagaaggggaggcttctactcagattgaagtctctgttgttgaattcaaccatcctgatggatctcgccatctcattcaatccacctcggaagagaaggccgccataatcaagagaatggctaaacgattcaaacctactccattaccctcatgtactctcccatggacattcaggaaagcgtggatggagagatacaagtctgttgcagcaaaacagctagacgagattgaagcagtgatgccactgaacctcacaaagatgtgagaaatctaatactggaaagaatcaagatgtatcacgactgagatgatgaatgtgatgcttctccatctcgagttgctgataagaagattgttcaagaaaagttaaaagatcctggatcttttagtctaccatgttccattggggaattagccttcagcgattgcctgtgcgagctcgtagcctctgtcagtttaatgccactctctgtggcaagaaggttagagtttattcagtacaaccttgtgacctgactttgatccttgcggataggtcttctagaaaacccttcggcatgctgaaagatctactagtcatgattaatggagtggaagtgcctacagacttcgtggtgctggatatggaagtagagcataaggatcccttaatcctgggaagaccccttcttagcttcagtgggagcagtgatagatgtcagggaagggaaaataagtctcaaccttggaaagcacatcaagttgcagtttgacatcaacaaaattccacaagagtcaacagaagatgaaaaaacctctgaagactatagagtgatcccaggagaagggtatgagacggagaaagtaaaagagcttaaaaagaggtctgataagcaagaagaaactatagagaggctagctcactctgttgaggaacttaggagtaagctgaatcagatgcagaaggaagctcaacctaaaggcgggattaacactatcccgagaaaaaagttcacttcaagatggtctgaagtgatagattaccctcgagaagagaaagaagcctattttgaagaaaggggaattgagtattctgctgtagagtatgatgatgatactagagaggactatgcagaccctctctatcattcattttcttcatgataagtgtgaggagtcaagctagagactttaaacaagctcacttgcgaggaagtcccatgattatccttgtaaataagttttactttcttgttattttttatttgttttagttgtgtttgtggttctgaagaatacaggaacaacgtggagatagagtaaaaattcaaaactcttactctacaaaaggcctgaagatcgagtgtatagcccagtggagagcacaatttannnnnnnnnnnnnnnnnnnnnnnnnccttgcattcaagtacatcagtcgagtatgtgctatgtttaaaacccaaaaaaatttaaatcatgattatactcgaccaataggagctacatagatttgcagggagtttatcaagtttacagaagagggcctgaagttttcccaatcaacagggaacaaagttcaaagacaagtcaacagagtgtgggccacgcgctttctccttgaagataaaatggagagagaatctcaaactcaatctccaccactccttttgaaatcgccatcattctaaccatggagtaaaatttcattcgaccaatctctcttcatttttccaccactcgaccaaactcaatctttcttcttcgcagcaattcgccacaaatcgcttctctctggtctgagaacttactcgaccacaagaagcaaatctctgaagccgacgaaacatcaagctatactcgacctctctgaatctactcggccactgagggaaagaaatactcacccaccttaatcgagttccaagtttcacttgacagccggacaaagactcgagtcttgttgattccagttcaccgtaaagcactcgacctcctgcagccaaccactcgacttcgtcctgagactcgaccaacgattcaagactcaagacgttaattatggtttcctgaggatctactcgacccttagagcattcgtcgggaagagctactcgattccaacgactctactcgaccgatttcaccggctgtacacgaccctgttctgctctactaggttaaaacataaacgaagaactcgggaacgtctctgtttactcgagtactagactgtactcgaccaacttggtctatttcattttctgttgataacgattttggtttcattgttttctttgaaactaacatattgacatttgagttttgagttctcaatctttttcaggattatcatgagtaattatagtgacggctcgtcaatggatcctgactatcacatggatgaggctgagtcttcatcttcaaggccagaaagagaacagagagaatatgataacttcaggagaaaagctgaggtagctcgagggaagagagcaatgacaaagaggtatgtgctgatagatgaggatctggaggacgagtatatgcctacgcatactcgcagagccacacaacttctgcacaaacctgatgtattgccagttgaggagtatatcaggctcttcaagctgaatgagttctactgcacaagatatccttgctcgactacgctggcacagcttggattactggaggatgttcagcacatgtaccagagttgtcacctggacactttgatggcttactcatatgtagcctatgaataataaacgattcagtttctttccacactacaagtggagctttaccaaggtatgacctctgatgatttggaaagtgaaggagtgagattcttgcaattctatgtgtatggtcagggttatatgctatcaatcaagcgcatggaaggattgttcagtttcccagtggaacgggtactaagcccaagtatgacagagaagagttgaaagacttgtggatcaccattggcagctctgtaccgctgaattcttccaggtcaaagagcaatcagatacgcagccctgtcatcaggtacttccagcgttctatagccaatgtgctttactcccgagagatcacagggactgttactaattctgatatggagatgatcgcaatggctctcaagggaactcttcgccaaactaagaatggcatgtctctccaaggtgaaatcaatgacacacctctctctgtacttcttctgatccatctgtgtggatacaagagcaggaccgtcagcaataaccacaagagagcatgaggcgctctgtgcataggaggtgttgtgacaccgattctgaccgcttgtggagtcccgatcacttctgatggaatcgacccgcgagcaatggatatcgagcttctaggtcactgcgaattcttggagtttgcaatggttgacgacttgcacaggttcaggtttgagcactctacagacaagagagctagcatccttctccccagctctgaggttccacggataatcgagggagataacattgatttttggcctgaggttgggcgcctctactatgagaacgctccaccattggatgaggatgatcttctagaagaagctgcctcggatgggatggatgaagatagggcagtggagttcgacactagcatgtatcactttgctgaacatgtacctccagcgaggcagagcaagagcttgactgaagctcataagaataacagtaaattgcagaagtggtgcaagaaccaggacaagctgatcgccaagtgtttcaagcttctgacagataagctgagttgctcttcctccaccactgctattccacaggtacagcgtactatggagatgccatcgaggagaattaatgcacctacgcacaggcctgagcttagcgagcagagagtcccacatgtccaggctaggcattcgtcattcgaatcccgggaacacaagagaagaaggaaggctacactcactcgatctagcagcagatcacgcctcattcactcgaggagatcacttgaccgcggtgctggccgcagcagaaggagagaggtcgagtttcctcagagcggtgctggccgccacagagctgatgaggtcgagtacccacctgctggagctgatacagaacaaggtggttcgtctatggcctgggagcaatcacaggcagccattgacgagcaactacgttcattcttcgactgaggtaagcgcctcacttcaccattgtattatatcatttgtcttgatttgtttcttcattttttgtttctgtgattggatttgtcctgagtactctcttccaagtttattcgcacagtggactgtgtgatttaagtttgggggagggctcaggaagtgtgtgttgcattgtgtatatttttgagtctgcattcatctaaggcatagaaaaaccaaaaaaatttgaaaaatttcagaaaatgatttcacaaaaaaagagtgttcatgtagttgcattacatttaggatcgagtctagagtgtttcatttaggattgttgcatatgcataggggatgatgatgagatagccttgtaagcattttgattcaccggataaactcagttcttaacccgtcccaatacttcgtcgttttgagtattagggttttcgggatatttggctataagtagcatgtacttcacattttcgcagacaagaagtttttatctagttttatttccgcagaccttgtgttctagactttttgtaatccggatttctctttatctattcagtattcagtattcagtttctgttcttgatttcgtttactgttgttcattctgttatcatcctgctgttacattgttgttatcatgttttcaatttgttcaacgtttatgctttctgttatgatgtctgagtagtgaataggtttctaaggatgggttagagtagtgtagaattctcagtatgctaggtgattgagtattggttgatagatcccttctggattagttgttcttaatgcctattgctttctgatcaactggaatttgagcccagacatttccgcgcccaaaaggtgttcgatgaaatgtctgaaccactaattccagagattcgtggccctgtaccaaggtattggttgcagggagcgttttggctttaacttgttgattcgtaatgcatgttaggttagctctcgtcaatggtgattcagtctgggactaggttaacttgagggtctctgttgcggtggcacttagatgtgattaatgaactcgttgtctagggataatttattgagcatgtcaatcacctgtaaactaaggaaacgaaactactcaattaccccatcctcgggaattctttgtctgattgaattctttgtttactctactgttgtttactgcatcttgttatctgtcgcttaatttctgcagttctttcttgttacnnnnnnnnnnnnnnnnnnnnnnnnnnnnnnnnnnacagactgtgcagtggagtatctgtgtttcattttctgtctgttactcgacctgtctatcgacctcacccagtgctctacaaagagctgtgttggtcgagtgttttactgtttctgtttgattttctgttttctgcatgttcacttaggactgctagaacgaaccaaaacctgttattgcttggcttgacttagtgacttctgatcacatcttgattgttagcatcacacccatttgaattgacaacctaaaatactacaacgatatgattggtgttttaggataatgactaaaaacctattatcaatttggcgccgtggccaattgggtgtttgtttgttacattgagatttcagacttgcttagatcaagttctttttcaattttattttcggttactaactgtgtgtttttcttgttgtcttcttgatccaggtacacctctgctgtatgcaaactcgatcaacaggcaatcagaacctccttttcaacgacaacatcaaccgcatagctcgcgaactcagagaaaggagaaacacagccaacctaataccacaacaaccactcgaaatggctgacgaacagaatcaacaaaatggccctgctaacattggtgctggagatgcaccacgtgatcaccgtcagcggaaaggaattgcaccacctgctatccagaacaacaacttcgagattaagagtggtctcatctcgatggtctgccaacggaggatccactcgaccaccttgatgaattcgataggctctacaacctaa

SEQ ID NO: 163327 - DNA, 3088 bp, Arabidopsis thaliana landsberg
aggccaagccacaagagcaatggaaatcgttaagaagtttggtgaattacacaacaaagttgaccgacactttttcgaacttaacaacaagtacgaatccttgagcaccaggatacgatatctggaaggcatccccacttcaccatctattaccaacaacccaggccagcttccagggaaagcaatacaaaaccctaaggagtatgccaccgctcacgccatcactatctgccatgatcgagagctgccaactcgacatgcctctacctctatcactagggacagtgaagttcaagaaggggaggttttcgttcagaatgaagtttcagctgaaatagctatagaggagcccatactcgatcgtagtactcgatcccaagctcaagtagtacatccttctcttaaaaagcatgccgctactaaaaccaaggataaagtctatgttcctccaccctacaagcctccactaccatttccagggagattcaagaagcaactgataaagaagtaggaagctctatttgaaaaacatttgaaggaccttgaaatcacaatgcctctagtagactgtcttgagctaatatcggactcacacaaacgtgtgaaggacatgattacagagaggatcagagaagttcaaggaacggtgacgttaactcacgagtgtagtgcaatcatagtacataagatcacacctaatcaattagcagatcccggctcgtgtactataccatgtgcccatggcccttgaccattcaaccggtgcctatgcgatctaggcgaatccgtaagcttgatgcctctctcagtggccaagcaacttggtttcagtaaataaaaggcttgcaacatttctttgattctagtagacagatccatcagaatacctcatggtttgctagaagacttaccagtaaggataggcactatggaggtttctacagactttgtagtggtagaaatggatgaagaacccagggaccctttgatcctaggaagacccttcttagctacagttggagccaccatcgatgtcaagaaaggaaagatcaatcttaacattggcaaagaactcaagatgacctttgacatcactaacaccatgaagaagcctacaatagaaggaaaggtcttctggattgaagagacggatatgttggctgatgaactgctagaagagctagcagaagaagaccatctatagaatgctctaacaaaggatgggaaagaagaagatttacacttggaaactttggggtaccggaagttgttagatatgcataaagaagttgagaatccagaggagtatgacgatttgttcggaaatgcaaaggagcagaatatactcgatcacgtcattcaacagactgtccactcgaccgagctactcgatcacaaccttccctctaacgccgatctgacatccgacgactggtccgaactcaaggcaccaaaggtggatctgaaaccgctgccaaaaaggttaaggtactttttccttggacaaaactctacttaccctgttatcattagtgatgagctaaacaccgatcaagttattctgttattaactgaattaaaaaaatataggagagctataggatattcactagatgatatcaaggggatctcacccaccctatgcacccatagaattcatttagaaaacgaatcttattctagtattgaacctcaaagaagattaaacccaaacctgaaagaagtggtaaagaaagagatacttaaactattagacgcgggtataatctaccctatatctgatagcacttgagtatctccagtccattctgttcccaaaaagggaggtatgacagtcataaaaaattctgaagatgaactgatacccactaggaccataacaggacataggatgtgtatcgactctaggaagcttaatgcagcctctagaaaagatcatttctcattacccttcattgatcaaatgctagaaagattagcaaaccatccctactattgttttctagatggatacagtggattctttcaaattcctatccacccaaacgatcaagagaaaactaccttcacttgtccttatgggacctttgcttacaagcgaatgccttttgggctttgcaacgcacctgctacttttcagcggtgtatgacttctattttctccgatttgatagaggagacggtcgaggtattcatggatgatttttccgtgtatggtcctccttctcctcctgtttgttaaatttgtgcagggtactcaagaggtgtgaggaaaccaatctggtactgaactgggagaaatgccacttcatggtcagagaaggaattgtcttggggcacagaatctcagagaaagggatagaagttgataaggctaaggtcgatgttatgatgcaattacaaccaccaaagactgtgaaagacatcaggagttttcttaggcatgcaggcttttacagaagattcatcaaagacttctccaagctggctagaccactcacaagactgctgtgcaaagaggcataattcatacttgatgaagaatgtctaacagcttttaagacaatcaaggaagctttggtctctgctccaatagtccaagctcctaactgggaatatccatttgaaatcatgtgtgatgcttcagactacgctgtaggagcagttctcgggcagaagattgataagaagctacatgtcatctattatgccaacaggactatggatgatacacaagtgaggtatgccaccactgagaaggaattactggctgtggtattcgcattcgagaaatttagaagctacttggtgggttctaaggtgacatgattttctgcgaagaaggataccaaacccagactgttgagatggatcttattgctccaagattttgacatggagatagttgataagaaggggattgaaaatggtgtagctgaccatctgtctaggatgagaattgaagacgaggtacccattgacgactccatgcctgaagaacagctaatggcgattcagcaacttaacaagagtgctcaaattaaaaaatcactcgatcaagtatgtgcagtagaggacaagcttcatg

SEQ ID NO: 163328 - DNA, 1239 bp, Arabidopsis thaliana landsberg
ccgtggaaatgtgggtattcgggtcgggctcggatcggatttttcgggttcgggtttagaaattttggacccgtatggttatatcaacaatttcgggtcgagttcgtttcggattcattttgggtccgtataattcgagtattacccataagtaaccaaaactatttcgagtttgagtactacttacccaaattttgtccaaatatactcaaacatacataaaagtatccataaaacccgaaagatctgaaattagaacaagtttttccttaagccaataatataaaacaagaagtaaaccttgttttaagcttgttccataactcaaatcattaaacaagtcacattattagtgcatatatatcctcatatgtatatatagggctgggtaaaaaaccggacccgatacctaacctgattcccgaaccgaaaaatcgggttggggtgggttagggttttaagaaattacttcattgggtaaagttttagtaaacccgtgggtatcaggtcggtccggggtttatccgttacccaaacaggatacccgaacatagatttaatatcaaaaatattaattatatttaatcttaatataatgtaataatctaaaattataattataaatctaaatatatcaattacttttagatctaaatacccaactatttaaaaattatttgttatgtttgtcaaaatttagtataatatatttaaatctaattaaattattaaaatttgttaatatttaaggttttttttttgttgggtacccgctatctacacataaaatacccgttttcatttgtttggctatttttagggcctgaaattctttacccaagccgacccgaacccgaatgtacccgaactagaccgaaatcgaaaaatttcattttaccctattgggtagtaaatccattacccatttaacccgaacccgaacgggttttacccgaatccgaacgggttacccatatgcccagccctatgtatatatatgttcgggtaataaaagtacccacggatatcgggttcggttcgggtaatatccgatacccacgattatttgaaaacagaacccgatcgagtaattagcctgaaccgaagtagaacgagttcaggtatttcgagtcgggttcaggtattatgcccatgcctatttttgtaaatgatatgtattcaacggaaccacgttttcagaacgtgaaaaaactctatgttattcaagaccattgtgtt

SEQ ID NO: 163329 - DNA, 1892 bp, Arabidopsis thaliana landsberg
atggggaacactataatggtgaggagaaacaaggtgaaagttatgaagatcgacggcgatattttccggctcaaaactccggtgacggcgagtgacgccacgaaagagtatcccggattcgtgctgttagactccgagaccgtgaaacgattaggagttcgcgccaaacctctagagccgaatcaaatattaaagcctaatcacacatattttttggtggaccttccaccggtagataaaaggaataagcttccataccggagagttatgtccggtaatatacatgttggcgcaaaggagcgtttagagatgttaatgctttcaaggagaacggtttctgatgttggtgcagcaagatctgacgtagtaggagatgggcctgagcttggacatacgagggtgaggttaaggctgcctaggtctcagataacaaagttaatggaagagagccatgatgcttcggaagtggcagcgaagattatcagtgcttatatggagagttccggtgggatacaaggcggtagggataacgatggccttcgccagagacttggaattgcggagataaacaaccattacaaaccacgagaggtaaatgtccgagataattacatgatcgaaatacatttgaagttatcaatcctaagtttttatatatagcataagtgcataactaaaacaaaggtcttatagcatagctaaatatttgaaattacgttttttttccaacaacatgcattttatccgatttgaatataaatggtgacacatcaacaaagaaactattacaaaccaataaactacatgcaatagtcattaagacattaatatttatgctactcaattgcctaaagtttttggaaccagaacgtatgatgaattatcactatgtatagtatatgatcaaacatcaaatccgcatttaatgtactttgggtttcgttgtttcaaactgtaactcatattttttttacattttttttgccatgaatatatttgtgaaatgaacacgcaaactaaaggagatctctttgtttgtatttgacattttataaaacgttgttgttccaaataaaatgcagaagcatgtgagtttcgcagagaaaggaggaagaggagagatcgttgttctatgaagtacaaagcaagagtagccagcaattacatattgtccactacttcaaaatgcatttgttaggattcttattttttatttgtttttaggactcatatattttaatgggcatatctagctatcatctctactatgatgtcaaaaacgaaatgagacatttaccaccaatttttaatcaacattcagaaagttcgagtcaaatttttactaccgcccatgagctataattttaacatgcgtccaccaatgtctcaattaaatatgcttaagctatccaatcccaatatatatcatagtgtagtagctaattacgctaactcaatcctaatgtatcaaactttattaggctaattagatccggatccaaaattcaatcggatatccggatgcgatagattcgaatctgagtaatagtaaaaatcaaaattggaatatcacggttattggcctactttcgcgctaaaccgaatatcctgatccggtctaatagataaacatcgcacattcacatagtggtgggcttaaaatacagatgatgtacctatctagtaggagattcgagaaaagatggaataggaaagacgtgtttccaaataatcctatgactaacctaactcaaaaattttagggcaaaaaacggaatctgcgggataaaaggggatggcagtctcatgtccccctgccggtggggactctgctcccgggttggtgcccatgtttcgagaagtttaaggcaaatggtgtgcccatgttttga

SEQ ID NO: 163330 - DNA, 1270 bp, Arabidopsis thaliana landsberg
atggcgatgatcgttagactggttcgaggagagtggaaaagatatgaatccgtatgctatgaacacgtagtctagttagatgggttatgcttggcggtaaagctccatgagagagacacgttcgctaaagtggttgaagctgtgaaggaaagactgactctaagcctgaaagatgaagtggaactatcctatcagtggccgcagtggatgatgagctcagatttgcagcgggcaaacctgatccatattctcgatgacgaggatatgacgttgtttatggcaatttgttctgatctagaggaggttcacttgaaggtcaaaaccatacggaagatagtgggtacaccaacagttaattcaaaccgaggcgtcttagatatatgaggtatgacttcagaagcgatatccgataagtactgaaatagtagtgaaacaagagcagctttggattcggcaataacaagaatgttattcggtaacgtacctagtaatagtgtgactggggttaccagacaggacaagaacgatgccggaacccacttaggcaggagttgcataactatacgagagaatgcgggagagacgggtgtaggaagcgtcgcaccgagaaacctaacccaaggccaaccacgtgcaaccgctaaagggaaggaacgtgtcctttacaaggagagatatatggatttggagtttgcagtttggaggaaaaaccagcaggcataaatgtagagagagatgcagaatagagaaattcgtttggctagctcggtgggtggacaactcgacatgactccggctaatgctcaggataacgtggttagagggcaaagaagttcaaatacggaggagtcaatacatcttacccttggaagcgaagacccagctagtggcgatgtctcagtagtggcgttatcttcaacatactcgacatttaagacaccatcgaatagtataaccttctccagtgaggagctgatggaccaagatgaattatctagcaacaattgtctggccaggataggtatgttatcttgtaaagtgcaaatttttgaataatatatgtgttgccacataacactaacgaacacatctgaaaatagtcttcttcatcatatacacaggtcaagatgaggtggaacactactactcagacccagtcggaccgctctatatggcaccaataaatactccaagaatgagtagagttaacaacattgtaaggggggagatcattgcaactcaagaacaagttatggcattaaatacccag

SEQ ID NO: 163331 - DNA, 2822 bp, Arabidopsis thaliana landsberg
  unsure (1)..(2822): unsure at all n locations
tatttccgttctctttccgattcgaaatcagtcatgccgcctaagacgcgtgaaggaggtcaagggaaaaaaaaggagatagaagcgccggcgccggcgaagacatagaaagttaaggcgtcggcggagaaaccgaaggttcaggcgccggcgaagaaagataaagagaaagtgccggttgaggagcagtcgccggcacaaacgactgcgacggcgatggcaaccaatgcggctccaacgacagcggctccaacgacaacggctccaacgacggctccaacgacggagagcctgatgcttgatgattctacgttttatgatgctctgaagcatattcctgctgaagaaattcaagagaatatgcaaactgatgaggtagaagatgaaaatgaaaaagaagaaacaagtgaataagaagaatcagggagtagtagccgaaccttgggctccgattccgattcagaggagacggagacaaacaaagaactcgcgtgtgctaatcccgtggaagaggcggagagacaagatgacggcctagccgttatcgaggaggaggaggagaggactccgcgagcgacgaggacgtcaatgtgaaaaagtccgtggaggatgagggagacgaggacgagagagacgaggatgtgatagtggaaaaaaccgtggatgagaggaccatannnnnnnnnnnnnnnnnngtggtaagtattccatttcgtaataccgatctaattgggtaataatgcaattgtgaactttggacagtactagtaacattgggaaatgctatgttgacatttaggtaatattggcggatgtgggtaatactttagagtaatactacaattgtgatttatcgatagttagtactactaactttgagaaatagtacatagtaaaataggagtatttgtgtaatactggtaattacggggaatacttttgagaaatacagagtaatactatggcagtactatttaccattgagtgatatatgaatagtaggatttgtgtaatactggtaattacgggaatacttttaggaaatacagagtaataatgtggcagtactatttacaattgagtgatatatgaatagtacgatttgtgtaatactggtaattttggggaatactttttggaaatacagagtaataatgtggcaatactatttacaattgagtgatatatgaatgaatgtttgtttctttcaggatatggaggaagcgatggcaatgcagccacttggtatgtacttcccggcgttggagtataccaagaagatgaagttagcaacgaggtgttatatctcggaggtgttgaagaccttcactgacttggaacatcctctaacgaatgttgaaaagaattattttatggagcatccgagtttcaagcacatctaccacctgccttccggatatacccacaagttaatgcggatgtggatgctttttcttcgaacggcatctattgagaagaagaaggaggtttggttcgttgttaatggagttcccatccgctatggtattagggagcatgctttgatctctggtttcaactgcaaggcctatccagctaattatcagagtgctggtaatatgaacttcgccaacaggtacttcaaaaccggggtaattagacgtgaagacgtgaaaaccaagctaatggagatggaaccggctagatcaaaggatacgttgcggaaggcggtcctctattttctaacaagcatcattgtcgtgcctactaagaccggagaaagggctagtccaattgatgatttctgtgttagggctgcaagtgatcttacgttttgtaagacatttccatgggggcgatattcatttgagtacatgttaaaatcgatctcacacacattggatcattttaacggtgtcgtcccgaacactcagtcaccatggcctgttcccggattctgtgtgccgcttgaggtaagtcttttgttttatccttgttacattttcgtaattgaagctaacaattaaatttcatgtgtttttttgtaatttttagcatttgaggccattccatcacttagggaaagattcatacaagaaaaagagggtgcacatgccggttgtccaaggatgtgcaaggtgaatttcaagaggaccgagatgaaagggtttacccttgagcaaatcaaccatgtactcagaacaactggggttagtatttcctattattccttgagcggatatgatgagatttcgttctaataatacgaacgaccattatttccatagatcattgagagtataattagagagaaggatgaagaagtacctcttttcgctaaaatcaagggagtagaggctgattttgataagcacgatgttgtagttgatagttggatgaggcgtcttggtcaagggcgtgaaattagattttaagaggtgtacaacgaatatgtgcaggcccgaatggaagccccaaatgaagaggaagttcccacagctgttggaccgggacacccgacgttagttgatgtaatggagaacctccaagccaacaatgacaagctgaatgaagctttggtggcgcttatggaaatggaggaaaaacaagcaacgttcaaagcatttatgaatgagatgaaagctaaggtaaatctgggtgatatcggatatactgtaccataattggtaatatcgcgtaataccagggtataactaaattacaatgcagatgtctccgacccaccagatgtggaggatgaaacaaccaaggacaagccggctgctcctgttgtgcccaaacgagtgacccgttcaacccgtgcaacctctagtttagtgtga

SEQ ID NO: 163332 - DNA, 1393 bp, Arabidopsis thaliana landsberg
atggattttgtgttgggattgccacgtacacaacggggtgtggattctgtgtttgtcgtggctgatagattttccaagaggacacatttcattgcatgcaagaagaccgttgatgcatccaacatagccaaactatttttcaaggaggtagtgcgccttcacgggggtcctgagtcaatcacttcggatagggatacaaagtttctaagtcatttctggtttactctatggaggatgtttagaacagctcttaaccaaagttctatagctcatccgcaaaccgacgggcaaaccgaagtaacaaacagaaccttgggaaatatggttcgaagtatatgcggggataaaccaaagcaatgggatttagctttgcctcaaatagaatttgcttacaatagtgttgaacattctatgatagggaaatcacctttcttctagtgtatacttctgttcctaagcatgtggttgatttggttaaattaccaaaggctcatggggtaagtgcatcagctgaaactatggctgaagagattttagctgttaaggaagttgtcaagactaagttagagactacaaggaaaaagaacaaggtcgctgctgataaacgtcggagattcaaagttttcaaatacggtgatgatgtgatggtgttcctccgtaaagagagatttccagttggtattacaacaagctgaagcctcgcaagtatggcatgtttaagttgtcgcggaagatcaatgataatgcttatattgtggctctctcggaatcgatgaacatttccaatatcttcaatgaagctgacattcatgagtatcgtgcagacggggacaagttctttagagaggagagatttagcagttttacatttcttttgataatttcttatttcaagctttctattttgcttaaagttttttattttatgttttggtttcttctctatatagagaccctaagttatttgttagacacgtttttttatcattctaattaataaaagtagagagtttttctaatgtagtggatttccagagttttaacccttcaagttcgacgcttactattcttagagattctgattgcgtcattaggactgcggactttgatgctagttctgatatccttcatgcaaaggtacccaccatctacgagtccttcatctttacttgtttgaattcatacattagtgtttgcagccttgcttcttcaactcgatcaactccgagatttctagatttgattgagtccaaatccctttagaagaaacttgttcacctatttgtaagattagaatcttcgagatggattggaacaacaaagaaattgcgatatcgttttgtggagtctgttgaaccgcgttcaactatgccccacaacttattgacccaca

SEQ ID NO: 163333 - DNA, 2442 bp, Arabidopsis thaliana landsberg
atgagttccagtcagtctctttcgttcccgagcgcttctctcgttgattccagcgactaaaatcatccagacgaccttcccccatctacaaacggagagcggtttggacatcttctgaagatgatgatgtatcttcttcgagtgcctctgagcagatgacctctttcacggctcgggaagataccaatgccgatattgctcaggaattggatttgtccgatgatcccgagctgcctctcgttcggaggccccttgccccgatggctgatgaagccaggacatccaattgacgagatgtgcccgagcccttaatgccgacgataaagattgaggactttctttatttcggcccgaacgagacataagacattctgcgtcttaacgagcagaggacttttgagaaagccgagaagaagaagaggaagaagaataaaaaggcgataatgcgggatcctcctggctcaacattatgcaccgagcggtctctttcggatcttagggcccgattcggtcttggtgcagtaaccttgcgtgtgtagagccctgatgagcgagccgacaatccccctgcgggtttctatactttgtacgaggggttcttttatggttgcttcttgtggctgccagtcccaaggctggttttggagtacgtgacatcgtactagattgccctctcccagatcacgatgcggcccttgagacatctgctcgggattttgattcggagttatgaatttgaaactgaaattacgcttgctcatctaaagaattttcttgagatccggcgggttcccaaatccgaagtggatcggtattacatctctcctgctaagggtaagaaaattattgacgggttctcgagcaaggatgaatcgtataccgatcacttcttctacgtggctctcggagatgctgttcacgacgaccttctcgggacggtcctaacgagatggggaactttgggtagttttagttagcaatttatttatgtccgacgcaatttatatttttttggtttatttttctaactagtttcttttgtcgcataacgcaccctcaagttcctcgagccgattcctgacgatttcctctcgacttatcacgcgtaatcatctcggaagtgcgataggacaaaacatttttcccgggatcgagtcgaacgagccctccgtcttcttcaaggcgtttcctgtcctcccagttcaaaattttcggactatcgtactcaattattcgtcgatatgcagtcaactaaactcacttttagggaggtgtacgcgaagaagaaggaagataaagagagacgcttggcggaggagaagcgcctcgcggaggcgcgactgatttcgccgcgggcggcctctcccgatgcgactcaagaccgggacgttgctcccgaagttgcggccccgattgacccgacgcctgctgaggcttaagaggtcgatcctattgctgctgcgcctttgcccgagacgattgtcgcgctgcctgcgagcgacaaggcggcgggtaagcgcgttcagacggatgattcatcgtccaagaagaagagcaagaagaagaagggctcgagtaccgaggcgggaaaagagctccccatttttgaagatcgggtagcctctggaaacctcctcggggtgtgtgctggtcctttgcttcctcctccgaatactcttttggagtcgcggaagtatgctgaaacggcgtcccatttcctgcgggtaagtgcctattcaactttttcatttttcatcagtctggagctccaatccgtaattttctttctctgttctctaggctgtcgccttgatgaaccgaatggtgcattcggacgattcggccatgaggaataacatggaggcggccaacaggttggccgatgcagatgctcggatccaagctgtcgagcgagaaagagatgaggcgctctcctaagctgccgcggcgaagatggcgaaggaggaggccaaaaaggaggccttcgtgagcaaggcgaatgccattaagatggccgagctgaatttgagggcggactccgaggttgttcgtctcaaacgcatgctagccgaggcgagggggctccccgatagcgaagtggctcgggcttctcaaacggctaggcgcgagacctttgaggtttttatcgccaaatttaaggtcgccgagcagaaggtgtcgctcctttacgggatcaacgatcagtttatatacttatccaaggcgcgggctaatgcgcaactgatcaaggcacttgaggaaggtggagagttggcgaccgagaaagaccaggtcgaagaatggctgaaagacttcgccaatgccgaggtaaattttgccaattttgtcgccgagctgaaagaggaactcaaggctcctgttcccgaccccgctcctttaagtccgggtggtcacaaatcggtcgagacccttgctgactag

SEQ ID NO: 163334 - DNA, 946 bp, Arabidopsis thaliana landsberg
tacaggagacattcaaagccaatcatgccttggtcaaagttcacaaaggtagctctaggtctaggagctgccatagcggctgtgagatcaacaatgttcaccgttgatggtggccagagagctgttatgttccaccgattcgaagggattctagaagaaccagtaggagaagggacacatcgtaagattccgtgggtgcaaaagccgtatatcttcgacattcggaccaaaccctacaaaatcaataccgactctggaactaaggatcttcagatggtcaacctcacacttcgtgttatgtttcgccctgatgtaagttcccgcgaatatccaaaaaatttcactaataagattttgtgatatatatgtaaaataatatataactgttttccgtgggttcgtgttaggtttcgcgcctctcgtatatataccaaaacttaggtctcgactatggtgaaaaggtcctaccagcgatcgggacgaggtggttaaagcggtggtggctcagttcaacgctgacgagctcttaacagaacgtccacaggtctcagctcttatacgcgaaacgttgatcaagcgagctaaggagttcaacattgttctcgatgacgtgtcgatcactggtctctcatacggtaaagagttctcacttgcggtggagcggaagcaggtggcacagcaagaagctgagcggtccaagttcgtagtggcaaaggctgatcaggagagacgagcggctgtgattagagcagaaggagagagcgaggcggctcgggttatatcgaaagcgactgcagaggctgggatggggttgatcaagctcagaagggtcgaggcggctagagaggttgcgattacgctctctaattctcccaatgtcgtctatttgccaagtggtgggaatatgttgtttgcaatgaacggtccaagcaaagttgttgcttga

SEQ ID NO: 163335 - DNA, 851 bp, Arabidopsis thaliana landsberg
ttaagatggaacatgaagaaacacagaagaagacaggaatcagctggtcactggttcgaccatttcaaatgatctccattagccttcttagtcttcttgtccctctctctttcctcttcctttcacgtctctccgtttcctcctcctcagctccagtcaccgtctccggagtattctcccttcttcatcaggccgatgtcggaatcttatacacaatcttgtccctcatcatcgtctccactttaatccacattctctccgggaaaccagagtgctctgttctgcattcccatctatacatttgctggatcgttctcttcatcgttcaagcttgtgtcgccttcggaatcgaaggaaccatgagcacgaccatttctatcgatacagacaaaagcttttctcttgctgctcaagaaaggtgggttttggttagggttatgttctttttgggcctacacgaagtgatgctaatgtggttcagagtcgtggttaagccggtgattgacgacactgtgtttggggtttacgtggaggaggagagatggtcggagagagctgtcgtggcggtgacttttggtctaatgtggtggtggaggctaagagatgaggtagaaagtttggtggtggttgcagaggttaaacgtaaccttcagatacgtttggagggtctcgattttgtgaactggtggatgtattacatctgtgttggaattggcttggtgaagatcttcaagggttttttgtattttgtgaatatgttaattttgaccattaataggtcgagaaaatgctgtgaatcgtgtcttgttgatgatatgtgtaatattgatgatcatgtgtaagaaatttga

SEQ ID NO: 163336 - DNA, 870 bp, Arabidopsis thaliana landsberg
  unsure (1)..(870): unsure at all n locations
cccaatggttagaatatgggccttttctttatgaatttgctaaaatccacgtggacggtagagatgctacgatgcagagagcggtctatggtgagggttattacacgagatcatgacgttaacacgggaaacaggttgcttcaaaagaaatcaattcattcgtacgggcctttaatccacgcgccttcttcgcatccccacgcgcagtcgtgtgtgatgatggctaatcctccaacgttaccgatctcagaccattccggtggtggttcccaatctcagcaacccgtatcaacaccggcgtttcgcacgttcctctctcgcctctcgtcgtcaatccgccaaagcctatcgcagcggcgtccatggttagaactcgtagatcgaagcgcaatttcacgtccagagtctctcaccgatgcgtattctcggatccggaggaatctcccttacttcaaggtaaactacgtgacgatcgtctccttggtgctcgcgctctcgctcctctcccatcctttctctcttctcgntctcctatgcctcttctgcgcttggatcttcctctacctttttcgtccgtcagatcaacctttggtcgtcctcggccgtacgttttcagatcgcgagacgcttggtgttttggtaattttgacaatcgtctgcgtctttttaaccagcgttgggtctttattgacctctgctttgatgattggtttcggaatctcatgcttacacggcgcgtttagagttccggaggatcttttcttggatgatcaacaacctgctaacaccggcttattgactttccttagcggagccgtcactttcgccgcagttgccgccgcatcaactcctgcgtcaggtcgtgtttga

SEQ ID NO: 163337 - DNA, 1487 bp, Arabidopsis thaliana landsberg
actgcttggtagagtatatgaatagggatcgaaggcagatatgataagccaattacctgatcctttgatctgtcacatactttctcatcttcccataaaggaccttgttacgacacgcgtgttatccaccagatggaggagtctctggctttggcttccttgtttggaactgaattccttatacttcccagatttcaatgcctttgtgagttttggtgacaagtttttcgattccaatagggtttcatgcataaacaagttcaagttatatatttatggttatgacgttggtgtagatgacccctcttatctcacgtcatggattgatgctgcagttaagtgtaagatccaacatctacatgttcagtgtcttccagctaaatatatttatgagatgcccctaagcctttacatatgtgagacactagtctacttaaaactctgtagggtgatgttggatgatgccgagtttgtttccttaccttgtctgaagactatccatttagaatatgtttggtttcccaatgaggcaaatcttgagagatttgtatcttgctgtcctgtcttggaagagttaaagatttatggatgtgggaatgagaatgcaataaccttacggttgctctctagatcactgaagaagctgagtataaacattcttaaatctatgtgtgattttcattcagaagttgtgattgatcgctcctctactaagttatttgaaaatcaatgataacgtatcagaacgctatatagtaaacaatttggagtccaatgccaaattagatatttctctcccctttggtttgctagattttgatgaagcaagtgtttcatcgaggacagatagcatccacagttttctccgcggtattttgaaagtcagcgatatgacaatttgggtggacactttcaaggtatgtatatttcaattctagctagtatttgacattgctatcatgaaagtttctgtttctgacccacatcatatatgtatttttggttccacagctcatatgtaaatactcagaactagaatcgctgcctcggtttggttacatgtcacgcctgcatgttactctttgtatatatgatttgaaatggttaccaacatttcttgagagctgtccaaacttgaaatctctcatcttggtaatgatctactaaactcaataagattttccatctgtatatgaagttcttcattgtgttttaatcttcaggtatgtgttggtgataatgatgaaatgctttcggaggagatgattcaattcggttcttcattggtacctgagtgtttgctatcgtctctcgagtttgttgatattcgaataccgttccggggacatcttgaagtaatgaagctagtaaggtactttctagagaattcggctatcctcaagaaactctctctagatcatgacatcttcaagaaactcttcacaataccaagacgctctaccaagtgtcaagtcgtcttcatttga

SEQ ID NO: 163338 - DNA, 3195 bp, Arabidopsis thaliana landsberg
gaaaattatttcgattttagtgattgcagatatgtcatctaatcgtcgacggaacacaaatccttccacaagaacatgttcaactcatcccgaagtttcaactcctcccttagaaacaacagtgcgtgtaaatttacttttacttctattttttctaaagaaaaatatttattaaaatttgacataataaattacattgtattcactaaatttgtaaaacaaagacaagtacaaatggtcatacattcaagaaaaaacattaattcaattgtttaacgaagcaattgtcatgaataattatactattaagcatcctacttctatcggtagagaatatatggttgaaaagttcaatcaagcgtttgacatgaatataacttatgttttcttcaaaaacaagcttgatgaattcaaaaaaaagttataagagatggaagtttcttacacataaaactgacattactgttgatcctgagacatcaatgatatttgcatctgcggtatgtaagtacatataacttttttactcatcaaaatatcttttaaaattttggtataaaaatctaattgattatataattttaaggatgtaaattaacaaaaagtttctaccgaaagccgtctgagttttgggacgtgatgaaatgatgtctcgtattatatgatgtttagtcccaatcgcagcattcatctcggcaaagaagagaacaattaatcaacgagcaagcaatttatgaagaaagcgatgatgactcagacgctgacagtggtaacgtgccagcaacacaagttcccaagacacaagaagaaaaagaagtgtatcgtgtttccattattgatgatgaaacgttccaaaattctgctcttagaaaccaacaacgaattaggcctaatttgcagtcaacaggtagacgtggaagtagttcacaacgatatgggaaaagcgcgcaagtttctataggaagtggttcacgaagaagtcatagacgacaatcctttgaaacaacaatacaagacagcatcactggcttcagagaattccaacgacaaagttttcaacaacttcgtcttggtgcttttgatcaagatgattacgatgaatttaaaaaggcggaacgagtatttatcgcgctaaatcttcctaagcacactagatttcattgggcatgcattaatgcacttaaggagctagtattttggcgtaagtatttgattgatataactgcaagcaccgacgaggataaggtccaactgttagaagctatgactggtgtttcacgtaacaaccaagatgtgccaaaacagttaggttcaagccattcatttgggagtccacattcaggaggtatatcatctggaagtccatcctctgtgggtaattgggaggcaaaattcacccagtttttggggtcccatttatccatagtgggaaacaccaccaaacgttgcacaatggaaaacaccaccaaatgcacagtgggacacgccaccaaatgttccacagtggggatcatcaccaaaggctccacaatggcggcaaacagaaaatttttaacaaggtggttcaagcggaacgactccaacaaatgttcaatatggattttcagttggaagtcaaggagattgtgtaacaactgaaactccaccgatcattcaacaaacatcatcatctggtctcggtttcacaaattattttgaaactggacaaataccacaaacacctagaccaggaggtctttttaatatttggggaaccccacaagggtcaaatgcaagtcatcaaagtgatcaagcagatgaagattagttttgtggtgattgtgttttgtaatctcgcttatgcttcaaaaatatttatgtatttttgtttatgtttaaattgtatttaatacgttattgtaaaataatctatgattaataacatatagtttgtattaaaattttaggcatttcgtacatgtcagttacgatcagaagctcttaacaatctaaattacgaagaaaggatcgaattgtggaatttggaaaacgaacaatttgaagaattagtaattcaaccagctttgatatactatgatcgatattttcaaagagcaccaactcaaacagatggaggtttgggatggagaaatatttggcgtcgattacaacaagatgatgctgcatgtcttcagttattacggatgtcacttccatgtttcacaacattgtgtaatatgttgcaaacaaattatggtctacagccaacattaaatgtaagcattgaagaaagtgttgctatgtttctacggatatgtggacaatgaagttcaaagagatgttggttaaagatttggcaaaaatcaagaaactgtgcaaagaaaatttagagaagttcttacggcaactgaattattagcatgtgattatattagaactccgacaagacaagaaatttatcgaattcctgaaagacttcaggtagaccaaagatattggccatattttagtggattcgttggagctatggatggtactcatgtatgcgtaaaagtaaagcctgacttacagggaatgtattggaatcgacacgatcatgcatcattgaacatcatggcaatatgtgatttgaatatgttattcacatatatttggaatggagcaccaggttcatgctacgatacagctgttctgcaaatagcacaacaaagtgattccgagtttcctttgcctccgtcagagaagtattatctggttgattctggctacccaaacaaacaaggatttctagctccttatagatcgtcacgaaatcgagttgtgagatatcatatgtctcaattctattatggtcctcttccaaggaataaatatgaattgttcaaccaatgtcacgcatctttacgttctgttatcgagagaactttcggagtttggaagaaaaaatggagaattctttctgatttttcaagatataatgttcacattcaaaaaagagtgataatggctacaatcaaattacataattttatcagaattttaaaattttcagattcagattttgcaaatgtaatgacagaaacaaatataaacaacagagattgtgagcatgatgtaggtgacatggatgcagcatagttagcagatggagaacatatgacgcaaataaaagacaatattacaaatatgttatgggaaaatcaaaatactcgatga

SEQ ID NO: 163339 - DNA, 2025 bp, Arabidopsis thaliana landsberg
  unsure (1)..(2025): unsure at all n locations
aaaacaattcttgatgtctcaaacctttgctgtcatcttgttactactcatcttcttaacacacttagtttcatctctaattcaagacttctccttcattggcttcaaaaaagcctcaccaaatttaacgttaaacggagttgcagagatcgcccccactggagcaatcaggctcacaacagagacacagcgcgtgattggtcatgctttctactccttaccaatacggttcaagccaatcggtgtaaaccgagctctgtctttctccacgtcttttgcaatcgccatggttccagagtttgttactcttggtggccacggacttgccttcgccatcactccaactccagatctcagaggttctctttctagccagtacttaggcctgttgaattcaagcagagttaacttctctagccacttcttcgctgtggaattcgatactgtcagggatttggagtttgaggacattaatgataaccatgtaggaatcgatataaacagtatggaatcgagtatttcgactcctgctggctatttactcgctaactcaaccaaagaggagcttttccttgatggtggagagtgattcaagcttggattgattacgattcaaacaagacaagggtagatgttaaactttctccattctcagagaaaccaaagttgtctcttctctcttacgatgttgacctatcctctgtttttggagatgaaatgtatgttggattctctgcttccaccggtttgctagctagttcacattacatcttaggttggaactttaacatgagtggagaagcattttctctgtctttgccatctcttcctcggattcctagttcaatcaagaagaggaagaagaagagacagagtttgattcttggagtatctctcttgtgttcccttttgatcttcgcggttcttgtcgctgcatcgttgttcgtggtaagaaaggcgaaagatgaagacagagttgaagaatgggagcttgattttggtccgcatagattttcttacagagagctcaagaaagctactaatggttttggggacaaggagcttctcgggtctggcgggtttggtaaagtatacaaaggaaagctcccgggttcagacgaatttgtagccgtcaagagaatctctcatgagtcaagacaaggtgtacgagaatttatgtctgaggtctcaagcattggtcacctccggcataggaatcttgttcagttgctcggttggtgtcgaaggcgggatgatttgcttcttgtctatgatttcatgcctaatggaagcttagacatgtacttgttcgacgaaaaccctgaagttatcttgacttggaagcaaagattcaaaatcataaaaggggttgcttccggtttactctacctacacgaaggatgggaacaaacggttattcaccgcgatattaaagctgcaaacgttttgttggacagcgaaatgaacggacgggtaggagatttcggtcttgctaagttatatgagcatggatcggatccgggggatacaagagtggttggcacatttgggtacttagcaccagaactcacaaaatccggaaaactgacatcaagcaccgatgtttatgcgtttggagcggttttattggaagtagcttgcggaagaagacctatcgaaacaagtgcgttaccagaggagcttgtaatggttgattgggtttggtcaaggtggcaaagcggagacattagagatgttgtggacaggagattgaacggtgagtttgacgaagaggaagtggttatggtgatcaaattagggcttctatgctcaaataattcacccgaggttcgacctacaatgagacaagtagttatgtatctcgaaaagcagtttcnnnnnnnnnnnnnnnnnnnnnnnncggattttctagatgcaaatgatagtatgtgtcttgatgagcgcagcggtagtgcaggcgagtttgaagattttgtggattcagctaggttctatagcgccccgaatgaaactgctacttcgtaa

SEQ ID NO: 163340 - DNA, 1521 bp, Arabidopsis thaliana landsberg
atggcgccagacgaaaccggacaccagagaggcaaaacgaaaaacgacggagaagagagcttcggtgaggattgggagaaaagaatcgcgcgcgtgtacctcacgcacaaaggtttttcaacggatacatttaaggtagaataattgtgtgtgaatgagaactaaatgtattttgtgagtataaattatgggtcaaggaccatgtaaagacacacgcatttttgtgcaaacttactatacacattttcttacaaaaactcatagttttctctataatcgttgatctattttttaatacatttgtcctcaagaataatcattctcactaaataaataaatacttgagtgtgtgaatccgacatccacaaatatgacttcatgtcatgtgtatgattgagtataagaactaaaaccacaaccggatcttaaaagcctaaatagtgtttccttgttagaagatacaaagccaaagactcatgtggactttggttacactattaaagctttgagaagcaagaagaagcttggttaatgttttggagtcaaatatgactagatgtcatgtgtatgattaagtataaaaactagaactgcaacccaatctgaaaagcctaagtagtgtttccttgttagaagatacaaagccaaagactcatatagacttcagctacaccaacaaagctttgagaagcaagaagaagcttggttagtgttttggagtcaaatatgactttatgtcatgtgtattgataagtgtgtattttgcatgttttgagcatccatttgtcatcactttagcaccatatcatcactgttttatacaatttctcatcatttgtcatcactttgcatgtttaggatagttttgcatgcatgttgcatatttgtgttgttttaaggtgattcggagctattgacgagctaattggaagaagcggacctgatcatgcaaaaccactcgacccccaggtcgagtagacgcttcacaacctcagcagaccactcgaccccctggtcgagtagaggacatcaccacttcacctcaccactcgaccacgaggtcgaatgtcttcatctccatcacctgaccatcactcaatcacctcactcgaccctgaggtcgagtgtcttcaccaccattaccagacaaccactcgatctcaccactctaccttgaaatcgagtatcaccatcaccaccactcgactacatactcgattaagagcttcagagtctttttcattctgcactcaaccagaccgtcgagcacaaggaagaaaagaagactccagctattcacttgacctcctactcgaccacctgggtcgagtacagttcttaatccgtcccaatactgcgtcgctttaagtattagggcttcaaaatattttgctataagtagcatgtacttcacattttcgcaaacaagtttttttttctagttttattccgcagacactgtgttctaaaccttttgtaatctggatttctctttatctattcagtattcagtattcagct

SEQ ID NO: 163341 - DNA, 1635 bp, Arabidopsis thaliana landsberg
atgaccaaattctccgagccaatcagagactcccacgtggcagttctcgcgtttttccccgttggcgctcatgccggtcctctcttagccgtcactcgccgtctcgccgccgcttctccctccaccatcttttctttcttcaacaccgcaagatcaaacgcgtcgttgttctcctctgatcatcccgagaacatcaaggtccacgacgtctctgacggtgttccggagggaaccatgctccggaatccactggagatggtcgagctgtttctcgaagcggctccacgtattttccggagcgaaatcgcggcggcagagatagaggttggaaagaaagtgacatgcatgctaacagatgccttcttctggttcgcagcggacatagcggctgagctgaacgcgacttgggttgccttctgggccggcggagcaaactcactctgtgctcatctctacactgatctcatcagagaaaccatcgctgtcaaaggtttatatatattccaaccttgtgactttgtcattagacatgctattaaaggaaagttcctaaaatgggaaacaaaggttaaaagaattatgtcatttttaccaaaaaaagagacaaaaagaattatttgtatatgtcactataaaggttattcaaatttaaataaaagaaattacaagattcatatatatatatatatatatatatatatatattttttttttgataatgatatgatcctttctaatttacataagtagatgggcgtatggaggaaacattagggtgtatttctggaatggagaagatcagagttaaagatacaccagaaggagttgtgtttgggaatttagactctgttttctcgaagatgttgcaccaaatgggacttgctttgcctcgtgccactacggtttacatgaattcttttgaagaattagaccctacattgaccgataacctcagattgaaattcaaacgttacctgagaatcaaaacatcatgcgttgttattctctaattcgcaaagagaaacaccattgcatgatccacacggctgcttggcttggatcaagaagcggtccactgcttctgtagtttacattgccttcggtagagtcatgacaccgcctcctggagagcttgtagtgatagcacaaggattggaatcgagtaaagtgccttttgtttggtcgctccaagagaagaacatggttcatttaccaaaagggtttttggatgggacaagagagcaaggaatggtggtcccatgggcaccacaagtggagctgctaaaccatgaagcaatgggtgtgtttgtgtcgcatggtgggtggaactcagtgttggagagtgtatcggcaggtgtaccaatgatttgtagaccgattttcggggatcacgcactcaatgcaagatccgtggaggctgtgtgggaaattggaatgacgattagtagtggagtcttcacgaaggatggatttgaggagagtttggatcgggttttggttcaagatgatggcaagaagatgaagtttaatgccaagaagcttaaagaactagcacaagaagctgtctctacggaaggaagctcctttgagaatttcaaaggtttgttggacgaagttatgaaagtttgaagcaaa

SEQ ID NO: 163342 - DNA, 3599 bp, Arabidopsis thaliana landsberg
  unsure (1)..(3599): unsure at all n locations
ttgcgtgatggaggaatccgtgaaacggtgtagaggtttctcagatgcgagagaggatctgataagcaaattacctgattctctgataactcagatactcttgtatctcccaataaaggatattgttaggactagttctttgtccagtaggtggaaaagtctctggcttttgattcctcggttggatttggactctgaagagttccaagattacaatgcctttgtgggttttatgaacaagttcatagatttctctggggaagaaaaaatatgcttggacaagcttaagctaagtagtcggaagactgtgaatgatctgccttgtgtcacgcggtggatagactttgtggttaggcgtaaacttaaacatcttgatgttgagtgtcttatgaatcgtaagtttttagaggagatgcctttaagtctttatgtttgtgacacactggtaaatctaagactccatcgggtattgttgggtaagtttgaggctgtgtctttaccttgtttaaagactatgcgtttagaagaaaatgtatatgccaatgatgtggttctagagtcacttatctcgtcttgcccagttctcaaagatttgatcattcttagaatgtttgaagataacgtaaaggtcctacgagtgcactctctgacactaaccagtcttaatatagattttaattttggggagggtgatgacttcgttgatggttttgataaaaaagtctcaggggttttgattgatgcacctcgactcaagtatttgaaattccaagatgatctatcggggagtaaaatcataaccaattcgggctccttagccaaggtcaatgttgtttatgtcttcaatgagaatgattgtgctgatgttgttgacataccaagacgaaatatggtccgtaatttcttaaccggtatctcgggagttagcgatatgaagatctctcagcattttgtggaggtatacatatacatatcatgtagctagcgttcttcatgaaagttttgcttaactcatgtttcttttttttggtgtgcagtttctctattattacaaggacttcgacccactgccacagttttgcaacctttcccgtttaaaagccgagatttctttatactttctggaaattctgccaaccattcttgagagctgtcccaatctgaaatcactcgtcatggtgttggtgatgactcgcacaacccttgagcttttactcaaaatactttgaggaatgtgttatcttatattcattcctttttgtttgtttgtttggaatgttgtctatatgtaggaattttatctgcaggaggaggatgagccaataatattctcatccgtacttggtttcgtcactcgagtctgtagagataaaaaaattcaacggaaggcctgctaaaatggaagtagcaaggtactttttagaaaactccggagttctccaaaaactttttctgcatttgaggtgttccacgcatgaagatggattttacattttaaaggatctccttgcattgcccagaggatctagcacatgtcgaatcgtagtttgttgacggcttgaaaggtggggctgtgatcagcattaagactagcaatctagcattcccagctgattacttaaattgtacttggatttctcattttgttgcactctattatgatgtctttgtgagcttttggctactagttctggatgatgttgagaattctttgtgtctcttcccttctctgaagccatctttcttgtcttatctgttgtcgtgaatgactaatgggctttgagatgaaacttttgctcttgggccttgacccatctcaatctcttgtcttgacatctctatcttcttaaaacgctctcaaaacgtcaaaacccttaaaagagtcatccctatcagttctgctcatcttctccgctagaaaactgagatcatcgtgatctgtttctgactttcgtgctacatgcgtacttacacttaagtattcgaagctgtcactgcggattcaatggaggaaacgaaagtgaaacgaacatgcctcgaacgtactgtatgttcttcaaaagctaaagaggatttgataagccagttacctgactctttgataactcagatactcttttatcttcagacaaagaaagctgttacgactagtgttttgtccaagagatggagaagtctatggctttcgactcccgggttggttttgatctctaatgactttacagattacaatgcttttgtgagctttgtggacaagttcctaggtttctctagggaacagaagttatgcttgcacaagctcaagctaagcattcgtaagggtgagaatgatcaggattgtgtcacacgttggatagattttgtggctacgcctaaacttaagcatcttgatgttgagattggtcctacgaggtgtgagtgttttgaagtgatacccttaagcctttatagctgtgagtcactcctttacttaagactcaatcatgtatgcttgggtaagtttgagtctgtttctttaccatgtctcaagacaatgagtttagaacaaaacatatatgctaacgaggcggatctagagtctcttatctcatcttgtcctgttcttgaagatttgagctttgtgagtggggcatatgataaagtaaacgttttacgagtgcaatctcagacattaaccagtctcaatatagaaggttgtgttgagtnnnnnnnnnnnnnnnnnnnnnnnnnnnngattgatgcccctagactcaagtatttgaatcttgaagctgatcaatatgagagtaaaaccataagaaactctggctctttaaccaaggtcaatcttcttggctattttcatatgaagaataatgatgatgatgatgaagtcgacttacaaaagcgagatatagtacataattttttcaccagtatatcgggagtcagcgatatgaaaatctcttcccaagcgttcgcggtatatgcatgttttactaattcataaatcataatcatataatatataatgctctttcatgaatttttatttgctcaccaatttcctttttttctgtgagtagttgttcatcatgaataccatgccattttcacccaaattttgcaacttgtcctgtttggaagtagaacttttcttaccctcactggaaacgctgccaacgtttcttgaaagctttccaaatctcaagtccctaatcttggtaatgtctttcactcgttagaggtttcatacagttgagaattaagactctcgtttgtgcctcatgtaacaccaatatcatttgttttgtgttttacagggtttacgttattggactccgaaaaaagaattaagactctcgtttgtgcctcggtgtttgctgtcatcgctcgaatttgtagagataaaaaacgaacacccacctgatgatggtgtactgaaagttgcaaggtactttgtagagaactctgtaaatctcaagaaacttgctctacatttgcattttttctttctagaaggaaatccagctgtcttaaacgatctccttgcattgccgagacgatctagcatgtgtcagatcgaagtttttaatgtgcaaagtggtcgttctcgtgga

SEQ ID NO: 163343 - DNA, 3942 bp, Arabidopsis thaliana landsberg
atggtgggcaattataattatagcggcggtaatggcggtttttatcgggagtggatgtacaagaggtaaaacaaaatgacgggaaatctgacaccagaatacatcacaggggtgaaggaattcatgaactttgctaaaagccagcctatcgttcaaagtaatcggtgtaaatttcactgtccttgtagtgtatgcaaaaatgaaaaacatatcgtctcgggtagaagagttagtagtcatttatttagtcaaagatttatgcctgattattatgtatggtataagcattgggaagaattcaatatggatgtaggaacgagtaattacgtagatagaacttatctaagcgatcagaatcatgaatatatgggtaatactgtagaagatccatatgtggatatggtgaatgatgcatttgcttataatgcggggtttgatgaaaactataatgaggatggtagttataagaatgtcgaagaaccggtacgtaaccattcacagaaattttatgatttgttagacggtgcaaacactccattatacgatggttgtcgtgaaggccagtcacaattatcgttagcttctcgagtcatgcaaaataaggcggatcataatatgagtgaaaggtgtgtggattcggtttgtcaaatgttgataaattttttaccagaaggaaaccaagccactagttcgcattaccagaccgagaaattgatgcgcaatttaggccttccatatcatacaattgatgtttgtcaaaacaattgtatgcttttctggaaagaagacaaaaaggaagatcaatgtcggttctgtggtgcacaaagatggaagccaatggattatggcgttcaaagacaaagaaccaaagtaccatatagtcgtatgtggtatctacctattggttaccgattgaagagaatttatcagagccataagacggaagcggctatgcgatggcatgccgagcataaatcaaaggagggagaaatgaatcatccttcagatgcggcagagtggagatatttccaatcgttatatcccctgtttgccgaagaaccccgtaacgtttatctcggattgtgtattgatgggttcaatccatttggcatgtctcgtaatcattcgttatggcctatgatcctcactccatataacttaccccctggtatgtgcatgaatacagaatacttgtttcttacaattttgaattctgggccaaatcatcctcgaggtagtctcgatgtcttcctccaacctcttattgaggagctaaaagagttgtggtttattggaatcgatgcatacgatgtgtcaatgaatcataattttaatctaaaagcagtgctgatgtggaccataagcgactttctggcgtatagcatgttatcaggatggagcacacacggtaaactgtcttgtccaatttgcatggaaagtactaactctttttatctacctaatggaaggaagacatgctggtttgattgtcaccgaagatttcttcctcatggtcatccattacggaggaacaaaaaagacttccagaagggaaaagatgcttctaaagagtatccacctgagtctttaaccggtgagcaagtattttacgagcggttgcatggtgttaatccaccaaaaaccaaagatgttgggggtaacggtcatgaaaagaagatgccaggctatgggaaggaacataattggcacaaagaaagcatattatgggagctttcttagtggaaggacctaaatctccgacataatattgatgtgatgcatacagagaaaacattttggacaacatcatgaatactctgatgagtgtgaagggtaaatcaaaaaacaacataatgtcaagattggatatagaacaagtttgttctcggccaagcttacatgtggatagtaagggtaaagctccattcccttcatatacattaacagaagaagccaaatcaagtttattgagatgtgtgaaacatgcggtgaaattccctgatggttagtcgtcagatttggctagttgtgttgatatggagaatggaaagttctcaggaatgaagagtcatgactgctatgtttttatggagcgactacttccatttatctttgccaaactcctagatcggaatgttcaccttgcggtatcaggtaaaataagaatatataatttactctttatattatatatatatatatatatatatattaccttgagatgatgcaatttatattaacctaagatgatgcaatttatatttttttgcaggggttggcgcattttttagggacttatgttcgagaactttgcagaaaattcgcgttcaaattcttaagcttaacattgttttgatcatatgcaacttagaaaatatctttccaccatcattttttgatgttatggagcacctgcctatacatctccccaacaaagcagaattgggcggtcctgtccaatataggtggatgtatcctttgagaagtttttcaaaaagtttaaaggaaaagcaaaaagcaaaagatatgcggctggatcaattgttgagtcatatatcaatgacgagatttcttctttctcaaagcactactttgccgataatatacaaacaaaatcaaggtaattaaatatatagtaattaaacatctttacaaaagcaagttttcaaattaacaaccatgaattacctcatttggatcaggttaacgagattcgatgaaagtaaagttcctgtatatcatgttcctggagtacctaacatatttatgcacgtcggtcgtccaagtggtgaaatgcatgtagaatggctttcagagaaagactaccaaagcgcacatgcatatgttttaagaaattgtgactattttaaaccatttgagaggtatttttaatcactattaattcgtttgtaaattttcactaagatcactttgatttattttctttgtttgtaaatatagtatgttcgaggattgtctttctgcgaaatatccatgcttgcccgaaaaagaactctacgcgagaagagctgaagaatatcatttatgggttaaagaatatgtaagtctacatcaatttcttgcattcgaaaagtgagaatcatatttatatgtattaatattatttatctattatgtaggtaacatattggaacactacttctctatttcctacttgggttcaagaaattgtgcaaggacctttgaacaaggtcaaaacttggccaatgtatttcacaagaggatatatgtttcatacgcaaaatcacggcgctggacaaaagacatgtaactatggggtatgtgttaaaggtgaaaattacgctgattcatctgatgaattggatttctacggtaccttaactgatatcatagagctcgagtatgagggcattgtcaatttaaggatcacactttttaagtgtaagtggtatgatccaaagattgggagaggcactcggcgaaaccatggtggcgttgtagatgttctatctacgaggaaatacaataaatacgagccatttattcttggtacgtaattaagtatacttaaaatttctaattcattaataaatactattgtatatatttttgttgatatatgtataacatgtttgaacagcatctcaagcagatcaagtttgttatattccatatccatatacaaagaaaccaaagaacatttggctcagtgttttaaaggtcaatccaaggggaaacatttctggacaatatgaaaatactgatccgacattgttgcaaaccgaggatgatgaagctgttttgcagactacaattgaagatcttgtaatagactatccggtagcagacgtaaccccaatcatcctcaattacgatattggagatgctgaaccagaagatgaattccgatgtaatttatcgtcctcggatgaagatgaaatagaagacgaagatgtataa

SEQ ID NO: 163344 - DNA, 4363 bp, Arabidopsis thaliana landsberg
atgatcactgcctcggagatcatgtcgaagaaccatcccgaaccgggcctcaaaacacctcggagatcacatcgaggaaccatcctgaggcgacatcgagaattcctcggagcatcaccacaaaagggttccccgacccggtctcgaagtgcctcggatggcaacctggaaaatcatcccgaggcgggtttcaagatgcctcgggagtgcatcattcgactagcgcggtccaagccgctcagccacgacccgagggtcagctcaacccggctcggaagaacttcggatcgggtcagaaaaccttcaaaaaaagatattagagaatctccgaggatgtcaccgaatatagaagttcctaaaatcttcggaagataaagaaaatctccttcgccaactctaagataaagaaaaatcttccgagaatatcgcgagaagcgatctgccaaagccatatataaagcacctctaaggacaaacaaaggggacacgcacaaaaacgctctcaacctcaggctatcaaaatcgctctgattttgaaggcaaaacacttattttccatatttctaaacacttgtaggatcaaatcctcattatttcaataatataaccaagaacaccgtccgcggtaatcagcaattctaatgttctttgagaatctcacaaagatccgttctttgaaggaacccttagtacaatttctattgtgcgagttttgactctcacaatttggcgctagaaggaggggaaatattgagatttctcttactcccagaacacagaaccaaccaaccaatccacaatggtcaacaatcacatccccgataacactgttgacgcagagggaaacccgatccctccaaacgagacagacgttcctgaagccaccgctcccgctgtcctagcagaattaagaagtatgatggctcaacttcagaagaaggtaaacgatcaagaacaggcgaatcggtctttggcgcaacaactcgaagcagctacctcccaaggacagatcaggactactcgtttcggcgcaaggcatctttaggatcgatgaacagcagcagatctcaacccaacacggctcgtgttccacacacctggcaacacgacgaggcccatccgcagaaccgcgccggaaattggaagagaccgagcagtgccgacaactttgggaaatcgaatcacgacgaaccgaacagaatccgcagctccctcttccccgagcagatttgccgaggccgatcagatcgaggtctcagacgatgaagattcagaagagaacgttcgatgggctgaggaatgcgccaaagaacaagataagcactatcaagctctccctagccaaagcagaaaacgagatgaagcttgtaagatcccaaatgcataatgcagtctcctcggcccaaacatcgacctcattctggaggagtcccacaacactcctttcacacgcaggatctccaacgcaataatctcagatccagggaagcaaaggttcgaatacttcaatggatcctccaacccgaaaggacattggaagtcattcataatctctgtggcccgagccaaatttagatccaacgaaagagacgccggtctctgtcatctgttcgtcgaacacttggaagggccatccctggactggttctcgagactcgaaggaaattctgtggatagttttcaggagctatcgactcttttcctaaagcactattcggtgctaatcgatcccggcacgtcagacgctgatctatggtcactatctcaacagcctaatgagccacttcgagatttcctcgcaaaattccgatccaccctagccaaagtagaaggaatcaacgatgtggcggctctttcggctctaaagaaagcactgtggtataaatccgaatttcgaaaggaactaaacttgtccaaaccaccgacaatccgagacgccctgcaccgagcctcggattacgtatcccatgaagaagagatggagctactagctagcagacacgaaccgaccaagcaaacgcctcgcagcgataaacctcagaccggcgctccgaaccacaagaaaggcgcccaaggtggtacgttcgttcaccatgaaggacgaaatttctctggagcccataattaccaggtcgatacaccccgaggcaagccacccgaggccgagggcgaggccgcggacgaggacgcggtcgagaatcttacacatggacaaaggatcaacccgcagggaaagagcaagaatattgcgagttgcacaagagttacggccatcacacgtccagatgtcgtagcctcggagcgagattggcagcaaaattcctggccggagaaattggtggaggcttgaccatcgaggacttagaggcagaaaagggttaaaccgagcaggtcaacgctgtggccaatcccgagcagaccgcccccgcggcgaaccccgaaggacctaaaagaggccggggtaatcgcgaaacagacgaccatgaaccagaagctgctcggggaaggatcttcacaattttaggggattcagctttctgtcaagatacggcagcatcaatcaaggcatatcaaaggaaagccgacgcgaatcataattggacgcggccatttaatggaccaaatgacgaagtaacctttcacgaaagcgataccaacggtttagaccgtcgacacaacgatcccttagtcattacattaaccatcggtgatttcaacgtcgaacgagtcctagtcgacacgggaagcacactggacatcattttccttacaactctgcgagaaatgaagatcgatatgacgcaaatcgtgctgactccacgacctgtgctcgggttctcaggtgaaaccacaatgactctcggaaccatcaaactaccagtccgagccaaaggagtaacaaaaattgtcgatttttctattaccgaccaaccaaccgtgtacaacgcgattatcggcaccccatggctaaatcagttccgagctgtcgcctcaacgtatcacctatgcctaaaatttcccacaaacgacggcgtgaaaaccatctggggaaaccagaaaaatgctcgcatctgcttcatggcagcgcacaagcttaggaaccccgtcactgaatcgacggccgacgcaaatcataaaaaggccaaacttggccgagccgaagaaaagtcgatctctgagcagttatagcaattaaagatcgaagaagctcgggaatctacgataccaactcccgatccggtcatctcaatttgccttgacgacgcaaagcccgagcgatgcgtagaaatcgacggagatctagaagaagaactaacagctgaactcaccactttcctcaaagaaaacgtcaatactttcgcctggtccctagaggatttgcccggagtaagtgttaacatcgtatcacacgagctcaacatcgatccaacttttaaacccatcaagcagaagaggagaaaattaggtcgggaacgagcagaagccgtaaaagccgaggtagaaaaattattgaagatcggatccatcaccgaggtgaaataccccgactggatcgcaaacccagtcgtagtaaaaaagaaaaacggaaaatggagagtttgcgtagatttcacagacttaaacaaagtttgcccaaaggacagcttcccattaccacacatcgatcgcctcgtggaatcaacttctggaaacaagctactgtcgtttatggatgctttcgctggttacaactagatcatgatgaaccccgaagatcaagaaaaaaccgctttttacacagagcaaggaattttttgctaccgagtgatgcccttcggactcaagaacgccggggcgacctatcaacgcttcgtcaacaaaattttcgccttacagatcggaaagacaatggaagtctacatcgacgacatgttggtgaaatccattgtagagaaagatcacataacccatttgcgcaaatgtttcaagcagcttaacctctacaatgtcaaactcaatcctgcaaagtgtcgctttggagtaagatccggcgagttcctcgggtacttggtcacacaccgcggcatcgaggcgaatccaaagcaaatcgaggcattgttgggaatggcgtcgcctcagaacaagcgagaagtgcagcgcctaaccggaagagttgcggcacttaaccgcttcatctctcgatcaacagacaaatgcttagccttttacgatgtgcttcggggaaacaaaaagttcgaatggacaacccgatgcgaagaagcttttcaggaactcaagaagtaccgagcaactccacccatcctcgccaaacccgtaatcggagagccactatatttgtatattgccgtatcagatactgcag

SEQ ID NO: 163345 - DNA, 3241 bp, Arabidopsis thaliana landsberg
atgcagcttgcaggtattagaataaacgacaacaatgcagcagcgagagagaggtgtcggagctcgaactcgttggagaagaaggagctcgattcttttttcttgattcttttttttttttactctttttttcctttttaattttaattcaatttcaattattcataagggtaaaatagtattctcactaatcattaaaagagaaagggatatgtagagtagaaagagatttaagaagttttgttgtgtttaaagggaacatgagagctattcaaaaacgaaacaattttttttcaatggtttcctttattttctacttcaaaaataatattttaagtatattctatctctattttataattaattatcaataataccctttactttctaaacatatgaattttgacccatttatttgatttcatttagaatacattattataaaaaaatcacattacataacatttatttaaagtacgttgtttttccatttaatataaattatttttcgtattttagtttgattggattaaataaaaataaatagtttgtttaataaaaaaatatacttgttataattttaaggaccattttgtaaataaaaaagtttatcttcaaaatatgaagatgtgaatagtataccttcaaatacgaagatatactattcaaatcttcattttgaagataaaaatgaagcactattggagaagatttcttcatttttcacttcaaaatgaaggaaaaggtgaaaaatgaagtaccattggagatggtctcacgaccatagcaagtcttataaattcacagtgagtcttgtttacgtcgggtttgtaaaaatatttttccaaataacgatttacatcgggtttggctatcggggatgattttacatgatattgaaaatttctctatattttatctatctctaatctctatgatgaattcatgaatggtgatacaatgagactaaatgagaatgaaaaagtttatagttgtatgtaaacactgatcatctttgtaatagggttatgcataatattgtgactaaaaggcaacagagaatcttcaagtacatcgggaactaggtcgatcatcgaattaggtcattcatcggattaggtcatttaggggtttacttcttagagatggttaacattttggtattaataagtgaaccggtcggattcggttcgaatttaaacaaaaccgagatattgaatgagaagccctagtcttatcacattcttctacttgttgaaatgcgaatagtcattagggattcagtttcgttgaaatgcaattttagcactggaaaagcataagccggatttcaccgacaatggaacaagggtaaatttctttgtttcgtttgtgttttttttgtctccgtttaatgggtctggactccggcgcattctctgtttcgtttgtgtttgtgtttctttgtctccttttcaagtctcttgatagacagatccgtgattccattcttgcaaagaggaaacgaaaggttttcaattccctcatgcgagtatggctgaagtatgactagacaacttttctactcatatatttcttctcgtagattcttccttgtttttatcttttttgccaaggatcaatctgttgtattacaaactttgtagcttctttctacaagcaatttcatttgatgacaattcacatatttagcaaaaaaaaaaaaaaaagctcgaaaccctaactttaactcttgtcttcttttggttttgctagtgaaagtttgcgaattagagttgttatgggtaaagacaggatcagtgagttgcctgatgctttgcttataaagatactgtcttttcttccaacaaagattgtcgtagccacgagtgttttttctaaacaatggaggcctctttggaagttggtgccaaatctcgagttcgattttacgtttgatccaaagtatcaccaaacattttcagagaatctttacaggtctttgacttcacatgaagcttcggttctagaaagtttgcaattgaatttcacacgtggaattgatggtttgaatattggaatgtggattgcaactgcatatgtacgtcatgttcgtaaattggtattggttagtttcggtgatgtgcgtgataagagggctagatttcggagtgctttgtttaacttcaatgatacacttgacattttggaaatccaggattatattcttttagaccttccttctccggtttgcttgaagtcccttagagagctgcgcctatacgaagtacacttcaaagacgaagcatctgtttgcaaccttttatgcggctgccctagtcttgaagttttgtccgtgcatagagaacgcaatgtcgatgtggagacttttactattgtggtgccatcattacagagactaaccatatatgatttttgcataggaggaggtaagggaggctatgtgataaatgctccttctttgaaatacttgaacattgtagggttcgaggggcttgatttttgtttgattgagaatgcgccagagctggtggaggcagaaatcagtgacgtttctcatatagctaatgagaacattctagaatctctaacttcagtgaaacgtctgtccttagaattctcacctttgatggtagattttcttgcaattgattagattagtttttatcatattgtttatatataaatgtactaattatgactcatgcacagattaagtttcctactggtagtatcttctatcagctggtatatttggagcttctgacacatgaagcagagtgtttgaatatacttactataatgcttaatagttctcctaaaccgcaacctctaaagctcctcagtgtaagcaatgtaaatatagagcttggttttcgttttggtgatctacaataacatagattacatgtgttttcctctcactgatcagccaaagtatcaaagttggaaaaaagatattgttgggaaatggaataagccaaagattgtaccggaatgtttgttattccatcttgagacgttcatgtggaaaggatacgaatggaaacgaaacgatgagaccgaagtggcgaaatacatcctaagtaacacaaatcgtttgaagagagcaactttcttctcaaaacccatcagttctgaagagagagttaaaatggttaagaatttgaatagtgtggtcagggctttgaattcatgtcagcttctcattaaatgaaaaagtatataaatagtgagagag

SEQ ID NO: 163346 - DNA, 1955 bp, Arabidopsis thaliana landsberg
atggatcctaaggggaagggaatcgtgatcaacgataaggagaaggagtccttcgtcaacgagcccaaagatgacaagcctaccgacaccggctcgggccatagacggaaggaagggaagaagaagaagacaaggcgcatcaaggagatcatctactacgacgacagcgacgaatcttcctcttcccaaaaggacaacaacgacaacgactatgacaaacaaaagacggttaactcaaacttttcttttgattattcgcgtattccgcatagctcaaatgctcatttgctccccattccacttggcaagcctcctcactttgatggagaggactacggattttggagtcacaaaatgcgtactcacctattttctctccatccaagcatttgggagattgtggaaagtggaatgaaatttgattgctcggatagcccttcgtttattaatgaacagatccataaaaatgcacaagctactactgtgttgctagcctctttgtgcagggacgagtatcacaaggtgagcggcttggacaatgccaagcagatttgggacaccctcaagatctctcatgaggggaatgatgtcaccttactcaccaagatggagttggtggagggcgagctcggacgattcgcgatgataaggggcgaggagcgacacaaacatacaaccggctcaagatccttatcaacaaaataaggagctacggaagcacgcgatggacggatcacgacgtcgtccgcctaatgctaaggtcatttaccgttcttgatcctcacttggtaaacaatattcgtgaaaatcctaggtacatcaagatgtcgcccaaagaaattcttggaaaatttgtaagcgggcgaatgatgatcaaagaggcaaggtacgtggacgacgcgttgaatggcccaatccatgagcctcaacccattgctctcaaggcaacaaggagcaaggaggcgctacccagcaaggtggcgcaaattgaggcggtcggtcttaatgatgaagagatggccctcgtcatcaaaagattcaagacggcgcttaagggtcgcaagggacagccaagcaagactaagaccaagggaaagcgatcatgcttcaaatgcggtaagcttggtcattttattgctaattgtcccgataatgatagtgaccaggaacaagggaacaagagggaaaagaagaaggcttacaagaaggctaaggacgaggcacaccttggaaaggagtgggacttggattgttcgtcgtccgactccgacaacgaaggactcgccaccaccgccttcaacaagtcagccctcttcccaaacgagcatcacacctgcctcatggcaagggaaaagaaggtaagcactcataatactagtacttacgcttcctcaagtgatgaagaatctagtgatgatgaaatagactattcatgtttattcaagggcctagatagaactaaggttgataagattaatgaattaattgatgcattgaatgataagaataggttattagaaaagcaagaggatcttttgtatgaagaacatgataagtttatagaggcacaaaaatcccttgttttagaaattaaaagaaatgaaatgctttcttgtgaattgactacatgccatgactctatttctagcttaaagagcataaatgatgatttgaatgctaagttagaaatagctagtaaatcaacatcttgtgtagaacatgttgcaacttgtaataggtgtaaagattttgacattgatgcttgtagtgaacacctagtttcgatttccaaacttaatgatgaattggctagtcttaatgctcaacttaagactagcaagagcgaatttgataagctaaaatttgcgagggatgcctacacgattggtagacacccctcaattaaggatggacttggcttcaagagggaagccaagaacttaacaagccataag

SEQ ID NO: 163347 - DNA, 3466 bp, Arabidopsis thaliana landsberg
gtcaagctcaatcccgagaagtgtgtcttcggggtaccccggggcatgctcttggggttcatcgtctccgagcgggacatcgaagccaacccggagaagatcgcagccatcaccagcatgggacccatcaaggacttaaaaggcgtgcagagggtcatgggatgtctcgcggccctgagcccgttcatctcacgcctcggcgaaagaggcctgcctctgtaccgcctcttaaggaagaccgagtgcttcgcttggacccctgaggccgaggaagctctcgggaacctgaaggcgctcctcacaaaggcgcctatcttggtgcccccagctgccggagaagccctcctgatctacgtcgccgcaaccactcaggtggttagcgccgcgattgtggtcgagaggcaagaagaggggcatgcattgcccgttcagaggccagtctacttcgtcagcgaggtactgtccgagaccaagatccgctacccacaagttcagaagctgctgtacgcggtgatcctgacgcggcggaagtgcgacactacttcgagtctcatccggtaactgtggtgtcatccttccccctgggggagatcatccagtgccgagaggctcgggtagaatcgcgaagtgggcggtggaaatcatgggcgaaacgatctcgttcgcccctcggaaggccatcaagtcccaagtgttggcggatttcgtggccgaatgggtcgacacccagctgccaacgaccccgatccaaccggagctctggaccatgtttttcgacgggtcgctgatgaagacgggggccggcgtgggcctgctcttcatctcgcccctcggaaagcacttgcgctacgtgctgcgcctccatttcccggcgtccaacaatgtgtccgagtacgaagctctggtcaacggattgcggatcgccatcgagctaggggtcagacgcctcgacgcccgcggtgattcgcagctcgtcatcgaccaagtcatgaagaactcccactgccgcgacccgaagatggaggcctactgcgacgaggttcggcgcctggaagacaagttcttcgggctcgagctcaaccacatcgctcggcgctacaacgaaaccgcagacgagctggctaagatagcctcggggcgaacaacagtccccccggacgtcttctcccgggatctgcatcaaccctccgtcaagaccgacgacgcgcccgagcctaaggaggcctcggctcagcccgaggcaccctcggccgccgagggtgaggcactgcgcgtcgaggaagagcggaatggggtcacgcctaatcgaaactggcagaccccgtacctgcaatatctccatctaggagagctacccctcgacagagccgaagctcggcgatctcgcggcgcgccaagtcgttcgtcttactgggggacgagaaggagctctaccatcgcaaccccttaggcatccttcaacgatgcatatccatcaccgaaggtcaggagctattgcaagaaatacactcgggggttgcgaccatcacgcagcgcctcgagcccttgtcgggaatgctttccggcaaggcttctactggccaacgcggtggccgacgccactagaattgtccgcacctgcgaagggtgtcaattctatgcgaagcagacccacctgcccgctcaggctctgcagacaatacccatcacttggcccttcgctgtatggggtctggacctcgtcggtcccttgcagaaggcgcccgggggctacacgcacctgctggtcgccatcgacaaattctccaagtggatcgaggtccgacctctgaacagcatcaggtccgagcaggcggtggcgttcttcaccaacatcatccatcgcttcggggtcccgaactccatcatcaccgacaacggcacccagttcaccggcagaaagttcttggacttctgcgaggatcaccacatcagggtggattgggccgccgtggctcatcccatgtcgaatgggcaagtagagcgtgccaacggcatgattctacaagtgctcaagcctcggatttacaacgacctcaacaagttcggcaagcgatggatgaaggaactcccctcggtggtctggagcctgaggacaacaccgagccgagccacgggcttcacgccgttcttcctggtccatgggccgaggccgtcttgcccactgacctggagtacggctccccgaggacgagggcctacaacgatcaaagcaaccaagctagccgagaagaatcgctggaccagctggaggaagctcgggacagggccttactacactcggcgcggtaccaatagtccctgcgacgctaccacgcccgaggggtccggtccagagacctccaggtgggcgacctggtgcttcggctgcgacaagacgctcgagggaggcacaacgtcacgcccccctgggaagggccattcgtcatcgctaaagttctgaagcccggaacatacaagctggccaacaatcaaggcgagatctatggcaacgcttggaacatcaaacagctacgtcgcttctacccttaagatgtttccaagttgttcatatacctcgcacctacgcaaagtttagtcgtcaaggaagggtcggcctagcctcggcaaagcccgaccctccctcgggggctaaaaggggggagaccccctctgcgtcgaatttttcctcgaaaaaggatctctttttagcaggattactttcgtgcttcttgactacttcggaaagcggatcctggaaacgacggagtacacggaagcagccaaggctgaccgagccgagggactcctacgcctccgggatacggatacctcactcatcaccttctgcgataagtaactcgcgttcggataaagcgactccatggaccgaacaagtcttcacgttcggaagctctcctgccgaagcagtccttcaagctttctcgactaagtcggggacagggcctcatggacgggtgaaagtacgcgtaagccgcaaggccgaccgagccgagggattcccacgcctctgggatacggatacctcactcgtcccttccgcgaaaagcaactctcgctcacacaaacatccctgttaccgacagagtccagatgctcgaaacaagaggaaaaaagacgcagcttcgcaagcgcggcgagggtgtgtttttctggcctcggcggccgcagaaagcacacgctacaagatgatctgatcctgcaggctcgggtcttcacgctgaagggagccgtagcaccctcggcatcgacgacgtcttcagcaaagcccgacccagcctcgggcggcgccgcggtccagggactcctccgggaatccggcccgagcaggcggctcaaccggttacccctggggcctcggtcaaccggcttccaagggcgccagcccgacccgaggcctcgactgatcgacttcagcgtcggctccgctgacggacaacacggctag

SEQ ID NO: 163348 - DNA, 2130 bp, Arabidopsis thaliana landsberg
agattagccgaaagatggcagatatctatttgaaagaaacaccagtaccaacagtgttgtatgacaaggacgccccaccatatttcgacgatccgggagaagaaggtaaaacatgttaggatctaattcaaagtttagaaactaaattttagtgtagcatgtgtttttctggtatacttatggatatattattgttatgaatcttgtagctatcatgtagctactattctatttcgctagtaaaaggttaacatgtaacaaaaactttatctaacaaatggtacacctattgcagattacttgcagcgagccctgaaagatgccgactacgaaggagatgatctattcattggcagattgttaaaaaataaagaagattgtgcgactaaactgacaatccatgcaatacggagaaagtttcatttcatttacgccaaatcttgcccaaatattctcctggccgtgtgcgtcagccatactttcccatggcgtgtttatgcaccaaaactggagaacagtgagcgttttgaggcaaaatgtgcaacccaacaacacacttgtagtgtagacgccaagggagactttcacaagcaggcgtctatagctgtgattgggaaattaaggagaacaaagtacttgggagttggtaggggccaaggccaaatgagttgaggaagataatccgtaatgaattcaacctaaatgtctcgtactggaaggcgtggaggactcgagaaatagctatggacaatgccatgggttctgctatgggaagctacactttgattcagccttatctgagggggcgatacggcgggtgcttaattgatgcaagcgctcaggatgccaatttccaagttttccctattgcgtttggaatagtgaacagtgagaatgacgatgcttggacatggttcatggagaggctaacagacgctataccagatgatccaaatttggtctttgtttcagaaagacacttgtcaatatatgcaagcatacgcatggtaaattatcgacataaaagtaatgttatcttcataatttacaattatgaaaatgataacactagtatcttgctaatagttagattagttgatacatgattatctattattaataaaccctaacacatggtcatgcatctccaggtctatcacatgtcttcacacgccgcttgcgttgtccatcttaagagaaattttttcttaatattcaagtcagagggtttgagtttttggtagccagtgcggcccgggcttaccggctaaacgacttcaatcgcatatttgctgagattagagcaatgcacggaccgtgtgctgattaccttacatgcattgggttcaaacattggacgcgctcacattttgtgggagataggtacaacttcatgacgagcaacatagcggagtcgctaaacaatgtcttaacaatggcaagggattatccagtaatatcactactagagactcttcgaacaactcttattacatggttttctcttaggcgagaagctgcacagctcgaggggaatcattaacctccaaaggtgaatgagatggtcacagaaaattttgaaaaggggcaggttatgttgtacttaagattggtgatgcattttatgaagtgcgagacaaagaagattcggcatttacggtaaacctttgggagcgaacatgcacctgcagagaatttcagctccttacaattccatgttcccatgctatagaagccgcgatcaaggaaaggatatgtgtagagacgatggttggcgtctaccacatagttccatatctgagattggcgtacaaaggtgttatcatgcctatcgccgacatggttacactggcaccttccccaaatgatgtcggaggcgggaagcttgcaccaccttaggtgcgtaggccacctggatggccacagaaaagaagacttttctcaaggggagagttcaaggtaatgttcgctataatgtttattagtaacgttatcgttaacggatattcgtcatgtaaagaattcgatctaacgaaattattattctttcagagagaacatctaccaaacgttgctgaagatgcagggcgatatggcataatagcgcaacatgtagaggacccatcgcgg

SEQ ID NO: 163349 - DNA, 1833 bp, Arabidopsis thaliana landsberg
  unsure (1)..(1833): unsure at all n locations
gattatcatgagtaattatagtgacggttcgtcaatggatcctgactatcacatggatgaggctgagtcttcatcttcaaggccagaaagagaacagagagaatatgataacttcaggagaaaagctgaggtagctcgagggaagagagcaatgacaaagaggtatgtgctgatagatgaggatctggaggacgagtatatgcctacgcatactcgcagagccacacaacttctgcacaaacttgatgtattgcctgccgaggagtatatcaggctcttcaggcttaaggatgttctacagtacaagatatccttgctcgactactctggcacaacttggattactggaggatgttcagcacctgtaccagagttgtcaccaggacactctgatggcttacctatatgtagcctatgaagaagaaacgattcagttcctctccacactgcaagtggagctttaccaaggtatgacctctgatgatttggaatgcgaaggattgagattcttgcgattctctgtgtatggtaaggattataggctatcaatcaaacgcttggaaggattgtttggtttcccaagtggaacgggtactaagcccaagtatgacagagaagagttgaaagacttatggatcaccattggcagctctgtaccgctaaattcttctagatccaagagcactcagatacgcactccggtcatcaggtacttccagcgttctatagccaatgttctctactccctagagataacagggactgttaccaattctgatatggaaatgattgctatggctctcaaaggcactcttcaccaaaccaagaatggtatgtctcttcaaggtgaaaccaatgacacacctctctttgtacttcttctgatccacatgtgtggataaaagagatgggctgttagcaataaccacaagagagcacgaggcgctctttgcataggaggtgttgtgacaccgattccggtcgcttgtagagtcccaatcacatctgatggacttgagccacgggcaatggatatcgagcatctacatcactgagagttcctggagtttgcaatggttggcgacaggcaccgtttcaagtttgagcattctatagataagaaagccaacatccttcttcccagtcttgaggttacacgcataatagagggagataacattgattttaagcctgagcttgggaacctctactacgaggacgctcagccattggatgaggatgttcttatagaaaaagctacggaggatgggatggatgaagacagagaagtggagtttgaaactagcatgtatcattttagtgagctcacatgaacaacagcaagctgcagaagtggtgcaagaaacatgataagttactcgccaagtgcttcaagactatcaagtttctgacagataagctgagctgctcctcctccaccactgctattccacagggacaacctcctctggagatgccatcgaggagatttgatgagcctgagcacaggcctgagnnnnnnnnnnnnnnnnnntcacatgtcctggctaggcattcatcattcgagtcccgggagcacaagagaagaaggaaggctacactcactcgatctagcagcagatcacgcctcattcactcgaggagatcactcgaccgcggtgctggccgcagcagaaggagagaggtcgagtatcctcagagcggtgctggccgccacagagctgatgaggtcgagtacccccagggggagctgagacacaacagggagattcgtctatggcctgggagcaatcacaggcagccattgacgagcaactacgttcattcttcgac

SEQ ID NO: 163350 - DNA, 1053 bp, Arabidopsis thaliana landsberg
ttgtactatccgactctctctcttgtctccaagagcttccgatctctactagcttcaccggacctttacaaagcccgatcactcttaggccacactgagagttgtctctacgtgtgctttcattttgattctggccctaacacacattggttcactctctgtcggaaacctgacggaaccctaaccaatgacaccatcaagaagtcaagcgggtatgttttggctagagtctcaaatttacattctcctcctttgcactcttctagtctggtagctgttggttctaatatctataacattgcaggatccagctacctagagtcctcttcaagcgtctccattcttgattgtcggtctcacacgtggcgcgaggctccaagcttgcgtgaggggctatgttctgtttcttctagtgtccttgatcgaaagatatacgtagcaggaagttgcttggatggtgattcttacacctataagaattcgttcgaggtgtttgacactgaaacacaattttgggatcctgataccattacttgcagcaagacggaaggcgatttttacggatgcggaaccgcatgcattgacggagagttccatgtggtgcctgtaggtcaaaaaagagaggcggttgcttacaattccaaggaaggtagatgggacatggttggccaacaaatggatcattataagttttcagcttcttgcgagatacagaatgttttgtactcttgtactcatggagtgttcagatggtatgacactaacgcaatgatgtggagagatttgaagggtttggtaggactacctatgttcggttctggtgccaatgttaagttggctgattatggaggaaaattaacggttttgtgggaggaggagttgccttctcgtggacctgatagcggctataagaagatgattcggtgtgcagagattgcgcttgaaaggcgcaaaagttgtgaaatttgggggattgttgagtggtttggtgatgtgcttaccgaacctgtaggatatgttgttttggagaaggttcttgatgttactctttga

SEQ ID NO: 163351 - DNA, 2549 bp, Arabidopsis thaliana landsberg
aatcaccagttgcaacaccaccaaccgcaacatcaccaataaaaactccaccacccgcaaaaccacctgttgcaactccacccatcgcaaaatcgccaattgcaacaccgcctactgcgactcccctagttgcaactcctcctattgaaaaaccaccggttgcaacaccacccactacaacaccgcccaccgcaactccacctattgcaaaaccaccagttgaaacaccaccaatagcaactccacctaccgcaaagccaccaatctcaactcctcctatttcaaaaccaccagttgcaacaccaccagccgcaacaccacctataacaactccaacaccagtaaaaccgcctgttgcaactccaccgttagcaattccacccgtcgcaaaacccccagttgtaacaccgcccaccgcaacaccacctattgcaactcctcctattgcaaaatcaccggttgcaacaccgcccaccgcgacaccaccagttgcaactcctcctattgcaaaaccaccagttgcaacaccaccaactacaacgccgcccaccgcaactccacctgttgcaaaaccaccggttgcaacaccaccaatagcaactccacctaccgcaaagccaccaatctcaactcctcctatttcaaaatcaccagttgcaacaccaccagccgcaacaccacctatcacaactccaccacccgcaaaacctcctgttgcaactccaccaatagcaactccacccatcgcaaaaccgccagttgcaacaccgcccaccgcaacaccaccaattgcaacttctcctgttgcaaaaccaccagttgcaataccacctataaaaactccaccacccgcaaaaccgcctgttgcaattccaccaatagcaactccacccgtcgcaaaaccgccagttgcaacaccgcccaccgcaactccacctattgcaactcctcctattgcaacaccaccggttgtaacaccgcccaccgcaactccaccagttgcaactcctcctattgcaaaacctccaacgacaacaccgcccaccgcaactccacctgttgcaatgccaccaatagcaactccacctaccgcaaaaccgcctgttgcaactccacctatagcaaatccacctgtagaaaaaccgccggttgcaacaccgccaatcgcaaaaccgcccactgtactgccacctattgcaaaaccaccagttgaaacatcgcccaccgcaacacctccaaccgcaattccacctgttgcaactcctcctgttgtaaaaccaccggttgctacacctcccattacaaaaccaccggttgcaacaccaccagtgacaaattcacctaccgcaatgccaccaatcgtaacgccggctactgtagtaactcctcctattgtaaaatcaccgatcgcaactccacctgtttctactcctcctatcgcaaagccacctatcgcaacaccgcctgttgcaactacgcccattgcaaaaccaccaattgcaacaccacccaccgtaaatccacctgttgcaaatcctcctatcgcaaagtcacctattgcaaagccaccaattgcaacaccccccaccgcaatgccaccaatagcaactccacctatcggtaagccgcctgttgcaaccccgcccatggcaaagccaccagttgcaagtccaccaattgcaacacctccaatcataaaaccaccagtcgcaactcctccaatcacaaaaccgccggttgcaactccaccagtagcaactcctcctatcgcaaagccaccagtcgcaacgtcgcctattgaaactccgcccgtggcaaaaccaccagttacaactccacctgtagcaactcctcccatcgtaaaaccacctattgtgacaccgcctattgcaactccacccatcgcaaagtcaccaatcgcgccgccgcctattggtactcctcctattgcaaaaccaccagttgcgacaccaccaaccgcaactccacctgttgctacttctcctatagcaaaaccacctgttgcaacgccgccacctgcaactccgcctgttgcaaaaccaccggttgcaacaccacccaccgtaactccacctgttgcaactcctccaatcgcaaagccacccggcgcacggccacccgttgccacaccacccgtagcaactccacctatcgctaagtcgcctgttgcaaccccacctatgacaaagccacctgttgcaagttcaccaattgcaactcctccaatcgcaaagccacccatcgcaacgccacctacaactatgccgaaaacttgcccaattgacacgttgaagctaggctcgtgtgttgaccttcttggaggtttggttcacattggaattgggaaaagcgccaaggaaaagtgttgtccagttgttgaaggtttagttgatctagacgcagccgtttgtttatgtaccactattaaagctaaacttctcaacatagacgtcattctccccatagctcttgaagttctccttaattgtggaaaaaatccaccacctggcttcaaatgtcccgcctga

SEQ ID NO: 163352 - DNA, 2253 bp, Arabidopsis thaliana landsberg
ttttaaggtaattgaaagaataataacacatatatttatatattatgatccaattcttaaaataaaactgggaagagtgaatttacagtagtaatttcaaatctattttccacagctaaatgagaagatcatatacgattgtgtggatatatataaacaaccctcgttaagtcatccacttctccaaaaccataaaattcaggtatccattcatcaaaaacgaatattttcatacatgttttctgtgtttttcccaactttgtttatttttacatttgctttatagttagaatatatttgaagaatttgatatgtctatatacgtataatattctatttccttaaattttgagcaagattactcttttctattttattggttttgcatataacaagcaattgatttatttgactcagaaaatcattataccgcatgacaaaccatccaatgaatgtttttcattattagttagtattttttttttgtcaaacattattatcagttagtattagttttaattttcttatagagtctaatatacatcgtctaatgttaaaaagtaattttttattaagtaaaagttaattacataagtttaatactaactcaatatatacattttgtggaaatgaattttgaaattttcaagaaagattttttttcctgtataaaaaacataattagagttgattgtttcaattaacttttaaagttacatttcttgtggtttgtgcaaacttttttcgataatatctaatatgttttagtaaccacatcacgtatttatcgcgtataattctataattttgaatagatgaaaccatctttttcgatctctaaaccaaaaagtcaagttaaaaataaaattgagggtaaaaagatcatcgaatgtccaaatggaacggttcctatattaagaaatacaaaagaatatgtcgcaagagcccaatattgggagaaaaagcatttcaacccgcataccgtcggaagtcatgggacacatgtaaacaaaatacttgaattaattacttgagttacaaatgtgtatatttggaaaatatgtatgatatattttttttggaaatttgaagtatgctggagttaaatcacaaggtgatggtccttatcatgggttggcagcttatatgagtgtgcatgatttgaatattagtagggaccaaacttcatatgctagcatttttgttggtagtggagacaacaagaaaattaattttattcaaacccggttggacggtaaattttatgttgatgttattaaatttatatatatatatatatatatttatatatattggttttaaaaataggttacattactatgacttacaggtgaatccaagtttatttggtgatggacgtacatggagttttggggtttggaaggtacatctagatacaaatacttctttatctcgtttcccatgaaatgctaaatattctcggaattttcttttgtaaatactaaatatatacccttttgattgcaaaataatttatctatagggaaataatttgacacttagtatgtgttttacgcttctatcttttaatgtacattacattttactattttttcaattatcatatggaatatattaatatattaagattaaatattggcagggtgccaatggaactggttgttataatacaatatgtccgggttttgttcaagtgtcaaaaactgatcttttaagtgcaccttttccatatccacacaaaggacaagaaagagctgtttatgctagcattgtacaggtaatatacatacattacattttagtagcaaatatgttatgttggtaaatcaaatttgacatgtaggtctttttaactatatattgaaggaaaaagatgtaggaaattggtgggtaaccgatgtaagatatgacagaccagatgtgcatattggttattggccaaaagaactatttgatcttataggtaatagtgtagacatggttggagttgcaggagcagtccaggcttctccttctggtataagtccaccaatgggtaatggtcaactaccaagtgaagatgaaaataagtctgcacacgttaaaggcgtccaaatagtacattctgattttaaatatagtaagaaactgaagttagaaaaactattggacgacaacaaatgttatggcttaaaagatggaaagaagcagttttttaaagaatccaatttgttcacatatggtggacctgggggtaactcttgtggaatc

SEQ ID NO: 163353 - DNA, 1844 bp, Arabidopsis thaliana landsberg
gttagacagagtatatgccgtatattcttggaggtctcaccatagccgacattgtcaagtttattcccagattatggaaaaagtcgcagtcttgttccaagaactttccaaacccacattgaatcaatgctgagtgagagtcttttcaaatctctcggacatttggccagccacggtcatttgcacgacgctttcaaaacgttttctcttcttcgtcttcaatcttcttctgcagtttcagatgacctcgttttgcattccgcggcttcccttttatccgcttgcgttgatgttcgtgcatttttagcaggggtgcaagttcacgctcactgtatttcgtcgggtgtcgaatatcactctgtgttagtcccaaagctggttaccttttactctgctttcaatctccacaatgaagctcaatcgattattgagaactctgacattttgcatcccttaccttggaatgtgctcattgcttcgtatgccaagaacgagctttttgaggaggttattgctgcttacaagagaatggtgagcaagggaatccgacccgatgccttcacttatccgtctgttcttaaggcttgtggtgaaacacttgacgttgcctttggaagggtggttcatggttccatcgaggttagctcttacaagtccagcttgtatgtttgtaatgcattgatctctatgtataaaaggtttagaaatatgggtattgctcggaggttgtttgatcgaatgtttgaaagggatgctgtctcatggaatgcagtgataaactgttatgcttcggaaggcatgtggagtgaagcgtttgagcttttcgataaaatgtggttttcaggtgttgaggtcagtgtcataacttggaatattatttctggaggttgtttgcaaacaggaaattatgtaggagctttgggtttgatctctaggatgagaaattttcctacgagcttagatcctgtggctatgattattggtttgaaggcttgctctctcataggagcaatacgattgggaaaagagattcacggtcttgctattcacagttcttatgatgggattgacaatgttcgaaacacgttgatcacaatgtactcaaaatgcaaagaccttaggcacgccttaatagtgtttcaacagactgaagaaaatagtttgtgtacttggaactctatcatttccagttatgcgcagctgaacaaatcagaagaagcctctcacctgctgagggagatgttggttgctggctttcagccaaattccattacacttgcaagcattctccctctttgtgctcggattgcaaacctgcaacatggaaaagagtttcattgctacatcctgaggcgcaagtgcttcaaggactatacaatgctgtggaactcccttgttgatgtttatgcaaaatcgggaaagattgtacctgcaaagcaagtatctgatttgatgagcaaaagagacgaagtaacatacacttccttgatagatggatacggaaatcaaggtgaagggggagtagccttggccctgttcaaggagatgatcagatctggtattaaacctgaccatgtaaccgtggttgcagttctatcagcctgcagtcattccaagttagtccatgaaggtgaaaggctgtttatgaagatgcagtgtgagtatggtatacgtccttgtcttcaacatttttcttgtatggttgatctctatggcagagcaggtttcctagcgaaagccaaagacataattcacaatatgccatataagccatccggtgccacgtgggctaccctactgaacgcgtgtcacatccatgggaacacacagattggtaaatgggc

SEQ ID NO: 163354 - DNA, 6707 bp, Arabidopsis thaliana landsberg
  unsure (1)..(6707): unsure at all n locations
atgaagggtataaaaaatgaccaacggtggtggtggtatgagttccggcgaaggtttccggcgacggagctccgacgagggttttccggcaagggagttccggtggtgggtttccggcgatggaattccggcaaaaattccggcgagagttttccggcaaagaagttcaggtggtgattttccgacgacgtagttccggcgagggttttccggcgagggagtgccggcggtgatttttccggtgagggagttccggcggtggtttccggcgagggagttccggcggtggtttccggcgagggagttccagcggtgatttttccggtgagggagttctggcggtggattccggcgagggagttccggcggtggtttccggcgagggagttccggcggtggtttccggcgagggagttcggtatcatttacccttcaccgtcactccacaccactcttcgattggtataatcttcactcatatttcatttaccaatggaggagaaagtaaagagggctctcaaaagtcttcgtttttggcgattaatgccaaaggggagaaatattaagcccaaagcaaaaggaccgcaccaccaaacttcaaaaattttcgaaaatgatgatttatgtttgtcttttcaattggtatcttatgatagaaatttcttcaattgatatgatattttcaattggtatatttaaagatggaatttcaaaactagtatctaagtataagttccaattggtatctattaaaaccctcttgaaaactaagaggagaattttattcagggggagttttgtttagtcaaaggaaaagcatttgaaacagggggagaaatttcaaatcttgaaaatgctttgtgcaatcttattcatatacctttgactatttgcaaaagagtttgaaaaagatttccacaaggatttgcaaaaacaaaacaagtggtgcaagcgtggtccaaaatgttaaataagaaagaaacaatccatgcatatcttgtaagtagttatagtggctcaattccaagcaacctttacacttacattatgcaaactagttcaattatgcacttctatatttgctttggtttgtgttggcatcaatcaccaaaaagggggagattgaaagggaattaggcttacacctagttcctaaataattttggtggttgaattgcccaacacaaatctttggactaactagtttgctctagtgtataagttatacaggtgtcaaaggttcacacttagccaataaaaagaccaagtgttgggttcaacaaaaatgcaaaggagcagccaaaggctactctggtctggcgcaccggactgtccggtgccgaccggactatccggtgcaccagaggactccagctcaaactcgccaccttcgggaatttccagaggcgactccgctataattcaccggactgtccggtgtacaccgacagtgtccgtgcgccaagggaggtcggcctccggaactcgtcagcttcgggaaactccaacggctagtccgctaaaattcaccggactgtccggtgtgcaccggactgttcggtgcaactccggagcaacggctatctccgcgccaacggctctctaccgtgcatttaatgcgcgctctcgcgacngagtgtcaggcacgcccactccggcacaccggacaaggaacagtgcatgtccggtgtgcaccggacacccaggcgggccacaagtcagaagttccaacggctagaatccaacggcagtggtgacgtggcaggtgggcacggactgtccggtgtgcaccggactgtccggtgcgccatcgaaccgcggcatccggaactcttcactctcgggaattctcggaagccggcgcgctataattcaccggactgtccggtgcaccaccggactgtccggtgcgccaaggaagcgcggtctccggaactcgccagcttcgggaaacgcgtggcagccgctccgctataattcaccggactgtccggtgtagcaccggactgtccggtgtgccagcggagcaacgactaactgcgccaacggtcgtctgtaaaagtctacagtgaacagtgaacagtgcaactgcgcgcgcagaagtcagagcaggcgccagatggcgcaccagacagtgaacaggagttgtccggtgcaccaccggactatccggtggcccacatgtcagaagctccaacggtcagaaccctaacggccgtgatgacgtggcaggggcaccggactgtccggtgtggcaccggactgtccggtgcgccatcgagcagacagcctcccaacggccacttttggtggttggggctataaataccccaaccaccccaccattcattgcatccaagttttccacctctcaactactacaagagctctagcattcaattctagacacaccaaagagatcaaatcctctccaattccactcaagcctttagtgactagcgagagagatttgtcgtgttcttttgagctcttgcgcttggatcgccttctttctttctcacttgttcttgtgatcaaaactccattgtaatcaaggcaagaggcaccaattgtgtggtggccttgcggggaagttttgttcccggctttgatttgagaagagaagctcacatcgtccgagggaccatttgagagagggaaggattgaaagagacccggcctttgtggcctcctcaacggggagtaggtttgcgagaaccgaacctcggtaaaacaaatgcgcgtgtcacactcttcatcttgcttgcgatttgttttgcgccctctctcgcggactcatttatatttctaacgctaacccggcttgtagttgtgtttgtatttgtaaatttcagtttcgccctattcacccccccccctctaggcaactatcaattggtatcagagcccggtgcttcattagagcctaaccgctcgaagtgatgtcgggagatcacgccaagaaggagatggagaccggcgaaaagcccactacaagcaacgggagcacttcatcggaagagtcccgcaccaaacggagggagaagaagaagagctcttccaacaaagggaaggagaagaaatcttcttctcaccacaaagagaagaaggaaaaatcttcttcccacaagccgcatcggagtggggacaaacaaaagaggatgaggaaagtggtctactacgagaccgacacttcatcaacatcgacctccggctccgacgcgccctccgtaacttctaaacgccaagagcgtaagaagtttagtaagacccccctacactattctcgtatttctaaacatgcacctctactttccgtcccattaggcaaaccaccaacatttgatggtgaagattatgctaggtggagtgatttaatgcgatttcatctaacctcactccacaaaagtatatgggatgttgttgagtttggtgcacaggtaccatccgtaggggataaagattatgattaggacgaggttgcccaaatcgagcacttcaattctcaagcaacaacaatactcctcgcctctctaagtagagaagagtataacaaagtgcaagggttgaagagcgccaaggaggtttgggatgtgctcaaaaccgcacacgaaggagatgagatcacaaaaatcaccaagcgggagatgatcgaaggggagctcggtcggttccggcttcgcataggggaggagccacaaaacatgtacaaccggctcaagaccttggtgaatcaagtgtgtaacctcgggagcaccaaatgggatgaccatgaaatggtcaatgttattctaagatcacttattttttgtaatcctacgcaagttcaattaattcgtggtgatcctagatataagctaatgtctcacgaggaagtgataggaaagtttgtgagctttgagttgatgatcaaaggctccaaacaaattgtcgagcaaggcggcacctccactcctgaggtgcaacccgtcgcattcaaagcgacggaagaaaagagagaagagtctacatcaagtagtctccccatcgacgcctccaaactcgacaacgaggaaatgacgctcatcatcaaaacgtttcgccaaatcctcaagcaaaggacgggggaaggattataaaccccgctccaagaaggtttgctacaaatgtggtaagcccgatcattttattacaaaatgtccattatctagtgatagtgacaggggcgacgacaagaggggaaagaagaagaagaagagatactacaagaagaagggcggtgatgcccatgtttgtcgggagtgggactccgatgagagctccaccgactcctcctccgacgaggatgctgccaacatcgccgtcaacaagggtctcctcttcccaaacgtcgaccacaagtgtctcatggcaagagacggcaaaaagaaggtaaaatctagagcctccactaaatatgcaacatctagtgatgaggtgtgataaaaatgaggagataacttgcgcatactttttgctaaccttaacatggaacaaaaggaaaaattaaatgaactaattagtgccatccatgaaaaggatgatctcttggactcccaagaggacttcctaatcaaggagaataagaaacatgttaaggttaaaaatgcttatgctctagaagtagaaaaatgtaacaaattatctagtgagctaagcatgtgccatgacactattgccaaccttagaaatgaaaatgctaaattaattgctaaggtagattctcatgtttgcattgatcctagaaatgataatgttgatttgcttgctaggattgatgagttaaatgtttccattgctagccttagaaatgagaatgagaaactaattgctaaggctaaggattttgatgtttgcaatgctactatttccgaccttagaactgaaaatgatatgttgcatgctaaggttattgaactaaagtcttgcaaaccctctacatctaatgttgagcatatttccatttgcactagatgtagagatattaatgttgatgctatccatgatcaccttgccttaattaaaaaacaaaatgatcacatagcacaacttaatactaaaattagagagcatgacttagaaaacgaaaaatttaaatttgctagaagcatgctctataatgggagacgcccgggcattaaggacggcattggctttcaaaggggaaacaatgtcaaaattaatgcccctcctaagaacttgtctaactttgttaagggcaaggctcccatgcctcaggataacgagggttatattttataccctgccggttatcccgagagcaaaattaggagaattcactctaggaagtctcactctggccctaatcatgcttttatgtataagggtgagacatctagttctaggcaaccaacccgtgctaagttgcctagaaagaaaacttctagttgcatcaaatgatcatgacatttcatttaaaacttttgatgcatcttatgttttaactaacaaatccggcaaggtagttgccaaatatgttgggggcaagcacaagggctccaagacttgtgtttgggtacccaaagttcttgtgtctaatgccaaaggacccaaaaccatttgggtacctaaagtcaagaactaaacttgttttgtaggtttatgcatccgggggctcaagttggatactcgacagcgggtgcacaaaccacatgaccggggagaaaaggatgttctcctcatatgagaaaaacaaagatccccaacgagctatcacatttggggatggaaatcaagggttggtcaaaggtttgggtaaaattgctatttcacctgaccattccatttccaatgtttttcttgttgattcattagattacaacttgctttctgtttctcaattatgtcaaatgggctacaactgtctattcactgatgtaggtgtcactgtctttagaagaagtgatgattcaatagcatttaagggagtgttagagggtcagctatacttggtagattttgataaagctgaactcgacacttgcttaattgctaagactaacatgggttggctctggcatcgccgactagcccatgttgggatgaagaatcttcataagcttctaaagggagaacacattttaggattaacaaatgttcattttgacaaagacaggacttgtagcgcatgccaggcagggaagcaagttggagtccatcatccacacaagaacatcatgacgaccgatcggccgcttgagctactccacatggatctattcggcccgattgcttacataagcatcggcgggagtaagtattgtcttgtaatagtggatgattattctcgcttcacttgggtattctttttacaggaaaaatctcaaacccaagagaccttaaagggattcttgagacgggctcaaaatgagttcggcttaaggatcaagaaaataagaagcgacaatgggacggagttcaagaactctcaaattgaaggcttccttgaggaggagggcatcaagcatgagttctcttctccctacacacctcaacaaaatggtgtagtggagaggaagaatcgaactctattggacatggcaagaaccatgcttgatgagtacaagacaccggaccggttttgggccgaagcggtcaacaccgcctgtacgccatcaatcggttatatcttcaccgaatcctcaagaagacatcatatgaactcctaa

SEQ ID NO: 163355 - DNA, 3861 bp, Arabidopsis thaliana landsberg
tatattgaatgtattttgaattataatttggtgtttggaatctaattatcctatttaaattttaggttttggttgcatcggcatattatggaccaaaccggtgaagctagatacatgttattcgatagtcatgcaaaggaacttcttgacactactgcccctgaattgcttgatgggtcatttgatgagtataatgactttttaaaaataaactctttcattaaaatgacaacgttcatgttatagtaatctatatttttctatagatcgaagacccaactattttgcatgatgtgatcaatggtttgaaatggaagacttttcagtttctattgtgcatccaaaaggaaaacatattatgtggatatgattcattcactgttgcccgagtctacaccggtaacattgctgatgaaatcgttcaagaggactatgatgcatacgttgatccatcatcctcaatttcgatcgaacaggtttgtcaaataacattaaacaattccaatcattaatatttattgtttagagttgtcttattaaaatgtttttgtattttcatataggattcccttatgctcactaatggtgttgacttttctgatgtggatttgtcgtcaacctctactccatcatcaaaacgaaaagaagatgatgttgatggaaatgatcacacttctacaagtaggaggaagttttctaagatgaccatgtatgaggaaggctctgacgaatgatgctcaatgactacttaatgtttttgcttaaagttatggaacttttatcacttatgccacttttttgaaaaaactgatctggactgccatcagttaatctgaatgccaccgaaaatgtgatataccagttgtacccttaatgagttgattaaaaaaaaacagctaaataaagaatcgagctcgatcctccgttcagcttgttctctctcctcttcgtcgtcgtgttcttcttctttggtcgacgttcatcttcttcgtcggccaccatcgattccggccgccgccgacttgaaatccggcgtaaaagccaacgaattaggtcagtttcttctcatatttcctttgacattggtgcattgtgattttagattgggattttgaattctatataattcccagattcaatttgatagtttgatgattggtttgcaaagtaaagagtaatcgattagaggttgccgaaacgttatttgaggtgatgagcaaaggaatgtaggttgaatgtgagttgaatttgaattccgagatttcatattaaagatttggggggtttgtgtttgcaaagtttagattaaccaattagtttaacgaataggtatgtattaacattggaaatcaattgaaaggtaacgaattaggttcagtagaatcgagtgcgacgagagattgatttcaacgtatgataagagtacatgtggtataactattaaaatgtttgattggagttgaactggttgtattttcaggagcgatgaagaagaagatccacactaaggtacattttgactttggaggatactattctgaagtgaatgagtggattggtaaaaattcactatatgctatatcgtttaagacgagtagtttggagaagattagctattcgatgttagttgacaagatcatgaagaaggttgcgattgatgaagcttctgtcaagttgaaactgagttacaatctgtctaaatttaggagagagacatatattgtagatgatgaggatgtcttcatatttttaacagaatctgatgaagagagtcggattcctgttttgcatgtggaggaattaaatggtataggagttgagaggagagaggaaatttctgtaccggagcgtcgaagttcagttggtgtaaatgtaagagaggatgatgttttaaatgaagtatgtgagatggtgcatgatggatatgataatgatgtgaatgattgtgagaatgtagtaggtacggagatcgtggctgtcgaaaggccgatggaaaggccggtgaattctgttgaggaagaagatgaggatgataggattgattatgatgatattcacgatattccacgaagtgtagaagttactccgcaggttatagaatgggatgatggtacgggtattgaaattggtcaagaattttgttcaagggaggctgtgtgggaattggttaacagagctgcaaagcaagaagtttttggagtttatacaattaagtcagacccgttgagacttatgctacgatgccgccaagcttctaaagggtgtacttggtatctaagagttgcgagaactaagaaatctcatttttggagtgttagagtgcatagaaagatgcatacatgctctcggagtgttgagactacaagcaacagtatacagcgaggcacaccaagattaatagcatcggttttgcattgtgactatcccggaaatttagagaccccaactccaaaaaacattatatcgattgtaagaggaagacttggggtgcattgttcatactccactgccttaagaggcaaaatgctacatgttagtgatgtgcgagggattccggaaagaagctgcacgatgttattttcttatctttacatgttagagaaggtaaatccagggacagtaacttatgtggagttggaaggagagaaaaagttcaagtacctcttcattgcattaggcgcttgcattgaaggttttagggcaatgcggaaagtgatagttgtggatgcaactcatcttaaaactgtgtatggtgggatgttggttattgcaacagcacaagatcctaatcatcatcattatccacttgcgttaggaatcattgatagcgagaaggatgtaagttggatttggttcttagaaaagctgaaaactgtatatccggatgttcccggattggtgtttattagtgatagacatcaaagcataaagaaagctgtcaagacggtgtacccgaatgcgcttcatgctagttgtatatgacatttgtctcaaaacatgagacttcctttgaaaattaataaggatggagctgctgacaagttcagggattgtgctcatgcatatactgagagtgagttcaacaaagagtttggtcatttcccaagtatatgccctaaagctgctgactttcttaagaaagtaggaaatgagaaatggtcgaggtgccattttaaaagaggcaagtataacattgacactagtaattatgcggagtccattaatggtgtgtttagaaaagcgaggaagtatcacttgttaccaatgattgatgtgatgatttctaagttttctgaatggttcaacgtgcataggcaagattcaggttcttgttcaatcacatcacaagttgtgcctactgtggagaacatattgcacttgagatgtccagttgcagccaaattaacagtgattgagcttaacagttacaaccaagaatacaacctgattgatctcaactcggtaagttttctggtggatttgaaaatgagaagttgttcatgcaaatgttttgatatagacaagattccgtgtgtccatgctatggccgcagtaaggcacctcgcccgcaaggaagggagaaatgcgaatacaaccatctacggactctgctctgtgtattacttgatagatagttgggcattggcctattaccggacgttgtatgtagtcccacatgagtcggtttgggttcttcctgcccatattaaagagttagttgcatttccgccggaatacacaccaaaaggaccaggacgaaatcaagagaagcggtttccatccgctggtgaagcgcgaaagaggagaaaatcgcaacctggaataaacttggaggcttggctgcagcctgaggaagattaa

SEQ ID NO: 163356 - DNA, 3118 bp, Arabidopsis thaliana landsberg
  unsure (1)..(3118): unsure at all n locations
ttgcaggtttatgcatccggaagcacaagctggatcattgatagcggatgcacaaaccacatgacgggggagaagaagatgttcacttcctacatcaagaacaaggtttcccacgacacgattatatttggagatgggaatcaaggcaaggtcaaaggtttgggtaaaatagccatcactaccgagcattcaatttctaatgtgttcttagtagaatcacttggttacaatttactttctataagtcaattatgtcatatgagctataattttatttacaaatattgatgtatctgtctttagaagaagtgatggttcattagcttttaagggtgtattagacgacaaactttatttagttgattttgcaaaagaggaggccggtctagatgcatgcttaattgctaagactagcatgggctggctgtggcatcgccgcttagcacatgtggggatgaagaaccttcacaagcttctaaagggagaacacgtgataggtttgactaacgtgcacttcgaaaaagatagaccttgtgcagcttgtcaagcagggaaacaagtgggaggctctcatcacaccaaaaatgtgatgaccacttcaagacctctggagctgctgcatatggacctcttcggacccgtcgcctatctgagcataggaggaagtaagtatggtctagttattgttgatgacttttcccgcttcacttgggtgttctttttgcaggataagtctgaaacccaagggaccctcaagcgcttcctaaggagagctcaaaatgagtttgagctcaaggtgaagaagataaggagcgacaacgggtccgagttcaagaaccttctagtggaagagttccttgaggaggaagggatcaagcacgagttctccgctccctacacaccacaacaaaatggtgtggtagagaggaagaacaggacgctcatcgatatggcgaggacgatgcttggagagttcaagacccccgagtgcttttggtcggaagccgtgaacacggcttgccacgccatcaacatggtctaccttcatcgcctcctcaagaagacgtcgtatgagctgctaaccggtaacaaacccaatgtatcatactttcgtgtatttgggagtaaatgctacattctagtgaagaagggtaggaattcaaatttgctccaaagctgtagaagggtttttattaggttatgattcaaatacaaagaagtatagggtcttcaacaaatcatcaggtttggttgaagtctcnnnnnnnnnnnnnnnnnnnnnnnnnnatggctctccaagagagcaagttgttgatcttgatgatgtagatgaagaagacgttccaacggccgcgatacgcaccatggcgattggagatgtacggcctcaggaacatttggagcaagatcaaccgtcttcctcaactatgatgtatcccccaacccaagatgacgaacaggtacttcaagtggaggcgcatgatcaagggggagcacaggaggatcaagttgaagaggaagaagcacctcaggcacctccaacccaagttcgagcgacgatccaaagggatcatcccgtcgaccagatattgggtgatattagcaagggagtaactactcgctcgagattagttaatttttgtgagaattactcctttgtctcttctattgagcctttcagggtagaagaggccttgctagatccggactgggtgttggccatgcaagaggagctcaacaacttcaagcgcaatgaagtttggacactggtgcctcgtcccaagaaaaacgttgtgggaaccaagtgggtgtttcgcaacaaacaggacgagcacggggtggtgacgaggaacaaggctcgacttgtggcaaaaggttatgcccaagtcgcaggtttggactttgaggagacttttgctcctgtggctaggctagagtccattcgtattttgctagcatatgccgctcaccattctttcaggttgttccaaatggatgtgaagagcgctttcctcaacgggccaatcaaggaggaggtgtacgtggagcaacccctggcttcgaggatgaacggtaccccgacatgtgtgtaactctctaaggcgctctatggacttaagcaagccccaagagcatggtatgaatgccttagagatttctaatagctaatgctttcaaggttgggaagccgatccaactctttttacaaagacatgtgatgcagggtgatgacgcagaaattcgagatgtcgatgatgggcgagttgaactacttccttgggttccaagtgaagcaactcaaggacggcaccttcatctcccaaacgaagtacacgcaagatctgctcaagcggtttgggatgaaggacgccaagcccgcaaagactccgatggggaccgacggacacaccgacctcaacaaaggaggtaagtccgttgatcaaaaagcataccggtcaataataggttctttgctttacttatgtgctagtagaccggatattatgcttagcgtatgcatgtgtgctagatttcaatccgatcctaaggaatgtcacttagtggcggtgaagcgaattcttagatatttgattgctacgccttgcttcgggctctggtatccaaaggggtctacctttgacttagttggatactcagactccgactatgctggatgtaaggtcgataggaagagtacatcggggacgtgccaattcttaggaaggtccctggtgtcatggaattctaagaaacaaacctccgttgccctatccaccgctgaggccgagtacgttgccgcagacagtgttgcgcacaactactttggatgaggcaaaccctccgggactttggctacaatctgagcaaagtcccactcctatgtgacaatgagagtgctatccgcatggcgagaaatcctgttgagcacagccgcacaaagcacatagacatccggcatcactttttgagagaccaccagcaaaagggagatatcgaagtgtttcatgttagcaccgagaaccagctagccgatatctttaccaagcctctagatgagaagaccttttgcaggttgcgtagtgagctgaatgtcttagattcgcggaacttggattga

SEQ ID NO: 163357 - DNA, 1783 bp, Arabidopsis thaliana landsberg
  unsure (1)..(1783): unsure at all n locations
ttttctggttcttcaggtaaataatctaaaaaccttaagaatttaacgctacgacaagatcctttatcctcgtatccaagggcatatttgaaatggtctacaccatgtggnnnnnnnnnnnnnnnnnnnnnnnnnnacctttcttgccccaaatacggattccaaaccacaatcctagtagcgtctttcaaaatgcataacagcaaaccctcatagtggatgactcgatatataaagaattccttgtcaaggaaactaaactgacctttaagctctgtagatggattagcgccgtcgacgacaacgctcactaaagcaagagtgtgaggcatcaccgcaaccatcatggtcttctcttctcttgttgcagctttaccaatgtgcatcttcataaaactctcacttttagataaattgttccaacttttgcaagttaatctcattgctttcatagctctcaagggaaccctagaaagaatctcctctatcaactcccttggaagattggagatcgncgtagccattgttgggttttccgaaaaccctatttttcttttcctcaagtttcatcttgcggttaaggaaaagtatataacaattactgataccaaaaaccctaaacgaacgaagctgggccaatcgtgggcttcaagatcaataactatgagcccacacctcaatcacattgaaagtcttgagaagttttgatagacttgagtccattttcagggtatatttcgtttccgcttatgttttttccggtagagtcaatgaagcaatcgatgttttctccatcagttatatacttaagcctattcccaagagaattaaacattttagagaaacagtataaagattaaagaaaagagaacatacataacttgtatacaagtgatagttccatatatctcatcaactggttatcatatccggtttagatgtggtttactctggttagaatgtttgcttattagcgtcagttaagttaaacagcttgtatacaaaattctctttgggtcgttggagtaaatagtctacaaacctcaagaatttaacgctacgacaagatttcttattctcatatccaagagcataactgaaaatgtcctcttggtaagggcggtaagaatatatgggtttgatcataacgctagcggaaaacctctaacagactaacaccttgagttctctaagaagttcgatataccggaatctattttcagggattccatggctgcttggtttctcacttctctggtatattgtgacaaaataaagcccgatattgtttgttacacaatcgtttgttgcaaggcgtggttgttgggcagtacccgaaagtagacaagtagtttgatgagctgatcctgatgtttgttatacctataatatctatatcaatggcttatacaaggagaacgatattgaaaggagtcataacgatgatgtcttctatgaacaagctagctaggttatgagcctaatgtaattacatatttacatatatataatatattgactatggcattgtttaaatctgggacctttcgagctaagaagactctatgaaaagagacggggacgaactggaacagccacacatatgagattgtcattaatgcatttactgacctagacaaggttgtttgtgcttacggtttattcagaataggctttaagatgaacttgtttgtcaaaagttcaagaatcgaggaagttatttgcaggttatttgacaaaaggtttgaacttatagcacgtaccaagttgtagcgctatggag

SEQ ID NO: 163358 - DNA, 3334 bp, Arabidopsis thaliana landsberg
gcttaaattggtaatggtttttgcagaaagaatcttggtggacggttctgacattagcttaccaaagcttaggtgtagtctacggagatttagcaacttcaccattgtatgtctacaagagcacttttgctgaagacataacacattctgagacaaacgaagagatctttggtgttctgtctcttatcttctggacattaactttaatcccacttgttaaatacgtttttattgttcttcgtgctgatgataatggtgaaggtgggacttttgctctctactctttattatgtcgccatgctagaatcagctctttgcccaatttccagctcgctgatgaggacctttctgagtataagaaaaattccggggagaatccgatgagattaaaagttccggggtggagtttgaaaaacactctggagaagcataagtttctgcagaatatgttacttgttcttgctctgattgggacttgtatggttattggtgatggtgttctcacacctgcaatctctggtaaaagattgtttcctttttgttagatttgtgtggatttctcaagatctttagtagttgatggttttgtattatttttgggtgtgaatttgcagttttctcagcagtctctggattagaattatccatgtctaagcagcaacatcaatgtaagctctttacttcttttgatcaggatgtaaaattggaatttttagtatcactagatccccaaaatgtcaaattatgctatttttagtgttttcctctgaagtttagtccatactgtttaagatagtttaggagcaggatttgctgcatcaggtagttttagattagctattttggtctttcttttgtccacatagtcaattggctaattgcatgttaggttgaatccatgtaggatcaacaagaagcttcttaattatgtataaaataagttaattaacttttttttttggtgtggaaggtgagtctgatgcagatgcattcttataatcataagataatgaatgtggtttaggagttaataatttattaaagatataaaatctaaaggaatataaaagtcataaagcttataccttttgaaaactcaagtggtcaaagaaaaaggtagttggtttggataagaagactatcaagtcataaagttcttatgaatttgaagtaaccttctttatttgaatcattaacctgcacaattcttgcagatgtagaggtgcctgtggtctgtgccatactgatactcttgttctcgctacaacactatggaacacatcgtttaggttttgtttttgctcccattgtgcttgcatggcttctctgtataagcaccattggtgtatacaacatcttccattggaatcctcatgtttacaaagcattgtctccttattacatctacaagttcctcaagaaaactcgtaaacgcggatggatgtccctcggtggcatccttttatgcattacaggtaacaaaagagagaaagaactgttttgtttttgagtttcaaagcttttttcccataaatttgtttctgtcctgttttcgcaggctcggaagctatgtttgctgatctaggacacttcactcagttgtcaatacaggtaaagttttgtaatctttgaatattttgtgttctgttgttagctgtccctgaaacctgcatgttttttttgactccctggctgcagattgcattcacattcgctgtttacccgtcgttaatcctcgcatacatgggtcaagccgcgtatctatctaagcaccatgtcctccagagtgactaccggattggatgctatgtttctgtaccaggtatatatctactcatcatcttgttaaccagctaaaatgcaattctttgtttggcatagtttttcactagtttgtttgttgtgtacagagcaaataagatggccagttttagcaattgctatattggcagctgttgttggaagtcaggcaataatcacaggaacattctcgatcatcaagcaagtgtacttctctaggttgcttcccaaaagtcaaaatcgtacacacttcgtcgagaatgcatggtcagatatatatccctgagatcaactggactctcatgctcttgtgcttagccgtcaccgttggattccgcgacaccaaacacataagcaatgcatcaggcccagtccctgtaaccatagccataaccactaaactaaaaaatgtatgataatcaagaaactctccggttctgatttttttcttctctgtaatctgtatgcaggtttggcggttattgccgttatgctagtaacgacttgcttgatgtctttggtaatagtcttatgctggcgcaaaagctccctctacgcactagctttcattttcttcttcggaacaattgaagttctgtatttctcagcttcactcatcaaattcctcgaaggggcttgggttccagtcgcactctccttcatcttcctcctcatcatgtacgtttggcactacggaacccttaagcgttacgaatttgacgttcaaaacaaagtctcaatcaactggctcctcacacttttcggctcttcaaacctcggaattgtccgagtccatggaatcggcgtgatcaacaccgaacttgtctcgggcataccagctatcttctctcatttcatcactaacctcccggcgtttcaccaagtcgttgtcttcctctgcgtgaaatctgtccccgtcccgcatgtgaaaccggaggaacggtttctagtgggaagggttggaccgaaggagtaccggctctaccggtgtatagcccggtatggataccgcgatgtacacaaagacgatgtcgagtttgagaatgacctcatttgcagtatcgcggagtttatccgttcagataaaccattgaattactccccggacccagaaaatgaatctggaataaatgagaggctaactgtcgtcgcggcttcctcttccaatcttgaaggcgtacaaatctatgaagacgatggttctgacaaacaagaaccatcttcttcttcggaggtaatcatggtggctccttctccgagattcaagaaaagggtacggtttgtgttaccagaaagtgcgaggatcgatagatcggcggaggaggagctaacagagctcactgaggctcgtgaggcaggaatggcgtttataatgggacattcatatgtgagagcaaaatcgggatcgagtgtgatgaagaagatcgctattaactttggctacgattttcttagaagaaactcaaggggtccttgttatggtctctctactcctcacgcttctactttagaagttggtatggtttatatcgtt

SEQ ID NO: 163359 - DNA, 965 bp, Arabidopsis thaliana landsberg
  unsure (1)..(965): unsure at all n locations
ttgtcttttcttttggtaataaaagaaatatggcggcttgtttttttcaaatagttggatttagaaaaaaataatgcaagctaacacctcttgcgcgaccattcctggtttttaaattagatttcggtattaccgcaaagttttggcacgatgactggacgggtcttggtcccttaattgacttaaccgcccctcttggaccccaattcactggtttgtctcttgatgttgtggtaagagacgttgttattggttatacttggagattctccacctctataagcaagaatcatatcatcaacatgctcagaaacattctaccaaacccggtgaacatgattgagagtcagcatgatgactcttatctttggaaggctgaccatcatgctccctcaaacaccttctctgctgcaaagacttggttagctctctatacctttgctgccacagttccttggaacaaatccgtctgctttaaaggtaacttcctgaaacatgccttcatttcttgggtggtgacgtggaatcggcttcatacgcatgacaagttgaggaactgaggtttggtagttccggggatctgtctcctatgtaatcgtcatgatgagtccatggaccatttgttttttgaatgcagnnnnnnnnnnnnnnnnnnnnnnnncttcacctctagagcgagattgtctccatccacccagtttatggcttgtctcctttggcttcagtctgcttcgaggaacaagaatatttgcctcattgtgaatctcatacaccaagcctctgtgtacctcatttggcgtgaacgaaacattcggcttaattccgccaattataggtctgcttcctccattattaaggaaataaaactcaccatcaaggcaaaactagatcctttatctagggaacaacgatgtttacctcctgctttatcacttcttgctacacagttctccctctttagtaaa

SEQ ID NO: 163360 - DNA, 1336 bp, Arabidopsis thaliana landsberg
tactcagccgacgattttcttgaccgcggcgatctgatgactccagctgcgtctccaagggaaaaaatatccaaaatgtggcgtgagcttcacggtagcaacaattgggagaatcttcttgatcctctgcatccatggcttaggagagaagtaaccaaatatggagaattcgtggaatccgtttatgattcacttgatttcgatcctttatccgaattctgtggaagctctagatacaacaggaacaaactctttgaagagcttggtttaaccagacatggttacaaggtaacgaaatacatctacgcgatgtctcgtgtcgacgttcctcagtggttcttaagctcggctttgggagagacatggagcaaagattccaactggatgggctttgtagctgtgagtggagacagagagtcgttgaggattggtcggagagacattgttgtggcgtggcgtggaacggtgactcccacggaatggttcatggatcttaggacgagtatggagccgttcgattgtgaaggaaaacatggcaagaccgtggttaaggtgcaaagtgggtttttaagtatctacaactcgaaaagcgaactcacacggtacaacaaagaaagtgcatctgagcagacgatggatgaagtgaagcggctagtgaatttttttaaggatagaggcgaagaggtaagcctaaccattaccgggcatagcctcggaggtgcgctggcgcttatgaacgcttacgaggcggctagagatgttccagcgttatctggtaacatttcagtgatctcgtttggtgcgccgagggtaggtaacttggcattcaaggaaaagctaaacagtttaggagttaaggtgttacgtgtggtgaacaagcaagacattgtacctaagctacctggtatcgtgttcaacaaggtacttaacaaacttaatccgataacttcaaggctcaattgggtctacaggcatgtcggaacgcagcttaaactcgatgtcttcagttcgccttacgtaaaacgtgattcagacttagggagggctcataatctagaggtgtatctccatgttttggatggcttccaccgcaagaaatctgggtttagggttaacgctaggagagacgttgcttcggtgaacaagagcacagatatgttgttggatcatctaagaatacctgagttttggtaccaagtggcacataagggtctgatccttaacaaacagactggccggtgggtgaagcctgtccgtgcacctgaagacattccctctccgttaccgaccggaccaaaacctatttatagcttatgagaaataaatttattttcca

SEQ ID NO: 163361 - DNA, 2505 bp, Arabidopsis thaliana landsberg
  unsure (1)..(2505): unsure at all n locations
atgaccaacaatcaggtccccgctaacacagtggacatggagggaaacccgattcctccagtccagacaaacactcctgaggttgcgactcccgcagtcctagcagaaatgaaaagcatgatggcacaacttcagaagaaggtggactatcatgaacaagcgaaccggtctttggcccagcagctcgaggcggctacctcccaagggcagatcatgaccacccgctctaacgcgcgacattttcatgatcggcaagtagcggcagacctcaatccaacgaggctcgtgatcaatacgcctgataacacgacgaggcaattccgatgaactgtgccagcgctcaatggaatccgagcaaaaccaacagctttgggagagccgaacgcgacaaaccaagtgaaggaaaccgatccgcagtttcctattccttgagccgaggctgccaagggctgaggaatatgataggaacaagaaataaacgccatcaaactctccctaaccaaggaaaaaaccgagatgaagcttgttcgatcgcagctgcatagcgcagtctcctctgcaccaaacatcgatcgcattctagaagaatcccacaacacaccgttcacacacaagatctccaacgcgataatctcagatccaggaaaactaagaatcgagtacttcaatcgtcttccgacccgaaaggacatttaaagtcgttcatcatctctgtggcccgagtcaaattcagaccagaagaaagagatgctggtctctgtcacctgttcgtcgagcacttgaaagggccaaccctggattggttctcgagactcgaaggaaattctgtggacagttttcaggagctatcgacgctcttcctgaagcaatattcggtgctaatcgatcccggcacatcagacgccgatctatggtcactatctcggcagcctaatgagccacttcgnnnnnnnnnnnnnnnnnnnngatccaccctagccaaagtagaaggaatcaacgacgtggcgactctctcggctctgaaaaaagcgctgtggtacaagtccgaatttcgaaaggagttaaacttgtccaaaccacaaacaatccagatgccttgcaccgagcctcggattacatttcccatgaggtagaaatggaactactatcaaaaagtcacgagccgcctaagcaaacgcctcgcagcgataaatcccaactcagcgctcgaactacaaaaagggcgctcaaggcatgacattcgttcaccatgaaggacgaaatttctccggagcccacaattgccaagccgatacaccccgaggtcaaggacgaggccgcggtcgatggtgcggacgagaatcctacaccagaacgaaggatcaaaccgcaggaaacgagcagaaatattgtgagttgcataagagttacggccatcatacttccagatgtggtagcctcggagcaaagttggctgcaaaattcctagcaggagagatcggtggagctttaaccatcgaagacttggaagcggaaaagggtaaaaccgagcaggtcaatgctgtggccaatcccgagcaggcggcccccgcagcaaacttcgaaggacccaaaagaggtcgaggtaatcgcgaagcagacgacgatgagccagaagctgctcgggggaggatcttcacaattttaggagattcggctttctgtcaagacacggcggcatcaatcaaagcttatcaaaggaaagccgacgcgaatcataactggacgcggccatttaacagaccaaatgacgaagtaacttttcacgaaagcgataccaacggtttagaccgtccgcacagcgatcctttagtcattacgctgaccatcagtgatttccatgtcgaaggagtcctagtcgacacgggaagcatactggacatcatttttcttacgactctacaagaaatgaagatcggcatgatgcaaattgtaccaactccgcgccctaagctcggattctctggggaaaccactatgactctcgggaccatcaagttaccagtccgagccaaaggggtaacaaaaattgtcgatttctctgttaccgaccagccgaccgtttacaactcaattatcggcacaccatggttaaatcaattctgagctgtcgcttcaacatatcatctctgcctgaaatttcccacgagcaacggcgtgaaaaccatctgggaaattagaaaaatgctcgaatctgcttcatggcagcacacaagctaaggaacccgtcactgaatcaactgccgacgcgaatcataagaaagctaagcttggcggagctgaagagaaagtaatttccgagcagttatagcagctaaagatcgaggaggctcgggaatccacaagaccaatccccaattcagtaatctctatctgccttgatgacgaaaaactcgagcggtgcgtggaaatcggtggagacctacgagaagaattaccaactgaactcaccgctttcctcagagaaaacgtcaatacattcgcatg

SEQ ID NO: 163362 - DNA, 1362 bp, Arabidopsis thaliana landsberg
tcttcgatgaatgtgaagattgataagttttctggaagaaacagtttcagtctctggcaaattaagatgcaagccctgttaaaacaacaaggcttgtgggcgccgctgtctaatgacagtaaagggaagagcgatgctgctgagatggatgtcatggacaagaaggcacactccacaatcatgttgtgtcttgaagacgaagtcatcattgaggtttcaagagaaaccacttctgccaatctgtgaaagaagttagagaatttgtatatgacaaagtctctacagaacaagctgcttctaaaacgacgtctgtttgcattaaggatgcaagaaggtacgccactcaatgatcacttagatcagttaaattcagtattactagagctgcgtaatattgatgttaaagttgaagatgaagatgctgccttgcttctgttggtatctttaccactatcatatgagaactttgtggaatcattcatagtgaataaagttacagtaactttggaagaagtcagatctgcgcttcacagcagagtgttgcgtcatcaggcggctggtacagttacagattatcaagcctcaagactagtagccagtggcagtagtgggctgggacacggtaagaagaacaaaagcagaaatggtttttctaaaggtcctaagccagatgatatctgtaattactgtaaggagaaagggcattggaaatcagactgtcccaagaggaagcaacaaggatatgctgctgtagcagaagatgacactaagtctgaacatgatgttgctcttgtagctgctggaaacgcccacaactctgatgtgtgggttcttgatacaggagcatcatatcatatgtgtccaaggagagagtggttctcaacttatgcacaggtagaaaacggctgcatcaagatggcagacagttatgtcagtcaggttactggaatcggttctatacagatcagaacacatgatgacagattttgcacattgaacgatgtcagacatgttccgtcgatggagaagaatttgatatcactgagtctgcttgatagtagaggtctgaaatactctagtggagatggaattttgcaggtctgtcaaggttctgatgtgattctgaagggtgtcataagtggtactctatatatactacacgggttcacagttacagtttcagcgaatgttgcatcagcagagattcacaaggaggatatgactaagctatggcatatgagacttggtcatatgagtgaaagagggatgcaaattttgtcacaagaagatcttaaatgttgtcagaagatcaagaggttgcaaacagtaaatggtccagagtttagttgatcggagttcaac

SEQ ID NO: 163363 - DNA, 663 bp, Arabidopsis thaliana landsberg
atggtgtcaacaaatccccctgttcttccaatttccaccaccgcaacagacaccaccaatcagcctccgattgtaaccgctgtggtggaatcgcaacctccagtcgtccgtgcatttgtcaacggtgtgaccgagacggtctgtggtggtctatctcgtagccgtccgtggtcagagctcctcgatcgatccgctttcacaaagcctgactctctttccgaggccgggacgcgattccggaaaaattcctcttatttcagggtgaattacgtttgcattgtcgctctgatccttggtttctctcttctcgcccacccattctctctcatcctcctcctatgtctcgccgcttcctggctcttcctctacctcttccgtccatcagatcgtcctcttatcctcttcggccgatctttctccgaatacgaaactctcggtggcctaatcctctccacgatcgcagtgatcttcttcacaagcgtcggatctgtattgatatccgctctcatgatcggaatagcaacaatctgtgtccatggcgcctttagagctcccgatgatctcttcctcgacgaacaagatcatgccgcctccggattcctctcattcatcggtgttcccgcgatcccctctgtagcaccctatgcctcctcagcggcttcc

SEQ ID NO: 163364 - DNA, 597 bp, Arabidopsis thaliana landsberg
atggtaacaatgatgagacctactctccttatacttctcttttccacctttctcccacaaatcctcaccgttgatccaccactcccaccatccaacggctccgatttcatccgtttggcctgcaacaccacactctacccggacctttgcttctccactctctcctcttttgccaactccatccaaaatgactcaaaccgcctcgcgcgcgtagccatctccctcactctccacaacactctccagcttctctcttacctccaaaacgcttataaccgcgaccacccaacccccgtccttagagactgcttcgagaatcttaaagatgccgttgacggtatgagaggctccatgaaacagatgaaggagcttgtctccgcgtctggctcgatcgagtcatttaggttccagatgagtaatgtcaagacttggcttagtgcagctcttactgatgagtatacttgtacggacgggttcaaagacgtccacgaagacgactctatcaaagatgacgtctgctctcgagtcgatgacgtcaagaagcttactagcaatgcgctggctttagttaaccgctatgccgacgagtcaataata

SEQ ID NO: 163365 - DNA, 1593 bp, Arabidopsis thaliana landsberg
ttaccacaacacaaacacgacgagactccaccggagtttctttgtcccatcaccggattcctcatgtctgaccctgttgttgtctcttccggtcaaaccttcgaacgtgtctgtgttcaagtctgtcgcgacctcaactttatccccaaactcaacgacgacgaagaatctctacccgatttctccaacatcatccctaacctaaacatgaaatcaacaatcgatacttggtgcgacaccgtcggcgtctcacgtcctcagccacctgattactccaccgtcgagagaattttacggcaacagatgcctccaccggacgtcgagattcgtgtctccgagcaagagcttctcagagctgtagctcaccgagctccgatgataattcaccacgctgattctgaactcatgggaaggagagatttcaacaactccacgacctcttctgatgaatctgtaatcgttgctcacagtccattcactcctcttcctttaacaactagacccgcttgcttctctccatctccatcatcttcttcctccgaaatcgaaaccctaacgcaccacactttcttctctaattctacttccaccgccacagaagaggacgaagtgatttacaacaagcttaagagcagtgagatttttgatcaagagcaaggtttgattatgatgaggaagatgactcgtactaatgatgaagctagggtttcgctttgttctcctcggattctttctttgttgaagaatatgattgtttcgagatacagtttagtgcagacgaacgcgttagcgtcgcttgtgaatctgtctttggataagaagaacaaattgacgattgttcggttaggatttgttccgattttgatcgatgttctgaagtcggggtctagagaagctcaagaacacgcagctggaacaatctttagtctttctcttgaagatgataataaaatgcctattggagttttaggagcgcttcagccattgcttcacgcgttacgtgcagctgagagtgatcggacgcggcatgattcggctctcgcgctttaccatttgacgttgaatcagacgaatcgatcaaagctcgttaggcttggagcggtaccagcgcttttctcgatggttaggtccggtgaatcggcgagcagggcattgttggtgatctgtaatttagcgtgttgtagtgaaggaagatcggcgatgcttgatgcgaatgcggttgcgattcttgtagggaagttaagggaggagtggacggaggagccgacagagacccggtcatcgtcatcggctcgtgagaattgcgtagcggcgttgttcgcattgagccacgagagtcttcgattcaaaggactagcgaaggaggcgagagcagtggaagtgttgaaggaagtggaagagagaggaacagagagagctagagagaaagcaaagaagattcttcagctgatgagagaaagagtgccggaggatgatgaagaagatggcgaagaatcaattgattgggaccgagttatcgactccaacggctcaattaggtctagattccgagttggtggtagaaacagagtggtcactcaaaactcctctggc

SEQ ID NO: 163366 - DNA, 990 bp, Arabidopsis thaliana landsberg
atgattcccgatgaaaaacgctctcgaagaccatggtttcggacaacctgaaaccctaaaagaaactattattagaggaaacgatgatgttgccccgcctaatgcttccccgcccttgggaagaggaaagagcacgggcaataaaagccaaggaggccaggacccgttcagcttgaactgatccgttcaaccctttcgccacctgatttcgtctctacaagatcactctcacgtaccatggagacaaaagagtcagacttgaaagccaatacttggactaagaagcgctagacacaaggactctccacttcaagatggataaggttgatggcattctctcaagtaagatcgatgagctttccttgagctttagaagaatggaggtcaagctcacgaaagaagttgtcgccttgacaaagacggtacaaactctagaaaagagcagaggaaaggatctagagtataaccaaggaagtgcccaaaccatcggagaattggccatccggatagccgaggaagagtaggatcacagactcgaccgttagagagctccttgacaagaatgcggtcttgaaagaaagactccgaaaacttgaagagagagctaacaagaacgaagagaaactccatgaggaaatctttctccttcgtgagctagccgactgccaaagagaagccgaaaagaatcacatgtttgattttaaggttctctttagtaacaatatgagttcggcggctcagatgaagaagtacgaggacgaagctaaggcgaccatggtcaagattcataatctagaagatagctataaaattctagccgagacaatctgtttcgaattcgataagtccctcgacctgttgcatgggataaagtccaatcttggatatagggaaacgacgtttaacgaaacaatcgagagattggataagaagtacaactctttactccttcgtgctgccatctgcgagaaatgtatagaagaggactca

SEQ ID NO: 163367 - DNA, 709 bp, Arabidopsis thaliana landsberg
atgagtgtgcaggctaaacacatagttgatctcaaagaagcactcatgagtcatcgatccaaagaagatcacaagcttgaagaactcgttggtaaaatcgtcaatgacttccaaaaatacaccgaaaaacgatcagagctctcgtaccgaagctgcgctcattactttacaccgtcgtggaacactcctatagagaacagtatgctatggatgggaggatgtcgtccttcttctttcattagagttatatacgcactttgtggatcccaggccgaaacgcagctttctcaatatcttcttaagatcgatgaaaatgtcgatataaaccatggtggtttcatgagtgatcttaccgcgacacagcttggaaaactcaatgacttgcatttggaggtaataaagaaagaagacaagattacgaagacatctgcgaattttcaagacgatgtggcggatttgccaatcgcggatgtggtgcatgctgatgtagcggtggaggatgctttggataagacatgaagagggaatggcggctttactggcggaggctgataaactgaggtttgagacgcttaggaagattgtggacgttgtcacaccgcttcaagcggtggagtttttgcttgccggaaaaagattacagctgtcgttgcacgaccggggaagagttagagcagatgtttgtggaggagtggggggcgccgctgtc

SEQ ID NO: 163368 - DNA, 910 bp, Arabidopsis thaliana landsberg
gagagaaatcacgaaattagcaaactctcgtcacaaatcatcagtttctctttctctcttcctcatttagtctctctccactgatcttgaaactacaacgatgaacgtgtacatcgatactgagactggctcatcgttctccattactattgatttcggcgaaacagtgttacagataaaagagaagatcgagaagtctcaaggtatccctgtttcgaaacaaatcctttacttggatggcaaggctcttgaagatgatcttcataagattgattacatgatcctcttcgaatctcgtctccttctccgcatctctcctgatgctaaccctaatcagagcaacgagcaaaccgagcaatcaaaacaaattgatgataagaaacaagagttctgtggcattcaagattcatcggagagcaaaaagctcacgagggtgatggcgaggagagtctacaatgtatattcatcactaccggcttattcacttgatgagttacttggccctaaatattcagcaactgtgacggttggaggcagaacaaatcaagtggttcaaaccaccgagcaagcttcaacgtcaggcacagccaaagaggtccttagagattcagattcgcctgtggaaaagaagatcaagaccaacccgatgaagtttacagtacatgtgaagccatatcaagaagataccaagatgattcaagtagaggttaacgcagatgataacgtcgaagaactgaggaaagagctggttaagatgcaagagaggggtgagttaaatctgcctcacgaagcgtttcacttggtaatcagtgagttaccattgatcgaaactaagtcattcaagtggaaccgtgttgctgatggcgatacaattgagattatccgtagactcgtgcctttttgcagtctc

SEQ ID NO: 163369 - DNA, 1617 bp, Arabidopsis thaliana landsberg
atcaatgccttgagcttaagctctggtctaaattggttcgttacctcattgaaaatccatggaaataacctcaaaacattaaagcaatctcattgttacatgatcataaccggtttaaacagagacaacctcaacgttgccaaattcatcgaagcatgttcaaatgcaggacatctccgatatgcttactctgtattcacccaccagccatgtcccaatacttatctccacaacaccatgattagagctttgtctctcctcgacgaacccaatgcgcattcgattgcgatcacggtttatagaaagttatgggctttgtgtgctaagcctgacacgtttactttcccgtttgtgttgaagattgctgttagggtttctgatgtttggtttgggagacagattcatggacaagttgtggtttttgggtttgattcgagcgttcatgttgtaacaggtttgattcagatgtatttttcgtgtggtggtttgggagatgcacgtaagatgttcgatgaaatgcttgtcaaggatgtgaatgtttggaatgcgttgttagcagggtatgggaaagttggtgagatggatgaagctaggagtttgcttgagatgatgccttgttgggtaaggaatgaggtttcttggacttgtgtgatctctggatatgcgaaaagtggacgagctagcgaagctattgaagtgtttcagagaatgctgatggagaatgttgagcctgatgaagttacgcttttggctgtgctctcagcttgtgctgatcttggttcacttgaattgggtgaaagaatatgtagctatgttgatcaccgagggatgaacagagcggtttcattgaacaatgcggtcattgatatgtatgcgaaatcagggaatataacaaaggcgttggatgtgtttgagtgtgttaatgagagaaatgttgttacttggacgactataatcgcagggctagctacgcacgggcacggagctgaagccttagcgatgtttaaccgtatggttaaagctggcgtgagaccgaacgatgttactttcattgcaatcctttcagcttgcagtcatgtcggttgggttgatcttggaaaacgtttgtttaactcaatgagatcgaaatacgggattcatccaaacattgagcattacggatgcatgattgatttgctaggacgagcaggtaaactccgagaggcggatgaagttattaaaagcatgccctttaaggccaatgctgcaatatggggatctcttcttgctgcttcaaatgttcatcatgatcttgagcttggagaaagagctttgagtgagctgattaagttagaaccgaataacagcggtaactatatgcttttagctaatttatactcgaatttaggaaggtgggatgagtcgaggatgatgaggaacatgatgaaagggattggtgtgaagaagatggctggtgaaagctccatagaagttgaaaacagagtatacaaattcatttcaggggatcttacgcatcctcaagtcgaaaggattcatgaaattctacaagagatggatttgcaaatacagagcaaagtttgagaaaaaaaaaattatttgaattttgatcagattgag

SEQ ID NO: 163370 - DNA, 821 bp, Arabidopsis thaliana landsberg
atgaacgagagtaagattgttggattcatggctaagcttgacgcagtccacaatctatttgtggaagatgtcaattatgttggtggaagaggttatcagaatcagagactacaacaccaacgaggctatagaggtgtctatgggaatggtcaacctaactacactcacaagtctcagttccagcaaccttttcagtatagcagtagtttcagcttcacaagaaactacgatcttgcttcttaccaagcccccccctccacccgcacaaagaagcaagatagaatcattgcccgaacagatttcagagctaaattatcgacatgttaagggaagacaagttgtagcacgagtgtcgaccaacacaccacgagtgtcgatcgacacccatcactggttcagagagaatcatttaatataggtacttttcaaggtcgaatcacttctataagtctaggaactactgtcatgtgacccactatacctctactccttcatccacctcctaaacgaccaaggtactcatctcctcctctttaacctccatatgtcatcaataagagtttaaaattttcaaaaactgttttacagttatgcaagctacgagtttttcgtcgagtgcttgtcgttcttttgatgattgtgcaggaaaaaggagtgttcctcccatacctgagtcccaccctgctgatgctcctctcgtcctagatagacctaatgcgctaacagcttatacaccaacatggatgatgagaggtctttctccacggtatttacttccaccttttgaaccacctgattctagaaatcctttaaagtcaagc

SEQ ID NO: 163371 - DNA, 855 bp, Arabidopsis thaliana landsberg
atagatattcccgatttattatggtcggtgagtggagatgcaaagaagaagaatggaatttaacctaaagaaagacatgtttggtcgatgtgtacgtgtaaggaaaacatgacgtacacagaatttgtacgtacactaagcgaggctttcagtttgaattccatagagatcaatcccataattagttactggatgccgggagagatgttagtgatgatagatactaaacgccctcctgtctacattgacagtcaagtggggttggatacgttctttttaattcgtggtcggtatccttctctcaacttgtttgtctctttcattacaaccgtcaagacactcgagaataatgtctctaggactcatggtgatgatgctgaaagttaccgtgtatgtgatagtgtttcaaatgttgatgaaaataatgaggccgtagatgagcaagacgacgatgaagacgataaaacaaatgaggatgaagaggagggggacaacaaagatggtggtgggtatgatgattatcagggtgacgatggatctatagggggaagtaccctcgatcctactattgatggtagtgaaagtagtggcgaagattatgattacaacaagtggaacgatgtaattgtagaagaacatggaatagggaatgttgaggagaacgtcattctcacaccaggggaattcagtcgtctgttggcagagtgtacgtccacaagtcagcgtgtacctgacggagataacatttctcactcgggtgaccgtacaccagctgtgactccaagaaatatgtgtcaacatggtttgtaccactgtacgtatactatagattgggaagtgtttttaagaacagaa

SEQ ID NO: 163372 - DNA, 1323 bp, Arabidopsis thaliana landsberg
atggtggaagatcggacatatttgatgtcaaggattttctcaagttctcgtctttcagaatcaaagtggccatacatgtatccacaaccagaagattcctctgaatctaatctcatcaatggcaaaagagcattggagaatgatgttgatgagctcagacagagcaagtctcccagattgatgggattttcaattcatgggaatgaagccattgaagaagatgaacaagaacaagaccaatctgattctaacaacaatggtaatagcgatggcgattcacttatcaatgatattggcagagacaattctataagctgtttgattcgttgctcgaggtctggttacggttcgattgcttctttaaaccggagttttcggtctttggtgaagaccggagagatttatagactcaggaggcaaaaccagattgttgaacattgggtttacttctcttgtcagcttttggaatgggttgctttcaatccttttgaaagaagatggatgaatttgcctacaatgccttcaggtgttacattcatgtgtgccgataaagaatctttagctgttggtacggatttgcttgtgttaggcaaagatgattactcttctcatgttatatatagatatagtcttttgactaactcttggtcttccggtatgaggatgaactctccgaggtgtttgtttggatccgcgcgtctaggagagattgcgatctttgctggtggttttgattcttttggcaaaatcagtgattccgctgagatgtataactccgagcttcagacttggactacacttccgaagatgaataaaccaaggaagatgtgttcaggtgttttcatggatgggaagttctatgtgattggaggaattggtggaaatgattcgaaagtgcttacttgtggtgaggagtttgatttagagacgaagaaatggactgagataccggaaatgtcgcctccaaggagccgggaaatgccggcagcagcagaggcgccgcctcttgttgcggttgtgaataacgaattgtatgctgctgatcatgctgatatggaagtgaggaagtatgataaggagagtaagaaatggtttactttagggagattgcccgaaagagctgactcggttaacggttggggattagcgtttagagcttgcggtgagaggttgattgtgattggtggtcctaggagttcaggtggagggtacattgaactgaattcatggataccatctagtgatcgaagtccgcctctatggacattgctcggtaggaaacattcatcgaattttgtttacaattgcgcggtgatgggttgc

SEQ ID NO: 163373 - DNA, 9548 bp, Arabidopsis thaliana landsberg
ttgagaaatgccaacattagcactatagcgggtatagcgagtctcattgagggctacggccaagcccatgtactcttaccaaacggcacacatcttgaaataagtgatgccttgtattcacccagctcaaagaggagcttgttaagtttcaaagacatacgtcttaatggtttccacgttgaaacaaagggtgaagggaatagagaattcctacatgtaacagagatcgcccaaggacataagagagtcctagaaactatacccgcattgtccactggtctttaccatactaagatcaacatgatcgaagctaatttggcaatgaacaaagagttcatagaggagttcactttgtggcatgaccggcttggccatccgggtcataacatgatgcgaaagctaatgataagttcaaaggggcacaccctaaaagaaaagagagttatcccaaagaagctcacgtgtgctgcatgtgcacaagggaaactcataataaggccatcaccggcaaaggtcaataaagagaccataaactttctggaaaggatacaaggggacatatgtggaccaatacacccaccatgtgggacgtttcgatacttcatggtcctcattgacgcatcgacaagatggtcacatgtttgtctgttgtcctctaggaaccaagcatttgctaggttactggcccagatcattcgtctgagagcccattttccagattttccgcttaagactatacgtctagataatgccggtgaattcacgtcccaagcgtttaatggctactgtatgtccatgggggtaagtgtggaacatcccgtggcacatgtacatacacagaacggattagcggaatccttcattaaacgaatccaattgatagctcgaccattactgatgaggtcgaggctcccagtagccgcttggggacatgctgtattacatgcatcggaacttattcgtatcaggccatctagtgaacacaaatattcaccatcccaattgttaacgggtcatgagccagacatatcccatctaaggacattcgggtgtgccatatatgtaccaattgctccaccacagagaacaaatatgggacttcagaggaggatgggaatatatgttgaatttgattctcccaccattataaagtatctagagccaataacgggtgatctatttaaggctagatacgcggattgtcacttcagtgaatccgagtttcctgcgttaggtggtgagacgaacaagctgggtaaaaaaataaaagagatagcatggaatcaaacatccttgaattggcaagatcctcggactctgatgtgcgattcagaggtccataaaattatacatttgcaaaagctagctaatgagttgccagatttctttgctgacccaaagagagttgtgaaatcgtaaataccagcttgtaatgcaccagtacgtattgatatccagaagggaatcaatgtaattgctaccgagtctaacccacagaaaaaacatggtagaccagtaggttccaaagataaaaatcctcgaaagactaagaaaggtgcaatgggaaccgaggtaaaggaaaccatagacatggccgcggcaagtcccaaggaaccaccaaatcagattcgggacgccgaagctcatggtcctgaaggaattgataatgatgagatctcaataaactacatcatgtctggaataaaatggaaccgaaaagaagtcgacgtcgacgagaaatttgcatatgagataaatgaggatcatgaacccacgtctataatagagtgcactcaaaggtcagattggctaaagtggaaagaagccattgacgtggagttaggttcattaaagagaagagatgtgtttggtccaatattgaggacaccatctaatataaagccagtaggacacaagtgggtctttgtgaggaagagaaatgagaaaaacgaaatcgtgaggcataaggcacggcttgtagcacaaggattctcacaaagaccgggagtagattatgaagagacatactcccctgtggtggatgcaacgacttttagatatctaataagtctggcaataagagagaaccttgacttgcggttaatggatgttgtaaccgcatatctatatggtccactggataatgagatatatatgagattaccagagggtattgagctcaaaggaaaagataagaatgggtctcgagaccaatactgcataaggctgaacaaatcgctttatggactgaaacaaagtgggcgcatgtggtacaataggttaagtgagtacttagtcaaagaggactataaaaatgaccccatcagtccatgcatcttcatcaagaagtttgctagcaaaggatttgtgataatagcagtatatgtggatgatttgaacatcctgggaacctctggggaaatcgccctaacagtcgaatatctaaagaaagaattcgaaatgaaagacctaggcaagacaaagttctgtttgggattgcagcttgagtacgtagataaaggaatccttgtgcatcaaaaggcatatatagaaacagtactcaagagatttaatatggacaaggcccacccattgaccagcccaatgcaggtgaggagcctaggattggatagtgatccattcggtccaaagaaggacgatgaagatattctcggtcctgaaatgccatatctcagtaccataggagcattgatgtacctgtctagccacactagaccggacatatgttttgccgtgaacctcctctctagattcagttcttgtccaacaaagaggcactgggaaggaatcaagcatttgcttcgatacctacaagggacaattgattttggtttatattatactaaccataacaaagaaggtttagttggttttgctgatgcaggatatctttcagatccgcacaatggaaagtcacaaacaggttatgtgtttatgcatggtgggaccgcgatatcctggagatcaatgaagaagaccatcgcggccacttcctctaaccacgcggagatattggcaatgcacgaggccagccgcgagtgtgtgtggttgaggtcaatgactcaacacataggagccgattgtggaacggtcgaagacaaggaaccgaccatcatgtacgaggacaacgcggcatgcatagctcagctcaaggaagaatacatcaagggagatcggacgaagcacattctgcccaagttcttcttcacgcatgacctacagaaggatggtgaagttaaggtggtgcaagtacgttcaagcgacaattcagccgatctatttaccaaggcattaccagcatcgacattgaggaagctctcgcatcagattgggatgcggaggcttaaggacttatagggatgaccaattcaggggggagtaatgcgtgctgtactctttttcctcactatggttttgtcccaaaagggttttcctagtaaggttttaatgaggcagcatccccctagggcattactgagatcccgttggcatctacacggttatgtcatccaagggggagtgttgtaaaccacttgttggatggactccataactgtggcccatgtccttggaggataggtccgtcagcccattggtgtgaccgcccatcgaccagtcggcccaccagtccatcagtccatcggcccgtcggtctgtcggcccggtcaatgaagagaagctatagtcggtccggcccgtaggtccggcccatggggactagacataggtcggtcatagacttaagtagttatgggcttttgtaacctagcccattagacatgtaacctcctcaagtatgtatatatatgtgatgtaacttcattatgaatcaatgagaaacaagttagttcttcacacgttatcagcacgagcttgctcttaacaaaaccctagcagccgccgctcaaccctagctcgtccgccgtcagccgtccgtcgtccgttcgttgctcgtccgacgactgtcaccgtccgctgactgtccatccgctgtccgtctgacgatcgttccttaccaccgtcagacaccgaacgaccgttccgtcgttccgtcgtccgcctgtcgaccgtttgctgtccgtctgtcaaccaacgatacaaccgtcgaccgccgactgtcaaccagcgaccaccgtttgataaccaaggtctttagctcctagttccagtccgtacaaccccaaaggagaaaggtaattcattaaaccctaaagctaaagaaccctaatcgaacatggatctaacaaacggctaaaaccctaaaaacaaattgttgattagtgtttgcaatatgattgcttgtttgctcgattgtttgtcttgttattacttatcctaaactcgcaaatcaaaaacactataatcggatcaaaaccctaattctatttcgtgattgtttgaagttatctagggtgtttagtttgattgatttcatggttgcatgcatgaattgttaaaatccctcatgttgcataaaccctaaaaccaaaaccctaaggaaaatagaaaatcgctaaaaaggaaaatttaccctaagaccgaaaaaggaaactctcccaaaaggaaaaagaaaaaataatccctagagaaaagaggaaattctcctaaagagaaaagggaaattatcctagagaaaagaggaaattgtcccaagggaaagaggaaaagagaaagtcaaatccttgagtaaatagaaaaatcgatttatggtcttcatgacatttacgatttgtccattacatgatattgactcgtaacttcttcattgtagatgtcgaagctcacaaacctcatgtacgctgcactcttggcatctggtgacaattaccttcaatgggcattggacaccaagattgagctgaagtctaaaggactcgccgagtgcattgtggaaggcaatgagaaaacggagaggtcaaagtatcaggcgatttcaatcatacgccatcacatagcagagagtttgaaaaatcagtaccttacggtcgaggatccacttgagctttggcttgagttgaagaatcgatacgaccaccaaaggaccatacaactacccaaagcccaacatgattggcttaacctcaggatccaggattacaaatccgtggaggagtataactccgagctctttaagattgtctctatcctgaggctgtgtggtgagaaggtgactgagaatgacatgctcgagaaaactttctcgacctttcacgcgaacaacgtactgcttcagcaacagtaccgtgcgaaagggtttacgacttacacaagtctagcctcctgcttgcttcttgctgagaagaacaatgagctgttactcatgaacagcgcattgagacctcccggatccacagctgtgcccgaagccaatagagccgaaacggccaaagcgcctaatgaacctcaggcgaccaaggaatccacctacgtccataggggtaaccctcacggccgtgtccgtggcagaggacgtggtggaagaggtcgtggcaatttctacggccaaggaaaccactatggtggtagaggccgtgggaactatggccgaggtaggggtagaggccgcggtgttaacaaaccgcgtggaaaggctaagtccgtgtgctataggtgtggcatggacgaccattgggcaaagacgtgcaggacctctaagcacctcattgaggcatatcaagagatgataaagcaaaagggactcgaagccaatttggttcatctcgatggtgaaggggattttgaccacgagaacgatgacctaatggattatgagacttcggacatcttgggagaataggcatctagtttttaaatttgctttgtttgctttgctttgtagtttgaattctattgcttgatgtcttggatttatttattttaatggaattgctttgcttcattattgtttgctttatcgcctaacacatagttcttgtccacatttagaaatggccgaggacaaggacatactcgtagtggacagtggctcaagccacacgatattaagagacaaaagatatttcataaatctaacattgagaaatgccaacattagcactatagcgggtatagcgagtctcattgagggctacggccaaacccatgtactcttaccaaacggcacacatcttgaaataagtgatgccttgtattcacccagctcaaagaggagcttgttaagtttcaaagacatacgtcttaatggtttccacgttgaaacaaagggtgaagggaatagagaattctacatataacagagatcgcccaaggacataagagagtcctagaaactatacccgcattgtccactggtctttaccatactaagatcaacatgatcgaagcgaatttggcaatgaacaaagagttcatagagaagttcactttgtggcatgaccggcttggccatccgggtcataacatgatgcgaaagctaatgataagttcaaaggggcacaccctaaaagaaaagagagtaatcccaaagaagctcacgtgtgctgcatgtgcacaagggaaactcatagtaaggccatcaccggcaaaggtcaataaagagaccataaactttctggaaaggatacaaggggacatatgtggaccaatacacccaccatgtgggacgttccgatacttcatggtcctcattgacgcatcgataagatggtcacaagtttgtctgttgtcctctaggaaccaagcatttgctaggttactggcccagatcatacgtctgagagcccactttccagattttccgcttaagactatacgtctagataatgccggtgaattcacgtcccaagcgtttaatgactactgtatgtccatgggggtaagtgtggaacatcccatgggggtaagtgtggaacatcccgtggcacatgtacatacacagaacgaattagcggaatccttcattaaaagaatccaattgatagctcgaccattactaatgaggtcgaggctcccagtagccgcttggggacatgctgtattacatgcatcggaacttattcgtatcaggccatctagtgaacacaaatattcaccatcccaattgttaacgggtcatgagccagacatatcccatctaaggacattcgggtgtgccgtatatgtaccaattgctccaccacagagaacaaagatgggacctcagaggaggatgggaatatatgttggatttgattctcccaccattataaagtatctagagccaacaacgggtgatctatttaaggctagatacgcggattgtcacttcagtgaatccgagttccctacgttaggtggtgagacgaacaagctgggtaaagaaataaaagagatagcatggaatcaaacatccctgaattggcaagatcctcggactctgatgtgcgattcagaggtccataaaattatacatttgcaaaagctagctaatgagttgccagattcctttgctgacccaaagagagttgtgaaatcgtacataccagcttgtaatgcaccagtacgtattgatatccagaagggaatcaatgtaattgctaccaagtctaacccacagaagaaacgaggtagaccagtaggttccaaagataaaaatcctcgaaagactaagaaaggtgcaatgggaaccgaggtaaaggaaaccatagacatggccgcggcaagtcctaaggaaccaccaaatgagattcgggacgccgaagctcatggtcctgaaagaattgataatgatgagatctcaataaactacatcatgtctggaataaaatggaaccgaaaagaagtcgacgtcgacgagaaatttgcatatgaggtagcatatgagataaatgaggatcatgaacccacgtctataatagagtgcactcaaaggtcagattggctaaagtggaaagaagccattgacgtggagttaggttcattaaagagaagagatgtgtttggtccaatattgaggacaccatctaatataaagccagtaggacacaagtgggtctttgtgaggaagagaaatgagaaaaacgaaatcgtgaggcataaggcacggcttgtgacacaaggattctcacaaagaccgggagtagattatgaagagacatactcccctgtggtggatgcaacgacttttagatatctaataagtctggcaataagagagaaccttgacttgcggttaatggatgttgtaaccgcatatctatatggtccactggataatgagatatatatgagattaccagagggtattgagctcaaaagaaaagataagaatgggtctcgagaccaatactgcataaggctgaacagatcgctttatggactgaaacaaagtgggcgtatgtggtacaataggttaagtgagtacttagtcaaagagggctatagaaatgaccccatcagtccatgcatcttcatcaagaagtttgctagcaaaagatttgtgataatagcagtatatgtggatgatttgaacatcctgggaacctctggggaaatcgcccaaacagtcgaatatctaaagaaagaattcgaaatgaaagacctaggtaagacaaagttctgtttgggattgcagcttgagtacgtagataaaggaatctttgtgcatcaaaaggcatatatagaaacagtactcaagagatttaatatggacaaggcccacccattgaccagcccaatgcaggtgaggagcctaggattggatagtgatccattcggtccaaagaaggacgatgaagatattctcggtcctgaaatgccatatctcagtaccataggagcattgatgtacctgtctagccacactagaccggacatatgttttgccgtgaacctcctctctagattcagttcttgtccaacaaagaggcactgggaaggaatcaagcatttgcttcgatacctacaagggacaattgattttggtttatattatactaaccataacaaagaaggtttagttggttttgctgatgcaggatatctttcagatccgcacaatggaaagtcacaaacaggttatgtgtttacgcatggtgggaccgcgatatcctggagatcaatgaagaagaccatcgcggccacttcctctaaccacgcggagatattggcaatgcacgaggccagccgcgagtgtgtgtggttgaggtcaatgactcaacacatacgagccgattgtggaatggtcgaagacaaggaaccgaccatcatgtacgaggacaacgcgacatgcatagctcagctcaaggaaggatacatcaagggagatcggacgaagcacattctgccaaagttcttcttcacgcatgacctacagaaggatggtgaagttaaggtggtgcaagtacgttcaagcgacaattcagcggatctattcaccaaggcattaccagcatcgacattgaggaagctcgcgcatcagattgggatgcggaggcttaaggacttatagggatgaccaattcagggggagtaatgcgtgctgtactctttttcgtcactatggttttgtcccgaaagggttttcctag

SEQ ID NO: 163374 - DNA, 891 bp, Arabidopsis thaliana landsberg
atggacggtggttacgatcaatccggaggagcttctagatactttcacaacctcttcaggcctgagcttcatcaccagcttcaacctcagcctcaacttcaccctttgcctcagcctcagcctcaacctcagcctcagcagcagaattcagatgatgaatctgactccaacaaggatccgggttccgacccagttacctctggttcaaccgggaaacgtccacgtggacgtccaccaggatctaagaacaaagccaagccaccgatcatagtaactcgtgatagccccaacgcgcttagatctcacgttcttgaagtatctcctggagctgacatagttgagagtgtttccacgtacgctaggaggagagggagaggcgtctccgttttaggaggaaacggcaccgtatctaacgtcactctccgtcagccagtcactcctggaaatggcggtggtgtgtccggaggaggaggagttgtgactttacatggaaggtttgagattctttcgctaacggggactgttttgccacctcctgcaccgcctggtgccggtggtttgtctatatttttagccggagggcaaggtcaggtggtcggaggaagcgttgtggctccccttattgcatcagctccggttatactaatggcggcttcgttctcaaatgcggttttcgagagactaccgattgaggaggaggaagaagaaggtggtggtggcggaggaggaggaggaggagggccaccgcagatgcaacaagctccatcagcatctccgccgtctggagtgaccggtcagggacagttaggaggtaatgtgggtggttatgggttttctggtgatcctcatttgcttggatggggagctggaacaccttcaagaccacctttt

SEQ ID NO: 163375 - DNA, 672 bp, Arabidopsis thaliana landsberg
atgtttaggatagttttgcatgcatgttgcatatttgcgttgatttcaggtgatttggagctgttgacgagctatctggaagaagcagacctgatcatgacaaaccactcgacccagaggtcgagtaggagcttcaagatctcaagagaccactcgacaaccaggtcgagtagagcacatcaccacttcacctcaccactcgaccccgaggtcgagtgccatcatctccatcaccagacggtcactcgatcacttcactcgatcttgaggtcgagtgtcttcacctccatcatcagacaaccactcgacctcctcactctacctagaggtcgagtatctccatcacaccactcgactgcatactcgatgacaagcttcagagccttcttcattccgcactcaaccagacactcgagcacaaggaagaaaagaagactccagctattcactcgagttctcactcgaccacgttggtcgagtacagttcttaacccgtccaaatacttcgtcgttttgagtattagggtttcgggatatttggctataagtagcatgtacttctcattttcgcagggagttgtttttacctagtttttatttccgcagaccttgtgttctagactttttgtaatccggatttctctttatctattcagtattcaatattcagtt

SEQ ID NO: 163376 - DNA, 2198 bp, Arabidopsis thaliana landsberg
tccctttctctaaaaatggtgaaagggtcccagaaaatcgtggccgtagatcaagacataccaataatagacatgtcgcaggagagatcacaagtgtcgatgcagatagtcaaagcctgcgagagtctcggcttcttcaaagtcatcaaccatggcgttgaccaaaccaccatctcaagaatggagcaagagtctataaacttctttgctaaaccggctcacgagaagaaatctgtccgaccagttaaccagcctttccggtatggttttagagacattggactcaacggtgactctggtgaggtcgagtatttgctgtttcacactaacgaccctgcctttcgctctcagctctccttcaggtagacgtatagtaactgtatttctagatatatacggttcgggtttggtctcattttaacctaatcattattaatattttaatgaaattatattgaaatagtttatatatagttgcatgtaaaatatacaactgcatgtatagcttggatacgttcaaaagcttatactatatatctaccaaacttcaaaaatattaatgtgataaatgcacatgattattatatgtaggccaagtgcacgtttatgtaaattattttctaatgcgtgctaatatgccagcataaccggatatataaattcaattaagtgctaacttgtaggtctacatttatgtaaaaggagaccgttatagctcatggaagcattaattattgatactaaatacaaacagttcaccttttatgtatttaaatagatataggcttgtttttcatttattttggaagcttttaaacaatactagagtctggagaaaccaaacgtaccagacatgtagtaaactaaaaaaatgtaatagtctctctcaataacagtgtatggataagaattgtgtatctactaatctacatgatacatgacatgtactattttatatttgagcttttagaaaaacttatatatactacaatctgctagtctttgttctcaaatatactaactcttacgaagttgtataattgttcgtactaatgtttcaacagtttttttttgtacttaactcaataatggctcaataatgattcatttttgtctatctttttttttctttgatagaaaaaaacccaacttctttctgaaagtagaaatattaaggttacgtggatatatttcgtatatttctataagtaaccaaaaataaatgaatctcgtgctgatgtgtgacgtatatgtttgacagctcggcagtgaattgttacatagaagcagttaagcagttggctcgtgagatcttagatctgacggctgagggacttcatgtcccacctcacagtttcagtaggttaatcagctccgtcgatggcgactccgttctgagagtgaatcattcatccaccgtccgatcaattctttggtgaagccaatctttctgaccaatctgtgtcactgacaagagttggcttcggagaacacaccgaccctcagattttaacagttcttagatctaacggtgtaggagggctccaagtgtccaattcagatggcatgtgggtttctgtctcccctgacccttcagctttctgcgtcaatgtaggagacttgttacaggtcaatgtcttcttttttctttctttcttgattacattttttttattacatcatttttatttgtggtgattaaagatcgtaattaaaaaaaaaaattgttagtcctaaacgaaatcagaaaccgtaaaaatcgaacatatactaaactataaccatttatttataaaatcatcaaacaagaaaccataaaagccaaacctaaactaaacattaaacatgtttttatctttcttttggtcacaagatattactttaacattttttctgtcatttatcaatgttgtggaccttatattaattggttcttggattttaaggtgatgacgaacgggagatttataagtgtaaggcatagagcattgacctacggagaagaaagccggctatccacggcgtactttgccggaccaccgcttcaggcgaagattgggcctctttcggcgatggttatgacgatgaatcagccacggttgtaccaaacatttacttggggcgagtacaagaaacttgcgtactctctacgacttgaggatagccgtttagacatgtttcgtacatgtaaggactag

SEQ ID NO: 163377 - DNA, 1203 bp, Arabidopsis thaliana landsberg
atgggattttcctttctccttgccacggtacaaaaggagagaatgaagaggaggtcgagaacaagaagtagaagtagacgaagagcgaagcaagatccgaaaacttgggtcgcaagatatatccctcaggatctactgatcgagattctgacgagattacctccgaagtcagtgatgagattcaagtgtgtctcaaagttttggtcatctctcttgtcctccagatatttttgcaaccgttttctcatcgtcccatctcaacctcaacctagtctttacatgtgcctattggatcgatacaactactctaagtctctcatcttatcatctgctccaagcacgtctccgtattcctttgtattcgaccaagatctaaccatccgtaagatgggaggtttcttcttgcggattcttcgtggcttcattttattcactagaaatttaaaggcgcgtatctataaccccaccactagacaacttgtgatcttacctaccataaaagaatctgatatcatagcaggacctccttataacatcctctattttatctgccatgaccctgttaatgatcggtacaaactactctgcacagttagttatgcatcagacaatgatttgcaaaatttaaagtcagagctttggattttcgtactagaagcagggggttcgtggaaaagaattgaattcgatcaacctcatctccctacgagactaggattgtgcgtcaatggagttatatattatttggcttccacttggaagcgtcgtgatatcgttgtcagttttgacgttcggtctgaagagttcagtatgatccaaggacctcttaagctgtctgcattttctgagtcagtgggatttatagagtatggtggaaaaccagctgtttttgattataccattatgaaacaaacgggtttggtggacttgtgggtcttggaagatgctggaaaatggtcaaggaaatctttggttttgcagtcttgtcagatgcatttagtcgataatgacattcagtttaatgtggaaggtacaactcaaaacggcgaggttatcttggcacccgaaacgattatttcccctttttacattctttattatgatatacagaagaatgatatgaggaaggttgaaatccaaggaatgccggaccataagaaggatgggatcaaaggaacaccggactttggtttcaaacttatg

SEQ ID NO: 163378 - DNA, 1190 bp, Arabidopsis thaliana landsberg
cataacgtttcggaggatcgagtaaccctgtctcgacgcaataagcgatcaaagacctcactcaatggccacatcccaatagatctccttatcgagatattcttgaagttacctgtgaaatccatagcaacatgccgtagcgtatccaagttctggacttacgtacttggccgtcaagatttcacagagttgttcttgacaaaatcttcttctcgcccgcagctcttgttcgcatgcgcaaacgacaatgggtacttcttcttctcctcaaatcagcctcagaatcttgatgagaactcgtctcctatagctgcttatcctcttacacatgtccctaaatcccgtgacttgggtcctccaatcaacggcttggtctctcttagaggtgagcggatcttaaaaggaaggataaggccagtcgatgtgtcgattatatataaccctagcacgggagaatccttaactttacccaaaacgaatatgaacaggaagaagatctatacggtgacgagctttttggggtatgatccgattgagaaacaatacaaagtactttccatgaacatgtcatatgagaaacatcccaagtgtgaggggtatcaagttctaacactaggaactggaaagctgtcatggagaatgatcaaatgttgcttaaactaccaacatcctcttaaaaatagtgagatatgcatcaatggtgttttgtattacctagctatggtcaacggctcttcatggcctactagggcagttgtttgttttgatattaggtctgagatgttcaattttatggaagtctatagagaactatcttatacaactactctgataaattacaataatggtaaattaggtatgctgatgggacaagaggctcacaaaactatcagtggaatatgtagaagttttgagttgtgggttctcgaagacaccgtaaaacatgaatggtcgaagcatgtatacttattgcctcctttgtggaaggatgcagttgcaaataccaggttatactttgcaggagatgattggtacaagtgaaattgtgttgttccgcccagatgagcctctttgcgtttatctactacaatatcgatagaaacacgatcaaaagagttggaatccgaggattagaagcgtttaagtattttcgcatgtttctaaaccatgtagagaacgtgaagcttttt

SEQ ID NO: 163379 - DNA, 627 bp, Arabidopsis thaliana landsberg
  unsure (1)..(627): unsure at all n locations
atggcatacgacttggaagaacaggaaaagctggacgcgctgcgtgcgtggtgggacaagtacggtacgctgtgctcggtcatcctattggcgncggtgatcgcggtcgtgggatggcgcggctggcagtggtaccaggggcacgaggccagccaggccatggggtatttcgaagcgctggaacgcgcggcgggacagccgggcgaagacgccgtcgcgcgggtcaaggcggccagccagacgctgcgcaccgattacgcgtccacgggctatgcgtcgcgcggtgtgctggtggcagcccaggctctggaaagccgcaatgacctcgacggcgcgaaagaccagcttcaatggctgatcaagaacgacaaggatccggcgctggccgcgctggcccggctgcgcctggcgggggtcctgctgcaacagaagcagtatgaccaggcgctggcccagatacagacgccgccctcggcgttcgcggcgctgtacgccgatcgccgcggcgacatcctggccgcccagggcaagaaggacgaagccaaaaaggcctggacgcaggcgatcaaagaacttggccacgatccggccgcccagatcgtgcaactgaagatcgacgctttgaac

SEQ ID NO: 163380 - DNA, 1955 bp, Arabidopsis thaliana landsberg
atgggtccatttccgttctcgtatgggaataagtatatattggttgcagtagactatgtgtcaaaatgggtggaagcaatagccagtcctacgaacgatgctagagtcgtcctgaagttattcaagagcatcatcttcccaagatttggagttcctagaatagtcattagtgatggaggcacgcactttgtcaacaaagttttcgagagtctactgagaaagaatggggttaaccacaaagtagcgactccttaccatccacagacaagtggccaggtggaaatctctaacagggagataaaatcaattctagagaaaactgtcgggatcaccaggagagattggtctgtaaagctcgacgatgcgttatgggcatacagaacagctttcaagactcccattggtacaaccccgtttaatcttctttatgggaaatcctgtcacttacctgttgaactggagtacaaggctatgtgggcagtgaaacttttaaatttcgacatcaagactgctgaagagaaaagattgatacagctcaacgaccttgatgagctccgcctagaagcatatgagagctctaaaatttacaaggaaaggaccaagtcgtttcatgacaagaaaataagttcgaaaaatttcaagttggtgatcaagtcttgctgttcaattctcgcttgaagctttttcctggaaaactcaagtctaggtggtctggccccttcagtgtcactgcagtaagaccatatggagctatcacgttgtctggaaaaggtgacgacttcacggttaacggccaaagactaaagaaatatatggcagaccaaacaattccagaaggaacttttgttccactggaagagccgcccaacgcccaataagcgtgaggagtcaagctagagactctaaacaacctcacttgggaggaaatcccatgactatctttgtatataattttaactttcctattgctttctaacttactttggtggtgttttaatctcaggaaagtaagcgacaaaaatcaaccacagggtgaatagtgatttacagtgtgaatagtgatttacagggtgaatagtggagttactcgatcacgaagtcaagacggtttttcaaactttgcgatcaagtggtttatttcccgggaagcaatagttcgaaaattttgataacggagctgaacgaaggaacgaaaacgtgcagtgacccgtttaaatccaacgcgtgatcgagtacatggtttgggttaaatcaggccatcacttcccaatgacaaaaccggtgaagcccaccttgtcccccatgacaaaaatgtcaacaaaccaatagttctcaccacccacctctcatcacgtttttgccaagggaagagctctcctcaccaacctaagggtgcaactacctcctcctctccctataaataccaagctcctcatccaatgttaatcacacctcacaacaacatctccttctctctcatactcgatcgcaagcttctctctctttaagagttgccttcactcgatcacaagtctctccacccttggaagcctacttcactagaccgcaagctcccgacgcctcgtctttcactcgatctcaagccatcctcatcaagtccactcgatcgcaagctcccgagaaacggctcttgcctctttcactcgatcgcaagctcccgagacgtctccacgtttgtttctctccctcacttactcgatcataaccactccgagttcctgtcaacctcttttactcgatcgcagtattgctgaagttcaagacgtcactactctcacttctaccccttagatttgataactaacatactaaagtttagctgtgagttttgatcaatcccaacaacaatgacctcatacagttactattcatcaatggatgcagattttaacattgactaggcggaatcatggtcaacatgaccagagagagaa

SEQ ID NO: 163381 - DNA, 707 bp, Arabidopsis thaliana landsberg
atgtctaggatagttttacatgcatattgcatatttgtattgttttcaggtgatttggagctgctggtgagctaattggaagaagtggaccagatcaaatcaacatactcgaccacgagctcgagtacagtcatcctggagttcctgaagtactcggccacaacctctacagcaaatcactcaaccgcgaaactctatccaccactcgaccacgaggtcgagtagatgacttccccacttcacaacaccactcgaccccctggtcgattagctgcctgcaccacttcgattcaccactcgactactaggcaacatggccgagtatcaccatcatcattcactcgaccaatcactctaccaccaagtcgagtcccttatcatcattcactcgacgtccttactcgactgccagcttcagagtcttctccattccgcactcaaccagacactcaagcacaaggaagaaaagaagactttagcttatcactcgaccactcactcgaccacctgggtcgagtactgttcttaatccgtcctaatactgcgtcgttttgagtattagcgtttcggaattatttcgctataagtagcatgcacttcacatttttgagaacaagtttttatctagttttattccgcagaccttgtgttctagaccttttgtaatccggatttatctttatctattcagtattcaatattcagct

SEQ ID NO: 163382 - DNA, 939 bp, Arabidopsis thaliana landsberg
  unsure (1)..(939): unsure at all n locations
caactttctanacaagtctctcacatcatttcaataaaactaaggtgaaaggtccaaaaatgcatgaggttacataatcggacttctttgtgttatttttataatcacatacataatataatcctttgtatagtctgctcttatttatcttttatccttttcagcttcaaaagtttctgaaaaacttagcttccgaaaagcagcagaggaaccaaaccttcctattgctgctgctactactctgatatcacctcaagctcgagtagactttgtctttatggacaatgaagcacaagagataagaaatgtttcgccgacatcacaagaacttccatcttcttctactacttctatttcgcatagtaatgaacgatctaattctctacgatctatcgttattcagtaaatgtatatagattttctatcttatactacaatatttaaaattacaagataatatataaaaaagggtgatccttaaaacaatattttgtttgaactcaacggattttcctacatttttactcaatcatatacgtggaaatgatgataaaattatatcatatgataataaaattgatgggcttaaatatattatttggactttatattcaggacattgttttgcgtggtaaaaaggtgtgaccctttcaggatttagggtttgtaattcgtagtttgacagagacaaatccatcatatatattgagatgatactcatcaataacattgtgttagaagaaataatggtgagacttcccgtgaaaaccctaattggatttcaaagcgtgtctaaacactggaggtgtacgatagagtcgaagtctttcaaggagagattttgactttattaggaaacccaagaacccaaatttctcttaatctatgaaagcaagagtgagagtcttaatatgaagactatgaggtttgagtggtctt

SEQ ID NO: 163383 - DNA, 4205 bp, Arabidopsis thaliana landsberg
atagatcaatccatggatctctatacacttccatctttgaacatctcaaactgtgttacggtaaaactcacagaccgtaactacattttgtggaaatctcaatttgaatcatttctctctgggcaaggccttcttggttttgttaatggcgcctatgctgctccaacaggcacagtttctggtccacaagacgtcggcgtcactgaagctatcccaaatccggattatcaagcttggtttcgctccgatcaagttgtatggcgtggctacttggtctttgtctgaggatattctcagtgtgttgtgttccaaaacatctcatgaggtatggatgaatctcgcaaaacacttcaatcgcatttcttcctctcagatatttgagcttcaacgccgccttcatagtttatcaaaagaagggaagaccatagaggagtatctacggtatctcaagactatatgtgaccaactcgcctctgtgggaagttcagttgctgaaaagatgaaggtttttgccatggttcatggtcttactcgagagtatgaacagttaatcacttctcttgagggaaccttagatgcgtttcctggtccatcttatgaagatgttgtttatcgtcttaagaactttgacgatcgtctccaaggctacactgtcactgacgtttctccccatctggctttcaacactttctgatcttcaaatagaggcagaggaaacttctcaactcgaggtcgtggatttcaacaacagttctcctcctcaagttcttttgtctctgcgagtgagaaaccaatgtgtcagatttgtggaaaaagaggtcactatgctcttcagtgctggcatcgatttgatgactcttaccaacactctgaagctgcagctgctgccttctcagctcttcacataaccgacgttagtgacgacagtggttgggttcctgattctgctgcaacagctcacattaccaacaacagctctcgtctgcaacaaatgcaaccttatcttggcaatgacacagtaatggctagtgatggtaattttctgcctatcactcacattggctcagctaatctcccttctacatcaggtaatctcccattaaaagatgtattggtatgccctaatattgctaagtccctattatcagtgtcaaaactgactaaagactatccatgctcctttacctttgatgctgatggtgttcttgttaaggacaaggcaacttgcaaagttctgacaaagggaagcagcacaagtgagggactttataagttggagaacccaaaatttcagatgttctattccaccagacaagtcaaggcaactgatgaagtttggcatatgcgattaggtcatccaaattctcaagttcttcaactcttagctaacaaaaggcgatccaaataaataaaagtaccagcaagatgtgtgaatcatgtaggcttgggaagagttcgagattgccatttacttcatctgtttttaatgcttcaagacccttagagagagtttactgtgatctctggggtccagctcctgtttcttctgttcaaggttttcagtactatgtaatcttcattgataatctatcaagattctattggttatatccattaaagaggaaatcagatttttgctcaatattcatcaagtttcagagtctggttgaaaaccttttgcaaacaaaaattgggacttttcagagtgatggaggaggagaattcattagtcaaagatttctcaagcatttacaagattcagggatacaacatttcatatcatgtcctcagacacctcaacaaaatggtatggcagagaggaaacatagacagctaacagaaatggggcttactctaatgtttcaaagcaaaactccacaaaaattttgggttgaagctttcttcacagcaaattttctctgcaatctcttgccaacaaccgctcttgcaactaatgtcagcccttatgaagctctttttggtaaaactccaaactattctgctctaaggacttttggctgtgcttgcttcccaactcttagagattatgcttgcacaaagtttgatccacgatctatgaaatgcatctttctcgggtacactgaaaaatacaaagggtatcgttgcttctatccaccaacaggccgagtttacataagtcggcatgtcttgtttgcagaagaatccttcccgcttgcagacacttacactgatcaacagaacgcatttccaacttctttgtttgcagctaagttaaaaggattctctatcttcttacctccagaaactgaacagttcagtgaaacacctacaacaacagaaaatcagcaacagtcagaattaataccagtaagtcatcctattgattcaaatgtacaagggaagactactgaaaatttgcagcttatgatcgttgattcattaagtgttacacctctccaaatgattcctcctcaagagcgattgtctagaagtgatgagcaacgtcctgagtgtacggcaagcttagatcttgatcctataggcaacagcgttgcttcgtcatcttctagtcaagagcaatcaacatccaacgtcatcaaagtcacagagtcaactcatcctatggttacaagatcaaagacaggcattagcaaaccaaataaaaggtatgcaatgcttacacataaaatttctcatccaacaccaaaaacagtcactgaagctttaaaagatgaaaagtggactgctgcaacggttgaagaaatggaaaattgttctgaaacaaatacttggtctatagtaccttttaaacacacatgaacgttctaggttccaagtgggttttcagaatcaaactcctagcagatggatctctagacaagtataagtcaagactagtagctcagggcttcaaccaagaagagggaattgattaccttgagacttacagccctgtggttagatcagctaccgttagagcagtcctgcatcttgcaaccatcatgaattgggaactgaagcaaatggatgtaaagaacgcctttcttcatggagatcttactgaaactgtgtatatgaaacaaccagctgattttatcaacaaggccttaccaaatcatgtgtgtctgctacacaagtctctctacggattaaaacagtctccacgagcttggtttgataaattcagtaacttcttaatctcttttggttttatgtgcagtttctcagatccctcactttttgtctgcgtaaagaaatcagatgtcatcatgcttctactctacgtcgatgatatggtgatcactaggaacagctcaaaactactatccaatctcctcaatgaactcaacaagcagtttaagatgaaagatctaggcaaactaaactattttttgggaattcaggctcaatttcatcaaaaaggtctctttctatcccaacaaaagtatgcttaagatctactaatcattacagccatgaaagactgctcaccagtagctacaccactaccaattcagctagataatgctcctcatcaatctgagctcttcgaaaatccaacttatttttgtagcttggcagggagattatagtatctgacactcacaagacgagatattcaattctctgttaactatgtttgtcagaagatgcatgctcctactttatcagattttcacttgctcaaacggatcctgagatatgtcaagggtaccagggcaatgggaatctcgttcaacaaggatacagattgtaaattgagggcttacagtgatagtgatcatgctggttgtcactctacaaggagatccactggaggtttctgcacttttctaggcaacaatctcatctcatggtcatcaagaaaacaacctacagtagccaagagctctactgaagcagaatatagagccatgtcagacacagcttcagaaatcacatggattgtcaatctgctcaaagatcttggtgtccctcaaccgcaattaccagagctgttctgtgataatcattctgcagtttgccttgcttcaaatccatcttttcatccgcggacaaaacatttcgcgactcatgaccattatgtgcgagaacaggttgcttttggagaactcatagtcaatcacatcccagggcatctacaactcgctgatatcttcacaaaatcacttccagcagcttctttcgaatctctcagattcaaacttggcgtcgatttccca

SEQ ID NO: 163384 - DNA, 3450 bp, Arabidopsis thaliana landsberg
atgacgtacacggactttgtccgtacactccgagaggctttcagtttgaagtccaccgagatcaatcccataattagctactggatgccgggtgaaatgtcagtgctgatagatactaaacgccctcctgtatacattgacagtcagatgggtctcgagacgttttttttggttcgtggtgggtatctttctctcaacttgttcgtctctttcaataatacagtgaaggcgttcgggaatactgtctctaggtctcatggtgaagtttctgaaagtgaccgtgtgtttgatagtgctacaaatgttgatgaaaataatgaggatgcaaaggagcaagccgatgttgaagacgatacaacagaagaggatgaattggaggagggcaacgaagatgatgatgggtgtgatgattatcttggtgtggatggatctattgggggaagtaccctgtatcctaccacagacggtagtgaaggtattggcgaagaatacgattacaacaagtggaacgatgtaatagtagaagaatatgtacaaggaaatcttgaggaagacgtcagtctcactcaacagactgctcaacatccagggaaattcagtcgtttattggaaacgtgtacgtacacgggtgttagtgtacctagcagagatacaggggaattcagtcgtctcttggaaacgtgtacgtacactggtcttagtgtacctggcgaagaaacaatctctccattgggttacggtacacgctgcgaagggcaaagggattacaatcttatttgtatagacgaagtcaccggggatgaagtgatcgaaggtattggagcttcctcaactgggacacaaaatgataatggggtagttaccgcagctgaggcttaccaagtgtataatgaatttcctaagttacatggtggcgagttggcgaatctcggtaacgatgctgctcctgtgttcgatgacttactcaattttcgagctgatgagacacaggttgaaatcagcaccacaggcgaaactttgtttgttggaagtgtttttaagaatagaaaagtcctgcaacaaacaatgtctcttcaagcgataaagcaatgcttttgcttcaagcaacctaagtcatgtcctaaaacattgaagatggtgtgcgttgatgagacttgtccatggcaattgactgctcgcgtcgtgaaggattcagaaagtttcaaaatcacttcgtatgctacgacacatacgtgtaacatcgactctcggaagaactacaataaacatgctaattataagctcctcggagaagttgtgaggagcagatacagttctacgcagggtgggccgcgagctgtcgacttaccacagctgctcctaaatgatctgaatgtgcgtatttcatattctaccgcttggagagcaaaagaggttgcagtggaaaatgtaaagggggatgagatagcaaattacaggtttttgccgacctatctgtatcttctccaattagctaatccgggtacaataacacacctacactatacaccagaagatgatggtaagcagcgcttcaagtatgtctttgtctctcttggcgcttctatcaaaggtctgatatatatgaggaaggtagttgtggtagatggaacgcagctagtcggaccttacaaaggatgtctccttattgcatgtgcccaagatgggaacttccaaatatttccaatagcttttggtgttgttgatggtgagatcgatgcttcttgggcatggttttttgaaaagttagctgagattgttccagacagtgacgatttaatgattgtctcggacagacattcatctatatacaaaggcctaagtgttgtttacccgagagcgcatcatggagcatgtgctgttcaccttgagcgaaacctctccacctattatggtaagtttggtgtgtctgctttatttttcagcgctgccaaagcttatagggtcagggatttcgagaaatattttgaactgttaagggaaaagagtgctaaatgcgcaaaatacctagaggacataggatttgagcattggacaagagctcactgtagaggagaacgctacaatatcatgtctagcaacaactctgagtccatgaatcatgtgttaacaaaagcaaaaacttatccgattgtttacatgatcgagttcattcgggatgtcctaatgcgatggttcgcatcgaggaggaagaaagttgctaggtgcaaatcttctgtgacacctgaggttgatgagagatttctacaagagttgcctgcgttaggtaaatacgctgtaaagatgtctggaccgtggagctatcaagtgacaagtaaatccggtgagcattttcatgtcattctggaccagtgtacgtgtacgtgtcttaggtacaccaagctaagaatcccatgtgaacacgctctagcagctgcaatcgagcagttatatcattcacaaaaaaaaaaattagtctttcgattcgcttgttcttgctatccgtgagatggaggggtttcatatggtctcagaattgtgtcctctgatcactgggtggcgaatttatgtctttgtcgtgagagtcttcaagaaggttatatcgcccaacgtcttcgaactcggccttatcctggcagattacgaggttatttccgttaaatcattatgtgtttttctcgttcattcgcttaacttatatattaaactctctactatcatgttctgtatgtaaagaataaccgtattgaggccaccgttgatcgtcgccttgctccgttttacgaagaccgattcgttgaaaatgagtggaagacgatcacctctttcttggtccgtaagtcaactgacttagtcagagcaacaaagcatgaatacggcatactgtttatggatcggaccgtcgtcgttcatgccccaccgagatcaccaccagttccagatttcgatttcactcccttcgactacattttggataaatctgcttacaagaacgttttagtcggtgaggaggaataactctgacgcttcatttattacatttttgaaaatgtttgtttattatctttgtttctccatcatctagatgtcattggagcgttggttgatgttggcggattgactacagactattacggtctcaaactgagtttcaagttaaaagatagatagtaagtgttcttttcatttgttttatttacaatgtccctctaaacgctctgtccttatttctaacgtagcaatgaagtcttggagtgcgaagcccgcaataaacaggcggagtacttggatggttactttaagagtttgggtaagggaaatttcgttgtcgcactcagcttttggcgtttaaccgaattgtctaacccgaagcttgcgagccatggtgctatttcaaaggtggttgccaatccagacataccagaagttgtggatatcgcgatggtggttttt

SEQ ID NO: 163385 - DNA, 679 bp, Arabidopsis thaliana landsberg
atggctctcgacactatcaattctcccacctccaccaccacaaccaccgctcctcctcctttcctccgttgcctcgacgaaaccgagcccgaaaacctcgaatcatggaccaaaagaaaacgtacaaaacgtcaccgtatagatcaaccaaaccctcctccttctgaagaagagtatctcgctctttgcctccttatgctcgctcgtggctcctccgatcatcactctccaccgtcagatcatcactctctttctccactgtccgatcatcagaaagattacaagtgttccgtctgtggcaaatctttcccgtcttaccaagcgttaggtggacacaaaacaagtcaccggaaaccggttagtgtcgatgttaataatagtaacggaaccgttactaataacggaaatattagtaacggtttagttggtcaaagtgggaagactcataactgctctatatgttttaagtcgtttccctctggtcaagcattgggtggtcacaaacgttgtcactatgatggtggtaacggtaacagtaacggtgacaatagccacaagtttgacctaaatttaccggctgatcaagttagtgatgagacaattggaaaaagtcaactctccggtgaagaaacaaagtcggtgttgtgattattattattttttaccgatcgggattagc

SEQ ID NO: 163386 - DNA, 1368 bp, Arabidopsis thaliana landsberg
gtggaattgtctccatcaacgatggctcttaacatgatcaaaatctcccgagtcagccatgcaactaacttcagtcaccctgcttttcctcccactcactttctttgatttactttggctaaaacaccatcccatcgagcgagtcaccttttacaaactctctgagtcatcatctcacgactctttcttctccacaatcctcccaaagctcgagcaatctctctcccttgccctcactaacttcctcccactctctggtcacatcaaatgggatccacaagatcctaagccacatgtcatcatcttcccacaagacactgtctcttctctgtggttgagtccgacgctgacttctcaagactctccggcaaagagcctcgtctcgagagcaagttacgttctcttatccctacgttagaaacttcctctaactcttcatctattcttgctctacaaatcactctcttcccaaaccaaggcttctctcttgggctcacaacccatcatgtcatcatggacggcaaaacctcaacaaattttcacaaatcttgggctcatatatgtaaatacggaaccataccacaaggttttgttttacctacacattcagatcgtacggtgatcaatgtttctgtcggactcgaatttaagatcttgcagctcctgtcgtatctatcaggagacgtagacaacgacacaagaaccttaaagtctcctcccgctaaagagattgacgacgaccttgtccgggtcacgctccagctgtctcaagagaatatcaagaaacttaaagaacgaaccaagaatgagtcaactcggtctgatctttacttgtaaacgtttgtagtcaagtatgcttatgtgttgacttgtgtggttaaggcgcgtggaggcaatgtagatagaccaattcggtttatgtacgctgctgattttagaaaccgtttagaccctccggttcctttgacatactttgggaattgtgtcttaccaattgacatacattttgggagaagatgggtttgtgaatggcgtggagattctaagtgattccatcaaaagtttgggttcacgaagtgttgagtcattgtgggaagtgtacgaagaaggaactaaacacatgaagttgggtacacaagtattaactgttaccgggtcaaaccaatattggttatatggattggattttgggtggggaagaccggttcacacttaaatgatgtctctttaccaaaacggtgagttttctatgtcagcgaggaaggatgaaataagtggtgtggagattagtatatgtttgaagaaatgtgagatgaatgtttttcgatggcatttttgtgggaatatgggttgtcaatggtgtcaaga

SEQ ID NO: 163387 - DNA, 2785 bp, Arabidopsis thaliana landsberg
atggctggtcccgctacggtcatagttgtttctggttcgtgggtaaagaaacagagattcgtatttaaccccgacgaaagagggtgtagagttgtgcagctataagcggaaagaacagtttacgatagtcttttgaagatggtggtcgatgattacggagtgaatcagtcgactcatcagttacggctgagttacatgttctccaacaagactctgaaaaatatgcccttcgatactccactagtttatatctccaatgatcgacagttgcaatgttatctaggtttgacgaaattcgagcagctacgtctctgtgtggagtttacagcgaaagattcaagtgatattagtcggaaggacggatcaagaggaaggggttcgaaacgccctattgaatctgactcaagagcagaatctagattcgaagttccgagttgggggtttgaaggtgtctgttacgattatcaagaagatgaagcaggggacgatgaagcaggggacgatgaatcaggtgtcgatgaagcatctgacaaagaagcaagtgacgaagaagaagatgatgaattttctagccggtttgcttttttcgacgactccgatggtgcctcatctgatgatgaagactttgctgtatacggcgagcctaagaataatgacgaagattcaccgaaaccttctccttcgaagagaactcagaccatggaaatgatcggatctgctgggagcctgactgatttaaagttagagctgtctaccctaacactcgcggtaggccaacaataccgtagcaaattcgagttggagtatcgactcaaacttcttgcgataagggatggatttgattttgatgtaccaactatctaatacgactacagtgaattacgagtcctgggttgatagatgtcgctggagagttcatgcatctacacaaggggatgagccttatttttatgtccgtatatacgattcggaacacacatgttctgtgacgcaacattctaatcgatcccgacaagcaacacatgatgtactgggagttctttacagggactatcttggtgacgttggtccggatgttaaaccaaaaacagtcgaaataagcattttcgagtaaaggtaattacaatgtttcggctgacttatttattattgtatggctgacttatagaaatattacgattgcttatgggtatattatggctgacatataattacattccggttgagttatgacccttctacggctgacttaacatcactttgtggctgagttgtgttacagtttgactgagttataaatatattatggttgacttattaattaatatatttgtgtcaacagatgggttattgaaagtcatacaagacgctgaagtatgcaaggaagctcactctggaaacccctgatagtagttttgaagaactgccttcttacctatacatgataagacaggcaaattcaagtaaaatcgcgcgtcttcaaattgatgagagtggaagattcaagtatatgttcattgcgtttggtgccagtatcgctgggtttcctttcatgcgcaaagttgttgttgtcgacggtacgtttctccatggtagctacaaagggacgctcttaacagacctacctcaggatggtaattttcagattttttctgttagctttcggtgtagttgatactgaaaatgatgaatcttggcgttggttttttacgcaacccaaagttgttatgcctgacgcaatggatctggcaataatctcggacagacatcagtcaatagggaaagcaattggtgaagtgtaaccgttggctactcgtgggatttgcacttaccatttgtataagaacattttggtaaaattcaaaaaaaaacatatgttccctctggtgaaaaaagcggcaaggtgtttaaggcggaatgattttgatgaagcgttaaacgagattgaagagcgtgatcctcaactacatgcatacctccaaagacctgatgttcaaatgtgggcgcgtgttcatttccccgtgatagatacaatttaatgactacgaatatagcggaatcaatgcacagagcactgtcaaaagccagaaatcttcccatagttcgactgtaagaagcgatacgactatgatgacaagatggtttgctgaacagagagaggatgcgagcacgcatcaaactcagctcacgcgtggtgttgaaaaaccgttacaggtaactcagctgtaactgtgtacataagtcagtcgtaggatgcccataaaccagacattatgggcataactcagccataacatatctgttttttccttctcttctctaatatgcccgtgtcaccgaaacaaaacttatggatgtacaaacgattcatgctttccgcgtagaagtaacttatggaacatatttgcatgttggaaatgtggatgcaaaaaaatgcacatgtcgtcatttcgacaaagagaaattaccatgcatccatgcaatcgcagctgcagaacatatgggtgtgtctcgtatatccatgtgcagtccttactataagagcagttatttagtcaatgcatacactggtccaatcatgccttcagatacggaagtccctattcctcaaattgtagttgaccaaccgtgcttgcctccgattgttgtgaactagccaagcaggcccaagaaaataaggattaaatcatcattggaagtcgccattgggaatagataccctaggaaggaacacgcatgttctcgatgtaaacaagttgggcacaatgttaaaacttgtctggca

SEQ ID NO: 163388 - DNA, 1266 bp, Arabidopsis thaliana landsberg
atgaggaaactttcgttacaaaaaaagtcccaagttgacatcaccttctctattcacactctctctttctctattcactcttcatcagtctgcattgatacaatgataagtgtgttcttcgagactcaaagaggctcaccattctccattgaagtgggttactttgatacagtgttagagatcaaagagaagatcgagaagtatcaacgtatccctgtttcgaaacaaacccttttcttccaaggcaatgttcttcaagatcatcttgatatcggtcaatgtcagattctcgacaactctcatgtcgacttcttcgtccttccagaccttaatgacaacaacgatcaagttcttcaaacggaggagcaacctcctataatcggagatctcatttacggtgaggatttgcctttgacaactaaagttgttttgaatattcgacctttttgcccagttcaagattctccggtgagaaacaacgatcaatctccaccgtcagacgcagcaaaagatatcatcaaaggtcatcaagattcgccggtgagaaacaacgagcaaactccaccgtcagactcggttaaagagaacactaacattcaagattcgcctgtggggaagataatactaacattacgggtgatgccatattccggcaagattaaagctgcgaagaatcttcattttattacgtacaagacgtatagggtgaaaatgctgagacaagagttggttcagaatgaactaagggatcatttagatcggcctcaagatggtgattatttcttcgtacacaaagggagagtattgaacgaagatcagtcatacgagtggaacagtgttaaacccctggatacaattgtgattgttcccagacgtgttatccaagagaccagtaagatccaagattcgtctgtgacggttcaagtgcctcaaatggagcaatctccagcgtcaaactcagtcaaagagatcactgacccgaagaagaagattaaagtatatgtggtggcagcttcaagtgagtgtaaaggtctgaagagatttattgaggtggatgtgaactcgacggatcaagtgaaaatactgagaaccgagttggttgaaagtggtcggaggggtcatataagaatgcctcacgaaggatatttctttgtggacagaaagaaagagagagtattgaacgaagatcagtcattcgagtggaaccgtgttcttccagccgaaacagtttatatggttcgtggacgtgatacacattttgccttg

SEQ ID NO: 163389 - DNA, 996 bp, Arabidopsis thaliana landsberg
ctcatgagcttaatcaaagtatgggtttatgcaataatctccatatcttactgttactacacatcaacaagaatcaaatctggtgtttttcgattactatctgttcttcctgtttgtgttctgtttcttgttcttcctctgtttgtttcctctgttcacttttctggttccacagcatttttcctctcatggcttgccaatttcaaactaatcctcttctgcttcgaccaaggtccacttttcccacttccctcaaatctcttccgattcgtctgcttcacttgcttccccatcaagcttcaacaaaaccctaaacctcaaaaacaattgcctaaatgggttttcgcagttaaacttgccttctttggtgtgttgttgcatatttatgaatacaaacaatatatgtctccgactgtgctattggttctctattctctgcatatatacttggagtatgagattctcttagctccattgaaagttctgcttagtatctctctttggtgcgacctcgagccgcatttcaatgaaccatacttatccacctctcttcaagacttttggggtcgccggtggaacctcatggtcccggcgattctccggccaggggtctactctccggtgcgttcggtatgccagcaccaaatgaggtctgattgggcaaggttcatggggtgtatgacgacatttttcgtttctggtttgattcacgagctggtatacttctacataaaccgtgagaagcctactttggaagttacttggttctttgtattacatggggtttgcacggcgatggaaatagccgtgaagaggaagatgcaatggtcgttgagtccgatgttgtcacggttgatcacggtggggtttttggttgtcacaggttattttctttttttccgtcagattgaaaggagcaacatgttggagagacgcgccaatgaagcctcactattcattgatttcgtaaaacgcaagcttttcaattacactgtt

SEQ ID NO: 163390 - DNA, 1326 bp, Arabidopsis thaliana landsberg
atgaaacctccgtcgttaccgttactcctcctcctcctccacctctcagccactatctccgccgctccttccctctctccaactccatctccaaccacctctcccattccacctcacaaaccttcctcatcctcttccccattagacccaaaacaactcaaagcccttgaatctctcaacatccccaccgtcaaagatccttgcaaccaccgtcccaccaccaaatccacctcctcctccgtcgtaacctgcgacaccagctccccatttcgcctcgtcacttccatctccttcacaaattgctccaccgatctctccatctccacaacagctctcagagctctctcaccatctctaacctctctctctttcctcaactgtccttcactctcccctcctccacgtctccctgactcactccactccttcaccgccgtctcctccttcctccgccgccgtaatggcctctccggagtcttcttagctcgtctcgttaacctcactgacctcacagtctcttctgttccagtctcaacctctggtctcttcgttatcctaggaaatatgcacgaggtcgtctctttgacaatctcacacgcaaatctctccggaaacatccctaaatcattccactcaaatctcacattcattgacttatcagacaatctactcaaaggctcaatacccacttccattactctgctctcaaacctaaagtccttaaacttatctcataactctctctctggccaaataccaaacaaaatcaaaagcttaacttttctaaaaaacttatctttagcttcaaacaaactatcaggaacaatcccaaattcactctcatctatctctgaacttacacatttggatctaagtatgaatcaactaaacggcaccgttccaagtttcttctccgagatgaagaacctcaaacacttgaatctcgctgataactccttccatggagttttaccattcaacgaaagcttcatcaaaaatctcaactttttcgaaattggaaggaacagtgagctctgttacaacaaaactattctctcctcgaacttgaaattggagggtcttgctccgtgtgataaatacggttttcctttatggtctccgtcgcaaaaggaggaatctttgtcaggagaaaacgattacgacgttgaaggaggcaatgaggagaagacggagaatctgaagacgaaggaagaagaagaagaagaacgcaaaggttccaacaagactctgtttggtctcggcattggtcttttctcgcttgtgttcttaatcctcttcctcttttatctcgctaaaaggtgtcgt

SEQ ID NO: 163391 - DNA, 1171 bp, Arabidopsis thaliana landsberg
  unsure (1)..(1171): unsure at all n locations
atggttgtactccatgaaattcccgatggccctaacggcgacgatccaaacaataatcctcaagaaggagaagataatcaaaacgagaatcctcaagaagaagtaaagaatcttcggaatcttctagaacttccagaagaactcatcgaaagactcatcgcacacatcccaagatgtgattacccgtatatatctctcggcgtctccagagactttcgtcaagtaatcacttcggataaactattccgtgacgcgctcgctactaggtttcaacgagccggttctttatgccttaatcggatcctcacagactcccataatctggttctttctacgttggaccatcttccctttagaatgtcacataatccgttcacatcctacagtgttacttggagcagctgtggtcacaatcggatacaagatgtatgtaatgggaggtaccatcggcttgaatcaacccgtatctactgtgagtgtcatcgactgcagattccatacgtggcactatctcccggatatgcaaagggctcgttaccatgcagccgccggagtaattgacggaaggatttatgtgatcggaggacgcaagaaacaagatgctgattgggttgaagtgtttgatgtgacgactgagagctgggaaactgtgcctactcaatgccctaacgaggctagtgagaatggactgtttgttacatatgcggtgatgcagggcaggattttcattttggatcttgggcgtgtttttgcttacgaaccaagacaaggtttatggcagtcattgngagttatatgtcagttgatgagattctggggctcgtcttctcgtgtggtcggagattcgttgtatacacttgatcctatgtgtgttcttggacatgcaatagttgtttatgatccgaatgagttgatttggagacctgtgaagggggcatatattttgcctaagttttgttattatcagtgtaaaatggcgaattttggtgggaagttggcaattttgggatgttctaattccagccagcgtggtttgaaagatgtttggttcgtagagattgagttggaaaatcgtcaaagtggtgagatttgggggaaggtcgattcattggcgattgtgcttagatcagtgaagtcgccttccattgatctgtttcgctctgttacgttt

SEQ ID NO: 163392 - DNA, 646 bp, Arabidopsis thaliana landsberg
cttatagcaaaaataattaatctctctcccatatcacaaaggagaaaaacaatatgacaacatatggcaccaatcagaagtcgtctaacgacttagcccccaagctggagtacgtcacccgtggcatcaaccaacacaaaagatccggcctcgccacgcgccgcccttggaagcaaatgctagacctcggttccttcaacttcccccgcaaactagccaccgtgatcactagaatcagagccaacacggtctatttccagaccaattacaccattgtcgtcctcttctccgtatttctcagcctgatttggaatcccttctccctcttagttctactcgccctactcggtgcatggctcttcctctacttcctccgtgatgaaccgctcactgtttttgaccgcgagattgacaccgtatcgtacttataatcatgtctgttatcactctttccatcctttttttaactgatgcgaagctcaatatcgcaggaggccatcgtggcaggtgccttggctgtgttgtctcatgcagctgttaggaaaactgaagatcttttccaaaccgacgaagaaaccagtcttttaaatccgtaaaaagtttaatatcaactgttagactatttcaaattatggctacgattgtt

SEQ ID NO: 163393 - DNA, 1782 bp, Arabidopsis thaliana landsberg
atggtcaacattcaaatccccggtaacacagttgacgtagagggaaacccgatccctccaaaccaaacagacgttcctgaagccaccgctcctgcggtcctagcagaattgaggagcatgatggctcaacttcagaagaaagtaaaagatcaagaacaggcaaatcggtctttggcgcaacaactcgaagcagctacctcccaaggacagatcaagactactcgtttcggcgcaaggcatcttcacgatcgacgaacagcagcagatctcagtccaacatggctcctgttacacacacctggcaacacgatgaggcctatccgccgaaccgcaccggaaactggaagagatcgagccgagccggcaatcttgggaaatcgagacacgaatcgaacagaaggaaacgatccgcagctccctcctccccgagcacaaaatgtcgaggccaatcagatcggggtctcggacgatgaagattcagaagagaacgttcgatgggctgaggagtacgccagagaacaggaaataagcgctatcaagctctccctagccaaggcaaaaaacgagatgaagcttgtgagatcccaaatgcataacgcagtctcctcggccccgaacatcgatcgcatcttggaagagtcccacaacacacctttcacacgcacgatctccaacgcaataatctcagatccaggaaagctaaggattgaatacttcagtggatcctccgacccgaaaggacacttgaagtcattcataatctccgtggtccgagccaagttcagacccgacgaaagagacgccggtgtctgtcaccttttcgtcgaacacttgaaaggaccagctttggattggttctcaagactcgagggaaattccgtggacagttttcaggagctatcgacgctcttcctaaagcaatattcggtgctaatcgatcccggcacgtcagacgccgatctatggtcattatctcagcagccaaatgagccacttcgagacttcctcgcaaaattccgatataccctagccaaagtcgaaggaatcaacgacgtagcggctctctctgctctgaagaaagcactgtgctacaagtccgaatttcggaaggagctaaacttgtccaagccgcagacaatcagagatgccctacaccgagcctcagattacgtttcccatgaagaagaaatggaactactatcaaaaagacatgaaccgcctaagcaaacgcctcgtagcgataaatcccaattcagcgctccgaaccacaaaaagggcgctcaagacgggacattcattcaccatgaaggacgaaatttctctggagcccacaattaccaagctgatacaccccgaggccgaggacgaggacgcgggcgagaatcctacacttggacgaaggaccaacccgcaagaaacgagcaggaatactgtgagttacacaagagttacggccaccatacttccagatgtcgtagcctcggggcaaagttggcagcaaaattcctagtcggagaaatcggtggaggcttaaccatcgaggacttagaaacggagaaggccaaaaccgagcaagtctatgctgtggccaatcccgagcaggcggcccccgcggcgaatctcgaaggatctaaaagaggctgaggcaatcgcgaagcagatgacgatgaaccagaagctgctcgaggaaggatcttcacaattttaggagattcggctttctgtcaagacacgacggcatcaatcaaagcttatcaaaggaaggccgactcaaatcataac

SEQ ID NO: 163394 - DNA, 783 bp, Arabidopsis thaliana landsberg
gattcctcatgcatcatttctgcatccaccagtcttcaattttcagattccccaaagctgagcctagaaaattacaacatagacacagtagcagcacaagaagaagatgatcatgaccaaaaagaaggagtggaaggtataaagcttgaccttatgctagcaggatatgattctagtcaaccacagctcaatcaagaactcaatctcctcgactgcttagagacaggtgtagtcactccgagttttaacgggtcaacttccactgaacagaagctcttctcatgcaactactgtcaaagaacattctacagctcacaggcgcttggtggtcaccaaaacgcccacaaaagagaaaggactttggcaaagcgagggcaacggatggcatctgccgcagctttcgggcatccatatggttttgctccggtcccgttccatggacagtacagcaacagaaccttgggtattcaggcacactcaatgagtcataagccaagttcatataacgtttacggtggtgagtatggtcagatcaactggtcaaggataccactagttcagcaaccagcaatagcaaaactaacttcaacagagaatcattataatcatcatcagatgatgattgctccaccgttgacttccacatgtgaaaacatcggtaggttcgatgtaggaaggattccagtagagtttccaacttctgaactatggcagagaggcgaggaattgttgaagccagctgaagaagagaagcagaagaaccttgacttgtcccttaaactt

SEQ ID NO: 163395 - DNA, 1028 bp, Arabidopsis thaliana landsberg
cggcttcaagtgtcacacctgaacacgtgtcaacatcacattgcgatttccatttttcgttactctactccaatttccattttgtcttgttatttccatatccttctctatatatacgcagagtatcaatcaatatcattatcatcacagattatacaactcattgtttccgaacaaactagggttttgtttttccgttcgatttcagatactgatttgtcgattatgtttctagtaagtaaacatcttctgcaactgaaatccaaaagaccgaagaggtcgtcctcgtcgtcgtcttgcttcgatgatttcgtcaagagattacaaaaccacgctgcgatgtttaaaaagcatcttactacgcaactctttcagaagaagacggagaagaagcttcacctagtccttgatttggaccacacgcttatccattcgactcttgtttcgtaaatttctaaaaaggagaagtatctactcgaacaagctggttcaacaacaagggaagatctatggaaaatgaaagtcagaggagatcccatatccataaccatagaacacttggtaaaactacggccatttctttgcgaattcttgaaagaagccaacgagatgttcacaatgtatgtttacacaaagggtactcgcccttacgctgaagccattttgaagctgattgatccgaagaaactctattttggacatagagtgataacaagaaatgagagtcctcatacgaagacacttgatatggttttggctgatgaacgtggagtggtgattgtggatgatacacgtaaagcttggcctaataacaagagtaacctagtgttgattggcaggtacaactatttcagatcccaaagccgggtgttaaagcctcactctgaggaaaaaacagacgagagtgagaacaacggtggattggccaatgttttgaaattactcaagggaattcaccataaattcttcaaggttgaggaagaggttgagtcacaggacgttaggttgctgctaaaagatatagaatt

SEQ ID NO: 163396 - DNA, 561 bp, Arabidopsis thaliana landsberg
  unsure (1)..(561): unsure at all n locations
atgtcggacgaattacaattgatcgtggaagatgcggtttacagtttgcgcaaggcgattacacaccttgaaggggaactggtgaagatcagggccggaaaggcgagtcccgccatgctcgacgggatatcggtagaatattacggagcgcctacgcccatcgcgcaggtagccaatatcagcgtgctggatgcccgcaccatcagcatacagccctgggaaaagaatatgctgtcacagatagaaagggccatcatgcaggccaatatcggcatcacaccgcagaacgatggcaaccagatacggctgttcatgccgccccttacagaagaaagaagaaaagaacttttcaaaaaagccagcggcgagggtgagcaatcnnnnnnnnnnnnnnnnnnnnnnnnnnnnnnnnnnnnnnnnnnnnnnnnnnaactgcagaaagacggcctcagcgaagacgccgccaaagacggcgaaacctctattcagcagatcacagacaaatacattaccctcgtagacaaacacctttccgncaaggaaaaggaatgatggcggtat

SEQ ID NO: 163397 - DNA, 2762 bp, Arabidopsis thaliana landsberg
atggagtcgaactcgaatcccgagtcaaagctcaaatcactcatctttcaaatatatagtctgagcgtgggtttgaatccggattcatattttgatccggactgggattctatttctaagatgataccactcattactcaaacaatctctctggtcagctcaatggatttcgattcgcaaccggggtcgaagctcatgtcactcactaatcaagcaatctatgtcttcaactctatggattttgattcccagccagattcgttaaggaagctcatagctctcttttcacacaagctctctctcgtcaactctacggaatttatttcggagcaggacacgaattcacagccagacttggagtttttcgtgttactcattcgagaattatgtagtccaacaccggagccgccagagcttatatcactcatcagtcaaataattgacgaagtcgtctgttggaagccacagccagagttagttcgtgatttggagccagagccggagccggagccggagccggagattaatcttgggttgaaaatcatatctctcattactcaactaatctcccaaccaatatctttatccattaagacatctctcattcctcaaataatatctatggtcagtaaaattgatttggatgcgcagccggagacggaaatgatgtcactcactactcaagcagtctcgctcttcaactctatggatttgggttcccagccggatccgctaaggaagctcatatctctcatttctggagaaatctctcatgtcaaatctgtcagcgttttaaagcgggagcaagacccggaattgcgtcattctgctggaagtttactaagagtcccacgaggcttatatcgaaattgccatcccgaaatagatcccgggacaaagttattgaagcaggattcaaactcgggcacatattcgaacatagagcatttggagatggattcgaactcgaacacatatgtgtacataaagctttcggagctagattcagacctggacatagagttcgacctggaggcagatcccgacctctttttccgctattttaaaagagtgagtctcgattcctacctcatttccctcgttggtgaaacattgagtctcgagccacagccggagctcatatcactcatctatcaaatattctcactcgtcgtctctatgtattcagagtggaaaaggcttattttcctttaccctcaagtacaagtaaaattgaaaaaaggaaaatttcaagtgattgacgaagaagtctcgtggagcagcaatggcaagtggaagtgtctcccttttaactggaagaaaatctggatatctgaagaaggcgttagtcatattcgctgccaaacttgcaatggcgagaaccatggagaatatgaaaaggctccagttgtgatcaaacatactcttcatccaaaacattccctccaacttgtcttgttgaatggggacacaaccagggaatgttattgttgcgataaagatctcaacaagatattttattattgctcggcttgcgatttggctattaatcttgcctgtgtggagaaagcaccagtcttatcgatcgaccatccaaagtgccatgagcatacacttgccctgtttccaatacacacttcattaacttgcgatctttgtggcttggccgattcaagctgtcctttctatatttgttccccttgtggctttgcggtccatcaaacgtgtaccagcttaccacgtataataaacatatcaggtcatgaacatcgcattacttttaccccttcttttgatcaaagagattggtcttgtagtgtttgtcacaagaagatcgacaatgattacggaggctatgtttgtaccaaaggttgttcgtatgcggctcattcaaaatgtgccactcagagcaatgtgtgggatggtatagaacttgagggagagccagaagatattgaagaagaagtgcttcctccgtttttggagataagtgatggaatcatacaacattttagtcatcagcaacatcatatgaaacttgacgagaacacgggcagagattacgacgagaataaggagtgtgaagcatgcatcaggccaatctattccggtaacttctattcatgtttggaatgtggttttattctccacgaaaaatgtgcaaatctctctcgcaaaatgcatcatccgatacatccacatatgctcactctcaaagtaggatctcggtgtcttgtggaacagagtgttgatccatgttcagcttgtccttggaagtgcaaagccggtttcttctatgagtgtgaacaacaggataaagatgaatatcttttcaagctacatgtgcagtgcgccacaatgtctgagccattagtccataaaagtcatgaacattctttattcctaacatccaaaccaggagagcaaagaagatgttccgtttgcaaaaagttagaacagttttcaacaaacgaaacattcaattgcattgagtgtgactactttgctttgtgttttggatgcgccactttacctaaaaggtaaggtatgagcatgataaacatatgctcactctttcttatggggagaagataagtaccaagacacattggtgtgaagaatgtgagagaaaaatagatcagagcatcttgtatccgtgattcagctgatagaggtgccaaagtagcttgatggtcattgctatggttgtaagttgtaacaaatattattgaatttgtgtgtttgttgtattgactagtcaa

SEQ ID NO: 163398 - DNA, 1138 bp, Arabidopsis thaliana landsberg
tctgatattgatatacatttagcgcttaagatatgtaagtgcagagggggagcctcttattctctcaaatcattcgaagttttgttctataaagagaaatcagtggtgtattttgggtcggtttttgaatcctacacatcaaagaatggctaattagatattagacatgcctagaatttggagattatcctctagagttcggggtattgccttatcgcaggagagacttcagtttattttaaactctgatgttgatttagatgaaatcttaaaaacaagggtttggacacaagacgattggtgtgttgtaatggaaagatggattgaaaaacctatagatgattatttgatgttcattccagtttggattcgtcttcgtaatattcccgttatcattacacaaaggagacgattaaagaagtagcagagtgtgttgggaaggtgttactagtactttttgatcctgaaaaatctcaagctcaggattatgtctgtgttagggttctctttgatgttaggaatccgcttcggaagtcaaaagaagtacagcttcctactggtgaaatagttgcaataacctttgattatgagagaattagatgttttcattgtcaaaggctaactcatgagggaagagtttgtgtctgtttcttcagccaagtcatgtgttagtttctagtgaggtttctaaagtcacaaataaacaaaaaggattgtttataaataatggaggcaaagctatctccaagcaagaaactcctatactactagctgatgcgatgaaggcttcttcttcatcaaaacaaattcggacttctccaaggagtttaatgatgatctcttcttaggtttttctggttttgatttatctacgggttttaaagcaaacatgtctgatgctggttcttcagggttaagtatgaagcagaaaaatcctaagaaaaggaaaattactttgttacgataaactaaatccaaatcggatgggtcggagggagatcaagttagttttgatgattctgagaatcggtttgctaaagtgttcaagagaaaagtccatgttacatggtcagaatcttctgcttgtctaaagaaagataaaactacggtggttccaagtgaaccgccgttggatcag

SEQ ID NO: 163399 - DNA, 1101 bp, Arabidopsis thaliana landsberg
atgtcaaacggagaagagagaagaagcatgacgtttggtattgagatgcttcctgatgatttagtattaagttgtctagctcgtgtgccaagaatgtactatccaattctctccttagtctccaagagattccgttctttcctcacttcaacggagctttaccaaacccgaaacctcttaggcagcaccgagagttttctcttcgtgtgcttacgaatcgtcaacgattctaacccactacgtttgtttactctctgccggagaccaaatagcttgacgaaagttatggtcccaattttatctcccgattctattcccaagttcttgccagatgttgtactggttggttctaatatctatgtcattggcggtttaataaacaacaatgcatctcataacgtcatggtcatggactgtcgttctcacacatggcgtgaggcccaaggcatgtgtgtcccccgtgtgagcccatctgcttgcgttcttgatggaaaaatatatgtagcaggaggctgcaaaaatctaaatgcaactatgtggatggaggtattcgatacaaagactgaaagttgggagtttgtgtcgagtcctggcgaggaaatttgtagggaccttactagctgcgaaagcatagggtatgatggaaatgtctacgtggaatctatgaagacgtatggactttacgagctgcataaagggagatggagagaaggacaatactcgatgagtaggggtggtagtttatcatctcaatgtgtcatcgataacgtgctctatcgttcttggagctatatggtcgagtggtacgactctgagaacaaattgtggaatagcttgaagggtttggagaaattgtttatcgttactaatcagtatgttcctactaaatgcgtgaattatggtggaaaattggcggtattctggctcgagaaggtgtatgctaaacatcttcatcaagagacaaaaatttggtgtgcggtaattacgattgaaagacgcaaaaaagaggagatctgggggactcgtgagtggttcgaccttgtgtttacaactaatgaggaaatggttgacttaacgcatgtttttgctgctactctttaa

SEQ ID NO: 163400 - DNA, 3461 bp, Arabidopsis thaliana landsberg
agtaggagttgtttagctgtggtgtttgcttttgagaaattcagatcttatctcgttggatccaaggttattgttcacacacatcatgttgccttgaagtatttgatgcaaaagaaggatgctaagcctagacttttgagatggattttgcttcttcaagaatttgacatagagtttagagataagaaaggagttaagaatggtgtagctgatcatttgtcacgcattaggatcgatgatgatgtccctataaacgatttcatgcctgaagagaacatatacatgattgatacagctgaagaagatgactgcaaacgtgataggttgcagaatcgagcttcagtgtcgatcgacactcccattatgtcgatcgacactcacatttcagagaaagttgatattcgtagttccgcgatggtgtcgatcgacattattgcacctgtcgatcgacacccttctgaatcgacaagaaattggtcaccaactgagaaatgcgccctcacaggggtcgagaaggactacccatggtatgctgacattgttaattacctagctgcaaatgtggaaccggataatttcacagattacaacaagaagagattcctaagagagattaggcgatattattgggatgaaccttatctctataagcattgttctgatggagtttataggagatgcgttactgcaacagaggttcctgatatactatcgcattatcacagctctagctatggtggtcattttgcaaccttcaagatagtatccaaagttcttcaagcaggcttttgatggcctacaatgtttcgggatgctcagaagttcatatctcaatgtgatccttgtcaaagaaggggaaagattagcaagcgtagtgagatgcttcagaaatttatcctcgaagttgaagtcttcgactgttggggtaaagatttcatgggacccttcaaacctttcaacacgaatctctacatcctagtagctgtagattatgtctctaagtgggtagaggctatagctagtccgaagaacgattcagcaattgtcatgaaactcttcaagtctatcatcttccctcgatttggagtgccacgcatagtcattagtgacggaggtaagcatttcattaacaagattcttgcgaaagtgcttcttcagtatggagttcagcatccagtggctactccctaccatccacaaacaagcggtcaagttgaagtttccaaccgacagatcaaagagattgttgagaaaacagtgggtaaagcgaaaaaggagtggtcttacaagttcgatgatgtactgtgggcttataggacaactttcaaaactccgcttgggaccacaccttatcatcttctatatggtaaagcttgtcatcttccagtggaattagagcacaaagcagcttggacagtcaagatgatgaattttgacatcaaatcagctggagaaaggagacttattcagttgagtgagcttgatgagatacgaattcacgcttatgacaactcgaagctctacaaggaacgaacaaaaacctaccacgacaagaagatccttactcggacctttgagcctaatgaccaggtacttctttatgattttagattgacattatttcctggcatattgtcttctcgttggagaggtccctacacagtccactcggctaggccatatggaacaatcattctcaaaaacaacaatgacaaaccatttggtgtgaatggacagagagtcaaacactactgggctgaagctgagattccagtagaaaagcctttggatcttcaggacccacctgttgattaagcaactacaaagtcaagctattggctataaacaaccgcttagtgggaggcaacccactggtaagtatttctcctttttattcatttcattcatttgatttctaaccaaaaacgcgatggtctcattttccaggtaagtcgttttaacctaaaacttcatcttctttatttcatttttctcaaaaccgccgaattcactaaaacctccatagatccttcgattcttcaccatttctcgtgatttcaggctctaaactcaatagaatctcaccctctatcttctccaagtgtcaattccatcgatttgcaagatcacaggccagaaaaagaaggctaggaagagcgtcggactttcctcctcctccgccgtccctccacaccgccggtcacagcccttcccaaccggaatccgaaactgcagcccctcaacctcctattcatcgatttccatggccaaagcatccaaaagagagaattccttctcaaagggtttgggagaaagatatcaacaaggaattcactaaaggtgactatatcaatcgccctttttctccagattgggaagattatgatacattgttctataatgcctggatgaatgtagaaattttgcctactcgatttgcggatttcggtttgatgcagcgtttgcagatagagaaatcagttttaggactgctagatgacataggtttgggaaccatctgttgtaggcagtatgatttgtatcctgagttgattaaacaattcatggcctctgttagggtttcttatctgcatgacaggaaacgcaacgctcaggaaggaactcttatcttcttcattcgcggtgtcagatacagtttaccactgcgagatttgggtgacatatatgggtttgacaatgatctcactggagtttccctgcctggtcagtttaaggattctctgattttctggagcaggtttggtaatggaatctatgattccaaggacgcagttcattcagagatccgccaccctgttctgcgatatttggttaggcttattagtagcacactgttgtgcaagatggagcctggcaagatgagactatctgagttgttattgctctatcacgctcttcatgacttctttcctgacagccttggatttgagcaggttaaccgtaatgtcaactttggtgctgtgttcgctcatcacttggtttcttttaagatcaagccctttacaggtagaggacacaaatctgagagagttggcagtcttctcactcccatattcgagcatttccgcatcagctttgagggcgaagaagtcaacaccacgtgtttcactatggataagacttacctgaagaactctcactggcttaaaggcaacctactgtggtgcttcatagatgatacaggtcagcacatgattcagttacctcaccctgcacttacagagattacaggagagcatgaggagataggctttcatcccgatccctcccttctgcatgccgcaccacgcaccaggcgacagagaggttcaccttcaggatctgcacctacacagaccgaggacgagttcattgaccttgctgggggtccgacagttggatcttcctcatccgcttttccatatcagctgccttctcctccacccatcccgatggagaaa

SEQ ID NO: 163401 - DNA, 2424 bp, Arabidopsis thaliana landsberg
tgtagtgcaatcatcgaacagaagatcacacctaagaaattaggagatcctggctcgtttactttaccttgttcacttggccctttaccattcaaccggtgcctatgcgatctaggcgaatccgtaagcttgatgcctctctcagtggccaagcaacttggtttcagtaaataaaaggcttgcaacatttctttgattctagtagacagatccatcagaatacctcatggtttgctagaagacttaccagtaaggataggcactatggaggttcctacagactttgtagtggtagaaatggatgaagaacccagggaccctttgatcctaggaagacccttcttagctacagttggagccaccatcgatgtcaagaaaggaaagatcaatcttaacattggcaaagaactcaagatgacctttgacatcactaacaccatgaagaagcctacaatagaaggaaaggtcttctggattgaagagacggatatgttggctgatgaactgctagaagagctagcagaagaggatcatctacaaaatgctctaacaaagaatgggaaagaagaagatttacacttgaaaactttggggtaccggaagctgttagatatgcataaagaagtttagaatccagaggagtatgaggatttgtttggaaacgcaaaggagtagaatatactcgatcacgtcattcaacagactgtccacccaatccactcgaccaagcactcgatcacaaccttccctgtgaagccgatctaacatccggcgactggtatgaactcaaggcaccaaaggtggaagtgaaaccgctgccaaaagggttaaggtacattttccttcgacagaactctacttaacctattatcattagtgatgagctaaacaccgatcaagttaatctgctatttacagaactgaaaaaatataggagagctataggatattcactagatgatatcaaggggatctcaccgattctatgcacccatagaattcatttagaaaacgaatcttactctagtattgaacctcaaagaagattaaacccaaacctgaaagaagtggtaaaaaaaagatacttaaactattagacgcgggtataatctaccctatatctgatagcacttaggtatctgcagtccattgtgttcccaaaaagggaggtatgacagtcataaaaaattctaaagatgaactgatacccactaagaccataacaagacataggatgtatatcgactataggaagcttaatgcagcctctaggaaagatcatttccctttacccttcattgatcaaatgctagaaagattagcaaactatccctactattgttttctagatggatatagtggattctttcaaattcctatccacccaaacgatcaagaaaaaactaccttcacttgtccttatgagacctttgcctacaagcgaatgccttttgggctttgcaatgcacctactactttcaagcggtgcatgacttccattttctcggatttgatagaggagatggtagaggtattcatggatgatttttctgtttatggctcttccttctcctcgtgtttgttgaacctgtgcagggtacttaaaagatgtgaagagacaaacctggtactaaactgggaaaaatgccatttcatggttagagaaggcatcgttttggggcacaaaatttctgaggaaggaatagaggttgataaggctaaggttgacgtgatgatgcacttgcagccgccaaagactgtcaaggacataaggagttttcttggtcatgcaggattttacagaagattcatcaaggatttctccaagttggcgagaccgctcaccagacttctgtgaaggaaaccgagtttgcatttgatgaagaatgtttgacagcctttaagttaatcaaggaagctttggtcactgccccaatagtccaagcaccaaactgggacttcccattcgaaatcatgtgcgatgcttcagattatgcagtaggagcagttttgggccagcagatcgacaaatagctacatgtgatctactacgcgagcagaacgatggatgatgcacaggtaaggtatgccactatagagaaggaactgctagctgtggtatttgcattcgagaaatttagaagctacctagtgggttctaaggtgacagtttacactgatcatgctgctctgaggcatataaatgcgaagaagaataccaaacctaggctgttgagatggatcttattgctccaagaatttgacatggagatagttgataagaagggaattgaaaacggtgtagctgatcatctgtctaggatgagaattgaacacgaggtccctattgacgactccatgccagaagaacagctaatagcaattcagcaacttaacgagagtgctcaaattcgaaaatcatta

SEQ ID NO: 163402 - DNA, 816 bp, Arabidopsis thaliana landsberg
atgcccccgtacgttgtcgaaacccccctcttcgagccttacaagcccaagaaacaatacaaattgtactcttcgatgcttaccatcttcttaccgatcttcacatacattatgatctttcacgttttcgaagtatcactatcttcggtctttaaagacacaaaggtcttgttcttcatctccaatactctcatcctcataatagccgccgattatggttccttctctgataaagagagtcaagacttttacggtgaatacactgtcgcagcggcaacgatgcgaaaccgaactgataactactctccgattcccgtcttgacataccgagaaaacactaaagatggagaaatcaagaaccctaaagatgtcgaattcaggaaccctgaagaagaagacgaaccgatggtgacagatatcatttgcgtttctcctcccgagaaaatagtacgagtggtgagtgaggagaaacagacagatgatgtagctatggaagaatacaaaccagttacagaacaaactcttgctagcgaagaagcttgcaacacaagaaaccatgtgaaccctaataaaccgtacgggcgaagtaaatcagataagccacggagaaagaggctcagcgtagatacagagacgaccaaacgtaaaagttatggtcgaaagaaatcagattgctcgagatgcatggttattccgcagaagtgggaatatgttaaagaagaatctgaagagttttcaaagttgtccaacgaggagttgaacaaacgagtcgaagaattcatccaacggttcaatagacagatcagatcacaatca

SEQ ID NO: 163403 - DNA, 3087 bp, Arabidopsis thaliana landsberg
atgactaacagagtcatcagagctgatgtagaaggagttttgagagataaggatgggcaagcctacaataaggctggtcagagattgaatgatcatggactcatcctacttgaggacgtcgatgagaatcatgcgcacctcaacgcgcaattagctgctagagacgcagcagggctcgctgtcgatcgacaccaacagaggtgttgatcgacaccatcgagagcagcacacggatacaatcggtgtcgaacgacacaacagaggtgtcgatcgacaccaacaccagattcctgcagctattcctccaactgcggaaccacgtcgtactcttggggatttcaacaggcccaacctgttctatgctaattgatcagcgatcgtacccccacccttccagaggaacgtctatgagctgaagcctcgctactttactttagttggtcagcaccctttccatggcttatctcatgagcagccaatggaccatatagagcgctttgaggaccttgttctaagcatcaagactaatggagtctcagaggactacctactgtgcaagctcttcccttattcacttgctggggaagcagcttcttgactgaaacaacttaaagcaggttccctcaagacttggagaagcatcaagatagccttcttgaacaatttctacgatgatcctaagtttgatgagttgagaaacaagctgtctaccttcacacagggtccagctaaagcttaaaaggctgtgtggttcatttcaatgagtaccaacgggactgcccacatcacggtttcagtgacgtacaacttctaggtactttcttcggaggagtcaattggagataccatatggctctagatgcagcaagaaatggtaacttcaacacacgttacccaactgatgctacaaccctgatagagaacctcgcttgcagcaacagtaacaagaatgctgattttgagaggaagaagattgatggagctatttcaggtaatcaaatggcagaggtgaatgctaagctggattcagttcataacttgctcacagggaagaagcatgtccactttgcagctgaggaagagactattgagcctgagcctgagtcagaggaaggagtcttctacatagatggtcagggatacaggaagtttgggcagccacagggcaacttcagtggcaacaggtttacagggaaccagggttcctccaactacactccaaagcctgctttccagaagacttttcctcagagcagctttcagaggaactatggtaattcaacttaccaagccccccctccaccctcagcagagacaagaatggaatcgatgcttgagcagattctagagagccagactaagcttgttgtggagtttaatggcaagtttgatgctgtctacatagatcttaatgggaagatcgataatcagagctctcacttgaagaagctagatgtacaagaagctcaaactgcacaatctatcaagagacaagagggttttcttcctggtaatcctgatgctaacccaaggaagaaccgcaatgccatcttgatcagagaaggagatgatgtgtgggaggaattggacactgaagacgagttggagctcgcagttgcagagatggtgttgaccgacaccctcctgtgtcgatcgaaaccatatgggacgctcttctcagagacgactcaatacgacggtgtcgatcgatacccctctagtgtcgatcgacactggatccggacaacaccttatgaggtgcaaatacctatgctgcccgagtctgtctacactcctcatgtcccgtatccgaggaggcgtctttctaagcaagagattcatgctgctaagtgcacatccataatggagaagatcctccatactcttcctaaggatgcttctgagacatcttctgcttcactcaacatgtatgtcaagcgacttgttgacaatggaattagctcagatgaagctgagctgcttaccagagacatcagtgcaatcatgctgcctaaggccaagaaggagaaggcacaaagagtagatatagctgagtacatccgcaccattactcctggtctgaccactgagaagcttccggatccaggtagctttgtccttgattgctctatctccacaagcagattcagccgctctttgtgtgatttgggatcaagcatcaacctcatgcccaagtctgttgttgagagactagacatgactcagtacagacctactcgcatcactcttctcttcgcggatcgttccaagcgaatctctgaaggaatccttgaagatgttcctgttaaggttggtaactccataatccctgctgatttcgtggtcctggactatgagatggaacccaagaatccccttatccttggaagagcattcctagctacagctggtgctaggtttgatgtgaagagagggagaatctttctcaaggtttgtgatcagagatggagtttggcatggatagttcagagcttactaagcctatcagttgcattgcctccagcacattcacaccttctcaaactgatcagaatcccaccacagagccacacacaacgcttccattcgctcagctcgccaatgagatttgcagagcaacggtgtcgatcaacaccactacccctggcgatcgacaccctcgggtttcacagacagagggttctgcacaatctcttcagcccacaccacttgaggacctatgcgataagttttcctctatcttttctcctgctttaccttcgattaattctttaaattcttcgaggtctgcttcattcgataacaaacctatagttcttcgaaagcttgtttttcctgttgttcttgcaggtgacgagaagagtgtcgatcgacacaccactgagtgtcgatcgacacctgcagctgccccatccagatcagtttacacaccgccttggaaggataagaggcagcagcaatccttcaccactccacctacatcctgaaatccgccaagtcaagctattgactcaaaacaagcgcttagtgggaggcaacccactggtttgattttttttttttttttttttttttgatttattttac

SEQ ID NO: 163404 - DNA, 3631 bp, Arabidopsis thaliana landsberg
ggaagtgtataaggttttgcttccatcctgagaagaataaagaagaaggttgggtttttgctgttgacatctgctgttaaaatggggattgagttttcagattccgtaatgagaagagagattcttcataatgttatgaaatctgcttttgaggttatgtggttagggatggaaagagagtttgcgataagagggcttcaatatctcgataagtaccttgcgaaagaagcgaagttgtgtaaatggagtagcaaacaatgcggttttgttgcagcgtttgcatatgcgatcgcaggagttggaacaagtactaaggaagaagccaagaagatctttgtaatggttacaaacatggataagtatgttctgaatccggcttttaaactcgaacattttcgtgttgataatcaagatcttggagtagactctgaccgtgaattgtactacatgtttaggcaatgtactccaatggaagtcttgagtttctttgcaatacctggttctgattataggtctagagagatagcaatcaaaagactctatgattcactttgtgatcatacttcaagccagtgggaaatagatgtttcagagattagaggtcttcagccattgctcattacttgccttaaggaagaaggattgcctgagaacatatacaagattcttggtcaggtggtgttccacgttgcgcaggagacattcacctacgagaaagacccgtggttcgatctatgggactatattgggtgaggaagcaaagtggagttcgagaaagcggtttatatcttccagtgtttaacaatgaggcttgagtttaaagatattgttgttcctgcgataactaatcttcttccggagattaacagaaacctaaccccaccaagagagttgttggtagataacagtagatgggtcttggcgtttacaggtgcgtactgttcagctattcacttgctagaggtcaaaagtcacgcgggatacgttaaggagattgcatataagatgattgattcagtgagagagcttgtggaaagaggaatggaagttggacttgtgacgagagctttcagagatcttcaaagtattgtcaaaaaacaatgggactggtacatgacttgtgaatgcagattccttaagggtttgctttggaggctctacgcaattaaaggtatgaaaatggaaagtaagagcatcttcattggtgagatagtacttcataatatagtattaatatttttatgtttaatttaagtagaaaaatttatactaaaattgtatttccattggtatgagtatctcattaacattaacatattattatatgttttttatattaaatttaatatatctacaatattttcgaacatatcaattatttatttttacaaattatattattaaatagttttattatttttaaaaccataattaaacataattaaacattactttacatataaaatcaaaataaaaaaatatataaattaaacataaaattacatataaaaccatgataacataaattaaatagaaaaaatatataaattaaacagaaattacatataaaaccatgataacataaatcaaagctaactatattatctattatggttttactcttcatttgatgatgcaccaaacttttgtcatatatgctcaactaggtcatcttttagttgttggtgcatatctctatcacgaagtcgaattcgattgccgagaatgttgcaaaataaaaatagaaaattttaaatgtttgtttctaattaaaaaaaactattgtatttataagttattattatgtttaatgcttaactaacaccaattaaaaaatattcgtatataatttaaacatatacataatagagcttgttatatagataatttaattttatgaattttaaaaataaaaaataaaaaaaataataaacagatcaagtatttaattgatgttataaagtatagatgattttatttataacaaagaaaataaattaataacaaggtgacatgtggaagagagagaaagtttctccaagtttctcattttaaaaacgattctaagaaaaactgattaaaaaaatattattttaatattcttgataaatttttattggagttttttcagtgagaacccaccattgaagatcgtttaagtatgtgttgcggagaatcaatgttaatatgaagaggtcagtgaatgaaaatcttaaaatcctcccaacgagtgagtttaattggcttaggtaaattgattctcgttatcaaccaagattcttcaccgcctaaaaccttccggctaagtcagtagtcttccaaagtcaacgacagatttttcctcttttccttttttagcaagtttcctttttacttttctttagcatctgaataagcaattttccggtataaagattagatttacctttttctattgcacatgaaaaaagaaaagatgaccttttccttttaataagcaaatcatagtcttactctctagtctctatataagaagatctttcaccatagttgttgttattcacgattcaattcttcatctctcgtaaaccctaatcttgctgcaaaagtttcctgaattcttcctctctcaacttttgttacttgaaacttttttttcgtttcaaagatgtcgatgcaaattcacgcaaagactctcacagaaaagaccataaccattgacgttgtaagctccgacaccatcaataatgtcaaagcaaagatccaggacatagaagggattcctctagaacagcaaagactcatcttttccggtaaattgctagatgatggccgtactttggccgattacagtatccaaaaagattcaatactccacttggctctcaggttgagaggtggtatgcagatatttgtcaagacgcttaccggtaaaaccattaccctagaagttgagagttcagacactattgacaatgtcaaagctaagatccaaaacaaggaaggaatccctacggatcaacagagactaatctttgccggtaagcagcttgaggatggtcgcactcttgctgattacaacatccagaaagaatcaactctccacttggttctcaggttgagaggtggtatgcagatttttgtcaggacacttacccgaaaaaccataactttggaagttgagagctcagacacaatcgataatgtcaaggccaagatacaagacaaggaagggattccaccagatcagcagagactcatatttgcaggcaaacagcttgaagatggtcggacgctcgctgattacaacatccagaaggagataacacttcatctcgtgatgcgtttttgtggtgggatgcatatatttgtcaacactttgacgggaaagatcatcacacttgaagtggagagctctgatacgattgacaatgtgaaggcaaagattcaggacaaagaagggatttcaccagaccaacagagactcatctttgcaggcaagcagcatgaagatggtcgcactttagcggattacaacatccagaaagagtcaactcttcaccttgttctccgtctccgcggtggaagcttctgaacaagaagtctatggcagcgctttggttttctttttttcttgttatgttttaacttt

SEQ ID NO: 163405 - DNA, 1200 bp, Arabidopsis thaliana landsberg
atgaatggagaatccagttcaaagaggaacggaccaagcactttaccggttaaagaggtcaggacagatatgcggtctaaatactcatctgacctaagttcttacacatccgcttgtaaaaaagactccaacctcaaatcctttgattcttcgcttcaccaacgaaccaacataatcatcacctcgctcgctgctcgagccgagactcaatctttaaacctagactcactcatggaggtttacggatttctgcttgaactaaaccaaaatgcagtaagagtcattattgaaagcagagaagatgtctggaagaacaaagatcttaagtctttggttgatgtctacttcaaaagtacttccaagtccttagatttctgcaataccgtcgagaattgtgtcaagagaacagaaatcagccaacttatcattcggttcgcggtgaaacagttcgaggcagagtcagtggacacggatcttggaggagataagaagaagaagaagtatacgaaaaccttggaggagctgaataaatttaaagctatgggagacccttttgatggtgaattggtgactcagttcgactcggtctatgatcagcaggttttgtttcttgaggagttgcgtaagcagagaagaaagcttgataagaagcagaggaatgtaaaaacattgaggacggtgtctaacgtgtttttcgctactgcgtatgtctctgttcttgtcttatctgtggttgcaaccacaatgagcgcaccgccagtggtgtgtgcggttgcctctggatcgaccgcaccgattgagataacaggaaaatggtttagccagatgtggaaaaagtacgagaaagctgtgaagagacagagaggattggttttgacgatggagagtagagtgcaagttaacaatgaagcgatgaagaatataagatcggatgttgatgaactgagaagttgggtttcgtcgattctggagactgtggactttgctgtggagagagaagaagaagaggaggcgatgggacttgcgatgcaaggaatcaagaagcatgtagatgggtttactgagaaaatggaagaagttggtgaaaatgcggctaagtgtagcaaattcattgctttgggaagacttcttgttctggaacacatccttgggttacctgctaattgagtttttgtttaaaaggtctatattatcattaat

SEQ ID NO: 163406 - DNA, 1321 bp, Arabidopsis thaliana landsberg
acaaaaagccctccactagttttctctttcaaatatgaaggtccatgagcatacactcacgctcatgccaagattgatctccttcgtttgtgatgcctgtgggacgaaaggtgatcattctccttacatctgtgttcaatgtgatttcatgaccttccatcaaaagtgtgctcgtttaccacgtgtcattcatgtcaatcaccatgaccaccgagtttccttcaagtatcctcttggtcctggagattggagatgtggagtttgtttggaagagattgattggtcttatggggcttatatttgttccatttgtccttgttatgctattcattcactatgtgcaacaagggatgacgtgtgggatggggaagagctagatgaagtacctgaagaagttgaagatgtcgagccattcaagaggaatgatgacatcacaatcactcatttcgctcatcattaccataacctaatgagcttcgagaaaggatgtggagaaagtagctggtgtagtggatgtctttgccccatcggtacttcttgctctctctacaagtgtccagattcagattgcagtttctttcttcatgaaacatgtgctaatcttcctatgaagaaacgacattttttgagcccacaaccactggcacttagctttgacctccttcaacgccgccatattggcgaagaaatttgcgaagcttgtcatcaaattttttgcaaaggattcatttactcgtcggagttgggagagaacttcgacttactatgcagttcgattactgtgccatttatccatgaaagtcatgatcatcatttactctacctcaaactagaacatggtaacgtcaagacttgccagggttgcggcatcgatgaaaaaggagtcgccataggttgtaccaaatgcaattactttttggatttccgttgtgccactctaccattaacggtaatgcttcccaggtatgatgatcatccactcactctttgttatggtgaagaaaaggcaagcggcaaatactggtgtgatatttgcgaaagagaaacaaatccaaagacttggttctacacttgtaaagactgtggggtcactttacatgttttctgtgtagttggggatgtcagatacgccaaaccaggagcaatgatcaagtactatatagaattgctgtctaacaatagctcttcaaggccactttgccaccgctgccattgtcgttgcctaggtcccttcattcttaggaaaagaaagcaacagtattgttcttattactgttacataatcaccaaaagtaagaaggagtactccaaaattaagttg

SEQ ID NO: 163407 - DNA, 1914 bp, Arabidopsis thaliana landsberg
atgagtcctagacagtctccgtcgatcccgagcgcttctcttgtcgattctagcgactcaaatcacccagatgatcttcccccgatctacaaacggagagcagtttggacatcttctgaagagtatactgtttcttcttcggatgcccccgagcaggcgactcccgtcgcggctcgggaagataccaatgccgatatcgctcgggaactggatttgcccgatgatcccgagccgcctcttgttcgcaactcttttgccccgatggctgacgaagccgagacatccaaattggcgagaagtgcctgagcccttcatgccgacggttaagattgaggattttctttacttcggcccgaacgagacagaagatattatgcgtcttaatgagcaaaaagctttcgaaaaggccgagaagaagaagaggaagaagaataaaaaggcgataatgcggatcctcctggctcaacattatgcaccgagcggtctctttcggatcttagggcccgattcggtcttggtgcagtaaccttgcgtgtgtagagccctgatgagcgagccgacaatgcccatgcgggtttctatactttgtacgaggggttcttttatggttgcattcttgtggctgccagtcccaaggctggttttggagtacgtgacatcgtactagattgccctctcccagatcacgatgcggcccttgagacatctgctcgggattttgattcggagttatgaatttgaaactgaaattacgcttgctcatctaaagaattttcttgagatccggcgggtttccaaatccgcagaggcgggactgatttcgccgcggttggcctctcccgatgcgactcaagaccgggacgttgctcccgatgttgcggccccgattgacccgacgtctggtgaggctcaagaggtcgatcctactgctgttgcgcctttgcccgaggcgattatcgcgctacctgcgagcgacaaggcggcgggtaagcgcgttcggacggatgattcatcgtccaagaagaagagcaagaagaagaagggctcgagtaccgaggcgggaaaagagcaccccatttttgaagatagggtagcctctggaaacctcctcggggtgtgtgctggtcctttgcttcctcctctggatactcttttggagtcgcggaagtatgctgaaacggtgtcccatttcctgcgggtaagtgcctattcaactttttcatttttcatcagtctggagctccgatccgtaattttctttctatgttctctaggttgtcgcctcaatgaaccgaatggtgcattcggacaattcggccatgaggaataacatggaggcggccaacaggttggccgatgcagatgctcggatccaagctgccgagcgagaaagagatgaggcgctctcctaagctgccgcggcaaagatggcgaaggaggaggccgaaaaggaggcctttgtgaacaaggcgaatgccattaagatggccgagttgaatttgagggcggactccgaggtcgttcgtctcaaacgcatgctagccgaggcgaggggctccgcgatagcgaagtggctcgggcttctcaaacggctaggcgagaagtttcggaggttttcgtcgcgaaactcaaggctgctgagcagaaggtatcgctcctaagcgggattaatgatcagttcatgtacttgtctcaaccgcgagctaacgcgcagctgatcgaggtccttgagaaaggcggggttctggcgaccgagaaggatcaggttgaagaatggctgaaagatttcgccgatgctgaggccgacctcaaccgttttgttgccgagctgaaagaagaacttaaagctcctgttcccaaacccactctcgccgatgaggcgggggttaccgattaattcgggtcgcttctgcc

SEQ ID NO: 163408 - DNA, 1813 bp, Arabidopsis thaliana landsberg
atggatcctaagggaaaggggatggtggtcgacaacaacgagaaggagtccatcttcaacgaaccgaagaatgacaagtctaccgacttgggttcaagccacaagcgaaaagatgggaagaagaagaagacaaggcgcatcaaggagatcgtctactacgacagcgacgaatcctcttcttcccaaaaggacgacgaccacaacgactacgagaaaaggaaaccggttaattctaacttttcctttgactactctcgtattccgcaaagttcaaattcgcatttgtttccattccactcgcaagcccccacactttgatgggaggactacggattttgagccacaaaatgcgtagtcacctattctctctccatcctagtatatgggagattgtagatagtggaatgcactttaatagttcggatagtcctatattcattaatgagcaaatccataagaatgcacaagctactactgttcttctagcttcattgtgcagggatgaatataacaaagtgagtggcttggataacgccaagcaaatctgggataccctcaagatctctcatgagggaaatgacgctaccttgctcaccaaaatggagttggtggagggcgagctcggacggttcgcgatgataaggggcgaggagccaactcaaacatacaaccggctcaagacccttatcaacaaaataaggagctacggaagcacgcgatggacggaccacgacgtcgtccgactaatgctaaggtcctttaccgttcttgatcctcatttggtgaataatattcgtgagaatcccaggtacaccaaaatgtcgcccgaagaagtcttaggaaaattcgtcagcgggcgaatgatgatcaaggaggcaaggtacgtagacgacgccttgaatgaaccgatcaacgagcctcaacccattgctctcaaggcaacaaggagcaaggaggcgctacccagcaaggtggcacaaattgaggctgccggtcttaatgatgaagagatggccctcatcattaaaagattcaagacggcgcttaaaggtcgcaagggacagccaagcaagaccaaagccaagggaaagcgctcatgcttcaaatgcggtaacttagtcattttattgctaactgtcccgacaatgatagtgatcaggaccaagggaacaagagagagaagaagaagaattataagaaggcaaagggcgaggctcatcttggcaaggagtgggattcggactgctcctcgtccgactccgacaatgaaggactcgctgccaccgccttcaactagtcatccctcttctccaacgagcgtcacacatgccttatggctaaggagaagaaggtatgtactcgagactctacttatgcttcttcaagtgaagacgaatctagtgatgaggaaatagattactctagcttgttcaagggattggatagaaataaaattgataaaatcaatgaattgattgatgccttgaatgaaaaggataggctgttagaaaagcaagaggatttgttgtatgatgaacatgataaatttgtagaagctcaaaaatcccttgcattagaaattaaaaggaatgaaatgcttgcttgtgagttgtccacatgccatgattcaatttctaaattaaagagcattaatgatgacttaaatgctaaactagtagaagcacataaatccaactcttgtgttgaacatgttgaaatttgcactaggtgtaaggatgttgatattaatgcttgtagtgaacacttagtttccatttcaaaattgaatgatgaattagctagtcttaatgcc

SEQ ID NO: 163409 - DNA, 1208 bp, Arabidopsis thaliana landsberg
gaaaataacatcaaaagaagtaagcaaaagcaaaagtcctaatttctcctgtcatggacaccttacctcatcatctcctcgacgagattctcttcagaatagaccacagatctctggccatgatacaatgcacaaatagatctcttcaatctcatatatccaaaaaccctaactttgcatccgaatacttttctcgggtcagatcaagtttgctatacatagcattcaatggctcccctttgctctgctaccacctttacggtgattctaggtcaccgcgaacagtagaagccttgacggagtgtcacattttaggctattgctctggccttcttctactcttcctcaataaaaatctctgcgtcgcaaatcctctcacaaagaagtttcgttttttaaatcactctaggtcaaagtttttcccttgggttactactctacgacgaggtcgtcaacaagtcatcgggttctctgtagatcagattgatcgaacaaccaatagtttgaaaatcgtcatcataaacgaggtgagaaacagcaatgagacaacatatgagtttgagattaacgtaggctattcatggaaactatcggaaacgacgttaacttgctgcacaagtaatcttgatgaccgtatgaaaaaacctgtttatatgaagggaggtcttcactggctaagaaatgacggatctatcgtagctttcaaccctgaaacagagaaagcacgactgatctccatcagattccccaaagaactttgttctaaaacgttgttcacagccgtagattacattttaatcttgatatcggcgacggaagaagtcttttacgtttatgcagtagagaacattcttactgatcccaagtgggtcgtcttgaagcaaatccggaacggggtactggacgagaagatgctatatagttggtactcggaggcttacgatggaaagtgtttagtgctgagggagatattgaagaaggaccattacaagcaagtgcttcatgggtacgacctgagagctaataagtgggaagtcataggttcgattccagggtggtacacttcagctctagacttttatcagtttacaccgtctttgtcttcggtaataggacttgatgccaaggaggaggaagaaatattggcttgtgatcataaaaaaatctcctctataaactcaattattagaatgcttgatggaatctca

SEQ ID NO: 163410 - DNA, 810 bp, Arabidopsis thaliana landsberg
atggccaactcaattctgttattttcctttgttttggttctcccttttgtctgttcagttcaatttaacatatctcgttttggatcagatgtttctgaaatagcataccaaggagatgcaagagcaaatggggctgttgagcttaccaacattgactacacatgccgtgccggttgggctacttatggtaagcaggttcctttatggaatccaggtaccagtaagccttcggattttagtacgcgtttctccttcagaattgatacccgtaatgttgggtatggtaattacggtcatgggtttgctttctttctagctccagcgagaatccaattgcctcccaactcagctggtggtttcttgggtctattcaatggaaccaataatcagtcttctgctttcccacttgtttatgtcgagttcgacacatttactaatccagaatgggatcctctcgatgtcaaatcccatgtaggaatcaacaacaactctcttgtttcttctaactacacttcttggaatgcaacgtcacacaaccaagatataggccgtgtcctgatattctatgattccgctagaagaaacttgagtgtctcttggacttacgacttaacatctgatcctctggagaattcaagcctatcttacatcattgatctctcaaaggtactgccatcagaagttacaattgggttttctgcgacatctggaggggtcaccgagggaaatagacttctgtcatgggagttcagttcaagcctggagctccgacaaggccagcatagccactgccacgagttccttgccaca

SEQ ID NO: 163411 - DNA, 659 bp, Arabidopsis thaliana landsberg
atgtttaggatagttttgcatgcatgttgcatatttgtgttgttttcaggtgattcggagctgttgacgagctaattggaagaagcggacctgatcatgccaaaccactcgaccccgaggtcgagtagacgcttcacgacctcaacacaccactcgaccacctggtcgagtagaggacttcaccacttcacctcatcactcgaccccctggccgagtaccaccacaagagtcactcgatcaattcactctaccgccaggtcgagtgtgttcacctccaccacctgaccatcactcgatcacaccactctacctggaagtcgagtatcaccatcaccaccactcgactacatactcgactgccagcttcagagtcttctccattccgcactcaaccagacactcgagcacaaggaagaaaagaagactccagcttatcactcgaccactcactcgaccacctgggtcgagtacagttcttaatccgtcccaatactgcgtcgttttgtgtattagggtttcagaatattttgctataagtagcatgtactttacattttcgagaagaagtttttatctagttttattccgcagacactgtgttctagatctttttgtaatccggatttctctttatctattcagtatttagtatgcagta

SEQ ID NO: 163412 - DNA, 1467 bp, Arabidopsis thaliana landsberg
atgtcggcggcaatggataaggctctcatggcgatgtccttggaagatgaggatgtaccgttcgaaatgcccgatctcccacaatttagttcctgtgagaagaatgtcttgagcttgattggtagattgttgaacccgaagtgtcaaagtatgtcgagtttgatttatgacatgcctaggaagtggcagaaggtggggagagtccgtggagtggctctctcggatgaaaaattccagttcatcttcacttatgaacacgatcttattgaagtcctagagaagggttttcagacttacaacgaatgggggctggttttagagagatggtcgctcgtcccgcctccagattcgctacaatttgttgagatttgggtacaaatcaagaacattccactcaattactacactgaactttcgatttctgcgcttggagatctggtggggcaagtgaaagaagtgacttttgatccggataaacctcaaagcaaagactatgtccgggttctggttaagtttgacgtttccagacctttaaaaaagtcaaaagtcgtcaatcttcctaaaggtctaacttcgatggtttactatttctacgagaaggttcaaaagcgttgctatcggtgtcagaggcttactcatgaacaagatgattgtcccttggttgtgaaacagtttcaagatcaagtcattgatcggaaattgggcaggaaggtagaaaagccaaaagctcctttggtcttaaaagagaatgacccactttttggcgttctgaaggaagaacaagtaggtattcaccctcttctgggtcgtccgaggatagcccccgatgttctagaaggaatgcgacagtatctgaagattgccaccggagaagagcgcaagctgagagaagagaaggtgaagaagtctgttgctgatgctgaaaatgaccccattgcccagaaattggtcttacgtctggaacctctccctatcatctctaaagacatggagaagggtaaaggtatcgtttttggttatgattcttctgaagcgtcatccaatctttcgccttctgcatctgggaatcaattgcctcttaaaacgttctcccgtgctgaggtcatggttcctggttctgttgatatgacatctgcagctgttctttctcctttggtggattactctcaaacctcctctttttcagtgccatgttcttcggcttatgtggttggtctccttgaggctggcccttccggaacaaagccaaaaaagagtaaaggtagaagacgtccttatgccaccaaaagaaaacaaaaggcagcggctaaagcgggagatctggaggtagcttctaaaaaggaaggattacatgaaagaattttagataaaagaaaggggataattggagaggattctgaagatggtcaaaaagtcgctaggcgcaaaacccaagagggagtccccaatgagggactgtccaatatc

SEQ ID NO: 163413 - DNA, 825 bp, Arabidopsis thaliana landsberg
tcatcatcatcttcttctagtagtaattgtagtcatttgtttgttcgtcacggaatctgcttcgcctgtaaaaagaaggtgagttgtgtccatggccgagaattcggttatcttttctccggtttacgtctgagtcacgaagctgtatcctttacaaagcatctcacaaccctagtctcagtctacggacgcaagaagcttcacttggtacttgacttggaccacacgctaatccactccatgaagacttcaaatctttccaaagcagagaaatatctaatcaaagaagagaaatcaggttcaaggaaagatctgcgtaaatataacaatagattagttaagtttcgaccttttgttgaagagttccttaaagaagccaacaagcttttcaccatgactgcttacacaaaaggcggttccacttacggtcaagctgttgtgaggatgattgatccaaacaaaatctatttcggggatcgaataataactagaaaagagagtcctgacttgaaaacacttgatcttgtcttagctgatgagcgtggaatcgtgattgtggataatacgccaaatgtttggcctcatcataagagaaacttgttggagatcacaagctacttttatttcaaaaacgatggcaaaaacatgatgaggtcaagattatcctacgccgagaggaagagtgatgagagcagaaccaaaagagcattggtgaatcttctgaaattcctcaaagaagttcataacggattctttacctgtggacttgaagaagagttagattttaaggacgtcaggtatttgataaagggtcccttaaaacca

SEQ ID NO: 163414 - DNA, 660 bp, Arabidopsis thaliana landsberg
atgattaggatagctttgcatacatattgcatttctgagttgttttcaggtgatttggagctgtttgcgagcaaattggaagaagcgagccataaccagaggacatactcgacccccaggtcgagtacatccagcacaatactcgactccctggtcgagtgactttggagccatttttcccatctacacgaccccttggtcgagtaaccacagctcaggccattcgatgacgccactcgaccccctggtggagtttcacttcgccacaccacctgacctcactcggccgttcactcaaccacgttactcgaccccctggtcgagtatcatcactcaccaccatcaccatcactcgaccggacactcgatcacatcttcacagtctactcaaatccgcactcaaccagacaagctgagcacaaggtagaaaagaggagaagacaaagtgtttggaagcggcctggacctccatcggatcacgaagcccatctcggcccattatcactctatgggccgggcgattaggttattggcccgtctactatcattttatttcgtttggtataaatagatgttttagggttctgtcctgagacatccagtcgacattgagtttttacttcagttttatttttctgttttaccctactgcgccgcttt

SEQ ID NO: 163415 - DNA, 1578 bp, Arabidopsis thaliana landsberg
actatatctatgtttgtttttaatatctatatatatatttttgcagccattttatgaaataaatcctgtagttgggacttatttacaatggttaccactggattttaatatttgtttttgataattaaaaaaaaattattcgaattaaatatttgacatttaacaatcttcctaaaatctctctacattaactacacgattggttaataaaataaaactttcaaaatatttaatatcatttaattactacaaaattatcattattgatattgttttctgcatgactattacaattcaattataatcatcaaaccgcagagatatttgatagtatttaattactacaaaattacaaaatatttagacaatgattcataaacatatgataaataagatcaacattaataaaataaatgagttttttttacgggacgggttggcggacgggtttggcaggttgttacttaataacaattctaaactataaaataaaaatattttatagatagatacaatttacaaatttttatatatatactatctttaaaaaagaaattgtctccgcggtgtaccgcgggttaaaatctagtttaaactctataaatggaggcttggttcaatttatttggacacataaaaaaatgtcatttctaccataattttcttattcttctgccataaattctatatattattctaccataatgtcatttttaattaatttaatttagttttaatagatattttaacttaatttgtttaacaactattattatgcatcacgaaatataagatataagaaaataagaataaaagaaatagtggggttgggtgttgaattttattaatcaaaaacattggagtgataaaaaattaaagtaaggaagaaagaggaaataatgtgaaatgttcaaagttgaggtggaaggtgctaaatatgtttttgcattgtacgtagttttaagcatttaactattgaattaattttttcaataagtcattgtagatagtcatagagaaaacaattaatcaatactatttttgaatgcccaccagcactctagacttgcacattatcaccaatactaacggtcctaggaattttccaatcttcatcggtctatgtaaacatagatcatttattttggagaacacatttatattattttatttttagctttttttggatcatgtgatacatatggaaagtacaaaatgaaaaacttcacgaaaatatggatcgagatccaagagatattctcaaactagcgaaaaacaaagacaatgcttggacgttagcctgattggaggttgcaaatgaaattcaagcttcagtggcagttaagtcggttaatataaatctttcaggatattattgtttcattgatgactcttggaaagatagtgacaagtttttgggcatggatggttctgtattttatcaaatgaaggacatccaaccatgtgtgctggaagcactcgtttgggcaatgaaatgtatgattggccaagaaaagcgaaaagtaacgttttttataaactgtagatctgatgaagataatgtatttcccaacaaaa

SEQ ID NO: 163416 - DNA, 668 bp, Arabidopsis thaliana landsberg
atgtttaggatatgcttgcatgcatgttgcatatttgtgttgatttaggtgatttggagcagttgacgagctaactggaagaagcggacctgatcatgtcaaaccactcgaccaccaggtcgagtagaagcttcaagacctcaacagaccactcgaccccttagtcgagtaggggacttcacaacttcatctcaccactcgaccccctagtccagtatattcacctccaccacctgaccgtcactcgatcacatcactcgacttcgaggtcgagtgtcttcacctccactacctgatcatcactcgatcgcaccactccaccttgaagtggagtatcaccatcacaaccactcgactacatactcgatggcgagcttcagagtcttctccattccacactcaaccagacactcgagcacaaggaagaaaagaagactccagcttatcactcgacctctcactcgaccacctgggtcgagtacagttcttaatccgtcctaatactgcgtcgttttgagtattagggttttggaatattttgctataagtagcatgtacttaacattttcgagaacaagtttttatctagttttattccgaagacactgtgttcttgaccttttgtaatccggatttgtctttatctattcagtattcagtactcagca

SEQ ID NO: 163417 - DNA, 1687 bp, Arabidopsis thaliana landsberg
ttgctacagagaagggttagtttgtctactagtttgtgtaaatgcagagaaaggtttgattttttttatcagcagagatgtggtttagttaatgtaaagttgaaatgggttaaagatagagaacttgatgctgttgtggttcgtgaaaagcatcttagagcagtttgtaatctcgtttctgttatttcggcttctcctgatttgagactacctatctttaagcttttgcctcaccgtggtcagcttggtttgcctcaagagcttaagctttcagcttttattcggaggtatcccaacatttttgttgagcattgttattgggatagtgcaggtactagtgttccttgctttggtttaactcgtgagacgattgatctttattatgaagaagttgatgtttcacgggtgaatgaaagggatgttcttgtgaggttgtgtaaacttcttatgcttacttgtgaaagaacactttcgctacattctattgatcatcttagatgggacttgggtttgccgtatgattatcgagattcgttgattactaagcatccggatttgttcagtttggtgaagttgtctagtgatcttgacggtttaaaattaatacattgggatgaacacctcgctgtttcgcaaatgcaactgagagaggacgttggaaatgatgaacgtatggctttcccggttaaatttacgagagggtttggattgaagaggaagagtattgagtggctccaagaatggcaaagacttccttatacatcaccttatgtcgatgcatctcatttggatccaagaactgatttatcagagaagagaaatgttggagtgtttcacgaacttcttcatctaacaattggaaaaaagacagagaggaaaaacgttagcaatcttcgtaaaccgtttgcacttccgcagaagttcaccaaagtatttgagcgtcaccctggtattttctacatttctatgaaatgtgatacacagacagtgatccttagagaagcatatgataggcggcatctcatcgaaaagcaccctcttgttgaagtcagggaaaagttcgcaaacatgatgaatgaagggtttctggatagaagtcggggactgtatcaaaaatctgttgaggctgatttggagaagaacaatatcaagacaagttatccggtttggtcagacgaagaagaagagttggacaataatttgatatctggatacgactctgattgtcctgtggttgaagaacataaacgggtgttttagttgtgagttgagtacaagttttgttacaatggaaccaaatcaagacgttgcagacgacgttgagagtgaaagattacattctgcatctaactgtagcagcctgagcttccggcatcatatggggttgtacgccttagttcattcaactgagtctgaacatcattttccccacaatgctccaaattgggatgttagaaacaaaaatttcattggatggatccctacagaagatagacattctcaagcaagcttttagcattttcgcaagcgaacaaaagctggtttattgttgccggttctccaaacgccccatgaggacatagcattgcagaaagaatgggaaagttacttagggctcttctgttcaaagcgtgcatacacggatacacctttagtcaatctgagttatgacatcgtgtttccggga

SEQ ID NO: 163418 - DNA, 1405 bp, Arabidopsis thaliana landsberg
agacgttcttcttctttgtcttcactctgtttttgttttcttgcacaggtggtggtcttgtctgttgagaagaggaagaagacttgttgggcttcactgttgtgttggttgtgttgtcattgggcctgtttggtgagtggcccaataacccttttcctttgttaagctgagcgacgtcgttctctttctttgactcttcagctgaacttgagctctgattcgatctcatttcagatcttggagctcttgatggcggagcagtggagctcttgctaatactttgctcacaaacacgtatgatcatgtaacaatctccatcctacttttgtcacaagcgatgtgttcaaatcctttccagaccaccctctgtccgtggacgacaaaccctatcccaagcaaccaaatgttgttttctcttttctggtgtacttccccataaaaagcctcttgaaactttatccaaaccatcgccaatcgattttggtaaagatattgtgctcatggtatgaatcaatatagatgccaacactgatttggtcaatgttagtcttcttgcaaaactcaaagagcagcctttccatcccggtagctttgatgacacttttttgaacaaaatagtattagcgcggagaagatgagaattctttaaggatacttttgggatggttgtatggaaacttgggctgtatggaaaaaatggcagaaagcacttggtcgaccaatgtttgccatgggagtttggttgagcttgaaatagaggtgcggttatgtgtttggcgaattggaaaaatgtcgggaaagagtaaagtttaccagagaattgggacaagaagtaagccgtgcacataactcacttcgggagagtataggtacgggtgtgagagttgagcgaatggtaacgtggagaccaccgcgggacgagtagttaaagctagatatcgacttgtcctttcacaagaatccagttttgactacagcggggggactcatacgggatgcaacaggtagttggtgtggaggatttgctctcaatatcggtgtttgttcagctcctttcgcggaactgtggggagtttactatggactttacctaacttgggagagacatatcacaagattagaggtcgaggttgattcggagttggtggttggattcttaagcaaggggattagtgattctcatcccttgtctttcgtggtacatatgtgtcatgactttttatttaggaactagatagtctggacttcacatgtatatagggaggctaaccgcctagcggatgagttagaaaactatgtttttactttaccattaacctttcatatgttaaaggttgttccacatgttgagacgatttttcaggatgatgaccgcggaattgcgtttctgaggcatgtccgtctt

SEQ ID NO: 163419 - DNA, 838 bp, Arabidopsis thaliana landsberg
atgcagatccacaaactctgtatttttgttctgttcatatctttgttaagctctaaaaccatttccgccgtcaaattcaacttcaaccgtttcgacggaacaaatctaatcttcatcgggtacgccgagctaggaccagcaaccgatggcatgagccggtccggagctctctccatgacccgtgacaacattccattctcacatggtcaaggtctctacacagatccaatcccattcaaatcttccaacaacacatcttcttctgtttactctttcaaaacatctttcactttctccatcactcctcgacggtcaaaccctaaccctggtcatggtatcgccttcatcgtggtcccaaccgtagcctacgagtacgaccaagactcaacccgcggcttcctcggtctagttaacctcacaaccaatggcaatcctaataaccatctctttgcggtcgaattcgatgttttccaagacaaacgttttggtgatattaatgataatcatgttggtgttaatattaactctgttaactcaaaggtttctgagaaagctgggtattggattcagacaagaactagagggaagaatcaatggttgtttaaggaagtgaagcttagtagcggagacaactacaaagcttggattgagtataagaacagtaaagtcattgtttggcttgcacctgcgcatttaaagaaaccgaagaggccattgatcgaaacacaagttgatctctcggaggtggttcttgagactatgtataccggcttttccggttcgatgggtcgtggcgtcgagcgtcacgacatttggagctggagttttgagaacaccg

SEQ ID NO: 163420 - DNA, 926 bp, Arabidopsis thaliana landsberg
atcagagaaccccttggtgtacccgagtcttcattgaagcatgtctctgttcttggcagagggagctttggctctgtctctctcaaacaggattctaacttccgactctatgcgaagagtcgtcttcgttcaatcacataaagattctcgtgaaagagctcaggatcatgctttgtttccacaatcatcctcgcatcgtccgagcctcaagcgatcatcttctctttgcgactaacaccaaaagcatgagtgtgtgttacatctacatggagtatgcttccttagggaatctcaacaagatgatctctgatgccggagggagattgcctgaagatagtgtcagacgtgccactcgtatgatcctacaaggactcaaggctctccgctctgaaggttttgtccactgcgacctcaagccatcaaatgtacttgtcttcccttccaacacacgtggagagccatgggatctcaagcttgctggtttcggtttatacaaagagcctactatggactctagcttgttgtttcctggaacccttgaggagtacatgtcgcctgaggccattgagcgggacaggtttgttgggaaggacaatctgatcggaccagcccgtgatatatggtctctaggacgtattgttcttaggatgtttgggggtattcctgttcaggtgagaggctctaacacatgcaggctgtacgaagatatctctccggaggccacagactttgttgggcggtgcttggcatggcgccctccgaatcgggccaccgtggttgagctcttagaccatccttttgctgctgaaaaacttccattgcttctttctttcttaagggttccttctttcgtaagaaggaatgtcaatgaaaaattgaatgttagacaagaagaactgattccaaagcctcaaggcttgctctgg

SEQ ID NO: 163421 - DNA, 1755 bp, Arabidopsis thaliana landsberg
atgcttgcgaaacaaacgccattaacaaaacaaatgctctccgagctcttacgagcaagttcttcaaagccgaagcagcttaagaagatccatgcgattgtactaaggacaggtttctctgaaaagaacagtcttttaactcagctgttagagaatcttgtagttattggtgacatgtgttacgcacgccaggtgttcgacgaaatgcacaagccgaggatcttcctttggaacactcttttcaaagggtacgttagaaaccagctcccttttgaaagtctcctactttataagaaaatgcgtgatcttggtgtccgtcctgatgaatttacttacccgtttgtggtgaaagcgatctctcagcttggggatttttcctgtgggtttgctcttcatgcccatgtggtgaaatatggttttgagtgtcttgggattgttgcaactgagttggtaatgatgtacatgaagtttggtgaattgagttcggctgagtttttgtttgagtcaatgcaagtcaaagatttagtggcttggaatgcgtttcttgcggtttgtgttcaaacggggaactccgctatagctcttgagtatttcaacaaaatgtgcgcggatgcagttcagtttgattcgtttactgtcgtgagtatgctttctgcttgtggtcagctaggctctttggagattggagaagaaatttatgatcgtgcgaggaaagaagagattgattgtaacataatagtcgaaaatgcaaggcttgatatgcacttaaagtgtggtaacactgaagctgccaaggtattattcgaggaaatgaaacagaggaatgtggtttcatggagcacaatgattgtaggatatgcaatgaatggagatagcagagaagctttggcattgttcactacgatgcagaatgagggacttagacctaactacgtgacatttctcggggtattatctgcttgtagccacgctggactagtgaatgaaggaaaaaggtatttcagtctcatggttcaacccaatgataagaatctggagcctagaaaagatcactattcatgtatggttgatctactgggtcgatccgggcttctccaagatgcttatggattgatcaaagaaatgccaatggagcctagttctggtgtttggggagctttgcttggtgcttgtagggtttacaaagatacacaactcggaacaaaagccgcagagagattgttcgaattagagcctcgtgatggtagaaactatgtaatgctctcaaacatctattcagcttctcgtctatggaaagatgcttcaagaataaggaatctgatgaaacagaaaggtcttgtaagagcttcagggtgtagctacattgaacatggtaacaaaattcataagtttgttgttggagattggtctcatcctgaatcagagaagatacaaaagaagctgaaagagattaggaagaagatgaagagtgaaatgggatataaatcaaaaacagagtttgtattacatgatgttggtgaagatgttaaagaggaaatgatcaatcaacatagtgagaagattgcgatggcgtttgggcttttggtggttagtccaatggagccaattatcataaggaagaatcttagaatttgtggggattgtcatgaaacagcaaaagcaatatctttgatcgagaaaaggagaatcattattagagattctaagaggtttcatcatttcttagacggatcatgctcttgtagcgattattgg

SEQ ID NO: 163422 - DNA, 712 bp, Arabidopsis thaliana landsberg
taattaaacttaacattttctttgtgtaggttacaaacggatgtggaaacgaaccattaccactttggttgcatgagctcgttcaagaaccaagatctaagatcacaactgctccgatgtacttcactcgcggatatacttttcatacgtatccatatggaagtcgaagggcaactgcaaattacggaatccatgtggaaggtgaaactgagttttatgggattctacaacaaattctagaagtcgaatatccgggacttttgaatttgaaatgcgtccttttcatttgtgattggtttgatccggtgataggtcgaggggtacgagtaaataacttaggcgtggtcgatgtcaatgcaaacaagaattatgccaagttcgaaccctttatcctagcatcacaagcagggcaagtaagctttctaccttatccacgtgtgaggcctaggcgtgaactgtggtaatcggttattaaagttaatcccagaggccgtatagtcggtcttgttgatgatgttgtgatgcaacaagaaagtgtcagagaagtttccataccagacataacaacagaagatgttatccatatttacctacaaaacagagaattagaagacatcactcattacggtttcaaagaagaagaacatcagacgaattcggcgattctcatgtagacgttgagtctgaaaatgatggtagcaattcagaaaat

SEQ ID NO: 163423 - DNA, 2568 bp, Arabidopsis thaliana landsberg
atggcgggaaactacaattatggcggtactggcggtttctatcgagattggatgtacaagagatttgatgaagtgacggggaatttgtcagccgaatacgttgcaggagttgagcaattcatgacattcgctaataatcagccaatagtacagagtagtcgaggtaaatttcattgtccttgtagtgtatgcaagaatgaaaaacacatcatctcgggtagaagagttagtagtcatttgtttagtcatggatttatgcctgattattatgtttggtataagcatggagaagaaatgaatatggatataggaacgagttacacgaataggacgtattttagtgagaatcatgaagaagtgggtaatattgtagaagatccatatgtggatatggtgaccgatgcatttaattttaacgtggggtatgatgataactatcgtcatgatgatagttatcagaatgtggaagaaccggtccgtaaccattcaaataagttctacgacttgttagaaggtgcaaataatcctttgtacgatggttgtcgtgaagggcagtcgcaattatccttagcatctcgactcatgcacaacaaggcggagtataatatgagtgaaaagttggtggactccgtttgcgaaatgtttacagattttttaccagaaggaaaccaggcaaccacttcacattaccagaccgagaagttaatgcgcaatttaggacttccatatcatacaattgatgtttgtcagaacaattgtatgctattttggaaagaagacgaaaaagaagatcaatgtcgattttgtggcgcgaaaagatggaagcctaaggacgaccgtcgaagaaccaaagtaccatatagtcgtatgtggtatctacctattggggaccggttgaagagaatctatcagagccataagacagctgcggcaatgcgatggcatgctgagcaccaatcaaaggagggagaaatgaatcatccttcagatgcagcagagtggagatatttccaagggttacatcccgagtttgccgaagaaccccgtaacgtttatctcgggttgtgtactgatgggttcaatccatttggcatgtctcgtaatcattcgttgtggcctgtgatcctaactccttataatttaccccctggtatgtgcatgaataccgagtacttatttcttaccattctgaattctggtccaaatcatcctcgagctagtcttgatgtcttcctccaacctcttattgaggagttaaaagagttgtggtctactggagtcgatgcgtacgatgtttcattgagtcagaattttaatctaaaagcagtactactgtggacgattagcgactttccggcgtatagcatgttatcaggatggactactcatggtaaattatcttgtcctgtttgcatggaaagtacaaagtctttttatctacccaatggacggaagacatgttggtttgattgtcaccgtagatttcttcctcatggtcatccatctcgtaggaacagaaaagactttatgaagggaagagatgcttctagcgagtatccacccgagtctttgacaggggagcaagtttattacgagcggttggctagtgtaaatctaccaaaaatgaaggacgttggtgggaacggtcatgaaaagaagatgtcaggctatggaaaggaacataactggcacaaagaaagcatcttgtgggagttgtcttactggaaggacctcaatctttgacataatattgatgtgatgcatacagagaagaattttcttgacaacatcatgaacactctcatgagtgttaagggtaaatcaaaagataatatcatgtcaagattggatactgaaaatttttgttctcggtgagacttacatattgatagtcagggtaaagctccatttccagcgtatgcattaaccgaagaagtcaaaaagagtttattgtcatgtgtgaaactcgaggttaaattccccgatggttattcttcagatttggctacttgtgtagacatggagaatggaaagttttcaggcatgaagaatcatgattgacatatttttatggagcgactactgccatttatctttgctgaactccttgaccggaatgtccaccttgcattatcatgtacaatatatgttgtctaagttgccacacttttttaaacctctgatttaacttaaatatatatatatatatatattttagggattggagcatttttccgggacttatgttcgaaaactttacagaaaagtcaggttcaaattctcaaacagaacatagttttaataatctgtaacttggaaaagatctttccaccatcattttttgatgttatggaacacctacctatccatctcccatttgaagctgaattgggtggccctgtccaatatcggtggatgtacccatttgagaggtttttcaaaaagtttaaaggaaaagcaaagaataaaggatatgcggcaggatcaattgttgagtcatatatcaatgacgagattgcgtatttttcagagtactactttgccgatcatattcaaacaaaatcaagg

SEQ ID NO: 163424 - DNA, 1231 bp, Arabidopsis thaliana landsberg
tgggatcacaaggaaaaaataatctaagttacgaagaaagagctgaattgtggaatttagaagatgagtaatttgaggagttaataattcagccaactttgagttaccatgatcaatatttcgaaagagcaccaatgcaaattgatggaggtataggatggagaaatatttggcatcgactacaataagatgttgttgcttgtcttcagttattacgaatgtcactcacagcattcacaacattgtgcagtctgttacaaacaaattacaatctataaccaacactatatataagcattgaaaaaaatgttgctatgtttttacaaataagtaggcacaatgaagttcacagagatgttggtttaagatttggacgaaatcaagagaccgtgaagagaaaatttggggaaggttttacaacaactgaattattagcatctaattatattagaactccaacaactcaagatttacatctaattactgagagacttgaagtatattgaagatattgactttattttagtggatttattggagctatggatgggactcatgtttgtgtaaaagtgaagtctgaattacaaggaatgtattggaattgacacgataatgcatctttgagcatcatgtcgatatgtgatttgaatatgttattcatatatatttgaaatggagcaccaggttcttgccacgatacagttgttctgcaaatagcacagcatagtgattccgagtttcttttgcctccgtcagagaagtattatctggttgattctggctacccaagcaagcaaggatttctagctctttatcggtcgtcacaaaatcgaattgtgagatgtcatatgtctcaattctattttggtcctcctcctagaaacaaacatgaactgtttaaccaatgtcacgcatctttacgttctgttatcgagagaactttggagtttggaaaaaaaaatggaggattctttcggattttccaagatataatgttcatgttcaaaaaagagtggtaatggctacagtgggattatataatatcatcagaatctcaaacttctcaaatgtagattttgtagatgtaatgacaaagacaaatataaacaacagagattttaatcatgatttagatgacatagaagcaactgatatagcagatgaagaatatatgatgcaaataagagacaatattgcaaatatgttatgggaaaatcaaagtaatagataa

SEQ ID NO: 163425 - DNA, 906 bp, Arabidopsis thaliana landsberg
atggatattgccgagaagaaactttcgaagaatgattacgatggagctaaaacattcatcagcaaggctcaggctttgtatccaaagcttgatggtttggaacaagtggtgatgatgatcgatgtttatatctctgcatcaaacaaaatcaacggagaagctgattggtatgggattctcggtatagatcctttagctgatgaggaagcagtgaagaaacaatacaagaagttggctcttttgcttcatccagacaagaacaggtttaatggcgcggaaggcgcgtttaagcttgtgcgacacgctagggatttattatctgacaatgctaagagaactgcttatgatcaaaagagaagatcgaacccagttaaacggaagaggagcagaacgcaggatccaccaaagccacacaagtacaaatataagtacgagttccggaaaaggagcagaatgcataagccacacgagttcgcatacgagtgtgattctgactcttctgagtctgagtctgagtctgaccctgaacctgattcttcatggaaacagaagaaaccacggaaacaggaggaagacattaccttttggacagtgtgcaaaaacaataagtgcaacacacattgtaaattagggaaggctggttatctgaacaagaccttgcattgtccaaactgccgtcaagaattcgttgcgacagaggtaattccagagatgaaatatgggaggccagtctacagctttactgctaaatttcaaccaacaagcaaaagcacaagtgatgcttcttcttcttctacaacttcaacatctgataccgcaaatgaagcacaagatagagagtcgtcacaagaagagtttgttcctgctaatgcttcacctgctgctagaggagatgcaaacgaagca

SEQ ID NO: 163426 - DNA, 978 bp, Arabidopsis thaliana landsberg
gaagtcgtcgaactcacagagttcgagaaaacccagaagaagtatcaagatttcatcgctacacttccaaagagcaaaggctggagaccagatgagatcttaacccaatacggtggacactggtggcaagaatgtctcctcgaaggtctttttcacgctaaagaccatttcgaagcacgaccaactgatttcctcgtctgtagctacccaaaaaccggtacaacttggctcaaagcactaacttacgcaatcgtcaatcgttctcgttacgacgacgccgcaaacccactcctcaaacgaaaccctcacgagtttgtcccttacgttgagatcgacttcgcgttttaccccaccgttgatgttcttcaagacagaaagaacccacttttctctactcatatcccaaacgggttattacccgattcgattgtgaactctggttgtaagatggtgtacatatggagagacccgaaagatactttcatctccatgtggactttcttacacaaggagaagtctcaagaaggtcaattagcgagtcttgaggacagctttgatatgttttgtaaaggtttatctgtgtatggtccttatctggatcatgttttgggttattggaaagcttaccaagagaatccagataggattttgttccttaggtacgagaccatgagggccaatcctttgccttttgtgaagagattggctgagttcatgggttatggattcactgatgaggaagaggagaatggtgttgctgagaaagtggtgaagctttgtagctttgagacgttgaagaatcttgaagctaacaaaggtaataaagaaagagaggatcgtcctgctgtttatgcgaatagcgcgtattttaggaaaggaaaggttggagattgggctaattatttgactcctgagatggctgctcgtattgatggcttagtggaggagaaattcaaagatactggcttgcttcaacat

SEQ ID NO: 163427 - DNA, 1765 bp, Arabidopsis thaliana landsberg
atggatacaggagcagtaaagctacccattcacgagcaccctatatttccttcggctcggatcgtttttagtacatgtaaaggctgcggtgtagaagatttcgtctacggcgggtacgtctgcaatgattctgactgtaaagctcggtttcataaggagtgcgctgaggccccatctaagatcagccactctttccaccaacaacatcctctctttctcaccaatggcctgggagatcttccatgtgatttgtgtggacaaaagcgattggaagccgctggttatagttgtcccacatgtgagttcaagctggatttgacttgtgggataaacccatcaccgcctgctattgaacatcctatctgtcatgaccatccacttgtctttttgaagaaacgagaggagaaggccccttgtgaagtttgcaaggattctattggtggaccttcctattcttgtcttggatgcgatctgtacttccacgtggattgcgtccatctctcaaaagaggtaaatcatccttgccaccctagtcatcctctcaagctcatcgcatctgaatcacttacggataatgctgagaagatttgtcttttatgtgaacaacaaccagaaaatatgctttattattgttctgtttgcaacttcacatcatgccttggttgtactaaacgcccaccacctctttttatcgagcataccaagacccacaagcatcaacttactctctttctaaacggaatttcatatcaaggttccgcgctgacatataacagcagagcttatatgtgccttccttgtggtttcgttgtcaatgggaatggtatcaacctacctcaagtcataaacatcaaccgtcacgaccatcgtatctcttacactcatcagcttggccctggatatttgaactgcggagtttgccgcgaaattgttgacagggattgtggggcatatgcttgtgtcgtttgcagtaactatgcagttcactgggaatgcgcagtacatgataatgtatgggatggtgtggaattagaagggacatctgagatcacagaagatattgcaccattcaaggtaatgggtgataactcgataagtcattttagtcatgaacaacatactctaaggctgcacaaagaaggcatcattcatgacgcgtacgcactatgtgaagcatgtacatatccgatcggatttgatccgatctacagttgtgaggaatgtcatttcattctccatgaaacgtgtgctaatcttcgtaagaagaaacgacattttctgagcccacaacctctcactctcgacttcgtaacaaaacgaaaagaagaaaaatgtggagcttgtcatcaaatctgttgccaagggttcatctactctacatatcaaaacgagaattttgacttactatgcagttcgattactgtgccttttatccatggaggccatgatcatcatttactctatatcaaactagaatacggtcaagtgaagacttgcaagaactgtggcatcgatgaagcagaagtcgttctaggttgtatcaaatgcaattattttttggattttcgatgtgccactctaccattaacggtaagtctttctaggtatgatgatcattcactcactctttgttatggtgatgaaaaggcaagtggcagatattggtgtgatatttgcgaaagagaaacagatccaaagagttggttctacacttgtaaagattgcggggttagtttgcatatattttgtgtagtttgggatatca

SEQ ID NO: 163428 - DNA, 1471 bp, Arabidopsis thaliana landsberg
  unsure (1)..(1471): unsure at all n locations
atggnnnnnnnnnnnnnnnnnnnnnnnnnnnnnnnnnnnnnnnntttaaccgcaaaccgtttctcctccattagtgacgtcctccgtgtaggaggcatctgtaaaccctggcgttcggcggctgggccgccaaaaagctttcaatgcaaccttccttcctccaacaaaataatagagactgttctctctcccaccactttcttctgtgtaacgggcccttcttcatgtttttacaaaggatggctgatcagaaccaaacaagtctgtgaatccagtaagattaatctcttgtctcctttctttcgccagctcctaaccccttcccaacaaaccctagaccttttgaaatttgaggtttcagagattcgccaatcttacgagattcatatatttgataagtatttaatacaaggcgtgataggtaaagaaggaccatcacatatattgtctagagttgttttcctagacaatctgattttcgcagtcggacaggatgacaaaatctggtgctgcaagagtggagaagagagtagtagaatatggacaaaaatcaaaaaccaagttgaagatttcttggacattatacttcataaaggacaagtctatgccttagacctaaccggcgcaatttggtggattagtttatcaccgctcagcctccttcaattcacaccttcaattccaatggactacgacggatatgatagttgcaacaagagactcgttgagtattgtggagatctatgcattattcatcaacttcgcttaaagaaagcttatatccgaaggagtcaaaggacagttggttttaaggtttataagatggacgagtatgtggcaaaatgggttgaggttaggtccttgggagacaaggcactcattgtggctagggacagttgttttactgttgtagcctccgagtaccatggatgtttgaacaattctatctacttcgttgataatgtgcgaaagagtgtgataagaatgaaactatgaatttctctttcttatccttaaaatcccaattacaatgaaacaaaccctaaatcgataagcttggagttacagttctccaatcttatctcccaagaacagagcacataaagctctaatcctctttacacatcaatgatcacgcaggatgcttttctctctactctctcttactatttataatcttcttcacacgtgactccaatctctcacttcagttctcacacgtgccaacttctcatgaacgtatcagagtggcgcagaagctgatcaatttatcaagcatgatgatgagagttccgagtaccatggacttttgaagaattatatctacttcgatgataatgatggagaatattgtaatgatggaatgaatgatgaagctgttaagatgttcaagcttggtgatggtagtatcatcgatagtactgagttttcttctcatagttgttttcacatgttctttcctccgttcctc

SEQ ID NO: 163429 - DNA, 713 bp, Arabidopsis thaliana landsberg
taattaaacttaacattttctttgtctaggttacaaatggatgtggaaacgaaccattaccactttggttgcatgagctcgttcaagaaccaagatctaagatcacaactgctccgatgtacttcactcgcggctatactttccatacgtatccatatggaagtcgaagggcaactgcaaattatggaatccatgtggaaggtgaaactgagttttatgggattctacaacaaattctagaagtcgaatatccgagacttttgaatttgaaatgcgtccttttcaagtgtgattggtttgatccggtgataggtcgaggggtacgagtaaataacttaggcgtgttcgatgtcaatgcaaacaagaattatgccaagttcgaaccatttattctagcatcacaagcagagcaagtaagctttctaccttatccgcgtgtgaggtcacggcgtgaagtgtggttatcagttattaaagttaattcgcgaggtcgtatagtcggcctagttgatgatgttgttatgcaacaagatagtgtccgagaagtttctataccagacataacaaaagaagatgttatccacgttgatctactgaacagagaattcgaagatatcactcatgaaggttctgaagaagaagaaccatcagatgaattcgacgaatctgatgaagacattgagtcagaaaacgattgtaatgattcagaaaat

SEQ ID NO: 163430 - DNA, 1630 bp, Arabidopsis thaliana landsberg
atggatggtgttagcagtctaccaaacgagcttctttgtcacatattgtccttccttaccacaaaggaggctgctttgacttctattctctccaagaggtggcgcaatctcattgcatttgttcctaatctttacattgatgacactgtgtttctccatccagaagagggtaagcgggataggcccgaaattatacagagcttcatggattttgtggatagaatactggctttgcagggtaattatcccattaagaaatgctccctcaagtgtttaaccgaggttgattcagttcgtgtggatgcttggataagtaatgtgttggcgcgtggtgttacggaccttgatctattaatcatcttggattgtgagagtgatgataactatcggctgtctccaaaatgtctccagagcagcacactagttagcctgaaaatagacggtggaattgatattggttgggtggctgggaccgttttcttaccgatgcttaaaactctctctcttgactcagctcgggttgataactttgacattcttcttcttgctttgcctgcacttgaggaattagccctggttgatgtaatctggaaagatgaggatgtgatcgtatcaagtccaagcctcaagaccctaaccatatatgacatttattgttttagcaatttatcatttgatacaccgagtctcgtttactttaagtactatggttgtgttccgcaggattacccactagttaatatgaaaaacttatttgatgctcgaatcatcttcatgctacaactcccgggagctagagaaccagatgatgatcattggttcgaccaaaacgttgctctcagatatagcaatgtgtggaaactctttcttggcttataaaatgttccaaatctttacttgtctcctgatactctcaaggtcagttttcaatctctcttggaatatttttattcaactggtctcgaggaaataaaacatgatttcgtctcaactcctggagcataactggtctagttttgaaacatgtaattgcaaattatttagttgagtttttttttttcttattttcagggactttctctatgctgtgaatcgatgccagtgttcaaaaacctcaaatctttgtctatcaagagtgccgagaatcgaggatggcaagcactgccagttcttctaagcaactgtccatatttagaaactctagtccttgaggtattaaaaaaaataatttgccaaaacatgaactaagatagagtttatactttgaattgaatctcttattgtgtcctttatgctatcactctttcagggtctcttgcactatgtcacagataaatgcggggatgcttgttgctgcgtttctcgagaggataagggtcgttcactcacatcttgtccagtaaaagttatagagattaaagggtttcaaggaaaaaagaaagagatgcacatgctaaagcatttcttggtttattctccgtgtttgaaggagataaaaatttatattgaagagaatgcacttgaagtgtctaaagttatcgcgaagaggataaatcgctacaacaaggtatcgaattgcaacgtgcagctcctggtaagtggttgcttgtataaggagtggagtgcacaa

SEQ ID NO: 163431 - DNA, 935 bp, Arabidopsis thaliana landsberg
tccgtcacccactccttcgcttacgtcaccaaccccaccggtctcaaactctttacccaatggtggactccactcaaccgtccaccactcggcctcattgctgttgtccacggcttcaccggcgaatccagctggttcctccaactaacatcagtcctcttcgcaaaatccggatacctcacttgcgccatcgaccaccaaggccacggcttctcagacggtttgaccgctcacatcccaaacatcaacctcattgttgacgactgcatttccttctttgacgacttccgtaaacgtcacgcttcctcctttctcccggccttcctctactctgaatcccttggtggcgcaatcgctctgtacattactctccgccagaaacaccaatggaacggtcttatcctcagcggtgcaatgtgctccatcagtcacaaatttaaacctccatggccgttacaacacctcttaaccctagctgctactctcatccccacctggcgcgtcgtcccaactcgcggctccatcgccggcgtctctttcaaggagccatggaaacggaaactcgcctatgctaacccaaacagaaccgtcggtaaaccacgagcagccacggcctatgagctcgtacgagtctgcgaggatcttcaaaacaggtttgaagaagttgaagtcccgttgatgattgtgcacggtagagacgacgtcgtctgcgatccagcctccgtcgaagagctttaccggagatgcagtagcagagacaagacgataaagatttatccagggatgtggcatcagctgattggagagtcagaggagaacgtcgacttggtgttcggtgatgttttggattggattaagacacgatctgaaatctccaccattcatggtggtaccaaagcttaaagtttgcatatataataaataaacaatcaaaa

SEQ ID NO: 163432 - DNA, 664 bp, Arabidopsis thaliana landsberg
ataaacgcactagtgagtaaaataagaatcagacatgagctcgttatcaaaaccaaacagacaatttttgtcaccaacaacaaacaaccaagacaccggcagagaacaaacaatcgcctgcgcccgagatatggttgtcttgtacaacgagtgccttaaaaaccatgcggtcagtctcggaggccacgctcttgacggctgcggtgagttcacaccaaagtcaaccaccatcctcacggaccctccgtcccttaggtgcgatgcttgtggctgccatcgcaacttccaccgtcgtagtccttctgacagcttcagtcagcaccggtcaccaccgtctccgttacagctgcagccactcgcccctgttccgaacttgcttctctctcttagctccggtttctttggaccctcggatcaagaagtcaagaacaaatttacggtggaaagggatgttaggaagactgcgatgattaagaaacataagaggacgaaattcacggcggagcagaaggtgaagatgagaggtttcgcggagagagcggggtggaagattaacggctgggatgagaagtgggtgagagagttttgtagtgaagttggaatagagagaaaagttcttaaggtttggatccacaacaataagtactttaacaacgggaggagc

SEQ ID NO: 163433 - DNA, 1096 bp, Arabidopsis thaliana landsberg
gtgatttcggatcttccacacgaaatagaatcggaaatactctctagggttccgaccaagtctctagcaaagttgcatactacatgcaaacgatggtacgctttattcaaagatccgagattcgtgaagaagaaactttggtaaatcagaaaggaggttgatgttacatagtaatttcggggtttataaaattaccgacgatctccatggaattctcaacagcggtgatccatctctccagtttacaataaacttagcaacctaaagatatcagaagatttgacaataaccaaaatctttcactgtgacggtttaatattatgctccactaaggaaaacactagactcgttgtttggaacccatgtaccggtcaaaccaggtggatcaaacccagcaaacgttaccgtagtgatgattcgtattgtcttggatacgtaaacagcaagtcttcttaccacaactacaaaatcttgaggtattgcttttattacaacgaccaggatgcttgtgttagtgaatttgagatctatgactttagctctgaatcatggagggttcttgatgactactgcactcgtgaatggggcttattctgccatggcatgtctttgaaaggaaatacttactttgttgctggagaaaaagaaacaggctttttcatgctgtactttgatttcaagacagagagatttgagcgtctccctcttccgtatcagagttttgattctgaagataccgctgttttatcaattgttgggggagaaaaacttgcggtgttacatcaaaatattcaatcgttttcaaatgagatgaggatatgggtcaccaataagattgatgaggccaaagacttgacatggagcaacttcttcttagcagtggattatgatatatttaacttaccaagtgtgaataatgtgacaagcttcttgttggacgaggagaataaagtggcagtgtgttgtgatagagacatagatgatgaagataagaccagaatctacattgttggagttgatctttataaagaagtttataaagagaggacaaagggagctcatttcaattggccacttctcatcagttatcttccaa

SEQ ID NO: 163434 - DNA, 981 bp, Arabidopsis thaliana landsberg
  unsure (1)..(981): unsure at all n locations
aaagaaacatctgagaacagtgatgaccaacacagcgagatcacaacaattacatcggaagaagagaaaacaactgaactgaagaaaccagacaagattcttccatgtccaagatgcaactccttaaacaccaaattttgttactacaacaactacaacgttaaccagccacgtcacttttgtagaaaatgcaggaggtattggaccgaaggtggatctcttaggaatgttcctgtgggaggaagctcaagaaagaacaagagatcttcttccaattcctcttcctcttcaccctcttcgtcttcttcttcaaagaaacctctttttgccaacaacaacacgcctacgcctcctcttcctcatcttaaccctaagattggtgaagcagccgctactaaagttcaagacttgacgttttctcaagggtttgggaacgcccacgaggttaaagatctcaacttggcgttttctcaagggtttgggatcggtcaccatcatcacagtagtatcccagagtttctgcaagtagtacccagcagcagtatgaagaacaacccactggtctcaacttcctcggctttggagcttttagggatctctagttcctctgcttcctctaactcacgccctgctttcatgtcttatccaaatgttcatgattcatcggtctacacagcatccgggttnnnnnnnnnnnnnnnnnnnnnnnnagagttcatgagaccagctttgggattctctcttgatggtggggatcctctacgtcaagaagaggggtccagtggcactaataatggaaggccgttgctgccatttgagagcctcctcaaacttccagtttcatcatcaagcaccaatagtggtgggaatggcaatctgaaagagaataatgatgagcatagtgatcatgaacatgagaaagaagaaggagaagctgaccaatctgttgggttttggagtggcatgttaagtgctggtgct

SEQ ID NO: 163435 - DNA, 1352 bp, Arabidopsis thaliana landsberg
atgggcagtagtgagggtcaagaaacacatgtcctaatggtaacactaccattccaaggtcacatcaatccaatgctcaaactcgcaaaacatctctcgttatcatcaaagaacctacacatcaatctcgccactattgagtcagcccgtgatctcctctccaccgtagaaaaaccccgtagtccggtggacctcgtgttcttctccgacggtctccctaaagacgatccaagagcccctgaaactcttttaaagtcattgaataaagtcggaggcaagaacttgtctaaaatcatcgaagaaaagagatactcttgtatcatctcttcgccttttactccatgggttccagctgttgcagcctctcataacatcccttgtgcaatactttggatccaagcttgtggagcttactcggtttattaccgttactacatgaagacaaactctttccctgatcttgaagatctgaatcaaacggtggagttaccagctttaccattgttggaagttcgagatcttccatcgtttatgttaccttctggtggtgctcacttctataatctaatggcggaatttgcagattgtttgaggtatgtgaaatgggttttggttaattcattctatgaactcgaatcagagataatcgaatcgatggctgatttaaaacctataattccaattggccctctggactctccatttctgttgggaaatgatgaagaaaaaaccctagatatgtggaaagttgatgattattgtatggagtggcttgacaagcaagctaggtcttcagttgtttacatatctttcggaagcatactcaaatcattggagaatcaagttgagaccatagcaacggcattaaaaaacagaggagttccatttctttgggtgatacggccgaagagaaaggcgaaaacgtccaggttttgcaggagatggttaaagaaggtaaaggggttgtaactgaatggggtcaacaagaaaagatattgagccacatggcgatttcttgcttcatcacgcattgtggatggaactcgacgatcgagacggtggtgactggtgttcccgtggtggcgtatccgacttggatagatcagccgcttgatgcgagactgcttgtggatgtgtttggaatcggagtaaggatgaagaacgacgctatcgatggagagcttaaggttgcagaggtggagagatgcattgaggccgtgacagagggacctgccgccgcggatatgaggaggagagcgacggagctgaagcacgccgcaagatcggcgatggcacctggtggatcttccgctcagaatttagactcgttcattagtgatatcccaatcact

SEQ ID NO: 163436 - DNA, 1131 bp, Arabidopsis thaliana landsberg
atgaaagaccatattcatgagcatgaccacatggttcagatttgtggggaagtttcatcaggagaaacaagcttggtgggcatcaagaagacatgtggagaagcgccttgcggattctcagatgccaagaccagttcaatagaagctcaagagcgtgcagcatcaatgagaaagctattaatagctgttcttctctgtgccattttcatagttgtagaagtcgttggaggaatcaaggccaacagtcttgcgattctcaccgatgcagctcatctgttatctgatgttgcagcctttgcaatatctttgttctcgctctgggcttcgggatggaaggcaaaccctcagcaatcttatgggtttttcagaatagagattcttggtgctcttgtctccattcaaatgatttggcttcttgctggtatcttggtttatgaagccattgttagacttaacaacggtagtggtgaagtggagggatctcttatgtttgctgtctctgcagttggcttacttgtgaacattgcaatggctattctgttaggtcatgaccatggtcatggtcatggtcatagtcatgacaatggtcacggtcatagtcatgatcatggccatggaatagccgcaaccgagcatcatcatgactctggtcatgatgaatcacaactatctgaggtcttaatcgagcaaaagaagcagcgtaatgtaaatattcaaggggcttatcttcacgtgctgggagattcgatacagagcgtaggagtgatgataggaggagcaatcatatggtataagccggagtggaagatccttgatttgatatgcacattggttttctctgtgattgtgttagggacaacaattgggatgcttaggaacattctagaggttttaatggagtcaacaccacgagagattgacccgacaatgcttgaaaagggagtgtgtgaaattgaagaagtggtggctgttcatgagcttcacatttgggcgattactgtcggcaaacttttgttggcatgtcatgttaaaatcagacctgaggcagaggcagatatggttttggacaagattatcgattacattaagagggaacacaacattagtcacgtgactattcagatcgaacgt

SEQ ID NO: 163437 - DNA, 1518 bp, Arabidopsis thaliana landsberg
atgattcagtctcgtcctcttcccactgttatagatttcaatagattgtttagtgccattgccaaaacgaaacagtatgagctagtgttagctctctgcaagcaaatggaatcgaagggaattgcacatagcatctacactttgagtattatgatcaattgtttctgtcgctgtcgtaaactttcttacgctttttctactatggggaagatcatgaaacttgggtatgagcctgatacagtcatctttaacactctactcaatggcttatgtctcgagtgtagagtttctgaagctctggaattagttgatcgaatggtagaaatgggacataaacccactctcataacgcttaacactctggtcaatggcctttgtctcaacggtaaagtctctgatgctgtggttttgattgatcgaatggttgagactggctttcaacccaatgaagtaacttatggaccggttttaaatgtaatgtgtaagtccggccaaactgcccttgccatggagttgctcagaaagatggaagaaagaaatatcaagctcgatgcagtcaaatacagtatcatcattgatggtctttgcaaagatgggagcctcgacaatgcattcaaccttttcaatgaaatggaaatcaaagggttcaaagctgatattattacctacaacactctcattggaggcttttgtaatgctggtagatgggatgatggtgccaagttattgagggatatgatcaagaggaaaatcagccccaacgttgtcacattcagtgttttgattgatagttttgtgaaagagggaaaactacgagaggccgatcaactgctcacggagatgatgcaacgaggtatatctcctattactattacatataattccttgatagatgggttttgcaaggagaaccgcctagaggaggccatccagatggtggatctgatgattagcaagggatgcgatcctgatatcatgacgtttaatatcctcataaatggatattgcaaggctaatcggattgacgatggtttggaactcttccgcgaaatgtctctgagaggagtgattgctaatacagttacttataacactcttgtccaagggttttgtcaatcgggaaaacttgaggttgccaaaaaactcttccaagagatggtttctcggcgtgttcgtcctgatattgtgtcctacaaaatattgctggatgggttgtgtgacaatggagaactagagaaagcattggaaatatttggaaaaatagagaagagtaagatggagcttgatattggtatatatatgatcattatccatgggatgtgcaatgctagtaaggtggatgatgcttgggatttattctgtagcctccctctcaaaggagtgaagcttgatgctagggcatacaacataatgatttcagaattatgtaggaaagactcactgtctaaagcagacatactgttcagaaaaatgacagaggaaggacatgctccagatgagttgacatacaacatactt

SEQ ID NO: 163438 - DNA, 730 bp, Arabidopsis thaliana landsberg
atgtttgggatagttttgcatgcatgttgcatatttgtgttgttttcaggtgatttggagccgttggcgagctaattggaagaagcagacctgatcatgtcaaaccagtcgacccagaggtcgagtaggagcttcaagatctcaagagaccacttgacccccaggtcgagtagaagacaccaccactctatcacatcactcgacccctaggtcgagtgtcttcatctccatctctggaccaccactcgatcacctcactcgacctccaggtcgagtgacttcatctccatcttttgaccatcacatgatcacatcacttgacccccaggtcgagtgacttcatcccattgccagacatctactcgacctcatcactctacctggaactcgagtatcaccatcacgccactcgactgaatactcgatgacaagaatcaaagccttcttcattccgcactcaaccagacactcgagcacaagaagaaaagaagactccagctattcactcgacctcccactcgaccacatgggtcgagtacagttcttaatccgttccaatactttatcgttttgagtattagggtttcggaatatttggctataagtagcatgtacttcacattttcgcagagaggaagttttttatctaattttaattccgcagaccttgtgtgctagactttttgtaatccagatttctctttatctattcagtattcagtattcagat

SEQ ID NO: 163439 - DNA, 1121 bp, Arabidopsis thaliana landsberg
gaatccaataaacgatgttcaaactctggaggagaatactttgatcgaatccctgcagatttggtcatcaaaatcttatcgaaattgtctgcaaagtctatggccaagtgtcgttgtgtatgtaagctcttgtcgtcgataattcgacaaccaaattataaccagttgttcccgatcaagtatcccgatccaccgaggttcatcttcaccttcttaggtggaggaatgttattttcctacacttcaacacagcctgaaaatccagatgagaattcatctcttgtagccactgctcatcatcatacggatatccctagagatttctctcaaatccttagctctgtccacggactggtctgttatcaccgtaagataaaaaatgacacagtttttgtgatttataatcccatcacagggcagtacgtaaccttacccatattggaagcacatgcgacaataaattatttcgccatcgggtatgatccaatcaacaaacggttcaaggtattgtgtgtaacctcggtgcatcatggaacaggggaggagtttgatagtcagcatcaagttctcacattcgagactggaaggagaaatctattttggaggaagatccaatgtcgcagacattattatacccaccgttatcataaggggatatgcatcaaaggtgttttgtattatgcagcaacctctatgaaacctatgttgggacctatgatcgtttgctttgacgttaggtctgagaaatttggttttattacttggaaacctccctctctgataaactacaagggtaaattaggttcaataaatagtaatgataacgatttggtgttgtgggttttagagcatggccaggaacgtaaatggtcaaagcatatctacgtaaagccccttcaatggccggagttcaatggaattgatgtaaactttttagtgaagctgtattctgcccaaatcactatgatccacaagttcctttttacctttattactacaatctcgaggagaacattgtggtaagagtaagagttgaagttccagaatctcaaggttctaaacgggttttgtttcatgctgttccaaactatctagagaatatgaagcttacgtgagtgttt

SEQ ID NO: 163440 - DNA, 1314 bp, Arabidopsis thaliana landsberg
ctaaactcattatccaatgagtttagagttaaatgagttgggtcaaccaatgaactcatttattttgattggttgaatggttaaaagagtttaccatttaagtaatgatttaattaataattactataaaacaatagttaataatttttattatcatcaattcatcatcgattcggggggatgtagtgaattaaaattgaagacgaatgagacggaggaggtgagtgggctatggtcgctgctagatgaattgtggattgccaggcttacgtgtcgatattggacatggtggccttagccatggtctgtaggagacaccggtttgtggtagactcccatatggtcaggacattgaaattttggatgggtaacgtcgagccatgtttgtacgtatatatgcagatgcatcaaaatccaagcctatggtggttcgtccaccacccccatgcaacgtctgctcaaaccggtccaatcgagcttgtgtcctttccttgaatcaggattatgtttcgtgaggtaggattgcggaatctacattatttgtggactcatgaacggcaaacccacatcggaagtcctttattcgactgtatacaacacacaatgcaccgccttacccccatgaagatggcttgaagccgagcatcgacaagcttggtagacggcaagaagatatacgtgtttggaaggtactgggaatgttgttgctgattcctcaaactgtgtagaggtttttgatatgaaacccgaacttgggacttgttgtctgtgttaacgcccaagatgccccacaaaatccaacatgatgtggtggtacataacgacacgtatgttcacgcggtggatgaggatggtcaaatctttttcttctcaacaagttgttgtttctttgtgacaaccggatcaaaagagtctaacccaaaaaaatagaaacgattgggttttatttgaggcattattctgccaagatatcggcgggaaaatactgtgttgtttttttccagaggagactgtttggaaggaattcaagggtttgaaagagccgtagaagcaacactctgaatgggattattggtggtggttcttttgatatcattaaactttgcgccttctttgttgagaggctggccatcttctgggaagcccaccagcctgatgcattttggagatttggtatgccaagctttccctgaccagacgccatggactcgagggatggggtgaggtttcagtgaacattgagcggttaggttgtttttattgttatatagtggtggcggtcttaacttgttatatgctgattttatctatgcc

SEQ ID NO: 163441 - DNA, 805 bp, Arabidopsis thaliana landsberg
atgaagattcataaactctgttttcttgctctgctcttagctcacaccacttccgccgtcaacctcaacctcaaaacctcagagttggtcttccttggagacgctgagctcggtcctgcttctgatggcgtcagccgctccggagctctctccatgacacgagacgagaacccattctctcacggccaaagtctttggtccactccagtccctttcaagccttcttcaaactcttcttctccttatccatttgaaacttctttcactttctccatctctactcgcatcaaacccgcccctggtcacggccttgcttttgttgtcgtcccttccattgaaagtgacggtcctggacccgctggatacctcgggatattcaacaaaaccaacaatggcaaccccaaaaaccacatctttgctgtcgaattcgacgtttttcaggacaaaggttttggagacattaatgataaccatgtcgggattaatatcaactctgttacttccgtttttgctgagaaagctggttattgggttcagacaggaattgggaaaatgaaacactggtcgtttaaagagttcaagctgagtaatggagagaggtacaaggcttggattgagtatagaaactccaaggttacagttactctcgcgccagaaaccgttaagaaacctaagaagcctttgatcgttgcccatttagatctctctaaggtttttcttcaaaatatgtaccccggtttttctggtgccatgggccgtggcgttgaacgtcatgacatttggagttggaccttccagaacagtg

SEQ ID NO: 163442 - DNA, 645 bp, Arabidopsis thaliana landsberg
attcttatctattatagcatgctcaaatcatccaaaactcaaactgtttattttggttggatgacaatagaagagcttagacattctctgcttcatacaacaatggcgttagagcaaacaagaatggtagccagtgaagaactcattgccaaagacgaccagataatgcagctcaaagatcttctcaacaaagctatcaaagagaaagatgaagcacaagagcgatacaaaaggattcttcttgaccaaaacttcctccttcaacaccaaacggacgaagagcaagatccaaacatcaatgggtttcactcatcggatggtgaagaaagcattgtctcatcttttgaaccgccggtggaaatcgagttagattttccggagatgactttaccggagaaagggaagctttttaaggcggtggtgaaggcagggcctttgcttcagactctacttctagctggacagcttccacaatggcgtcacccgccaccacaacttgagtcctttgaaattccaccggtgattattgctgaagggtcaccattgtcacaagatagttgtgggaataatctaaacaggaagagggttcactgtgatgatcagtctgattccaaaagagagaccaagtaccaaaggatctttcct

SEQ ID NO: 163443 - DNA, 2447 bp, Arabidopsis thaliana landsberg
tgcagcgctatcatacagaagaaaatcattcctaagaagcttagtgatcctggttcgttcactctaccgtgctctttaggtccattggctttcaatagatgccaatgcgatttaggagcatcagtcagtctcattccgctttctgtcgccaaaagattggggttcactcaatacaagtcctgcaatatatccctcatcctagctgacagattagtgaggattcctcatggtttgctcgaaaacctcccaatcaggatcggtgctatggagataccaactgacttcgtagtcctggagatggatgaagagcccaaggacccgttgattctagggagacctttcttagccactgcaggagctatgattgatgtcaagaaagggaaaattgatctaaaccttggcaaagactttaggatgacctttgatgtcaaagacgcgatgaagaagcctaccatagaagggaaactcttttggatcgaagaaatggatcagttagctgatgagttactggaattgctggcagaagaagatcatcttaacagtgctttaaccaaaagtggtgaagatgagtttctgcatttggaaacattgggataccagaagctgttagactcccataaagcgatggaagaatcagaaccctttgaggaattaaatggaccagcaacagaggtaatggtaatgagcgaagaagggtcaactcgagttcatcctgcactctcgaggacgtactcaagcaaccactcgaccttgtcttccgacgaacctagggagccgatcattccaacttcagatgactggtctgaacttaaggcacgaaggttgatctcaaaccacttccaaaaagtctaaggtacgcattccttggtccaaactctacttaccctgtgatcattaatgctgagttaaatagtgatgaagtgaacctactattatctgagcttagaaagtataggagagcaattggttattcattatccgacattaagggaatttcacctagtttatgcaaccataggatccatcttaaaaacgaatcctattccagcattgaaccacagaggaggttaaatcccaatttgaaagaagtagtgaaaaaagaaattttgaaactgcttgatgctggtgtcatctaccctatctctgatagtacttgggtttctccagtgcattgcgtccctaaaaagggtggaatgactgttgtcaaaaatgaaaaagatgaactgatccctactagaactataactggtcatagaatgtgcatagattataggaagttgaatgctgcatctaggaaagatcattttcctttaccattcattgaccaaatgcttgaacgtttggctaatcatccatattattgctttcttgatggatacagtggtttctttcaaataccaattcaccctaatgatcaagaaaaaaccactttcacgtgtccttatggaacttttgcctataagagaatgccatttggtttatgcaatgctcctgcaacatttcagaggtgtatgacctctatattttcagacttaatcgaggagatggtggaggttttcatggacgatttttcggtctatggcccctctttctcctcatgtttgttgaatcttggcagggtattgaccaggtgcgaggagacgaatcttgttctcaattgggaaaagtgtcatttcatggtgaaggaaggcatagtattgggtcacaagatatcagagaaaggtatagaggttgacaaaggaaaagttgaagtgatgatgcagctgcagccaccaaaaacggtgaaggacatcagaagcttccttggtcatgctggattctatagaagattcattaaagacttctccaagatagcccgaccgttaaccagactattgtgcaaggaaaccaaatttgaattcgatgatgactgcctcaaatcctttcaaaccatcaaggacgctttggtatctgctccggttgttcgagcgcctaattgggactatccatttgaaatcatgtgtgatgcatcggattacgcagtaggagctgttttaggccagaaaataaacaaaaagcttcatgtcatatattacgccagccgaacgttggatgacactcagggaagatatgcaacaactgagaaggagcttctagctattgtattcgcatttgagaagttcagaagctatttggttggatcaaatgtcactgtctatacagaccatgcagctttgaggcatttgtatgccaagaaggatactaagccaagactgttgagatggatacttttattgcaagagtttgacatggagatagtagataagaaaggcattgaaaatggtgcagctgaccatctgtcaaggatgagaactgaagaaccccttccgatagacgattcaatgccagaagagcagctcatggttgtagagttcttcggaaggagctacagtgggaaagagttccac

SEQ ID NO: 163444 - DNA, 1044 bp, Arabidopsis thaliana landsberg
atggatgagaaagatattccatggaacttgtgggaagaagaagaagaagaaaatcaaagcgaagaaaccaaaattttgatctcttcacttccttgggagatagattaccttgggaacaagcttttcatgttccaaggatattggtactacgaagacgttctcaaatcaatccccaatatacactcgagttttcagtcacaagaaaccgatataattgttgcttctttctacaaatcgggcacgacttggctcaaggcactcacatttgcactcgttcaacgatcaaaacactctttggaagatcatcatcatcctctgctatctcataaccctcatgagatcgtaccgtacctcgagctaaatctgtatctcaacagctcaaaaccggacttgaccaagttcatatcatcatcatcgtcatcctctccgagattgttctcaactcacatgtccttggacgcgcttaaactacccttgaagaagtctccttgcaaggtagtgtacgtgtgcaggaacgtgaaagacgtgttggtgtcactttggtgtttcctcaatgccaacaagggagtagaatggggagattttagccaaaatgaaaagataattcgagcggagaattattctttcaaggctatatttgagtcattctgcaacggagttaccctacacggtcccttttgggaccatgccctgagctattggcgaggcagcttggaagatcccaagcattttcttttcatgaggtacgaggagttgaaagcggagcctcgtactcaggtcaagagacttgcagagttcttggattgtccattcactaaggaagaggaagataacggatccgtagacaagatcttggaactttgctctctaagtaatctaagcagtttggagatcaacaaaactggatccttgggtggagtagattacgagacttatttccgtaaaggacaagttggtgactggaagagttatatgacctctgaaatggtaaataaaatcgatatgatcgtcgaggagaaactcaaaggttccggtttgaaattc

SEQ ID NO: 163445 - DNA, 1104 bp, Arabidopsis thaliana landsberg
acccatctcatggcgcccacccatcccatggtgctcacccatcgaatggcgccctcccatcccatggtggccacagggccgcattctggttggggtcatggccgagccacattctacggtgacatcaatggaggacaaactcatcttaagcaggtccatacatacttaatatataattcaacaatctcgagacctgtaaaaatgttaagattgttttagacgtatacaaaagccaacatgaagacgtagtaaatgatactcgtgaatctttgacaattaaactaatattgtttgcttatgcatttacataagtaaccataaagtttagaaaagttattgacagaaacgaacttataataattataatttgcaaacgcgaaagtaaacacacgcatgcaaaagaaaaataacgaagccaaataattaggtttttttttacacataatttgttttgtttttgaaagtaatacatactttctttttctatttgatagagggagcttgtggatatggtgatctccacaaacaggatatggtctagagaccgcagcactaagcaccgcactatttaacaacggctcaaggtgtggggcttgttacgagatcatgtgcgaacacgctccacaatggtgtttgccaggttccatcaagatcacagctacaaacttctgtccaccagattttaccaagcccaatgacaattggtgcaacccgccacaaaaacactttgatctctcgcaaccaatgttcctcaaaatagctaaatacaaagctggggttgtccctgttaaatttagacgtgttccttgtgcgaaaatcggaggtgtcaagtttgagatcaagggaaatcctcatttcttaatgatcttaccgtacaatgtaggaggagctggagctgttagggctatgcaaattaagggaacaaggacccagtggattgcaatgaagaagaattggggacagatttggagcactggtgttgtgttgaccggacaatgtttatcgtttaggcttaccacaagtgatggaattacgaaagagtttattgatgttacaccgccggactggaaatgtaatggacagagttttgatggaaagattaat

SEQ ID NO: 163446 - DNA, 1152 bp, Arabidopsis thaliana landsberg
atgtctaatctccctgcagaggttttggaagagattctctcaaggactccggttacatctctgaggacaatgcgatctacttgcaaaaagtggaacaatctctcaaaaaagaagattattcctgaagctgcaaggaagcagcaaggtttaatgttgatcaaaaagaaaatctgttccttgagtttcagtctccatgacattcacaaggatgactacgtcgttccgtgcattaatcaggtcgatattcctcgcaacatagaagtagagaaaatctttcactgtgacggcatattgttatgcgtcatagaggacaactgtagtcttttggtatggaatccatatctagggcaaacgaggaggatcgaagtaagttccgatgccgacatgaatgataggtatgctcttggttacgacaacaacaacagtagccacaaaatcttgaggattaagaaagattttaagaacagcgacggtttaggatacgaaatctacagattcgcgtcgaattcatggagtttgcttgatgaggaagtgatgaaaccagagtgggatgtatggtctgttcaacgaagctccgtgtctttgaagggaaatacgtatttcttacttcaagggaatgattatgatgaccaagaggacgaagaggaggaagatgacgaagagtacgaagattacgaagatgacgacgacgtcctgcccaaagataattttttgctctgttttgattatacagcagagagatttggtccgcgtctgcttctaccgtttaaccctcatgttgaagagactgtggctttatcttgtataggagaagagcggctcgttatgctatatcaaagcttcaagacatataagggaatagagatttgggttacagacaagattgatccgaaagcggtgtcgtggagcaagtttctgaaagtggatatcacaccactcactggttttccggttgacttttacgctgatagtttcgtcattgacgaggagaagaaagttgctgcggttttcgatatacattgtagctaccaaaaagctcacatcattggagaagatggatacctgaaatgtgtgaatatgggaagagcttcggatgttggaaatggtcagccacttgtgttctcttcttatgttccaagtttagtgaaagtt

SEQ ID NO: 163447 - DNA, 4228 bp, Arabidopsis thaliana landsberg
  unsure (1)..(4228): unsure at all n locations
attagcaacttcctccacaatcctcggagggatgtcttctctattgatgttaccgaggccaaggaggttcctcatacgagagaaggaacaaaccagaggcaaactaaccactagtttcgggcatctaaggaataacttttcaactatatctgtatgctacaacaatatatatgtatacaggatacggccatctttgctcttggtgacttccctgttgagaaatccgtctgtgggtagattactgtcactgaagtagaactcaaccttcaaccatcagcaaaagaagctacgaaaatgaaatcggggaaattagagatgagagtgaaggaagcatagataaattacagacctgggtaagcaacttcttggcggtttcttcgttgaaggaggaggccatggctctctagctgcaattgaagaagagacgacgagagtgaagaagagacgagagagagagaggggaattgaaggggttggatctcatacattaataggcccattaacagtgctggcttgacctctgtcacataggcccatctattaattgggcttaacttttatttctatcgtttgagcttagtggttgggctattcaatgtcccctatagaatagagtattcttacgtccaaacaggctcgtcttcttcgaaatcggcggcaaaatgccatcaaaccctccaaaccggaactgatttcccttactgtgacgacctcaatgacggagatacgagannnnnnnnnnnnnnnnnnnnnnnnnnnnncgatccagatcgatttcatgaatgcgctctatcaatttctcgataagggaggcgtctccatgctcgaaagccccactggtatatatatatatttttttttccacattggatcagttattactcagtagtaagtaagtagactcacttagggtttgatctctctctctctttctctctctcttagggactggaaaatctctaagcattatctgcagtgctctccagtggcttactgaccgcaaggagaaacgaaactcaggattgaccgaagaatcccataaggttgatggaaacgatgatgaggacgagcccgattggatgaggaattttactctcaacgaagcagatggagccaatggtgacaagagcatcaaaaacaccaaatccccattttctctcaggaagcatgctaaggaagttttcacggaaggggaaaaggctgatgagctaaacgatcaagaatttttgttggatgaatacgaaagccaagatgaatcatctccgggcggaggcaactctaaaagaaaacctgcccgaggttttgacagtagttcatcagaggatgaggaagatgagaatgactgctcggatgacgaacaaggaggcttcaaggttttcttttgcagccgcacacattcacagctttcccagtttgtcaaggagttgagaaagactgtctttgccaaaaaactcaaagttgtgtgtctcggctcccgaaagaacttgtgcataaacgaaggtgccccaccatttctccttgttctttttcattgtttgcttcgtatttacttacacttaccatagctcatgtacagatgttcttaagcttgggaatgtgacccgaattaacgagaggtgcttggacttgcaaaagaagaagatatctcaagtctctaaaaagaaggtacactttatcaacttgttttatgagatgatttatctatatataaaagtgtgttccgtcttgcattgctggtagcctctgaattctgaatcaaagcttccaaattaaatgaatatctgcttgtttcgtcattgttaatggtcatttagctaagtagagtaaaagtaagatttttgctacctaatggaagcttcaacatttcagaatttaggtgcaaatgtaagaatagtacgaaccaaagcttcttgcagatgcccaatgcttagaaaacataaactacagagagaattcaaggctgagagttttcaacaagaagccatggacattgaggatcttgttcagcttggacgagagatgagaacttgtccatactacggttctagaagaatggccccggcagctgatcttgttattcttccatatcaatctcttctatcaaagtcgtcacgagaatctcttggcctaagcttgaaaaatagtgttgttatcatagacgaggctcacaatttggctgacactcttctcagtatgcacgatgcaaaactaacagtgtcacaggtataaatttcagtttcatcagctttctgagcacatgttgtttggatggacttttgcattgctattgggttctctgtgtcaggccatacgtggagtcatgtttttaaatgatttgtattgcagttggaggatatacattgcagcatagagagttatctgggaagattccagaatctcttgggagctggaaacaggagatatatccaaattatgttgattcttacccgagctttcctcaaacctcttgctagtgataggaatctgagtagcgtaaatgttggtcttgatactgaaaacccctctaaaagcaagccttgtggtgcttgttcaatggcaatatatgactttttgttttctctcaatatagacaatataaatttggtcaagttactcgcctatataaaggaaagcaatatcattcataaggtgaattggttcttaatattttcccctttcgcttgtccaacatttttctcctgtccatttccctttttttaactttgctagtcaactgtgcgtccaggtcagtggatatggagagagagtcgctgctatgttgcagaaagatccagtggctcatgaagaaatgagcaagttaacaagttttagagcgttttctgatatgttggtggcgctcactaataacaatggtgatgggcggataataatctcaaggacgagttcgtctacctctggccaacatggagggtacattaaatatgtcatgctcactggagcgaagttattttcagaggttggccctttcatacatgagtttctttatctctgagttcaacaatgtaatagttaatcaaaccaatttgtaggtggtggatgaagcgcatgctgtcatattggccggtgggactcttcaacctatagaagagacaagggaacgactctttccatggctaccatcaaatcagctgcagttcttctcatgtagtcacattgttcctcctgagagcataatgccaattgcagtttcacatggtccttctggtcagtcttttgactttagccacagttcaagaagctcaataggaatggtgagtaatccaaatgacgctcgttttctcatatgtttctttcctttaacattaatgggattcagaaagagtactgagagtaacctatgattttgactttctgggtatggttggcagatacaggagttaggactcttaatgagcaaccttgtggcagtggttcctgaaggaattatcgtcttcttctcctcctttgagtatgaaacacaggtgcacacagcgtggagtaactcagggatactcagaagaatagtgaagaagaagcgtgtgttcagagaacccaggaaaaacactgaagtagaagctgttctcagagactacaaggaagtgatagaaagcgaaagaggggcaataatgctagctgtggttggtgggaaggtgtcagaaggaatcaacttcagcgacagcatgtgtcggtgtgttgtgatggttggtttgccgtatcccagcccgtctgacatagagttgttagagagaataaagcatatagaaggtcgtgcagattcagattccataaaaccttctgtgactttggttgatgattcttactacagtggagatgttcaagcaggatttggcgtgttaaagagctgcaaaaggagagggaaagaatactatgaaaatctgtgtatgaaagcagttaaccaatcaatcggtgagtttgtggtttcaactatatgtgacgatataagtggaggttgtgttttattaattgataatgggactgaaacagaatgttcttcccggcttgtttttcaggtagggcaatcagacacgaaaaggactatgcatccattttactggtagatgctcgatattctaatgatccatccaaaagaacatctcattctcatccatccaacaagctcccaaagtggatcaaagatcgtcttatttattccaccaaaggctatggagatgttcacagactgttgcaccaattctttaaacataaa

SEQ ID NO: 163448 - DNA, 1095 bp, Arabidopsis thaliana landsberg
actagacaagaataacgttgcatgaggattgaatcgctgctgccacatgatgtagtagagcgaatcctggagagacttgcggtgaattctctgcctcgattcaaggctgtatcgaagcaatggaaatcaacaattgaatcccaattcttccaaggaaaacacttgacgcatcgtcagcaatcaggagatccagttgttctcatggtgaccgtatataatgacgactcctcgcacgtgggatccctactccttgggagcagaaggacaaggaaccctactacattgatcatataatagctgtgacggtctcgtttgtctctaccatcccaaagaaccgggttttgtggtcaacccgcacaactagatggtatcgtcttcttcctctttgcgaatatcaacaaatcatgatcgacatatgagaagttttgtacatattaactcggactctttaggcttggatttggcaaaggcatattcgcggcaacatacaagcccgtttggctatacaactctacagaaataggcatagaagaaaccgctaccacctgcgaagtttttgactttagcaccaacgcttggaggtatgtcactccagctgctctttatcaagttattgatttccttggtcccctctttgtagatgggtcgcttcattggttcactgagtgccaagaaaccaaagttatatctttcgatcttcacaccgaagcttttcaagtcatctctaaagctccctttgtcaattccaatcctcaagagatcgtcatgtgcaatctcgacatggtcgttcaattcaggcaagtgagatgaagtggcccacccaagtgatatggtcgttcaattcaggcaagaagacatgggacaaaatctattctatagatatggtagtaaatattgatatgctaataccctaagatacgctgtcgtacgtgccactagcaagtttgaagtagaagttgttgttttatgatggtgtggtatgtccaaaactgtttacacatgaccccgaaaccaaaccagatgatgttgctttctcggtggctacatccattagaattcctgttttgttatttcccgagtttaatctctattata

SEQ ID NO: 163449 - DNA, 1020 bp, Arabidopsis thaliana landsberg
accatcatcaaggcggtgcttatatccaccggaatcatcaccgccatgtctatgtttctaaaggttttccttcccgtaacattatatttctccttatctttttcgaccctttggagttccttcctcccgtggctgaaaccgccgtacctcttcgtcttcgtcaacgtcatgatcaccattattattgcttcttccagatattaccggagcattggtgatcacgatggtaaagacgagaagaatttacacggacgtggctactataggattcaaactgagccaatcgtcaaccaaacttctccgccacggcttgaggttaaggatatggatcttgacgtggactttgacttcatggcgacgattcagccgccagaggtggagagatcagaggttgtgtatgaagagaaggaggaggagatttcagaactgattaacggcggagatgagtttgttgtgttggaagaatcagagaatctccctccggttgagaagcctttggtttcggctagatttgaacaccggaaaatggtcaaagtgactccaaaaggtactatcacttccaaatgtttaaggaaaaaggtgacgtcattcaagacaacggataggtttttattcgaattttggaacactatttatgtaacttcggagggggattattattttgcaggcgatgatagaaagaaggcgttgaaagtggtgaacccgaagcgagataataagtggaagacgatatcggaggagggaacgtcaagaccgttgagtactagtcattaccagagaccggatatattcggacttggcgccggtggtgattctttgaggaaatcagagacttttagagacgtgactaattactatcaccagtcgtctctgacggtgacgcctccggtgaagatggagaaagagatgttgccgagtctagaggacctgaatcgaagaattgaggcgtttataaagaaggttaaggaagagaggctcgagtcactaaggttagacaaagaggtcgcttagctatctttg

SEQ ID NO: 163450 - DNA, 1095 bp, Arabidopsis thaliana landsberg
atgatcaagaacgacggaaagatgatgagagtgagaattgcgaaggagagatctgacttatgcgacttgactgctgctgcaattaaggctacttacaatacacggaacccatgcgaagtcgagcgatgcatcgatgtgttgaatcacttgaagtctctgtctctttccgtgaaggatatacgattgtctaaatcaatagttaaactggagactttgagaagtcataggaaccctagaatccgtaaggaagcccaagccttgtttcattcatggttgaagacattctacgcacatggaagcgacaactctttcaaagctgctcttaccaaggatcgtctgaagatgaagaagcatgttctaacaaggtgttcgaagttgaagaataaagaaaacaagagatctcagatgactgttgaagcagtagagagtaagacgacgatcaaactctgggagttaaataggaaagaagatcagagatcattaactcgtgaaacagagaagaataaaccaaggaacaactttttggctttgaacagatagaggatcataaatctgagactcgtgaagagaaatattttaagaaagagacaaagaccaatctaaagcagctcaacatgaagacaaggcgtgtctctttggaggatgttacaacaaagaagccacatgaagatggttcattgataaagaagactaaaacagaaaaggagctgctgaagaagaagaaagtggatgagatggtgaagttgttcgaagcaacaaagaaagctgctgatgtggccaacgctaagggtgttctctcaggtaaaccagaggcgtctcgttgcattaacgctctctcgttattgatgaagatcaacattactccaaaaccaaaagaaccaaggaggatgatggataagcttgagggacttacaaaacataaagaccgcaagatttgccatgttgcatcagcccttcttcacctttggagacagaggatcagagaacaagaacgtaaaaagtctgttaccaaggcttcatcaaagaacatacaaagacgaggaaacttagtgatgtgaagaacaaatcaaagtctcttgtggattcaaaaggttc

SEQ ID NO: 163451 - DNA, 1581 bp, Arabidopsis thaliana landsberg
atgaaatcttcaacaactcaaatttttatcttcacagtttttctccttctaatgggggggtcattcgcagcaccaccaaaactcaaagacagtttcacacaatgtgtaaccgttttcaaaccttccgtcccaatccaaaacttcacatacacgcaacaaaaccctaacttcctcaccattctcaacaactatgtccgcaatctccgttacttcaacggtactacacgtaaaccggtagcgatcgtagccgcggctcacttcactcatatccaagctacaatcaactgcgccaaaaaacttggcctccagctccgtatccgtagtggaggacacgactacgatggaatgtcttacttatcaaccgttgatttcgtcgtcctcgacatgtttaatctacgtgcaatcgagatcgatccaaagctagataccgcgtgggtacaatccggtgcaaccctaggagagatctactacaacgttgccaataaaagcaacaacctccgtggtttccccgctggaatctgccccggtctcggtgctggtgggcattttagcggtggaggttacggaaacatgatgaggaaatacggtttatcgattgataacattatagacgctaagattgttgatgctaacgcaagagtcttggaccggagttccatgggagaagatcttttctgggccttacgaggcggtggagccgctagcttctgtgttgtcttagcttggaagatcaagctagttcctgtcccggagaaagttacagtctttaacgttgaaacaatcggaaacagaggagtaatccctaccgatcttgcagcgaaatggcaagagatcgccgacaagatcgataacgatttgttcgtaagattaacgttgagctcaagtaacaaaaccgtgaaggcttctttcatgggaatgtacttaggaaactcatcgaatcttctagagattatgaacgcgaaattccctgagcttggtctgatcaaaacagagtgtattgaaatgaaatggatcgattcggttctgttctggctcggtatctcacccggtacagcaccaacaacgaatatgctaaaccggatcccacaaaagcaaatctacctcaagagaaaatccgattacgttcaaaaaccgatttcacgaaccggtttagagtcaatattcaagatcatgacagagaacgagaacgtcacaatggcttttaacccttacggagggaggatgagtgagattccatcgaccgagaccgctttccctcacagagcaggaaacatgttcaagattcagtacgcagcaaactggttcgtgccaggtgaagcagtggctaaagattgcttgagccagacggaaagattgttcgaggcaatgagcccttacgtgtcaaagaatccaagagaggcgtttttgaactatagagacgttgacattggaaagagcttaaactcaacgtacgaggaaggtaaagtgtacggagttaagtattttaaggataacttcgagaaattggttaagatcaagagcagagttgatcccgacaactttttccgatacgagcagagcattccagtgctctccagccac

SEQ ID NO: 163452 - DNA, 661 bp, Arabidopsis thaliana landsberg
atgtttaggatatgcttgcatgcatgttgcatatttgtgttgatttaggtgatttggagcagttgacgagctaactggaagaagcggacctgatcatgtcaaaccactcgacccagaggtcgagtaggagcttcaagacctcaagagaccactcgacccccaggtcgagtaggggacatcaccacttcacttcaccactcgaacacgaggtcgagtgccctcgtctccatcactcgatcacttcactcgaccatgaagtcgagtgtcttcaccttcactgccagaccactactcgaccacatcactctgcctagaggtcgagtacctccatcacaccactcgactgcatactcgatgacaagcttcagagccttcttcattccgcactcaaccagacactcgagcacaaggaggaaaagaagactccagctattcactcgacctctcactcgaccacctgggtcgagtacagttcttaacccgtccaaatacttcgtcgttttgagtattagggtttcgggatatttagctataagtagcatgtacttctcattttcgcaaacaagaagtttttacctagtttttatttccgcagaccttgtgctctagactttttgtaatccggatttctctttatctattcagtattcagctttggttc

SEQ ID NO: 163453 - DNA, 713 bp, Arabidopsis thaliana landsberg
  unsure (1)..(713): unsure at all n locations
atgcaaannnnnnnnnnnnnnnnnacacacctactattattcaaagacagaattgacagaatagctcgtgagttacaagaaaccaaagcaaaggcagcatgtgatcaacaaagaacagctgctatggatcaacaaaacagaccagttgatgttccagacccacctaatgttgataaaccaagaaacattggtagtggtgatacccaaggaatcatcccaaagacaagggatagtgccacaccagttcagaacaactactttgagaacaagagtggtctcatctccatgatccaaggaaacaagtttcatggtttacctatggaagatcccctggaccatctgtggccttaccaagatcaatggtgtcactgaagatatgtttaagctcagactatttcccttctctttgggaaacaaggcacaccactgggagaagactctgcccccagactccatcaactcatgggacgattataagaaagcttttcttgtcaagttctactctaacgctcgcaccgctagattgagagaacgagatcccaggcttcacacagaaaaacaatgaaactttctgtgaagcttgggagaggttttcaagaaggcttcattattgagcacactctaccaaggagctttaccaaagatcagaaggctaggagttagtcgaaaatctagcacaatctgatgggtgatacaatgaagaatatgatgcg

SEQ ID NO: 163454 - DNA, 1962 bp, Arabidopsis thaliana landsberg
gctatattatcgataaaactacctattcacatatatcctttgtccctttcctttcgatttcatgatcggtgtgaaggctgcagttttcgaaaccaaggtgaatactatggaggctatcgatgtaatgattctgactgcaatcgtgttctgtttcacaaggaatgcgccgagtcaccacttgaaatcaaccacccttctcacccggaacatcctctccggcttacagagaggcctccaagatatgaatgtgatatatgcggcattcatcacttagctgatgtgccgtatttttatcattgttccatatgtgacttcaacgtcgacacatcatgtgcgcggaaaccaccaccgccacctactcatgattttcaagacctaccatctgtctttccaaagataagtggaatatacaattgttgtggagtatgtgggcactcagttgttgctggtaaatattattattcactaccttctcgggatcagtatgctcatttggagtgtatatatcatgagaaaaaagtaaaccttccttttcaccctaatcaccctcttgagctcaccatatctaaatccctccctgatgatgccgaaaaagcatgtgttttgtgtggagtgagatcggaaattgtgatgtattactgcttaatatgtgacttcagcatgtgcctaaactgtgtgagaagccctccacctcttgttattgagcattccaagacccatgagcatcatcttaccctcttatcgagacgaatctcatttacttgtaatgtttgtgggatgcatgaagacggccaagtctcttatttatgtcttcaatgtggttttatggtccatcgaagttgtattggcttaccgcatgtcataatcattaatcggcatgttcatcgcataactctcactaaccatattggcccagggtattcggattgcggagtttgtcgtcgaccagtgaatcagtttcatggggcttatacttgcttcatttgccccaaatatgttgttcattcgcaatgtgcaacaagttacaacgtttgggatgggatagaacttgaagggataccagaagaagctgaagatcttccgtttaaggtggttggtgataacctgataaatcatttcagccacgagaaacataatctaaggcttaccaatgaagacgttatttatgatgaaagtagccgatgtgaagcatgcatctttcctctcaactctggttcgatatattgttgcgatcaatgtacttttttccttcatgaaaaatgtgcacatctgcctatgaagagacgccacttaatatacaacagaccatttaccctacatgctagaggaaaagatctccaaatagattggttctcatgtgacgcttgtggaaaacaatcgactggtttcaggtacatctctgatgatttaatgcttgatgtacattgcagttcagtttccgaaccgttcgtccatgatggccatgtacatcccttatattacaaagaagaagccagtaccaagtgtgattcatgtcataagctgtcttataacatgcttggttgtgatgtttgtgactttagtttggatttttgttgtgcaaatttgccaaagacacttaagcacaaatacgatagacatcctctctccctatgttatggtgaaaaggcaagtggtaaatattggtgtgatatttgcgagacggaaatggatccaagtaagtggttctacacatgcgatgattgtgtggtcacattccatattgactgtgtttttggggatttctcacgcttcatcgcaggatccatattcgagactataatatacacatttgaagtggttcctaccaaagatactacacgacaactatgctcccagtgtcactctcgatgcaaaacacctttcattctaaaggcacttagccaaactgaagattattgtatttgttctctcaagtgtcttagttcatatttttctaagtta

SEQ ID NO: 163455 - DNA, 666 bp, Arabidopsis thaliana landsberg
ctctattatacatctctaattatctcacttttaacatatagtttttttatacatctttaatgactatataaaccaaacactgatctttttcaggttgcgaataaaccaagaatggctttaacccatcacatcatcttcgtggcacttcttgtcatctccgtcaaagccatctcaccggcggcgaaactgaaacccaaacaaatcgtttccacttctcctccacctcctccaacaatctctgcagcagctaaagctttcaccgatgcgcacaacaaggccagagccatggttggtgttccgccactagtttggagccagacgttggaagctgctgcgagtcggttggctcgttaccagaggaaccaaaagaagtgtgagttcgcgagtctaaaccctggaaaatacggcgcgaaccagctttgggctaagggcttagtagccgtgacaccgtctcttgctgtggagacttgggtgaaggagaaacctttctacaattacaagtcagacacgtgtgctgcgaaccacacgtgcggggtttataaacaagtcgtctggagaaactctaaagagctcgggtgtgctcaagccacgtgtacgaaagagtcaacggtgttgaccatttgtttttacaatcctcctggaaatataattggccaaaagccttac

SEQ ID NO: 163456 - DNA, 2851 bp, Arabidopsis thaliana landsberg
  unsure (1)..(2851): unsure at all n locations
atggttaaaggctaccccagttttgaaaatgaggattggtcaaagtagcctggttcagaagaagaagactactctgctgatcagaaagaagcttattttgaagaaaaatcaaataagtactcatcctaccatatctcaagagaggatgcagagtatgattcaagcactgaaaattcgaccactgaagatgaggacttctctgttcctctcttccatctcttttctgactaagctctgtaagagtcaagcttagtgacttaaaaaagctcacttgggaggaagtcccatgtctatccatgtatataactttctatttttcttgttattttgatgtttttgcttaagtgtttcaggtttatttcattattcattatggagtcaacggtcgagtaaattcaaaccaagtcaagaaaaatatcaaccgttgattgagtagaatgaggaggagtattttgagccattgatttgaatgactaaatgtgggaaatcaccctcaccgtttgatcgagtgaccaagggagaagtattctccaccgcccgcccaagtatttcacacttcaagaagatactcgattctttactcgagctctcatatttcgaagaccaaggcataacttcgtgacccaacttgctccccaaacactcctttactcaacggacaaagagattacccatgcccctcaccatttacaatcaacttttctatcctttcccaaagaaaccaaacaccattctcctccacccattgaattcgacaaacccacttttgaaactctctctttcatcatctcattttcgcaaaatctccatctctcacaaagcttcaaagtttcactccaaactcttcacgaattcgttctcacttcatcataattcaccaaagtcactcgatcacttccaagttcnnnnnnnnnnnnnnnnnnnnnnnnnngctcaaaatttcatcaccaaagaaactgattcccttcccctttgatagctcttagagaagtgttcttgtttgccctgtcaaagctcaccaccaatctccatggattcaagaaggaagagttcaccacgggcaagaagatcctctattgataatgaggaagttgaggcgtttgacatgagtggcatgactgagcgccaaattcgccaagctcgtcgtgctcaaagatcaagcttgattcaaggtggaagctcaagccgctcaaccatgcaaagagaagaagtagctcgaggaaagagggtcgttgaagctgaagaagaacaccatgaagaggcaccttttgaagaagcggtttctgaggaagaggttgagatcatcggggatgatacaccaacccctgttgggagaagaaaccgtccaaggaggaagagagagccaaccccgagcgaatactatcaatacttgaaggagttgaagtttgagggaactagataccctcataaggaaacgatgcaagagcttggtatttgtggtgatgtggaatacttgatggaattggccaatcttgcaacattcattagcagccaatgtgggggatacaaagaggagagctgccaactccttgcaaacctcaaggttcatttttgtgttgatgattcggagaaagaagaaagaggagggcttggttacataaatttcaaggttgggggtgtcgagcttgatattagccaccttgataccatttttgggtttccaagtggagaaagaatccgccaagactatgaccaagatgagataaaatctctttggacaacaattgccggtccaaagccctactcgcccgccaagagcaagagttcttcaattcgaagtctcgtgattagatacctccaccaatgtatcgccattacccttttcccaaagaagactaccagattcgtttatgaaggagagctattcatgattgctcaagctttggtcttcattctgagagagaccgaggatgggaggaagatggcgggtgatagagtagacacttcgttgactgtcgttcttttggaccacctattgagctatagagagtatgttgcaaccatccatctctcggggatttgcggaagtctttgtgttggtggtctcttaacaccaatcttaggagcttcaaggatacaatttggaacccctgacgtgttccccaagttcatcgacctcaactatctcaaggggaaggattttcttgaaaagaagactccggcggatcattatatcttcaagttcaaccatccaaagcttggaccttctttgttacctctaccttgcgagaaccggacttcattgaagacaaggcacaacatcaacttcatgccatctccctcttccctaaacatcgacatcgaaggagctagagaagatgaacaagagtatactcaagctgactatgagcaacaagaatattatacacaagctgactatgagcagcaagtcgagttcgagcaacttagcgaacaaccggagcaagagaccaaagaattcaagcaagctcattatgaagcagatgctgatcaaggaggagatgagataactgaagtttacaagaagctccgtgtgcttgaagagcttgggaaccttcacagcaaaacgatgaagggtttcaagaagaagatgagaacaatgaagaaatcactaaagagtatggctaatcaaatcaaagacttccagagcaagccaaggccaccgtctgccacccccgaagtaagaagaagcggttccacaagctcagctgcaaggagggctgaaaggattgatcaaccccgagcttcatcactcgagcctcgggaagtgatctccgagttgagagagccaaggagtaggcagagacgaggttctacacgctcgaccaactactcgaccagacagaacgag

SEQ ID NO: 163457 - DNA, 1512 bp, Arabidopsis thaliana landsberg
acaccaagacttacagatttccagatatcttctatatcagttcctccttaaagcaactcgacgtgacgttggacttttttgatatgattcccacatgcacagtgtcttggaaatccctaaggaacttaacactgcgtttttgtcaaattccagacgaatccatgcataatattctctctggctgtccaattctcgaaagcttgacactcgatacatgcagattacttgagcgtcttgatctgagtaaatcaccgaatctgaggagattggatataaataggcaatatcgacgcacatgaccaattgtgattgttgcgccacacatctattatttgagagtgacatactctagtacaccatctactatagtggatgtctcctctttgagcgaagctaaccttaacattatcagtagcctactctctcccttgactgctgatcgttatcaaaccatggcgctggagatgctataaaaatttcacaacgtaaagaggcttactgttggggaaaccattcttcaggtatactctaaagcctaaaaactgtagaactattaattatttggttaattaatgtttgtttgatggttaagaacgccttggaaacatgaacttgctaagtgggtttcatctcgttttttcagattctatctctcgccgagctccgcggtgttcctttcccaacgctcaaggtcgaaactttgactgttgaaacggagttcgttcgatctgtaatccctggtatatcaaggttactacagaattcacctggattaaagaagctaacattacacacattgcagctaagccacgacataatggtatttttacctcttttctttccttgtcgatttatatataagaccatgtatactaataacggactaggaacattccatgaaccacatgtctttcactttcgtttatcaagggtatatctccaagtctactctattttttccctaaactatattacatagcaaaattctttacaacttcattctaaactagagtaaaatatatgtttgctttacatttagagtaactctattttttgcgctttaaaaaaagtaaaaataaatagagtggtacattgaaaaaaaaataaggctctactatattttagagtacgctagcttagagtaaaaaaataaagaaatacattggagatgagcttattctctatagaataactttttatgttctacaggaaatgcatcctttaaaaggtttatatccggatcaatgttggagatcaacatgtgaggtgtttcctacctcaaaggagatctacaagatgttgggttttaataatgcaacgtcgaaactcgtggcttcgtttatggatttggtgctgagaaacgcaaagacgctagagaggatggttgtttggttgggaggcatctactttaatggtgatgcaccatggtttgaagaagagctgtttgacatggttgaaacactttctcacaacaataatgtctccattttgctcaaacaaagcaattgctaa

SEQ ID NO: 163458 - DNA, 706 bp, Arabidopsis thaliana landsberg
tcatcatcattatcttcaccaatatcaatccaacgatcgaaacctgaaaagaatcaaaactaaaaagatgtctgcccttcggctaagaaacgcaaacactccggctccggagctcgacgagttatccgatcagacaccgtcagaatcccgggtgctcaagagacagatgtcaatgtctcagcgagccatgtcaaacaccctgacgtcagcagccaatctctcaaacctactcccaacgggaacactcctcgcgtttcaactcctaacgccggttttcacttcaaacggcgtttgcgaccacgcaacgcgtttcctaaccgccgttctccttttcctcttagccgcgtcttgcttcgtcagctcctttaccgatagcgttaaagccgacgatggaactatctacttcggtttcgtaacgttcaaaggcatgtgggtcgttgactatcctgacccgtccgggttaggtttacccgatttagccaaatatcggatgcggttcgttgattggatccacgctacgttgtcggttttagtgtttggagcggttgcgttgagagacaagtatataactgattgcttttatccgtcgccggaggcagagacgaaacatgtcttggacattgttccggtgggtgttggggttatgtgtagccttttgtttatggtttttccggcgagacgccacggaattggatatcttgttacc

SEQ ID NO: 163459 - DNA, 2217 bp, Arabidopsis thaliana landsberg
atgtctggtttgttcggtatattatctccggccaaacgggtcaatggcgatggcctccctctgttttacaatatccacaagtcagtggagcttcagagatgtcacagagacactgcgcgggtgtctgtcacacttgcagaacttctcatgagtgtggaagatgagggggatgaccagagtcgggctatggatattgcggttgcgtccaatttctggtcctcggttccgtcttctcgtgtgccttcttcttctccgtttgttctttccttcaaagacttgacttacagcgtgaagatcaagaagaagtttaagccctttccttgttgtgggaattcaccttttgatggtaatgatatggagatgaatactaaggtgctcctgaatggtatttctggtgaagcccgggaaggagagatgatggctgttcttggagcgagcgggtcagggaaatcaacgcttatcgatgcattagccaatcggatttcaaaagagagcctacgcggtgatattactttaaacggggaagttcttgaatctagcctgcataaagtcatatcagcttatgtgatgcaagatgatcttctcttcccgatgctcaccgtggaagagacgttgatgttttctgctgagttcaggcttccaagctcgctttctaagaagaaaaagaaggcacgggttcaagctctgattgatcagctcggcctgaggaacgcagcaaaaaccgtgatcggtgatgagggacacagaggtgtgtctggaggagaaaggagaagggtctcaattggaaccgatataatccatgacccgattattctctttctcgatgagccaacttctggtcttgactctaccagtgcatacatggttgtcaaagtgcttcagagaatcgcacaaagcggcagcatagttatcatgtccatccatcagccgagttacagaatcttgggattactcgataagttaatcttcctatctaggggaaacaccgtttacagcggctccccgacacacctccctcagttcttctcagaattcggtcacccaattcctgaaaacgagaacaagccggagtttgcactcgatcttatccgtgagctggaagattcgccagaaggaacgaaatccttagtcgagttccacaagcaatggcgagcaaagcaaacctcaagccagagcagaagaaacaccaatgtatctctcaaagatgcaatcagcgcaagtatctcgagaggtaagcttgtctccggagcaacaaacctaagatcatcatttcaaacctttgcaaacccattctggactgaaatgctcgtaattggtaaacgatctatactaaactcaagaagacaaccagagctattcggaatccgcctaggagctgtactagtcaccggaatgatcctagccacaatattctggaaactagacaattcaccaagaggtatacaagaacgcttagggttcttcgcattcgcaatgtccacaacattctacacatgtgcagaagcaataccagtctttctacaggaacgttacatattcatgagagaaacagcttacaacgcttaccggcgatcatcatacgtcctcgctcacacaataatctccatccctgctctcataatcttatccgccgcattcgccgccacaacattctcggccgtaggactcgccggaggctccgagggattcctcttcttcttcttcacaatcctcaccgcgttttgggccggaagttccttcgtgacgttcttatccggcgtagtctcacacgtgatgatcggattcacggtggttgtagcaatcctcgcttatttcctcctcttctccggattcttcatctctagagatcgaatcccactctactggatctggttccattacctctccctagtgaaatacccttacgaaggtgttctacagaacgaattcgaagatccgacgaaatgcttcgtcagagggatccagatgttcgacaattcgccgctgggacaagttccgaccgccgtgaaaatcagcctcctgaagagcatgagcggcgttttggggatcaacgtgacggcggagacttgcgtaacgacgggaatcgatatactgaaacagcaaggaatcacggagataagcaaatggaattgcttgtggatcactgtagcttggggattcttctttagggttctcttctacttcacactcttgatcggaagcaagaacaagcgtcgc

SEQ ID NO: 163460 - DNA, 1070 bp, Arabidopsis thaliana landsberg
ggagacaagaagaaaaaggaagcaaacgggtcggagctatgtccggacttgctgcgatgtgttttcaaacgattgagtttgatatctcttaatcgagctaaatcggtagtggcactctgcttcgagaggctgcggccctgaccaaaatcagattccatggctgattctcttctctcccaaggaggaatccaacaaacacagtagtagttgtgtgttgtacgttccggaggatcaagacaacgtttacagaagtagagaacttggtgttgactttccccagagaccagagtcgttgtctgacgacttgtggtagctggctcttgttgttgaaacctcttagtatggatctcctttagctggtgagaggattgatctacccgatagcaataagccatatttaaggagttacttaagatacgaccgagcttgttttcggatggacaataaaaccaaagattacctagttgtaatgttggagtacgactttcgtgtgtttaccaagaaaggagataacaagtggcacgactttcccttggagtgttttgaagattttgtctacactcatcaaaagctctaccttcgttatgccaattctcttgtcactatttggacccttgattggtattctgtctcttgattggtattcgttcaatcatcacgattttgacccttttcttcagcaaaaagatcaaaaactctattggaaattgatacgccgctccaggacacgcattgcagtcacagtatccggagagtttttggtggtatcaagtatagtacaagacagcaaaacattatattttcacatctagaagaaaaaccaagtgggtggcaaattggtgaaagtcgattctttgggcgatgaagcattgatctatgacatgggtatcactgttgtccccagtggcgtcccagggatcaaaaggaactctatctacttcagtggcgtccaaatatttgtgtatgatctcaccacccaaaagatggaacctatgcctcaatgtgttttctcctccataccattctctgatgctcgttgattcttcccctgctagtcgtctacctgcgca

SEQ ID NO: 163461 - DNA, 918 bp, Arabidopsis thaliana landsberg
  unsure (1)..(918): unsure at all n locations
atgaggaaaagaggaacaaaaagaaagattgaaattgagaaacgcatgactaaacaacaacgatccgtcgcttgcagcaaacgccgtcccacactcttctccaaagcggctgatctttgccttctctccggagccaacatagccgtttttgtaacttctcctgacgagaactccgatgtcgtttattcattctcgggctactctcatgcctctgaaattgttgactgttacctcaacaacaagtctcctcccaagactactattaaccctgaatcagccaagttttggtgggaagagcccgatctttaccgtgattgtgacgatctgtctgagttaagaatcatcgaagatcgtttgatgagaacgaagaagcatctcatggattatcttgagaagaaagaaaaatcacactctgtttctaaatccgatcaaaaccctaacaacgacagngggttttcttctcctttctcacaaattgcttctgattttggtcaaaaccctagtacctctactctgtcttcttctcaaattgcttctaattttggtcaaaaccctagtacctattctccgaattcctcacaaattgtttgcttttatcagaaccatggcgagcctcggtcatcacaagttacttgttttgatcaaaatcatatcttctttgttgatgagtcattatttgatcaatctggttacttagttaatgatgatcaatctggttacttggttaatgttaatcttggatttgttgacagcttatgtgaaatagaggaagagaagaacggaatgagtgtaccccaagaaacacagacatcaacgcttttcactgaggatcagagcttttgggaaaatctattcaaggattttaataacgaaaaccttgaggttccacttcaagatcattcctcaactaacgaaaaa

SEQ ID NO: 163462 - DNA, 849 bp, Arabidopsis thaliana landsberg
  unsure (1)..(849): unsure at all n locations
gttggcttggttttggcagacgagcatgtaagctaattgaattattgtgtattctttgtctagatcttttattttcagaaccgtattgaacaattgttgcatgtatacttcctagggtgtatccgactactataatgaatttattgatgttggcgattggataaccatcatgcgttttggagtttatccgaactcgaattttgttagggtaacatctcataagttcaagatttgtttcttcaaagacaccgttgttaggaagacaactgctgtggttgcgaatcctcattacgctttgacatatttctctttgannnnnnnnnnnnnnnnnnnnacgtcggttctaatcggtaagaccctttttattttgtgttaacttatgttcttcgaaaatcaactaatcgatataaataaatttcaatcatatttagtgatgtttttaaaaaaaaactgtattctagactttgttggggcgattcatgatgtaggagaggtggagaatattaggcgtacacaaaatgttgtcaatgatttaaggatttgtttcaaactcaagaacaaagagttagattattttataaatataatgaaattgttgttctttagtaaaaaagatcaatttttcttttttcatatgtagcaactgtgtgttggaatgcttggcttggggaaaacaagctcttgatttttgtcagaattatcacagtcgtggtggtggtgttattgtggccgtgcttggatggtggaaattggaccattattttgatggtccataaaatgtgcaaatttgcacatgttcatttaactttatgaaaatcgcgaaaagaaacacgtgtgttttatgaccta

SEQ ID NO: 163463 - DNA, 1017 bp, Arabidopsis thaliana landsberg
accgatgggaacattgatggcacttgtgaacattttagccgctggtgtccttccgatcttcactttcgtcctctcacttacactcctcggctacgcagtgtggcttctttacatgcgtagctacgactgcgaagatattctcggtctgccacgtgtccagacgctagctagtgtcggtcttctcgcggtgtttgttgtcagcaacgcagctctgtttttgcggcggaagtttccgatgcctgcacttgtggtgatggtggtggtcttgttgttaatgcttttcatcggtttggcgtatgccggagtaaatgagatgcaaagccggcggtttccggcgacaaggatgtggttcaagctcaaaatcatggacgatcatgtgacctggaacaatatcaaatcgtgtgtctatgataaaggagcttgcaacgacctcatttacggatctccaaatgaaaaaccttacaatagaagaaaaatgccaccaatcaaggtttgatcatcatagatatatattctttgatctcaagaccgacttttaaagtgtacaattagtacattcgaacaatataccgataaaaagatcactcaaatatacgttttgtaaaacatttgtataagattttacaaacatttttatgtttacatttgatgttgttacagaatggatgttgtatgccaccagagacatgtaacatggacgcgataaacgcgacgttttggtacagaagaaaagacgaaggaccaccgtcgtctatgaacctaatgtacggtgatgagatgatggtgggaaggattagcgactgtcaactatggaggaacgattggagcattttatgctatgattgtagatcttgtaagttcggattcataagatcggtaaggaggaaatggtggcagctcggtatcttcttgatcgtcatttccattcttcttctcatgtctcatctcttgatcttcttggctactttttgggaacgattcaagggttagtcacattatggagtcttttctaattag

SEQ ID NO: 163464 - DNA, 1684 bp, Arabidopsis thaliana landsberg
  unsure (1)..(1684): unsure at all n locations
atgatcaccgatcttccaaaggatttgatagaagaaatcctttcaagggtttccatgacatctatgagagttgtgcgattaacttgcaaaagttggaatactttatccaatagtgagagctttaagaagatgcacattggtaaagttacatcaacgagagaaggagaatctagggtgatcatgttgatagattacaatgtttttttgatgagcgctgtcctcgaggatgacgttgatccatctatagagtttaaaggtaaacttagttgtcttaacgaacaagtcaagatatctcaagtctttcactgtgagggtttattgttatgcatcttgaaagacgatactaggattgttgtttggaatccgtataggcaggaaacaaggtggatgatacctagatattctcaccgtccatacgtaatgaacaatatcagatatgctcttggatacgagaataataaatctggtcgtagccttaaattattgaggtttatagattattgctacaccgaaaagcacatttgttggcatgaaatctacaattttgactctgatttatggacaactcttgatgtcactccacattggtatatattgtctaattggtcttgtgtccaaggcgtctatctcaaagggaacacttactgatgtgctagagaagaaaactcagatggtttttttttttttttttgaaagaatgtaaaattatattccacaaaaaaaacttgtttacaatgaatgcatctgtttagctgaaagtgttttgaaagagatcagaaaagcttatgaaccaaaagacgagttaaaaaaaaaaccgacgccttgcttatgaagctggtctagaagagaaccacaaacttaggcttgcatcgtagcgatggtctcccaagtccttgatggcactgatacggttgcgcacgtttttatcgatgagttttatgagccgagtcgttggagctggaacttcaccatgtctccttgcgtttctttcgcgccacacatgatatagtgtagcttggaagacatatcgaaacaagaaagagatttggttacaatcatataatcatataatcagatggttacaatcatataatctgttttgattttacaagagagagatttggtccgcttctgcctctaccggttaacgttatagataatgaatatgaatatgtgactttatcttgtgttagagaagagaagattgcggctttatttcagcacaacgattcatatccatatgagcgtgagatatggattacgactaagattgaggccgaaatggtgtcgtggaacaagttcttgagaattgatagcgaacctaacaattacataatggttccatttatatgtgggggtttcttcattgacgaggagaagaagaaagtcgccatggggtttgatgaaaactctcacaaaacatttaacattatgggagaggctggatattttagagaactcgatcgcaaaaaacttcaacattattgaagaggctggagagcgtgcacgcgaaaactgtgtgtgctcttatgttcctagtatggtccgaattaagaaacctgcacaaggcaaaaggaaaaggcaaagcagtttagaaaagcttcgctttgatcaaaacnnnnnnnnnnnnnnnnnnnnnnnnnnnnnnnnnnnnnnnnnaatccgcaggaggaggccaacggga

SEQ ID NO: 163465 - DNA, 658 bp, Arabidopsis thaliana landsberg
atgtctaagatagctttgcatgcatattgcatatgttgagttgatttcaggcgatttggagctgctgacgagctaattataagaagcggacctgatcatacaaaacctctcgacccccaggtcgagtagcacttcacagcctcagcagaccactcgaccccctggtcgagtagaggacatcaccacttcacctcaccactcgaccccgaggtcgagtgtcttcatctccatcacctgaccatcactcgatcacatcactcgaccccggggtcgagtgtcttcacctccattaccagaccactactcgatctcaccactctaccttgaagtcgagtatcaccattaccaccactcgactacatacttgattgcgagcttcagagtcttcttcattctgcactcaaacacaaggaagaaaagaagactccaactattcactcgatctcccactcgaccacatgggtcgagtacagttcttaacccgtcctaatacttcgtcgttttgagtattagggtttcgggatatttggctataagtagcatgtacttcacatttttgcacaagaagtttttatctagttttattccgcaaaccttgtgttctagactttttgtaatccggatttctctttatctattcagtattcagtattcagct

SEQ ID NO: 163466 - DNA, 1768 bp, Arabidopsis thaliana landsberg
gcggtaaatgtgcagacatagcactggaagttcagagggaaactcaatccctctaaaccagacagacgttcctgaagacgttgctcccgcgaccctagcggaactaagaagtatgatggctcaacttcaacagaaggtgaacaatcaagaacaggcaaatcgatccttggtgcagcaactcgaagcagctacctcccaaggacagatcaggactactcgtttcagcgcgaggcatcttcaggatcgacgggcagcagcagatctcaatcccacacggctcgtattccacacacctggcaatacgacaaggcccgtccgcagaaccgcaccggaaatcggaagagaccgaaccgagccggcaattttgggaaatcgggaaacaaatcgaaacgaaccgcaactccctcctccccgagcagaggttaccgaggccgatcatatcgacgcctcggacaatgaagactccgaggagaatattaggtgggctgaagagtacgccagagaacaggtaataagcgccatcaagctatccctagccaaggcagagaacgagatgaagctcgtgagatcccaaatgcataacgcagtctcctcggcaccaaacatcgatcgcattctggaagaatcccataacacaccgttcacacacaagatcttcaacgcgataatctcagatacaggaaaattaagaatcgagtacttcaacgggtcttccgacccgaaagggcatttaaagtcgttcatcatcttcgtggcccaagccaaattcagaccagaagatagagacgctggtctctgtcacctgttcgttaagcacttgaaagggccagccctggattggttctcgagactcgagggaaattatgtggacagttttcaggagctatcgacgctcttcctgaagcaatattcggtgctaatcgatcccggcacatcagattccgatctatggtcactatctcagcagcctaatgagccacttcgagacttcctcgcgaaattccgatccagcctagccaaagtagaaggaatcaacgacgtggcggctctctcggctctgaagaaagcactgtggtacaaatccgaattttaaaaggaactaaatttgttcaaaccactgacaatccgagacgccttgcaccgagcctcggattacgtatccaatgaagaagagatggaactactagctaaaagacacgaaccgaccaagcaaacgcctcgcaccaataaacctcaacccggcgctccgaaccacaagaaaagcgcccaaggcgggacattcgttcaccatgaaggacgaaatttctgcggagcccataattaccaggccgatacaccccgaggcgaagccgcccgaggccgaggccgaggccgcggacgaggacgcagtcgagaatcctacacatggacgaaggatcaacccgcaggaaatgagcaagaatattgcgagttgcataagagttacgaccatcatacttccagatgtcgtagccttggagcaagattggctgcaaaattcctggccggagaaattggtggagggttgactatcgaggatttagaggcagaaaaaggtaaaaccgagcagaccgcccccgcggcgaaccccgaaggacctaaaagaggccagggtaatcgcgaaacagacgacgatgaaccagaagctgctcggggaaggatcttcacaattttaggggattcagctttatgtcaagatacggcagcatcaatcaaggcatatcaaaggcagcatcaattcaaatgttcg

SEQ ID NO: 163467 - DNA, 2046 bp, Arabidopsis thaliana landsberg
atggaaaaagtggtgctacgggttcatgaccatcctttgttaccctttgaacgcttttattttggccgttgttccgggtgctcacgtgaaggctacttttatggaggctaccgttgcaatgagttggcgtgttttgcggtgttccataaggagtgcgctgagtccaaacccgagatcagccaccatgcccatcccaagcatctgcttaagcttggcaatagacgtcaacgttgtcatttgtgtgaacggccggtgggaattggttatttttgttcgatatgtgactttggtatgcatttggtttgtgcgaagtccccaccactatcacttcagccacaactctctagtattgagaattacaaggtgcatgaacatcctcttaaacctttcaaaacagcatggcttgcagaaactggcaattgcaaagggtgtaactacattatcggcaatggagataacgctcctttttatgaatgtcgtcggtgtaaactttacattcacgtgacttgccttgagctctttttcaccacagatgcacaccacaactctcatctcaaacaccctctcaaatatctcaaaaatggacacccgagttacgctgaccataaatgccttctttgcggaagagagtttgaagatcaacaaggccaaaaatatgagctttatcactgtgatgtttgtaacttcagcatatgcatttcttgtcaaggaaacccaccaccactagtcgttgttactccgaagacccacgagcatcaacttcacctcattccaagacttcttgattttacttgcaatgcttgtgggacacaaggtgaccgaagcccttatttttgtcttcaatgcaatttcatgattcatcgaggttgtatcgacttaccccgcatcataaacatcaaccgccatgatcatcgcatctcttacatttgtcatctcggacacgggaattggagatgcggagtttgtcgcaaaacagtggatgggttctacggggcttattcctgctcgaaatgttctagttacgttgttcattcattatgtgcaactagaaaagatgtatgggacatggtagaactagaaggaacaccggaagaagaagaaattgcgccattcgaggtggttgatgagaatacaataaagcacatgagtcatgatcatgatttaatattcaacaatgatggtataaatctccatgaaagcaagctttgtgaagcatgcgtctcccagatcaatactgatccgttctatagttgtgagctatgcggttttattttacatcaaacatgtgctaatatgcctaggaagaaaaggcatgttttgtgcaacatacccttctctctacaaacagacgatagcaaggattcttcacgcctaagaagaaaatgtagtctttgtctccaacatttcactggatttgcgtataatctgcatattgcgtataactcgcgtaccgaagttatggatatacgatgtggttcgatatttgaaccatttgttcatgaaagtcatccacatcctttatactacaagttcttcaccttttcggcggttgcgaagtgcgacatctgtcacataacaagaaggcatttgttatgttgtgaagagtgtgactttaggttggatttcaggtgcgcaactttaccaaaaaaagtaatgaagcaaaggtacgatgaccatccacttttcttgtcttatggtgaaaataatgtggatggtgaatactggtgtgacgtatgtgaaaaaagggtagatgcaaagacatggttctatacatgtgatgcttgtggggtcactttacatgtttcttgcgttgtgggtgacttctcctatcatatgccaggaccattatcaaccgtagttagcgaatacaaaatggtaccgccggcggtagtaagcttatacaaagtggtgccaaacacttcgatttgtagaccactttgctccaggtgtcacactagatgcaaactcccttgcattcttgaaacctccgaggatggtgttaatgtttacttttgttctaatgattgtcataaaaatccttgggag

SEQ ID NO: 163468 - DNA, 664 bp, Arabidopsis thaliana landsberg
atgattaggatagctttgcatacatattgcatttctgagttgttttcaggtgatttggagctgtttgcgagcaaattggaagaaacgagccagaaccagaagacatactcgacccccaggtcgagtgactttggagccattcttcccacatactcgacccccaggtcgagtgactttggagccattcttcccatccactcgaccaccaggtcgagtaacctcagctcaggccactcgatgacattactcgaccacctggtcgagtattacttcgccacaccacctgaccacactcgaccattcactctaccactttactcgaccccctggtcgagctcaccaccatcaccatcactcgaccggacactcgatcacgtcttcacagtctactcaaatccgcactcaaccagacaagctgagcacaaggaagagaagaggagaagacaaagtgtttggaagcggcctggacctccatcggatcacgaagcccatctcggcccattatcactctatgggccgggcgattaggttattggcccgtctactatcattttatttcgttttgtataaatagatgtcttagggttttgtccggagacatctagtcgacattgagtttttgcttcagttttattttctgttttactctgttgcgccgcttttg

SEQ ID NO: 163469 - DNA, 731 bp, Arabidopsis thaliana landsberg
caaatacaacatttatctatactagagtttattactatggcttttgatgaagatacgaaaatggcgtctttcttaagagaagaagaagaacaacactattctttatcaagactctccgtttgttccaactacgacggcgatgaagccgacggtgagtcttctgcttccgacgagaaacgtgttgtccacggcggaggagagaaatccatggaggagctaaatttttcagattctgataaagaatcaaccggttgtcagtctctcccggcgacacctccgagacggagacggcgaagaggcggtggaggaggatatttagcggtgagttctccggtttccggcgataaagcttacgctagcgagaacgaagtacaaaagacgaataacaatcagaggagaaggaggagattgaaaccggagtgtccaccgtgggttgatagtatgcggaggagctacgtcggagatgaacagagtagtcacggtggttacggaggaggagtggtggttgttacgaggcctataggaggaggaaggccattgtgtatggatttagaagaagtcaaagcttgtaaagatttggggtttgagcttgaaccgggtcgggtttcgtattccgggtcaacggtggatactagtagtggcggcaattctcctatctcttctaaccaccgtatttcgagtcccggttagtcccaaaaaagcttcttggctctttgttcaaattccaaaaa

SEQ ID NO: 163470 - DNA, 2429 bp, Arabidopsis thaliana landsberg
tccagtgcaattatccaatagaaggtcatacctaggaaattgggagatccaggctcattcactctaccatgctcactaggccctttaacattcacaagatgcttatgcaatctaggtgcttcggtcagtctgatgcctctctcagtagccaagaaacttggttttgataaatataaaacttgcaacatttcgctaattctggcggacaaatccatcaggatacctcatggcctgttggaagacttacctgtcaagataggttctaatagaagtacctaccgactttgtggtgctggatatggacgaagagccgaaagacccattgattctgggaagaccagttttaactacagcaggagccatcatcgatgtcaagaaaggaaagatcgacctcaacctcgggaaagatcttcggatgactttcgacatcaccaacatgatgaaaaagcccacaatagagggtaaagttttctggacagaagagacagaattcctagctgacgagcttttagaaggactagcagaggaggtccacttacaaagcgccctgaccaaagacagtagagaaaaagacttacatgtggaaactttgggataccagaagctcatggatatgagcagggaagttgatgactcagaagactttgaggagttgagaccactcgatcgcaccaacgacccactcaatcacgtcactcgatcgcaaggcgagctacatcactcgatcgcttcactcgatcacgattccatctccgacgctgaatcaccacctgacgattggtccgagctcaaggcacccaaggttgacctaaaaccgcttccgaaagggctaaggtatgtttttcttggaatcaattccacctatcctgtgatagtgaatgatgaactagatactgaacaagtaaatttgcttttaattgaattaaaaaagtatagaaaaaccataggttattcactagatgacatcaaggggatttcacccactttgtgcactcatagaatccatctagaaaatgaataatattctagcattgaacctcagaggagattaaatccaaacttgaaagaagtagtaaaaaaggagatacttaaactattagatgcgggtgtaatctatccaatatctgatagcacttgggtatctgcagttcattgtgttcctaaaaagggaggtatgacagttattaaaaattcaaaagatgaactgatacccactaggaccataacaggacataggatgtgtattgactataggaagcttaatgcagccactaggaaagatcacttccccttacctttcattgaccaaatgctagaaagattagccaatcacccctattactgttttctagatggctatagcggattttttcaaatccctatccacccaaacgaccaagagaaaactacattcacgtgtccctatgggacttttgcttataaacgaatgccttttgggctttgtaatgcacccgccacttttcagcgctgcatgacttctattttctccgatttgatagaggagatggtcgaggtattcatggatgatttttctgtgtatggctcttctttctcctcctgtttgcttaatctgtgcagggtactcaagagatgcgaagagacaaacctggtgctgaactgggaaaaatgtcacttcatggtcagagaaggaatcgtcttggggcacaaaatatcagaaaatgggatagaagttgatagggcaaaagttgatgtcatggtacagttgcaaccaccaaaaactgtgaaagatatcagaatttttctcggacatgcagggttctacaggagattcatcaaggatttctctaagttggctaggccattcaccaggctgctgtgcaaagaggctgagttcacgtttgatgaagaatgtctggttgctttcagatcgatcaaagaagcactgatctgtgacgcaatagtccacgcacctaattgggatcacccttttgagatcatgtgtgatgcattagattacgctgtatgagctgttttaggccagaaaatagataagaagcttcatgtcatatattacgccatccggacgttggatgaagcttagggaagatatacaacaactgagaaggaggttctagctgttgtattcgcatttgagaagttcagaagctatttggttggatcaaaggtcactgtgtatacagaccatgcagctttgaggcatctgtatgccaagaaggatactaaaccaagactgttgagatggatacttagtgctccaagagtttgacatggagatagtagataagaaaggctttgaaaatggtgcagctgaccatctttcaaggatgagaattgaagaaccccttccgatagacgattcaatgccagaagagcagctcatggttgtagagttcttcggaaggagctacagtggaaaagagttccac

SEQ ID NO: 163471 - DNA, 864 bp, Arabidopsis thaliana landsberg
  unsure (1)..(864): unsure at all n locations
atgggtctcanagcctccctttctctcctctccctcaccatcttactcgtcttctctaaggtcgttacggcgaataacatcacgctggcctttcagaaatactccaaattcagcaccatgagggacctcttcatcaagaccaagctcattgcagccatcgacaaataccagacgataaccgtgcttgctgttagcaatgacgctatcagctccatcactaacagatccgaagttgagctcaggaacatcctcatgactcatgttattcttgactactacgatgagcttaagcttcaggggatgagggagaagagtataatgcttactaccttataccaaaccaccgggttgggtgaacagatgaatggtttcttgaacgtttccaaatcaaaaggaagaccttcctttggatcggaagtgaagaactctcctttaaacgaagagtatgtctcgacggtgtaccacaatccatataacctctctatcatccagattaccatgccaatagtggctgatggactcagccttgcaggtatcgcacctccaccaccatacgtgcatgtagctccatcgccaactcccatggatgcttcagtggttccagcgccatctgccatgaatgctgaaagagctccaggaccagctgctgatgacaattccccagagtctgctgtcccaaaaactccacgctgcacgctgcaacagacacaccagaggctgatggctccagctcctgcgccaagcgccgataatgagaagattgaagctgctgataaggctaaaccatcttcttctgcttctaaggctggttggagctttgatcttagtctcttgttagcatttttggctagctttgctgggttc

SEQ ID NO: 163472 - DNA, 823 bp, Arabidopsis thaliana landsberg
gattccatgatttagtcaaaactacgagcaactttaattcatcaagagtgcaatacttttctccaatattagctattaatatacatcaattgaaacttgtaggtggtcaataatagcagctcatctaccgggacgaacagacaacgacataaaaaactattggaacacaaagctaaggaagaaactcttgtcttcttcctctgattcatcatcatcagccatggcttctccttatctaaaccctatttctcaggatgtgaaaagaccaacctcaccaacaacaatcccatcttcttcttacaatccgtatgctgaaaaccctaatcaatacccaacaaaatccctcatctccagcatcaatggcttcgaagctggtgacaaacagataatttcctatattaaccctaattatcctcaagatctctatctctcggacagcaacaacaacacctcgaacgcaaatggtttcttgctcacccacaatatgtgtgatcagtacaacaaccacaccagtttttcttcagacgtcaatgggataagatcagagattatgatgaagcaagaagagataatgatgatgatgatgatagaccaccacattgtccagaggacaaaagggttcaatggggaattcgcacaagggtattataattacttcaatgggcatggggatttgaagcaaatcattagtggaacaggcactaattctaacataaacatgggtggttcaggttcatcttctagttcgataagcaacctagctgagaacaaaagcagtggtagcctcctactagaatacaaatgcttgccctatttctactcc

SEQ ID NO: 163473 - DNA, 2446 bp, Arabidopsis thaliana landsberg
tgcagcgctatcatgcagaagaagatcattcctaagaagcttagtgatcctggttcattcactctaccatgctctttaggtccattggctttcaatagatgtctatgttatttaggagcatcagtcagtctcaggccgctctctgtcgccaaaagattggggttcactcaatacaagtcttgcaatatatccctcatcctagctgacagatcagtaaggatccctcatggtttactcgaaaacctcccaatcaggatcggagctgtagagataccaactgactttgtagtcctggagatggatgaagagcccaaggacccgttgattctagggtgacctttcttagcaactgcaggagctatgattgatgtcaagaaagtgaagattgatctaaaccttggcaaagactttaggatgacctttgatgtcaaagacgcgatgaagaagcataccatagatgggcaactcttttggatcgaagaaatggatcagttagctgatgagttactggaagagcttgtagaagaatatcatcttaacagtgctttactaaaagtgatgaagatggatttctgcattaagaaacattgggataccagaagctgttagactcccacaaagcaatggaagaatcagaaccctttgaggaattgaatggaccagcaacagaggtaatggtaatgagcgaagaagggtcaacacgagttcaacctgcacactcgaggacatactcgaccagccactcgaccttgtctgccaatgaatttagggagccaatcatcccaacttcagatgactggtctgaactcaaggggccgaagttgatctaaaaccacttcctaaagatctaaggtacgcattccttggtccaaactctacttaccctgtgatcattaatgctgagttaaatgatgatgaagtgaacctactattatctgagcttagaaagtataggagagcaattggttattcattatctgacattaaaggaatttcacctagtttatgcaaccataggatccaccttgaaaacgaatcctattctagcattgaaccatagaggaggtcaaatcccaatttgaaagaattagtgaaaaaagaaattttgaaactgcttgaggctagtgtcatctaccctatctctgatagtacttgggtttctccagtgcattgcgtccctaaaaagggcggaatgactgttgttaaaaatgaaaaggatgagcttatccctactagaactataactggtcatagaatgtgcattgattatagaaagctaaatgctgcatctaggaaagatcattttcgtttaccattcattgatcaaatgcttgacccttagctaatcacccatactattgctttcttgatggatatagtggtttctttcaaataccaattcaccctaatgatcaagaaaaaaccactttcacatgtccctacggaactttcgcttacaagagaatgtcatttggtttatgcaatgctcctgcaacatttcagaggtgtatgacctctatattttcagatttaatcgaggagatggtggaggttttcatggacaatttttcggtctatggcccctctttcttctcatgtttcttgaatcttggcagggtattgaccacgtgcgaagagacaaatcttgttctcaattgggaaaagtgtcatttcatggtgaaggaaggcatagtgttgggtcacaagatatcagagaagggtatagaggttgacaaaggaaaaattgaagtgatgatgcagttgcagcaaccaaaaacggtgaaggacatcagaagtttcccttggtcatgctgggttctacagaagatttattaaagacttctccaagatagccagaccgttaaccagactattgtgcaaggaaaccgaatttgaattcgatgaggactgcctcaaatcctttcacaccatcaaagatgctttggtatctgctcctgttgttcgagcgcctaattgggactacccatttgagatcatgtgtgatgcatcggattacgcagtaggagctgttttaggccagaaaatagacaagaagcttcatgtcatatattacgccagccgaacgttggatgaagctcaaggaagatatgcaacaactgagaaggagcttctagctattgtattcgcatttgagaagttcagaagctatttggttggatcaaatgtcactgtctatacagaccatgcagctttgaggcatttgtatgccaagaaggatactaagccaagactgttgagatggatacttttattgcaagagtttgacatggagatagtagataagaaaggcattgaaaatggcgcagcggaccatcagtcaaggatgagaactgaagaaccacttccgatagacgattcaatgccagaagagcagctcatggttgtagaattcttcggtgagagttacagcgggaaagagttccac

SEQ ID NO: 163474 - DNA, 3858 bp, Arabidopsis thaliana landsberg
gggacacgaaggccagtcaccacacctccccccgccccgcataagaaaaacatgagggttccattacgcctctccccgaaacacatcgatttcattatgggaggatctcaactctgcaacaattcgatcaactcaatcaaaactcatcaaaggaaagcagattccaacacaaaaggaaaaagcccgatgatgggacctgatcaacagatcacgttatgggaaagcgaaaccactaacctcgataaacctcatgatgacgctctcgtcatccggattaacgtaggcaattacgaactctcccgtataatggtctaagggaagctcggtcgacgtcttattcaaaagaacgggtcacctcgactccgagctgcaaggcaggaaaacaccagttactgggtttgccagagatacgaccttttctctaggaaccatccaactccccaccatcgcgtgaggagtgagacaactcaagaacttcttagtagtcaataagaaagctcctttcaacgcgatactgggaaggccatggctacaacaatatggaaggatctcgtaacatttctcaaggaaaacaagaacagtttcacaggtcaagagggaacctccaaggaataaacataaagtcccccctcacacgaactcaacgtcgatccgacctaccggcctataaaacataaacgtcgcaagctaggtcccgaaagggctaaagctgtgaacaaagaggtcgaccgattgctcaaaatcggatcaataagggaagtaaaataccctaactggctcgccaacccagtcgtcgttaaatagaaaaatggaaagtggagagtatgcatcgactttagggacctgaataaagcatgtcctaaagatagtttcccacttccgcatatcgaccggctggtcgaacccactgtatgacacgaaaaattgtccttcatggacgcattctccgggtacaaccaaatacttatgcgtcgagacggctaagaaaaaacagcttttattactgaccgaggcacctactgctataaagagaagcaaattggtttgaaaaatgccggaactacctaccaacgattggtgaacagaatgttcgtcgaccagctcggtaaaacaatggaagtctacattgacgacatgctggtcaaatcagctcacgaaaaggaccacgtcccacaattaagagaatgcttcaaaattctaatcaaattcgaaatgaagctaaatcccgagaaatgttctttcgaagtccaatcaagagaattcctcggatacctggtaaccgaaaggggcatcgaggctaatcctaagcagattgcagccttcatcgaaatgccgtcaccaaaaatggcacgagtggtccaacggctaaccggccgtatccccgcccttaacgggttcatatccaggtccgccaacaaatgcgtccctttctatcagcccctccgaaagggtaaggagtttgactggaataaggattgcgaacaagccttcaagcaattgaaagcatacctgaccgaaccgcctatactcgcaaaactcgagaaaggagaaccgttatacctctacacggtaatctccagaaccgcgataagcgatgtcctggtaagagaagatcacgaaggataaaaaccgatctattacgtgagtaaaacgttgatagacgctgaaacctgttatccaacaatggaaaaactggcactggccgtagtcatgtcagttcgaaaactgagactatatttccaatcacaccccatagtggtcatgacgtcccaaccaatccgaaccattctgcatagtccgacccaatcaggacgacttgcgaaatgggccattgaactaagagagtacgatatagagtatcgcaccagaaccagcttgaaagcacaggtcctagccgactttgtaatcgagctcccgttagccgacctggatggaaccaactctaataagaaatggctcctccacgtcgatggctcatccaaccgacaaggatctagagtaggaatacaactcacctcccccaccggggaagtcatcgaacaatcgttccgacttggattcaacgcatcaaacaacgagtctgagtacgaagccctcattggtggcattaagctagctcaagaaatagggatccgcaaaatacacgcccacaacgactcccaactcgtcaccagccagttccacggggaatacaaagctaaagacgagcgcatagaagcgtacctcgaactggtcaaaaccttgacccaacagttcgaatcgtttgaattaacctggaactggctggtgacgagttgggagacgccttggcagctctcacttctacctcagatcctttcgtcaaaagaattatccaggtcgaaggaatagaacacccgagcatcgacctaacggtcaaacatgctgggatggaaaccttcgacaacttgcaacttcacgcgagtaacccgaagcaccaccaccacagctagagctctcgtagcagccgtggaggcaaatgcaacggaggaggagccagagctagaaaacccccgaacaaccgtacaacgaccggagaattccaatcattgattacatcgaacaagggatcacacctcccgacaagtgggagaccagaaaactcaaagcctagagcgcaaggtactgcatcatggaagggagacttatgaaacgcagcgtcgcaggtccctatatggtgtgtacctacgggcaacaaacaaaagacctcatgaaaagcatgcacgaggggcaatgtggtagccactgtagtggacgtaccctcgccctcataatcaaaaagcaaggctacttctagccaacaatgatagccgattgcatagctcattcactcaggtgcgataaatgccaacgacatgcacctactcttcatcaacctcccgaggaaatgtcctcgatatcttctccttacccatttatgaagtggtccatggatgtcgtaggtcccatggaagcctccgagggaagaagagactaaaaaacctgttggtcctccccgactactctaccaactcgatcgcggctaaagccttccaacaggtaaccgagaaacaagtcgaggacttcctatgggaaaatatcgtatgccgacatggcataccttatgagatcgtcaccgataacgagactaacctcacctcgggaaaaatcaaagcattttgcgacaagtggaagatccgtcttaccacatccaccaccaccaccaccaccaccccgttacccacaaggtaacggacaagcagaagcccccaacaaaactatacttagcaacatcaagaaaagacttgattccaaataatcaatgtggtccgacgtgcttcacggagttctctgggcctaccgaactatacctcgcaaatcaacgcaagaaacactgttctctctcgcctatggtttagaagcagtaatccctgtcgaaaaaatagtaccaagcgtgagaaggaccgccagtcctgctaactcggacctgaacacgcaaatgttacaggacaacatggacttcatcgatgaacgcagagatcaggcaatgatccgagttcaaaactatcaacaagctgccgcccgctactataactccaatatcaaaattcgggattcgaagtgggaaagctcgttttacgaaaagtgttcagcaacacgagagagctaaacgctggaaaactgggaactaacaaggaaggtccctatcgaatcagcgaggtggtacgtgacggcgtctataagctcgtaaaagttatcaacggagtacttgagttacggccttggaatgccatgcatctcatgaaataccacgaataggtactcaaaaacaatcgaactacgataagacttgatcccttg

SEQ ID NO: 163475 - DNA, 1221 bp, Arabidopsis thaliana landsberg
atgacaaaacagaagcagtacgtctccgacgtaaacttaacagtatgtggatccaataaaccgtcttcaacacctggaaaagacatagaatactttggtctgatccctgttgatctcttcatcagtaatatcttatcgagattgccgctgaagtctaaagctaagtgtcgttgcgtatcgaagctctggtcgtccataattcgccgtccaaattacaaccagttgttcccgatcaagtccccagctccgcggatccttttcaccatcgaatatgcaggaatcttgttcttttactcttcacctcagcctcacaatccggatgagaactcgtctcttgtagccacccttcatcagaacactggtaacaccaagttctatgagatatgtggtcctgtctgcggacgggtactgtgtcgtcagtataattcagttggggtgatttataatcccatcacaggagagtcttcaaacttgccgaaactaagtttaaaggggattaataagtcagagtggttatgtgataaagcaagatattcttttgggtatgatccaatcgagaaacagctcaaagtgttgtgtatcacctggttgcgtactggctcagagcacttgtccaatgagtatcaagttctcacattagggactgaaaataaaaaaactcttttggagaaagattcaaggttgtgcaattcattttttttgggacaatactgcgatatgcatcgatggtgttttgtattatccagcaatgatctataagggggaaggtaccatcgtttgctttgatgttaggtctgagaaatttagttttaccaacattgatcaagatgacatagcagtaaagatagattcttgcactttaacgttgatcgactacaagggtaaattaggtgcttgtagttttaatattaacactaatcttttggagttgtgggttttggaggatgccaagaaaaataaatggggtcaaagtatatctacgcaatatcttatccgtggctcgtgaaacccagtcatgtacgtcctgccggaatgactggtagttgcgaacttgtgttatacccaatctttataggaggtcgtcatcctttcttcattttgtactacaatctcgagagcaaaatcatcaccattgtaaaacttgaagatcaactttttagaaattttcgtgggtgtaggattcaggcttttacaaactatgtagaggatgtgaagcttatc

SEQ ID NO: 163476 - DNA, 654 bp, Arabidopsis thaliana landsberg
attgatgagatgaggcagaatctacagagcactctgttcgaactagagacactgaaaatggaagctaatgagaaatcaagaacacacagagaagaagtgaaccaacttctcaatctcctcaaattcactcagcaagaaagagacgaagctagacaacagttatctcaattcatcttccatacccaacaaaaccctaattcaagaagcctcactaaatcaaacagcttctctcactctcaagatgtatcttcttcttcttcctcagaactctccaccttcctcaacatccatcctcagccgttgacgaatcttgaagatccaacggctcataatcatcatcagcagattgatcctctagacgttcttgtgatggggaaagcttttccagaaacgggaaagcttttgaaagcggtggttgaagctggaccgcttcttgaaacgcttcttttggctggaccgctaccaaaatggataaacccgccgcctcaaacgcaatcgcagcgttttgagttaccttctatctcgtttagagggtccgatgttgatagtaaatgtgattctatgacgtgttctggttcggttaatagttttgggttcggttcgagtttggttatcgatcaatcaatgttaaccggaaagaggcagagattagag

SEQ ID NO: 163477 - DNA, 654 bp, Arabidopsis thaliana landsberg
atgtttagggtagttttgcatgcatgttgcatatttgtgttgttaaagggtgatttggagctgttgacgagctaattataagaagcggacctgatcatacaaaaccactcgacccccaggtcgagtagcacttcacaacctcagcagaccactcgaccccctggtcgagtagaggacatcaccacttcacctcaccactcgaccccgaggtcgagtgtcttcatctccatcacctgaccatcactcgatcacatcactcgaccccggggtcgagtgtcttcacctccattaccagaccactactcgatctcaccactctaccttgaagtcgagtatcaccattaccaccactcgactacatacttgattgcgagcttcagagtcttcttcattctgcactcaaacacaaggaagaaaagaagactccaactattcactcgatctcccactcgaccacctgggtcgagtacagttcttagtccgtcccaatactgcgtcgttttaagtattagggtttcggaatacttggctataagtagcatgtacatcacattttcgcaaacaacttttttctagttttattccacagacactgtgttctagacctttgtaatccggatttctctttatctattcaacattcagtatttgttt

SEQ ID NO: 163478 - DNA, 4177 bp, Arabidopsis thaliana landsberg
acagagcagccccaatcgatgattctatgcccgaagaaagcagttgggatcggttttgacaggtttaaggttgaaacaatgtgtgcaacaagaaatggtaaatcgccttggtatgtggatcttgttaactacttagctgctggaatagtccctaatgagctaagctcctaccagaagaaaaagtttttcagagacattaatcactactattgggatgagccattcttgtataagaaaggagtagatggtttgtttagaagatgtattgctgaagaggaagttcagggagtgttagagctttgtcacaattcaccttatggaggtcactttgctactttcaagacagttcagaaggttttacaagcaggattatggtggccttctatgtttaaagatgcacatgagcacataacaagatgtgatcgatgccagcgagttggtaatatctccaggagaaatgagatgcctcaaaacccgatccttgaagtagagatttttgatgtgtggggaatcgacttcatgggacctttcgagccagcttcatatggaaacaagtacatcttggtagctgtggattatgtgtcaaaatgggtggaagcaatagctatcccaacaaatgactccaaggtggttttaaaactttttaaaaccatcattttcccaagatttggtattccaagggttgtaataagcgatgggggctcacattttatcaacaaggtttttgagaaccttttgaggaagaatggggttaagcacaaggtagctactccctatcaccctcagactagtggacaagtcgaggttagtaacaagcagatcaaggctatcctagctaaagttgtagggatatcaagacgagattggtcaactaagcttgatgacaccctttgggcctataggacagcatttaaaactccaatagggagaaccccttttcagcttctttatggtaagtgttgtcatctccctgttgaagtagaatatagaggcatgtgggcaaccaagcttctaaaccttgacatagggacagcacaagaaaagaggtctctagatcttcatgagcttgaagagataaggttagagtcatatgagagctccaagatctacaaagaaaggaccaaagcttttcatgacaagaagattctgcctaaagattttaaagctggtgatcaagtgttactattcaactcaaggttcaaacagtttccggggaaactcaaatcaagatggtctggcccttacactattaaagaggtacttccctttggtgcagttaaaatagtttcaaaagagggttatgagtttaaaatgaatgggcaaaaactcaaaaagtacctagcagacagcatcattcccgaatgatcaacagtgtaccttcaggaacctcaaacagtttgaaatgagtatgagaagtcaagcttagagacttaaaacaagctcacttgggaggaagtcccatgtctatccttgtatatatctttattttccttgttatttttgatttagttgtgtttgtggttctgaggaatagaggagtaacgtgaagatagagtaaaaattcaaagcttttactctacagacggcctagagatcgagtacattggtcgagtatgagtgatgtttaacacctaaaaaaaaaaaaaaatcatcatttcactcgaccaacagaagctatagagtcttagagagagtttatcaagtttacagaagattgcgggatttcctgagattttcctagtgaagatagagtaatgattcagaacaaagagacagatgagggactcactcctgcggccatgtctcccacgctccctacaaggtgataacaaaatccatccccttcttctctccatcactcgtcttcaatgccatcatcatccaaccaccaccactcgaccccatcaccttctctctcttcatatactcgacctcctcttctcattcttgcaaccaaagaacacaacaatccgccatctctcttcctcacaactctcactcgaccacaactcagttctcgaagcttacaccaccgcttgctctctcacttactcggcttcatcgctctcatcaccatctctccacatactcgaccacgcgagatcactcgacctcgccgcttcacaccgcctctccatcgtcacctcctgctccctctctacaaggaaacaactcgagctcgccattttcttcaactcgacctctatcaccaagctaccttcaccacttctagctcttaaccactcgaccatcttcaccatcaaccaatcaaatcgttttctcctccattaaagcttcaaatactcgaccgctgaacacttatcaccttcaagctcctcatctctccatcgtttccaacgccgatgctctcatccccacgaaagctcgtcatcgccggttcactcgattaagcaaacaaactcgacctctttcaaaccgcttgaccatctgtcgcctctaaaggtcactcgatcgccaagcacaaccaaggaatcactcgaccgcgagttcaccaaaccgaaaaaaaaaaaaaaaaaaaaaaaagaattggtacactcaatcggtttactcggttggtttgtgtttttggttttgttggaactaacgtattaacgtttatttttgagttacccatgctttcaggtttcatcatgagtaactacaatggagtaattctctatggaccctgattacaatgtggatgaagctgagtcctggtccgctagaccgagagagcaacatgtttaccagagtttcagggatgaactcgaacgctctacagcccgacataatcagagaagagctgaaatcgccagaggaaagagggcgatgtcaagtaggtatgagccgattgatgaggatatcgagattgagtatgagccagagtcatggcgcagggagacgaagctgctgaacaaactcgacgaggttacagtggaggagtatatcagattcttcgagatgaatgacttctgggggacaaggtatccgtgttatgagactttagcccagctgggattactggaggacgtgcagcatttgttcgagaagtgtcatctggagacactcatgtcttacccttaccctgcctatatggaggagacaatcgagtttctttccaccctgcaagtggagatgtatgaagcactcacagactttaagctggataccatgggattaggcttcttgacgttctcagtgaatgaacagcggtatcagctttcgatcaagaagttagaagaactgtttggtttccctagtggaatgggaaccaaacccagatttgacagagaggagcttaaggatttgtgggccactatagggaacaatctaccgctaaactcggcgcggtctaagagcaaccaaatctggagtcctgtgatccgctactttcagcgatcggttgccaacgtcttttactccagggagtctacaggcaccgtgtctaacacggacatggagatgatagattatgcgcttgcagggattctccgtcggacgaaaggaaagaatgtcttgagaggcgatctcaacaacgcaccaccagtaatgcctctgttgatccatctgtgtggatacaggaagtgggcgttgacgaacggaaagaagaaggtgagagaagcactatgcgtgggtggcgttgtgacgccaattttgaaagcttgtgaagtaccgctcaaggaactaggtttagcaccgaggatgatggacttggatcatttgcgcagatgtgagttcttggagtttgacatggctggtgactttcaccgctacaggttcgagcattcatcgattaaaatcgccaacattcttctcccctgcattgacgctactaggattctcgagggcaggaacattgacttcaagcctgcgcttgaagaactttatttcgagggtagtccgccaactgaggagatcagtcataccgaacgagctacaacagaagatattgatgagacggatgatatagatgcgacggagtttgacacgagcatgtatcatttcagtgagcatatacctcctgagagggaaagcaggagtttgagcgaagctcacagaaacaacaacaaactacaaaagtggtgcatgaaacaggacaagttactcgccaagtgttcaagaccatcagtttctgacagataagctgagttgttccctcaaacttcaattccttaag

SEQ ID NO: 163479 - DNA, 1482 bp, Arabidopsis thaliana landsberg
gtagctcaagatcgtgactcaaagcgaatgcttcaacaaatcattcagggtcaaactattgagctctagttctggaaaaacgattggctgagattaatagtaaagttgcatgttcctataatgagttaagaagcaaatatgaggatctcacatctaaaatgacatccatggaacgtctacctgtttccaatacctcctcaacgtatacagggccacatccaggaaaaaccattcacaattccaaggaatatgcacacgcagtcacactttgtagtggaaggaaattgctcaacacccaaccaacagaaaagatcactgaagatagtgaagttcaagaaggggaggaccagcataaaaacgaagttcaaactgatgaaccaattaagcttgatcagccttcatactcactcgaccctataatcgatcgaacaaagccatgtttgaaaaaagaagagctaatgttgtagcaaagaataaagaatttgctctgtcaccctacaaactgacaatgcctttccctggaacatttaagaaggaattaacagaaaaatacaaagccctttttgataggcagctaaaggagattgaactaaaaatgccattaatggatgctttcatgctcattccaccctcccacaagtacctacaagatctgattatggagagaatcaaagaagtacaaggaatggaagttcatagccaagagtgcaatcctattatacacaaggagagtgtccaagaaaagctagaagagcttgctgttaaagatctactccaaacttctttaactaagagagttgaagctaaatatctccctagtgagaccttgatctctaagaagtcattagcctcccacaagatagtaacatgggcatatgtcattataggtgtgattaggtcaaaagaggcatgttcaactcaagctcgaccatcaaactcgaccagtaggtcatgttcaaacctctactcactccaaatgctcaagctcaacgtctaaagtcgacctgcatgttaagcaaaacactctagcttctgataattggttaaagcttcaaagaagatctaaatggcacggagaaagccataagggagctaacacaaacagtgaaagaactcaaggatcaaattaaggacctccgtgggaaatccaaccaagtaccattcaacatcaaagacaaaccccctgatggaaccaccaccttaattagcaaagccgaagctgaactcaaagtgaatgggcagagagtcaatccttgtatggctgagcagatcattcaagagtagtgctcatttcctctcctctcatcatcctttgcctaaaaacagtatgaaagtcaagctaaagactttacactagctcacttgggaggaagtcccatgtctatccatgtatataagtttatattttgcttgttatttttgatgtttttgtttaagtgtttcaggtttgttttaattaccctgaggaagttaacggtcgag

SEQ ID NO: 163480 - DNA, 674 bp, Arabidopsis thaliana landsberg
atgtttaggatagatttgcatgcatgttgcacatttgcgttgatttcaggtgatttggagctgttgacgagctatctggaagaagcgggcttgatcatgtcaaactactcgaccaccaaggtcgagtaggagcttcaagatctcaacagatcactcgaccccctagtcgagtagaggacatcactacttcaccacatcactcgtccccgaggtcgagggtcttcatcccatcacctgaccatcactcgatcacatcactcgaccccgaggccgagtgtcttcaccttcattgccagagcactactcgacctcatcactctacctggaagtcgagtatcaccatcaccaccactcgactgcatactcgatgacaagctttagagccttcttcattccgcactcaaccagacactcgagcacaagaaagaaaagaagactccaactattcactagacctctcactctaccacctgggtcgagtacagttcttaacccgtccaaatacttcgtcgtttttagtattagggtttcgggatatttggctataagtagcatgtacttctcattttcgaagacaagaagttttttacctagttttatttccgcagaccttgtgttctagactttttgtaatacggatttctctttatctattcagtattcagcttttgttc

SEQ ID NO: 163481 - DNA, 840 bp, Arabidopsis thaliana landsberg
atggcagagcatttagcttcaatctttggtactgaaaaggatagagtgaattgtccgttttactttaagattggtgcttgtcgtcacggtgaccggtgctcacggcttcataaccgtcccaccatctcgccgacgcttctcctctcgaacatgtaccagagacctgacatgataactccaggtgtggatcctcagggacagccgttagacccgagtaagatccaagaccactttgaggatttctacgaagatattttcgaagaactcaacaagtttggtgaagtggagagtctcaatgtttgtgacaatcttgctgatcatatgattgggaatgtgtatgttctgtttaaggaggaggatcacgcagctgctgcgttgcaggctttgcaggggagattttattccggtcgtcctatcattgctgatttctctcctgtgacggattttagggaagctacttgtaggcagtatgaagaaaacagctgtaaccgtggtgggtactgtaatttcatgcatgtgaagcagatttcgagggagcttaggaggaaattgtttgggaggtatcgtcgttcataccgtcggggaagcagaagtcgaagcaggagtataagccctcgacgtaagagagagcattcgcgagagcgagagagaggggacgttagggaccgtgaccggcatggaaatgggaaaaggagcagtgatagatcagagaggcatgatcgggatggtggtggaaggaggagacatggaagcccgaaacggagcagaagcccacgaaatgtgagagaaggaagcgaggaaaggagggcgagaattgagcaatggaaccgagaacgtgat

SEQ ID NO: 163482 - DNA, 823 bp, Arabidopsis thaliana landsberg
  unsure (1)..(823): unsure at all n locations
atgcaaannnnnnnnnnnnnnnnngtacacctattaccattcagagacagaattgataaaatagctcgtgagttacaagaaaccaaagcaaaggcagcctgtgaccagcaaataccagctgctatggatcaacagaacagaccagttgatgttcaagacccacctaatgttgatcaacaaagaaacattggtgctgatgatgccccagggaaacataaccaaagacaagggatagtgcctccaccagttcagaacaacaattttgagattaagagtggtctcatctccatgatccaaggaaacaagtttcatggtctgccaatggaggatcccctgaaccaccttgacagctttgataggctctgcaacctaacaaagatcaatggtgtcagtgaagacagattcaagctccgtttgtttcccttctctttgggagacaaagcacaccactgggagaagactctgaccccatgactccatcacctcatgggtcgattgtaagaaagcttttattgccaagttcttctctaatgctcgcacagctatattgaggaacgagatctcaggcttcacacagaaaaacaatgaaactttctgtgaagcttgagagagctttaaaagctacaccactcaatgccctcatcatggctttactaaagcctctctgctcagcactctttacagaggagtcctaccaaagatcagaatgcttctggataccgccagcaatgggaatttccagaataaggaagtagcagaaggatgggagttggttgagaaccttgctcaatctgatgggtgctacaatgaagactgtgatcgc

SEQ ID NO: 163483 - DNA, 2855 bp, Arabidopsis thaliana landsberg
atgctcgaaggcaagatcagagctgataaacaaggagttttgagggatgacgacgggtaagcctataatgagactggattatcatggactcatccacgtgaggatctaatagaggaacatccacagatcctagacgcagctaatcagcaaggtgcggaacaacgtcgtactcttggggatttcaacaggtctgacttgttttatgctaattgatcagcgatcgtacccccacccatccagaggaacgactatgagctgaagcctggttactttgctttagttggcgagcatcctttccatggcttatctcatgagcagccaatggatcatatcgagcgattagaggaccttgatctaagcatcaaggctaatggagtctcagaggactacctagtgtgcaagctcttccctttcacttgctgcggaagcagcttcttggatgaaacaacttaaagaaggttcccttaagacttggagaagcatcaagatagccttcttgaataatttttacgatgatgctaactttgaggagttgagaaacaagctgtctaccttcacacaaggtccagctaaagctttcagggctgcttgggttcgtttcaaggagtaccaacgagattgcacacaacatggtttcagtgaggtacaacttttaggtagcttcttctgaggagttgatttgagataccagatggctctagatgcagcgagcaatggtaacttcaatacgcgttacccagttgatgctacagcccagatagagaacctcgcttgcagcaatagtaccaagaatgctgattttgagaggaagaagattgctggagctattttatgaaatcagatggtagaggtgaatgctaagctggattcagttcgtaacttgctcacagagaagaagcatgtctactttgcagctgaagaagaaactattgagcatgagccttagtcagaagaaggattcttctacatagatggtcagggatacaggaagtttaggcagccacatgacaactttagtggcaacatgtttacagggaaccagggttcctccaactacacttcaaagcctgctttccagaagacctttcctcaaagcagctttcagaggaactatggtaattcaacttaccaagccccccctccaccgtcagcagagataagaatggaatcgatgcttgagcagattctggagaaccaaacaaaatttgttgtggagtttaatggaaagtttgatgttgtctacacagttcttaatgggaagatcgacaatatgagctctcacttgaagaagttagatgtacaggtagctcaaactgcacaatccattaagagacaagagggctttcttcctgaaaatgttgatgctaacccaataaatagctgtaatgccgtcttgatcaaagatggaaatgatatgtgggaagaattggacactagagacgagttggagctcgttgctacaaagttggtgtcgaccgacatctaccagtgtcgatcgacactggatccggactgcaccttatgaggtgagaatcccgatgaagcccgagtttgcttgcactcctcctgtcccttatctaaggaagtgttgctctaaacgggagattcatgctactaagtgcacaaccatcatggaaaagatcctcacttctcctcctaaggatgcttctgagacatcttttgcttcactcaataggtatgtcaagcgacttgttgacaatggcattagctctgatgaagctaaactgctgacacgggacataagtgcaatcatgctgcctaagaccaagaaagagaagtcaaagagagtggacattgatgaatacatccgcacaatcactcctgatcagaccactgagaagctcccatatccaggtagctttgttcttgattgctcaatctccacaagcaggttcagccgctctttatgtgatatgggatcgagtatcaacctcatgcctaagtctgttgttgaaagattaggcatgactacttacaggctgaatagaatcactcacctcttcgcggatcggtctaaacgaatccctgaacgaatccttgaagatgttcctgttaaggttggtaactccataatccctgatgatttcgtagtcctggactatgagaaggaacccaaggatcctcttatccttggaagagcattcctagctacaattggtgctaggtttgatgtgaagagagagagaatctctctcaaggtttgtaatttggagatggagttcggcatggatggttcagagcttactaagcctatcagttgaattgcttccagcatagacacacctcctcagactgatcagaatcccaccatagagccacacaaaatgctccaacccgctcaactcgccaatgagagttgtaaagcaacagtgtcgatcgacaccactacccctgtcgatcgacaccctcgggtttcacagacagaggattctgcatatactcttcagcccacatcactcgaagacctatgtgataagttctcttctatctcctctcctgctttacctttgattaattctttagattattcgaagaatgcttcacaagataagaagcctagagtccctcgaaagcttgtttctcctgttgttcttgcaggtagcgagacgagtgtcgatcgacacatccctgattgtcgatcgacgcccgcagctgctccaaccagatccatttacacaccgccttgaaaggcgaggaggcagcagcaatcctccaccactccacccacatcttgaactccgccaagtcaagctattgactcaaaacaacgcttagtgggaggcaacccactagtttgatttttctttcccctttcttttattttcttttatttt

SEQ ID NO: 163484 - DNA, 2219 bp, Arabidopsis thaliana landsberg
  unsure (1)..(2219): unsure at all n locations
acgagtttccgatctttgagtctaaatcaagtccgtggaataagaccaccgattgctgttcttgggacggtgtcacgtgcgatgataaatctggccaggtaatatcactcgaccttcgtagcacccttctcaacagctctttgaaaaccaacagtagtctttttagactccaatatcttcgtcacctagacctttctggttgcaatctccatggagagattccttcttcactaggaaacctttcccgtctcgaaaatcttgagctttcttctaatagattggtcggtgagattccgtattcaatagggaacctaaagcaactaagaaaccttagccttggggataacgatctcataggagaaattccttcttccctaggaaacctttctcttctcttagatcttgacctttggaataattctttggtaggtgaagttccagcttccatcggaaacctaaacgaactaagagtcatgtcacttgaccgtaacagcttaagtggcagtatacctatttcatttactaacttaaccaaactttccgagtttagaatcttctttaacaacttcacatcccttccttctgacctgagtggcttccacaacttggtgacgtttgatattagtgcaaactcattttccgggcatttccctaaatttttgttctcgattccttcgttagcatgggtttctatggatagaaaccaattctcaggacctatagagtttgctaatatatcttcatcatctaagcttcagaatctaatcctcactcgtaacaaattagatggctcaatccctgaatccatatctaagtttctcaacctcgtactgttagatgttgcccacaataatatcaatggaccagtccctaggtctatgtcaaagttagttagcctccgtatctttggtttttccaacaacaagttggaaggtgaagtaccaagttggttgtgaagattgtcttcaacaatgctttctcacaattctttcagcagttttgaaaaaatatattcaaaagaaacaatgatccaagtgttggatctaagtttcaattccttccgagggacgtttcccatttggatctgcaagctcaaagggttacacttcttagatttgtccaacaatctcttcaacggttcgattcctttatgtttaaggaacttcaatcttacggggctaattcttggaaacaacaagttcagtggaactcttccggacatatttgccaataataccaacttacaatcattggacgtaagtggcaaccagttagaggggaagtttccaaagtctttgataaattgcaaaggtttgcattttgtgaatgttgaaagcaacaaaatcaaggatacgtttccatcttggttgggatctctaccatctttacaagttctcatcctaagatcaaacgacttctatggtccgttgtatcatcccagcatgtccattgggtttcaaggtttaagaatcatcgatatatcacacaatggcttctctggagtactcccacctaactttttttctagttggcgtgaaatgattacattagtccatggaagttatgaatacattgaagatattcagaattattctcttatctatcgctccatggaaatggtgaataaaggagtagagatgagttttgagaggatccgacaagactttagagccattgatttttctgaaaacagaatttatggcgaaatacctgaatccattggttgtttggaggaactgcgtcttctcaacttgtcaggtaacgctttcacaagcgatatcccacgggtctgggaaaatctcacaaagctcgagacgttagacctatcacgtaacaagttgtctggtcaaatcccacaagatcttggtaaactctcctttctgtcgtacatgaacttctcccataaccgtctccaaggtccagtgccacgaggcacacagtttcaaaggcagagatgttcttcatttttggacaaccatagactctacggtctcgaagatatctgtgaggagactcatgtcccgaatcctacatcacaaccatccgaggatttgttagacgaggaggaaaaaatgttcnnnnnnnnnnnnnnnnnnnnnncatatggacctggagtattttgtggtctggtgatcggatacatcttcacttcacaccatcatgagtggtttacggaaaagtttggtcggaaaaaaatcagagtaaccacaagtgctcgt

SEQ ID NO: 163485 - DNA, 687 bp, Arabidopsis thaliana landsberg
aattacctgaaaacaactcagaaatgcaatatgtatgcaaagctatcctaatcatgcaaagtatgcaagaattatgagaaatgatataaaacaatgatgaataatacgaaattggactcaaaacgatgatgaatggacactgaaaacatgcaaattatagacatatcacactcgacccccctggtcggttagaggacatcactacttcaccacatcactcgaccccgatgtcgagtgtcttcatctcatcacctgaccatcactcgatcacatcactcgaccccgaggtcgagtgtcttcaccttcatcgccagaccactacttgatctcgctactctagcttgaagtcaagtatctccatcacaaccactcgactacagactcgatggcaagcttcagagtcttcttcatcccgcactcaaccagacactcgagcacaaggaagaaaagaagactccagctattcactcgacctcccactcgaccacttgggtcgagtacagttattaatccgtcctaatacttcgtcgttttgagtattaggatttcagaatatttggctataagtagcatgtacttcacattttcgcaaacaagtttttatctagttttattccgcagacactgtgttctagaccttttgtaatccggatttctctttatctattcagtattcagtatttagca

SEQ ID NO: 163486 - DNA, 862 bp, Arabidopsis thaliana landsberg
ccaacgagtcagcatcatgtcgttagaacagacatttcagagttaaaatctcagattgagaagaggattggtcgggccaaaacagagagttaccttaatctcttatcaaaattcttgagcttgaaaatcagcaaatctgatttcgataagctaatcattgtgacggtgaagagggagaatataagtctacacaacgctttgcttagagggattcttaagaatatatgtctctcaaagacactacctccattcataaagaatggtgtagagtcagataacaagaagaagaagcaactaaatggagcttttcaatctttgtgcaaagaacttcctagatctcctcgtaaaggaaggactcaacggaggcttaataaagatggtaatattagcaaagggaagagtctagtcactgaggttgtttcttctagtggtaggcaacaatggtcaatggaaaatgttgaagaagttgaccaattgattccatgttggagaagtcaacctattgaagctccttttggtgttaatcttagagatgttataaagaaacaacatcgtatagacacgtgttgttactcctctggtgagcttcctgattcggtttctttaaagaagaaactcgaagatgacttggaggaaggattagaggtttcggttgggtttgctaactcgttaaacgcagggctagatgttttcttgaagagattgatcaaaccgtgtcttgaactagcagcttcaaggtctagtaacgcttcatcagcatcttctctggtagattttcaagtagctatggcgttaaacccatcgatactaggggaagattggcctacaaagcttgagaagatcgcctgcagattcagataag

SEQ ID NO: 163487 - DNA, 706 bp, Arabidopsis thaliana landsberg
atgtttaggatagttttgcatgtttgttgcatatttgtgttgttttcaggtgatttggagctgttggcgagctaattggaagaagcggacctgatcatatcaatacactcgaccccatggtcaagtagatggctctgcgatttcaacaaaccactcgacctcctggtcgagtagaaggccttatcacttcacaccaccactcgaccccatggtcgagtatcatcatctccaccacccgaccatcactcgatcacaccactcgacccccaggtcgagtacttccatcaccttcactcgatcactcactcgattgcacggccgagtctcaccatcatcacacactcgaccgatcactctaccaccaagccgagtgccgccatcaccaccactcgactacatacttgattgcgagcttcagagtcttcttcattccgcactcaaccagacactcgagcagaaggaagaaaagaagactccagctattcactcgacctctcactcgaccacatgggtcgagtacagttcttaatccatcccaatattgtgtcgttttaagtattagggtttcggaatatttggctataagtagcatgtacttcacattttcgcaaacaagtttttatctagttttattccgcagacactgtgttctagaccttttgtaatccggatttctttttatctattcagtattcagcttttgttc

SEQ ID NO: 163488 - DNA, 655 bp, Arabidopsis thaliana landsberg
acggagtagccaatgcacacactgcgtgaggccagccaggccgagctgatcgtcaaaaaaagtcgcttcatcgcctgcgtgcagccggttgctgacaggccaactgcccttcagatggtgtctggcttgcgtcaacaacatccagacgctgcccacgtgtgttgggcgttgatggctggcggccattcagctgcagtggacgacggcgagccatcaggcacagcggggcgccccatgctgtaggtgttgcgcatgcaagggcttgttggcgtgcttgaacggtggtgcgctattttggcggtgtgaagttgggggcaggtggcctggtgggggcctacactgacagcgtggccacagccctgttttccgcccagcgcattgagattgtcaaatcagtgaatcttcaacttcttgcaccttacgcactggaaggcactgttcggcactatatccagcaatttggtgccacaatcgcatccattgagcacaaggctgacgtgcaatttcagttgcttgtgcctgaaccggttgctgctgaatttgtgcaaaccctgaacaatgcgtgtcaggggcgtttgcactggttgcagcctgatgacccagaccctgaaggaccccgatgacccagcacattattcacattcaccgcgagccg

SEQ ID NO: 163489 - DNA, 1245 bp, Arabidopsis thaliana landsberg
atgaggacgacaatgtcaaatcttccaaaggaactggtagaggaaattgtctctagggttcctttacaatgtttgagagcaatgcgattaacttgcaaaaactggaatgctttgttagaaagccagagctttaagaagatgcacatacggaaagaagaagaagcagcaagggaattaggagagaatcgaatgattgtgatgatggattacaacgtttatttaatgggcatcatcgtcaacgaaaacctatccataaagtctctaggtaaacttacttgcctacatggttctaaacaagtcaagatatctcaagtctttcattgtgagggtttattattatgcatcttaaaagacgatgatactaagattgtggttttgaatccgtatttggggcaaacaaggtggatccaaaccagaaagtatcaccgtacaagtgaatgggaaggacgagatgtttataactatgctctcggatacgaaactaacagtggaacccggagccccaaaatcttgaggtttatagatgatttccatcaccaccccgaaaaccccgctttacgatatgaagtctacgattttgactctgatttatggactactcttgatgtcactccacattggcgtatagcgttttgtaacactggcgtttcttttaagggaaacacttactggtgtgctgcagaaaggaacgtagatgtagatgaagtcttagctaatcgcttaatctgttttgattttacaagtgagagatttggtcctcttctgcctctgccgtttagtggtgggcatcatgactatacgactttgtcttgtgttagagaagagaagcttgcggttttacttcagcacgatgaatcaaatccatatgagcttgacttatggattacgaccaagattgagactggagaggttttgtggagcaagttcttgagagtggcaacagctggatttaatagttatgttccttttataagtgaaagtttcttcattgacgaggagaagaaagtcgcctttggttttgatggacgtaaccgcgagagagttattgtcattggagaggctggatacttgaggggattggatctcgttggagattttggagaccaagaatgtaggactgatctgtgctcttatgttccaagtttagtacaaatcaagcaacctgaaggaggggaatcgaaacaacaaagcgatttagaaaagtgtcgatatgatgaaaacatgttgaggcttgtctcactctaa

SEQ ID NO: 163490 - DNA, 723 bp, Arabidopsis thaliana landsberg
gtcggtccaatccctactaacatttctttcatcatggatggaaaccgtaggttcgccaagaaacgcaatcttgaaggcctagacgcaggacacagagctggtttcatatccgtcaaatatattcttcaatactgcaaagagattggtgtaccgtatgtcacactctacgcatttggtatggacaatttcaagagaggacctgaagaagtcaagtgtgtgatggatctaatgcttgagaaagtcgagctcacgatcgatcaagctgtatcagggaatatgaacggcgtgagaataatctttgccggcgatttgaattcgttaaacgagcgttttagagctgcgacaaagaaactgatggagcttacggaggagaacagagatctgattgttgtggtttgcgttgcttatagcacaagtgtcgagattgttcacgctgttcgagattcttgtgttagaaagagtaaaactggagatggttcttcagctttggagttgagtgatattgaagagtgtatgtatacatcggttgtgccggttccggatcttgtggtaagaaccggaggaggagatcggctgagtaacttcatgacgtggcaaacttctagggcacttcttcatagaacggaggctctttggccggagttagggctatggcatttggtttgggccaccctgaaattccagagaatgcaagattcttgcaaaaaaaaaaaagctccacta

SEQ ID NO: 163491 - DNA, 1295 bp, Arabidopsis thaliana landsberg
aacgtgactgactggtcaagctttggatctatggcacacttgctccacctctgttccgatcttccttccaaaccggtgacacatcacgttatgtttggatacgagtagagaatcagtttcaaaacaataaagaagcaagagctattcagcttgacaacgagcttcgtacccaggatattggagattgatcgatccaagtttattatcagaagatcaaatcactcgccgatttgcttgccaatgttgatgctccggtcaatgaacgtaacttggtcatgtacttgcttaatggtcttagagaaaagtttgataacataatcaatgtaatcaaacacaacgatccttgtccaacatttgagatcgccaaattgatgctggaactgtaggagagtcgtctcaaaaagccacaccaccttattgcaacccacaacgatcattcttcatcaaccacagctctcaccattgctcttgcaccgccagcgctttgttcatcaaatcaacaccaacagtccaataacaacaagggcaacaaaagcaacaataaccactacaaaggtggaggtcccaacaacaacaactcacaattccaaaccacattttcaaattgtaccacccctccattttggcaagacccatttccagcttggcccgactactttggaaattggtctccttatcaacaaagctcgtttcgaccaccgactccgtcgtcttcaccacatcaacaggttcaacaagcgcatctaatggaaattcaacctagatcacaaatgacggagacactgacggatcctaattgggattcttgggtcttggattccggttcaacggctcatctgtcttcttcgctaggtaatctccactctattcttaatcatagcaacactcaatcagtaatagtgggtaatggttccaatattccagtaaattgtgttggctcttcctctattaaaagccttttgagatcacttactctcaaaaacgtccttgtcactcctcaaattgtcaaaaatctcaattctgttagacaattcacaaaagataattggtgtactgttgagtttgacccatttggattttctgtgaaggaccttcaaactcagatgatactgctttgatgtgatagccaaggtgatctttattgtctcccatccttgtttaataaaacatctccaccatcaactgttctcttggcttctactccatctctttggcataaacgcttggctcatacaaattatactattctccgttatgttgttttaaactctatggttcaatgtaatacagacaaa

SEQ ID NO: 163492 - DNA, 885 bp, Arabidopsis thaliana landsberg
atggaacaaatttgcagagatgatgattggattgtggacgagtcttcgttgacgaagctctcttctcttggccgagggaacttcggttacgtctctctcgagaaggactccaactcccgactttacgcaaagaagtcatcgccgatgcagcacaaaaagattctcgagaaggagctccggatcatgcatcgtttccgtgaccatcatcgcatcgtccaagcctcaaacaagcttcacatacaaatcaaaccctctgaatgctacatctatatggagtacgcgtccgaaggtaatctccataagtttatatctggtttggaaggaaaatccgtaccagagtctttggtccaacgcacggctcgtatgatcctagaaggacttgaggctcttcattcccatggttacgttcactgcaatctcaggccatccaacgttctcctcttcccgtccaagactcctggagagccgtgggatctcaagcttgctgatttcggctcatccaaggaacctgattccgggtatggttggatgtactttggtacggcgcctaagtacatgccaatagagtcttttgggcctaagggagtgatcatcgatccgagccttgatatatatgctctagggtgcgtggtttatgagatgcttggagctatacctatccaggactactttgacgaatattaccaatggaatctgcgtgacgttatctctccgcaggctcaagatttcttaaggcgatgcgatgacatgcgttcacgcaggcccaccgcgactgagctcttgaaacatccttttattacacaaggacttccatcgccaacaacagaagacaacaaggagatatctaggtcgttgattccaagtttctcgaagcttcttttgacc

SEQ ID NO: 163493 - DNA, 911 bp, Arabidopsis thaliana landsberg
acaatgtctctcatgaatgcctctaatctaaatctagctacctatgttgcatttgatgatttgcaacttggaactcacgcccaacgttattggttgtattgttaggatgtagaaaatttatactgaaatacgtaccgccaacgatcgtcctgtattccttggaaactcactcctcctgcttgatgagaaagtatcaatgtccaatgcctagcatgtcaatttatttttctaacataaatctcacatccatactcataatatatcactattttccttaatttgttgcatcatacctgcatcactttctgaaaaatacaatggtattttccaagaaggaagcttacaaattcaagggtttgaagtaaggccatgtaccaaacacaccaaaatcacagaccatcctttcgtcatcaagttcaacattgatatcaaaatcattgtgaaatataaatcatggctaaagatagaaaatgagaaattcagagtttacaattacgctcacttggttggttttgccaacacaaatgttcactacttggtaaatatttactaaacatatgattttctatttaataatattaaaatactaacattagtctcagcttcaaattctaaatataatagtaacattatcgttttatatgaattttacatatttactattcttggttaataacaaattccaaactcaatacaaatgtagttgggaaaattctttcaattgaaggttcaaaccttagtgaccttacttcaataaaccaaatcattgtcaaattatggttccaaccttaagtttctattttgattgtctaagacttttttccctacatttcaattatctttactcataactaaacaaattactttaaacattctacaccaatatgttgtctcctcatctctttgggttc

SEQ ID NO: 163494 - DNA, 1876 bp, Arabidopsis thaliana landsberg
gtggatgaagctgagtcctggtctgctagaccgagagaacaacatgtttaccagagcttcagggatgaattcgaacgctctgcagcccgacgtaatcagagaagggctgaaatcgccagaggaaagagggcgatgtcaagtaggtatgagctgattgatgaggatatcgaaagtgagtatgagcccgagtcatggcgcaaggagacgaagctgctgaacaaacctgacgaggttacagtggaggagtatatcaggttctttgagataaatgatttctggggaacgcggtattcgtgctatgagactttagcccagctggggttactggaggacgtgcaggatctgttcgagaagtgtcacctggagacactcatgtcttatccttaccctgcctataaggaggagacaatcgagtttctttccacgctgcaggtggagatgtatgaggcactaacagactttgagctggataccatggggttaggcttcttgacattctcagtggatgaacagcggtatcagctttcgatcaagaagttggaagaactgtttggtttccctagtgggaagggaaccaaacccagatttgacagagaggagcttaaggatttgtgggccactataggcaacaatctaccgctaaactcggcgcggtctaagagcaaccaaatctggagtcctgtgatccgctactttcagcgatcggttgccaacgtcttttactccagggagtctacaggcaccgtgtctaacacggacatggagatgatagattatgcgcttacagggattctccgccggacgaagggaaagaatgtcttgagcggcgatctcaacaacgcaccaccagtaatgcctctgttgatccatctgtgtggatacaggaagtgggcgttgacgaacggaaagaagaaggtgagaggagcactatgcgtgggtggcgttgtgactgccaattttgcaagcttgtggagtaccgctcaacgaaccagggttagcaccgaggatgatgaacttagatcatttgcgccgatgtgatttcttggagtttgacatggctggcgactttcaccgctacaggttcgagcattcatcgattaaaatcgccaacattcttctcccctgcattgatgctactaggattctcgagggcaggaacattgacttcaagcctgcgcttaaagatctttatttcgagggccgtccaccaactgaggagatcagtcataccgaaggagctacaacagaagatgttgatgagacggatgatatagatgaggcggagtttgacacgagtatgtatcatttcagtgagcatatacctcctgcgagggaaagcaagagtttgagcgaagctcacaggaacaacagcaagctgcagaagtggtgcaagaaacaggataagttactcgccaagtgcctcagggctatcaagtttctggaggacaagatcagctgctcctcttccactacagcaattctgtagggacagctccctcatgacatgccttcgaggagatatgacgcgcccgagccaagtcagcgcaggcctgagcctagagagcaggagattcggcatgtccctgcgaggcattcatcattcgagcctcgtgaatctgggaggaagaggaggaccacactcactcgatctagcagcaggagcagaccacttctgcaaactagtagtttactcgaccgcggtgctggccacagcagaaggagagaggtcgagtatcctcagagcggtgttggccgccacagagctgatgaggtcgagtacccacctgctggagctgatacagaacaaggcggttcgtctatggcctgagagcaatcacaagcagccattgacgagcaactacgttcattcttcgac

SEQ ID NO: 163495 - DNA, 1373 bp, Arabidopsis thaliana landsberg
tggtgttttagggggattggtaccccaactcttttctagcctcggcagttaggggtcaatatttcatatgcttggcccgtctgtatgtcagaagagcttatgttccctgctatgtggatggcggagcatgctagcggctagaaaactccttctatctgggatgaggaaaaacattcgatcaagctttgatactcgagtttagagcgacccatggatcccaaccacaccggcatgtccaaccaaaagtaagctcactagcacttacccaaacttctttgtcattgagctaatcaaccatgtgtcgaaggcttagaaggtagaaaagattcaagaacttatgtcacaagaagacatacctcacattcagggacttatcgttacgactctacatgaacaatcatggaagatccaaacttcaaaaaaaaaaaacgctttctatggaaaactttcaggggctgtctagcaacgtgctaacgactagctgattgtcatctaggaactaatcatttgtgcctctgatgtgggatggacgaggaaattattaaccatgttttagttgagtgtcctcctgctttccaggtttggtctttatcttgaatcctgtttatttagaacatttttcctcgtcttctctgtttgagaatctagaccatctattttgaagagcgaaggaattaggaggccgagaggagaatatcaagaatttcccttgtatcatgtggttcatttggaaggatcgtaacactaaggttttgagaacaaggatacccaccttgtagaaatgttccaacacgcatcaaaggaagtaaaatctttccatatagcgagagcccgtgagatgatccttgacccctaatcgcttcaacaacctgcagtccaaacccctttttcaatagactcttttgtctatcgagtagatggttctttggtagattcatgcactctaagtggtattggttggattgttggctcaaatggtttggtatcttatcttggtctatcaagagctggttctttggtaaattcatgcactctaagtgatatttgttggtttgttagcttaaatggtttagtatcttatcttggtttgaagagttttcgctgctacttatcacctcttcatgcagagtttgagactcttctctcggcaatgagatctcttatttctcggtctctttttaatgttgcaaagtgtcaactcattttctagacacttccgatgagtggtttgccgtcacgtcagaattagaagattttaactctttgaaactatcttttcctcttttactttgtcatttattccatgttgtaacaacacctgtgatgtgtgctttgcaaaaagacactttcatgtggtctattctttctcatgt

SEQ ID NO: 163496 - DNA, 1206 bp, Arabidopsis thaliana landsberg
atggagaattcaagttccgaaacacttcatgttgaagatttacaaacggagataatgtcatggctgcctctgaaaagcttgttgagattcgtcatcgtctcaaagaaatgggcatctattatccgtggagaacaattcaaagctctttacttgcgtcgatcgatgacaaggcctcggctgatgttcatggtccgacgaattgcaaccctaccacccgaacctgagatggtgtggtttcagtctttttgtaaagaggaaagatgtattcccggccaactcgaagttgagttcttgtttcactctgtttatcaagaaaagataccgtatttttcatctggtcaacagcagttgcgtgttcctcctaatacaaactatacgtctgtttctcaacccatcggaggtttgatctgtcttcagtcagaaactaagtttgcgctttgcaatccgggtacgaaaaagtctcgggctttacctgatatccaagcacatgaaaaagcttttataacaagttttttaggatacgatgaagctacgaacgtattcaaggtgttatgtttgacgatggtatgggcccatgaaccatcaaaacgagtttatgagtatcaagtcttgacggtggaatccggtgtagagtcttgttcttggagagggatcacatgtaaggagaaggatcacacaccagaaactcaaggactatgtaaaggaggggttttgtactatggagctcggtccactagtgaccatcgacctctggtaatgagctttaatgtgaggtctcaagagtttaccgccattgaacttcctgatcaactacatattagttatttttggaattttgtgatttacaatggggatattgccttagtgaacgaatctgactttgaccctagagttgtgaatgaaccgaatgggaataaagtttttcacatatgggttagggatgcaactgcacaagaatggcagagaacccgcatcgagattcctcgttgggaacaaaatgttggacatgtggactatgttttcagaggtaccactggaacaaaagaacttgttttcgcccaagactctcgccattgcgaagatgatttctttgtgttgtattacgatacattcacaaaagatctcagaagatttcagattggagtgactggccctaaaatttctgttcgaacctgcttggatcatgttgatagcctttggcttatg

SEQ ID NO: 163497 - DNA, 738 bp, Arabidopsis thaliana landsberg
atgtttaggatagttttgcatgcatattgcatatttgtgttgtttttaggtgattttgagctgctaatgagctaattggaagaagtggacctgatcaaatcaacatactcgaccacgagctcgagtacagtcatccaagagttcctgaagtactcggccacaacctctacaacaattcactcgaccaatcactctaccaaaaggtagagtatcaccatcatcattcactcgaccaatcactctatcaacatggccgtgtcccaccatcatcactcgactaatcactctaccaacatgaccgagtatcaccatcatcattcactcgaccaatcactctaccaaaaggtcgagtatcaccaccatcattcactcgatcacactactctaccaacgtggccgagtatcaccatcatcatccactcgactacatactcgactgctagctttagagtcttcttcattccaaactcaaccagacactctagcacaaggaagaaaagaagactccagcttataacacgacctctcactcgaccacctgggtcgagtacagttcttaatccgtcccaatactgcgtcgttttgagtattagggtttcagaatattttgctataagtagcatgtactttacattttcgaggataagtttttatctaagttttattccgcagacatcgtgttcttgaccttttgtaatccggatttctctttatctattcagtattcagtatttgctt

SEQ ID NO: 163498 - DNA, 2068 bp, Arabidopsis thaliana landsberg
atgtgtattcattatagaaagctaaatgctgcatctaggaaagttcattttcctttaccattcattgatcaaatgcttgaacgcttagctaatcacccatactattgctttcttaatggatataatggtttctttcaaataccaattgaccctaatgatcaagagaaaactactttcacatgtccttatggaacttttgcttataagagaaggccatttggtttatgcaatgctcctacaacatttcagaggtgtatgacctctatattttcagatttaatcgaggagatggtggaggtcttcatggacgatttttcggtctatggcccctctttctcctcatgtttgttgaatcttggcagggtatagaccaagtgcgaggagatgaatcttgttctcaattgggaaaagtgtcatttcatggtgaaggaaggcataatgtttggtcacaagatatcagaaaagggtatagaggttgacaaaggaaaaattgaagtgatgatgcagttgcaaccaccaaaaacggtgaaggacattagaagtttccttggtcatgctgggttctacagaagatttattaaagacttctccaagatagccatgccgttaaccagactattgtgcaaggagatcgaatttgatttcgatgaggactgcctcaaatcctttcacaccatcaaggatgctttggtgtcttctcctgttattcgagctcctaattggaatatccattcgagattatgtgtgatgcatcaagttacgcagtaggagctgttttaggccagaaaatagacaaaaagcctcacgtcatatattacgccagccggacgttggatgaagctcaaggaagatatgcaacaactgagaaggagctttagctgttgtattcgcatttgaatagtttagaagctagttggttggatttaaagtcactgtctatacagaccatgctgctttgaggcatctgtgtgccaagaaggatactaaaccaagactgttgagatggatacttctgttgcaagagtttgacatggaaatagtagacaagaagggcactgaaaatggttcggctgaccatctgtcaaggatgagaattgaagaacccattccgatagaagactcaatgccagaagaacaactcatggttgtagaattcttcggtgagagttacagcgggaaagagttccaccaactgaatgctgttgagggaagatctccatggtatgctaatcacgtcaattatttggcatgcggagtagatccccccaacttgaccagttatgaaaggaagaagtttttcagggacatacaccattactactaggatgagctttacctttacactctttgtaaagataagatctacaggagatgcgtctcagaagatgaagtagaaggtatcctgctacattgccaccgctctgcatatggtggccacttcacgacatttaagacagtgtcaaagattctacaagcaggcttttggtggccaacaatgtttaaggacgctcaggagtttgtttcaaaatgtgattcatgccagagaaagggcaatatcagcagaagaaatgagatgccttagaacccaatcttggaagttgagatctttgatgtatggggaattgattttatgggtccattctcatcttcatacggtaacaagtatatactggtcgccgtagattatgtatcaaagtgggtcgaagctattgccagtcctaccaacgatgcaaaagttgtgctgaagctattcaagaccataatcttcccgagatttggagtttcttgggtagtaatcagtgatggtggaaagcatttcatcaacaaggtttttgagaacctcttgaagaagcatggagtaaagcacaaggtcgctactccctatcatccacagacgagcgggcaggttgagatctccaatagggagataaaaacaattctggaaaagactgttgggattacaaggaaagactggtctgcaaagctcgatgacgcattatggacttacaagacagctttcaagacccccattggtacaactcctttcaatcttctctatggaaaatca

SEQ ID NO: 163499 - DNA, 1345 bp, Arabidopsis thaliana landsberg
atggttcattctcaacccttaccttccattgttgatttcactagattacttactgccactgccactttgagaagatatgagactgttatctatttctcccagaagatggaactctatggaatctcacacgatctctatagtttcaccattttgattcattgtttctgccgatgctctcgtctctcttttgctctatctgttcttggaaaaatgatgaaacttggttatgagcccagcattgtcacctttggctctctgctccatggattctgtctcgtgaatagaattggtgacgccttctctttagtcatttcaatggttaaatcgggatatgagcctaatgttgtagtctacaacactcttattgacggtctctgcaagaacggtgaactgaatattgcgttggagcttctcaacgagatggagaagaaaggtctcggagccgatgttgttacatacaacactctcttaacaggtctttgttattctggtcgatggagcgacgcagctcgaatgctgagagatatgatgaagaggagtataaaccctgatgttgtcactttcactgcgttgatcgatgtatttgtgaaacaaggcaatcttgatgaggctcaagaattgtacaaggagatgatccaaagctctgttgatcctaataatgtcacttataattcaatcattaatgggctgtgcatgcacggtcgtctatatgacgccaagaaaacatttgatttgatggcaagcaagggttgcttccctaatgtggtgacatataacactctcattagtggattctgtaagtttaggatggtagatgaagggatgaaactcttccaaaggatgtcttgtgaaggattcaatgccgacatatttacttacaacactcttatccacggttattgtcaggtgggtaaacttagagttgccctagacatcttctgctggatggtttctcgtcgcgtgactcctgatatcataacccactgcattctgttacatggtctttgtgttaatggggagatcgaaagcgcactggtgaaattcgatgatatgagagaaagcgaaaaggtatattggcattgttgcatataacatcatgattcacgggttgtgcaaggcggataaagtggaaaaagcttgggagttattttgtagactccctgtcgaaggagtgaagcctgatgctagaacatacactataatgatactaggtttatgtaagaatgggcctaggcgtgaagcggatgagctgattagaagaatgaaagaggaggggatcatatgtcaaatgaatgcggaagatgaccatctagaagagcatagctcaagtaataaggagataagc

SEQ ID NO: 163500 - DNA, 1197 bp, Arabidopsis thaliana landsberg
aagaaaggctctttgtgtttgatttacttgtctaagggttttgtgctaatgatgaattcaccagttgatttgtcttctcttcctgatgatttacttttgaactgcttagctcgcgtctcgagattgtattatccaactctctccttagtttccaaaacttttcgatctatcattacttcaccggagctttataagatccgctctctcctaggccacgccgagagctgtctctatctttgcttcccttacgacatgaacacgcattggttcactctctgccgggaacctaatcgaaacgttgccgagaattcaagtggctatcttctggtccaagttccatctcccaatggtttacttcctgtgcattcgtcgagtgtcatagcccttggttctaatatctacaaaatcggcggcactaagtcttatagacacaaactctggaaaaggacgcgctattcttcttctgtctctgtcctggattgtcggagtcacaggtggcgtcaggctccaggaatgcgagtggcccggggctgttcctccacagtatgtgaagttgatgggaagatatatatagcaggaggctgtaaagaagacatcggttccttgtactggattgaagtgtttgatccaaaaactcaaatttggggcactctgaagaacccatgcattgactatcaacatgatattggatatagatgtgaagtcaaaagcttaggtcttgatggaaaaatatacatgtttggaagtgagtttgtggtttacaattttgaggaagatagatggaaatgtataggccgagataagtataatttgtatcatgcagtagaccctatgtctcgcataaactctagttcttgcgtggtagacaatgtcttgttcattttggataagggaactcgagtgttcaaatggtatgactttaaggtaagtttgtggaaggaattgaatggtgttgaaggattgcctgatttaagtgaccgtgggtatgttaaaatggtggatcttggtggaaaattagcggttttgtggcaagagtgtctgactaataagaaaattaaaaggatttggtgtgctgagattagccttgaaagacgcgatagagatgagatttgggggaaggttgagtggtttgatattgtgcttagtgtccactcgtctttttccttgctctgcgcggatgctatttccgttgttgtt

SEQ ID NO: 163501 - DNA, 658 bp, Arabidopsis thaliana landsberg
atgtttaggatagttttgcatgcatgctgcatatttgtgttgatttcaggtgatttggagttgttgacgagctaactggaagaagcagacctaatcaagtcaaaccactcgaccccaaggtcgagtagaagcttcaagacctcaatagaccactcgaccccctggtcgagtatgggacttcacgatttcatctcatcactcgaccccctggccgagtaccaccacgattgatactcgatcacttcactcgacccccaggttgagtgtcttcagctccaccacctgaccatcactcgatcacaccactctacatggtagtctagtatcaccatcaccagcactcgactacatactcgatggcgagcttcagagtcttcttcattccgcactcaaccagacactcgagtacaaggaagaaaagaagactccagcttatcactcgacctctcactcgaccatctgggtcgagtacagtttttaatccgtcccaatactccgtcgctttgagtattagggtttcggaatattttgctataagtagcatgtactttacattttcgagacaagttttttatctaagttttattctgagacattgtgttcttgaccttttgtaatccggatttctctttatctattcagtattcagtatttgttc

SEQ ID NO: 163502 - DNA, 1799 bp, Arabidopsis thaliana landsberg
atggatgagagagagtcatcgtcttcaaggccagagagagaacaaagagaatatgatagtttcagaagaaaagctgagatagcccgtgggaagcgagtttatagatgaggatctggaagacgagtacatgcctgagcatgctcgcagagctaccaaacttctgcacaaacctgatgtattgcctgctgaggaatatattaggctcttcaaattgaatgagttttgtagcacaaggtatccatgctcgaccacgcttgcacaacttggattattggaggatgttcagcatctgtaccagagttgtcatctggacactctgatggcttatgcgtatgtagcatatgaagaagagacaattcaattcctctccacactgcaagtggagctctaccaaggtatgacctttgatgagttggattatgaaggattgggattcttgagattctctgtgtatggtcatgagtataggttatcaatcaagcgcttggaaggattgtttggtttccccagtggaacggaaactaagcccaagtatgacaaagaagagttgaaagacttgtggattaccattggcagctctataccgctgaattcttccaggtcaaagagcaatcaaatacgtagccctgtcatcaggtacttccagcgttctatagccaatgtactctactcttgagagatcacaaggactgaactaattctgatatggagatgatcgctatggctctcaagggaactcttcgccaaactaagaacagcatgtctctccaaggtgaaatcaatgacacacctctctctgtactttttctgatccatctgtgtggatacaagagctgggctgtcggcaataacaaaagagagcactaggcgctctgtgcataggtggtgttgtgacaccgattctgatcgcttgtggagtcacaatcacatctgatggactcaagccacgggcaatggatatcgagcatctacgccactgcaaattcctagagttcgcaatcgttggcgacttgcaccggttcaggtttgagcactctacagataagagagctaacatccttctccctagccctgaggttacacggataatagagggagataacattgattttcggcctgagattggacgcctctactatgagaacgctccgccattggatgaggatgatcttctaggagaggatgctgaggatgggatggatgaagacagagcagtggagttcgacactagcatgtatcactttggtgaacatgtacccccagcgagggagagcaagagcttgcgtgaagctcataggaataacagtaaactttagaagtggtgcaagaagcaggacaagctgctcgccaagtgtttcaagacgatcaagtttctgacagataagctgagttgttcctcctccgctactgctattccacagggacagcctcctctagagattctatcgaggagatttgatgagcctgagcacaggcctgagcttagcgagcagagagtttcacatgtcccggctaggcattcgtcattcgagtcccgagagcacaagagaagaaggaaggctacactcactcgatctagcagcagatcacgcctcattcagtcgaggagatcactcgaccgcggtgctggccacaacaaaagaagggaggtcgagtatccccagagcggtgctggccaccatagagctgatgaggtcgagtaaccacctgctggagctgatacggaacaagtcggttcgtctatggcctgggagaaatcacaggcagccattgacgagcaattacgctcattcttcaac

SEQ ID NO: 163503 - DNA, 1047 bp, Arabidopsis thaliana landsberg
agtctccatataaaaactgcaacttccatcactcttcgatcaccatcatcactctctctctctctctcttctatttccatggctcttgttcgtaaacgccgtcaaatcaacctccgtctccctgtcccaccgctctctgttcacctcccctggttctcctttgcctcatccaccgcccccgtcatcaacaacggaatctcagcttccgatgtcgagaaactccacgttctcggaagaggaagcagcgggatcgtatacaaagtccaccacaaaaccacgggggagatatacgctctgaaatcagtcaacggcgacatgagtcctgctttcacaagacaattagcgcgcgagatggagatcctccgtcgcacggattctccttatgtcgtcaggtgtcaagggatcttcgagaaaccaatcgtcggagaggtttcgatcctcatggagtatatggacggtggaaacctagaatctctccgcggcgccgttacggagaaacaactagcgggattttcccgccagattttgaaaggtttaagttatctccactcgctcaagatcgttcacagagacatcaaacctgcgaatctactcttaaactcgagaaacgaagttaaaatcgctgattttggagtgagcaaaatcattacccgatcgttagattactgcaattcctacgtcggcacttgcgcttacatgagcccggagagatttgactctgccgccggagaaaactccgatgtttacgcaggcgatatctggagtttcggagtgatgatacttgagctcttcgtcggacattttccgttgcttcctcagggacagagacctgactgggcgacgttaatgtgcgtcgtgtgctttggagaaccaccgcgtgcgccggaaggatgttccgacgagtttaggagttttgttgactgttgtctccgtaaagaatcgagtgagaggtggacggcgccgcagcttcttgctcatccttttctccgggaagatctttgattcgattccttttgtaacagaatctggaatcttaaaagttggaat

SEQ ID NO: 163504 - DNA, 1399 bp, Arabidopsis thaliana landsberg
atggcgttctccgtagggtcaacccggtttgttataaccagcgaaccagagaccgcgaaagagcttctaaacagctctgcttttgcagaccggccagtgaaagagtctgcttacgagctgctctttgatagagccatggggtttgctctctttggtgattactggagagagttgaggagaatctcttctacccatctcttcagccctaagaggatcttcagttctggcgagtcccgccgaaaaatcgggcaaaacatggtaggagagatcaagaacgcaatggagtgttatggagaagtgcatataaaaaagatcttgcatttcggatcactcaacaacgtgatgtctagcgttttcggtaaaacatacaacttcaacgaaggtattgtctactcgaaagagagcaatgagttggagcatttggtgtctgaaggctatgagctgctcggaatcttcaactggagtgatcatttccctggaatgagatggttagatttacaaggtgtgaggagaagatgtcgtagtttggtcggtagagtgaatgtgttcgtcggtaagataatcaatgaccacaaatcaaagaggtcacttcgtgataatcctgaagagagcacttatgatgatgactttgtagatgtcttacttggcatgcacggcaacagcaaactttctgactccgatatgatcgcagtcctttgggtaaccacaagtacttacatgtatacacgtgggttaaggagtaaataagtaaataacataatttaaacatttttttgttgttgtataggaaatgatttttaggggaacagacacggtggcgattctcttggaatggatccttgcgaggatggttcttcaccctgacattcaagccaaggcgcaggccgagatcgattgtatcgtgggtgactcgggacgtcaagtcacagactcagacctccccaagctcccatacgttcgtgccattgtcaaggaaaccctaaggatgcacccacctggtcctctcctctcatgggctcgtctctccattcacgatactcagatcgggactcactttatacccgcaggaaccactgcgatggttaacatgtgggctataacccacgatgaaaaggtctggccggaagctcatgagtataaaccagagaggtttcttggtgcgcaagaaagtaataacttccccatcatgggatctgatctgaggcttgctcccttcggtgctggacgtagggtctgtcccggcaagtcaatgggtctagccaccgtggagctatggctagctcagttgctaggaagctataagtgggtctcatgtggtgaagtggatttgagtgagactttgaagctatctttggagatgaagaacactcttgtctgcaaggcaatccctaggggttaa

SEQ ID NO: 163505 - DNA, 4301 bp, Arabidopsis thaliana landsberg
acttctggaccttacccctttccttccactcttcacgtcgctagctccgtcacaatcaagctaagcgacagtaactatcttctctggaaaacccagtttgagtcacttcttcgatgtcaaaagcttctcggttttgttaatggttcagtccctaaaccaccgacggttcttgttaccactgtcaacaatctcgccgtcgaaactccaaacccggagtatgaagcttggatctgtacggacgagctcatcaaatcttggatctttggtactctcactgaagaagtgctcggtcttgttcatgctctgtctacatctcatgatgtttggatgtctcttgctgaaaacttcaacaaaagctctgtcgctcgagaatttgatctccgtcgccggcttcaacttctgaacattaaaggtaagaactttaccacctactgccgtgagtttcgagccgtctgtgacagcttgagttccattggaaaaccagttgatgagcatatgaagatatttacctttcttaatgggttgggccgtgaatatgacccaataactacagtccttcaaagctctatgtctcgtattccatctcccacctttaacgatgtcgttttggaggtctctggttttgattcgaagttgcagtcgtatgagacttcttccgatgtatcgcctcatcttgcttttcaaactcaaaaaggcggttactttggctctggtcagagaggtcgtggtagcaatcgagggcgaggaggctactcaactcgtggtagaggcttctctcaacaagtaaactcctctggctggaatccaaatcaatcgggtaactcctctaactctcgacccgtgtgtcaaatctgtggtcgtactggccatgttgctcttaaatgctggaatcggtttgataactcttatcaaagtgaagatgttccccaagctctcgctgcacttcatgtctcagatactagtggtcgagaatggctcactgattctggctctactgcccacatcactccaaccacgacttctcttcagactgcgactccatataatggacctgagaatgtaatggttgcagatggaagcttccaacccattactcacgttggttctactactctcacaacctccacaggtagtgttcctcttaatgatgttctagtgtgtccgaccatggagaaatctcttttatcggtctcaaaactgtgtgacgactatccttgtggggtcttctttgatgctaatgctgtgtatgttattgatttacaaactcagaaggttgtgacaaagggaccacgtcgtgaagggctctatgtgttgaagaatttggggtttacagctttctattctaaccggcaagttgcagcaagtgatttggtttggcatcaacggctcggtcatgcaaacttccagattcttcaacttttacaaaacagcaaggcaattctagttaataagagcagcactacttccgtttgtgaaccttgccaaatgggaaagagcactaagcttccgttttcttcttctatttctagtgttaaggaaccattagatcgtttacattgtgatctatggggtccatctccggttgtatcggttcaaggtttcaaatattatgcagttattgtggatgatttctctcgttattcatggatatttcctctcaagtccaagtcagatttttgtgatgtgtttatggtttttcaaaaacaagtcgagaatcagtttagtaagaagattaaagtttttcaaagtgatggtggtggtgagtttatcagtactcggttcaaaactcacttacaaggtcatgggattcaacatctaatctcttgcccatcaacaccacaacagaacgggattgcggaaagaaaacatcgtcatctaactgagcttgggttgtcgatgatgtttcaaagtaaaaccccattaaaattctgggttgacgctttttactcagctaatttcattagtaatttgcttccaactcctgcgcttaaccagaaaagtccacatgaacttctgcttaagattaaacccgactactccttccttagagtgtttggtgctgcgtgttatccttgtctccgctctttcactcaacacaagtttgaaccacgctctcttcaatgtgtttttcttggctatcatccacaatacaaaggttatcgttgtctctatcctcccaccggccgagtttatataagccgccatgtgatctttgatgagaattgctttccattcacggatagatatcgagatttggtgccgagtcataaaactgggactcttggtgcctggcaatctgctgatgcttcgagaccaccttgtgtgttgcctactctacctccgcatatcaccaatgctcccaatgattcacaatggcttgaatatgtggtggaatttcctcaaggagacaatgaatgtacagaaacgagtatatatactgaacacggttccccaccttcatcctcaacggatccttctacggtgaccactgaagagattggctctccggctccggttcaaactgacgattctcccaccacagcccaatctctccatccaatgacaactcggtctcgagatggtattcgcaaaccaaatccgaggtatgctcttgtggctagtaaaacaattccatctctccctaaaactgttgcagaagcactcaaacatccgggttggcgtcaagctatgttagaggaacttaattccatatatgagagtcagacttggaatttggttcctgctacttccgagatgaatatattaggttgcagatgggtttttacagtcaagttaaatgctgatgggacagtcaataagctgaaagctcgtcttgtggctaagggtttcaatcaagaagctggtgtggactttactgagacctacagtcctgttgtaaggacttctacaattcgaattgttcttaccgttgcaacagcaaagagttggcatataactcaacttgatgtgaagaatgcttttcttcacggtgacttacaagagaatgtgtatatgattcagcctcctggctttgaagatatcaacaaaccgacacatgtttgttctctaaaaaaggctctctatggcttaaaacaagctccgcgtgcatggttcgacaaattcagcaattatcttctggaatttgggtttgtgtgtagcaaggctgatccgtctctgttcacttaccatcacaatagcgataccttggtcttgctcctttatgtggatgatattctactcacaggttcaaatcccacactctttaagtctttgattgctgaccttaatactcgttttgcaatgaaagatttgggtgacatacactatttcttggggattcaagcacaagctcatcaccagggattatttcttcatcaaaccaagtacactgaagaaattctccaccatgccaatatgacaacttgtaacccggttcacactcccttgccacttcgccttgatcatgtgtttcaagatactaagccattctctgagccgtcttactttcggagtcttgcgggaaaacttcaatacttaaccatcactcgtcctgacattcaatttgcggtcaattttatatgtcaacggatgcatgctcctactgaatctgactttggtcttctcaaacggattcttagatatcttcgtggcacatctaccatgggtttacacttgtacaagaacaacaatctctctcttgtttcctatagtgacagtgattacgcgggctgtaaggatactcgccgttctacttctggtttttgtgttttgttgggatctaatgttgtgtcttggtctgcaaaacgacaaccgacagtttctcgatcttcaacggaagcagaatatcgtgctcttgcctccaccgcttctgaactcacttggactgcctctgttcttcgtgacttaggcatcacacaatctcgggctgctatccttcgctgtgataatctatccgcagttcatctctctgcaaatccggttcttcataatcgttccaaacacttcgatgttgactatcactatgttcgtgagagagttgcacttggtgttcttgagattcaacacattccggctgtcttgcaacttgctgacactttcaccaagtctcttccacgacaatcctttcaacagttaagacacaaactgaatgttcgacttcctcccacactcagtttgagggggaatgtaagtgacaagacacaagcccagtcagcccaatcacaagcccaacaaaacaatgtccaagtcaagagttcctctcaacatcacggtcagacaaaacagagtttgcagaatttgca

SEQ ID NO: 163506 - DNA, 1095 bp, Arabidopsis thaliana landsberg
  unsure (1)..(1095): unsure at all n locations
atgcataaactcgatgaggatgtcaggaagagggaagtaaaggccgcattccgagaagaaaatttcgaatgcgcaattatgtccagcagggggagattcgggagagtttgtcggttcgggagagtctgtcggttcgggagatattaaactgatttgtgtagagatctgatgggcccctctgagtaaggcgagtcttctcgaggttgaaagtgaggttttatatttcccgaactgaccctcgatcgagaacacctcgcggcttattttcttcggaggcatgacaaagaccaacgacttcgaggattctgtgaaagacgatctggagcctattcggttcagtaaaattcaagaacacgatgaagatnnnnnnnnnnnnnnnnnnnnnnccgaaacgattttcgccgagatctcggaaataagcggttgtgccgaaggtgattttaacgagaaccgcggcggagagagaagaataacagtggcaaacagcgaaaccttcggaatcagcgctgaaaatctatgaatcgataaggattttcgatcgaggaacaccccgttcaaaccctaagcgagcctaaactaaagaatttccggcaagattcatagcgtctaaagaatagaagcaaaagcagagagggaataaagagaatttacttggaaaaacttaaagacgagtcgctggaacttataaatgaaagtgaagaagacgaggggttgattcgattaaatagtggacgaatgagcgggaaaaggaaaaaccctaggatcacgaaacgtcacactcttcctgatgaaatttggaaagtcacgggattttgtttcctattttacctcgagcatatgcggttaaggaaaaggaatcccgaactgatcccgtaattggtgggattgcgagatgaagtcgatttaagttttcgaattcatttctctttttcgaagacttggggggcaaattgtggatgtcggatcttgttagtttgccccgacccgagatccatcatcatcaatcaatgggctcgaagttctggaccaggagatgggcctgagtctgtcaatagcgaagtgggcttcgagggcccattcgaggcccgacctgtg

SEQ ID NO: 163507 - DNA, 843 bp, Arabidopsis thaliana landsberg
atgtttaggatagttttgcatgcatgttgcatatttgcgttgatttcaggtgatttggagctgttgacgagctatctggaagaagcggacctgatcatgacaaaccactcgacccgagaggtcgagtaaggagcttcaagatctcaagagaccactcgacccccaggtggagtagaggacatcaccacttcacttcaccactcgaccacgaggtcgagtgccctcatctccttcaccagaacatcactcgatcacttcactcgaccatgaggtcgagtttcttcatctccatcaccagaacatcactcgagcacttcactcgaccatgaagtcgagtgtcttcacctccatcatcagacaatcactcgacctcatcagtcaacctggaagtcgagtatctcctgaccaacactcgatcacatcactcgaccccgaggtcgattgtcttcaccttcattgccaaaccactactcgacctcgtcactctacctggaagtcgagtatcaccatcaacaccactcgactacatactcgatgacaagcttcagagccttcttcattccgcactcaacaagacactcgcgcacaaggaagaaaagaagactccagctattcactcgacctcccactcgaccacatgggtcgagtacagttcttaatccgtcccaatacttcgtcgttttaagtattagggtttcggaatatttggctataagtagcatgtacttcacattttcgcagacaagaagtttttatctagttttattccgcagaccttgtgttctagacattttaacagtcctaagtattagtgctctgcaaagagctgtgttggtcgagtgt

SEQ ID NO: 163508 - DNA, 3836 bp, Arabidopsis thaliana landsberg
aggagaatgagcatcatcatatattttgattatgatggatattattcaaaaaccggagaagcatatcaatggaatccgaaagtagtttgtttgtatggtatattgtttaggacatcatcaatggaggagattacttattcgtggttagtggataagatatgcacaaagataaagatagatgaatctacgatgaagctgaaattgagttacattccaacgggtgttaaacctcctacatatttatatattagggatgatgatgatgtatatgtttatctaaccacgttggatgaagagaaaagtagaagtgtcttgcatgtagaagtcggtaatgagttggaaatggttgacgtaaacgagcaacaatcgagagtacaaagaaagagttcagttggtgtgaattatgaagaggagaatttcggtggtctagataatgatgatagagctaatgttggtgctataactctttacgcaaatgagccactaggagaacaacttgctgagcctttggagacattggagcctttagagcctttggagcctcttagagatgtggataatggtgttgatagtaatatgagtatgactaaggagaatgatggtattcgtgaatatgttgaggaaccacgtgacagccaacattctaagtttaaaggtccatgggatgatggtcttgatctagtaataggtcaagaatttgaaaatagcgatgatgtgaaatatttagtagagataggagcaaataggaattgttttggactaacattactcaactcggataagaagcggtatgtggtaaaatgtgctgaagaagggtgtgaatggtacatacgattttcgaaggctaaggattcaactcgcttctcggttcgaacatataggaagttgcatacatgtgtacggtcgaatactgctacaggcattaaaaagagaggtacaccacatttagttgcaaccgtattgcatgaagattattcaggtcagtacaagaccccaactcctaaaagtctcattggccttgttcagggaaaacatggtacaactgtgtcatactcgactgctattagggggaaaaaactagctgttagtgatattcgtgctagtcccgaggagagtttcaagatggtttatcaatatttgtatatgttagagaaggtgaatcctaacacaaagactagtgtggtattagatgaagaaaaaaggttcaagtacctatttgttgctttgggggctgccattgaaggatttaaagtcatgagaaaagtgattattgtggatgcaacatttttgaagactatatataaaggtgtgctcatttttgccacagctcaagacccgaatcatcaccattatcccttagcgtttgctgtagctgatggcgaaaaagatgttacttggaagtggtttttcgaaactctcaaaactgttataccagacagttcggaattggtctttatgtctgacagaaattctagcctcatcaaggcagtggctgaggtgtacccgagctctcaccatggaaactgtgtgtatcatttgtcacagaatgtgagaacgaaagttgcatacaacaaagaaggggttgctaaaacgttcagaagaattgcatccatttgttcagtgtctgagtttgaacatgaatatgcagagtttagaagaaggcaccctaaggtagccacctatcttgatgaaaacactgatttggaaaaatgggcaagatgtcattttccgggagtaaagtacaacattgacactagtaatgcagttgagtctatgaatggtgtgtttagggatgtgagagggtatgcgctattacctatgatagatgcagttattgagaaatttgcggaatggagctgcaataataggaaggaagccttaagtggatcaaatgcccagagacttgttccttttgtggagaacgagatacatgaaacatgtgaagttgcacaaaaattaccggtgatagagcttaacacctacgagctttaatatagtgtcattggtcgcgatggtaagacctatgtggtggacttgaggaataaaagttgttattgtcgttgttttgacttggataagtatccttgtgtacatgcaatagcggctgtgatgactcacttgaaacaaaaagatagatccgaggaggtaaaaagtttatatgatttgatcaagaaatattactttgttgagatgtggcttatggcatatgttagtaccatttatcctgtgccgcataagtcagagtgggttattccaagtgaaatccaagaattgtttgcatatcctccggttcatgttgttaaaaagggaagagttcaagaaactagacacccatcggttggagaacgttgcccaaagaataagcgtgtgaaaggcagaaacttggagagctgattttttccaaaccacgaaagtgatagccaggggagtggccaatacacaagtggaaattaatgtactcgtgtttttaaatactttttgattttgtaaaactcggttaaactttattctctaatggtagaactatgtatgactctaaattcatgtttttaagtactttcagattttgtaaaactcggttaaacttaattttgtaaatggtacaactatgtatgtctctaaattcgtgttttttgtactctctggttttgtaaaacttgattaaacttggttttgtaaaggtacaactatgacaaatgtaacaaatgtgcttaatttgcaacaaaatttgatgtaatgttatttcttatacaaattataccacttctgttgagtattaaaactactgattgataaaatcataatttaatgaaacttcaaaaaattagtctttaccaaattcatttgttatacaagaaacaccttacactttgaagatgactttataattattatcatcataacattgcataacacacaaaattaaattttccagacatatttttctatgaaaatatgtggaatgtttataaaacatcaaaactctttggtataactaaatttgtttagtttaaaattaagtatatctaataaaattaaaaaaaaaaaaaaagtcaaactatgtatacacatgtacaacctgttaacttggaatatctgtgtgcaaatttatttgcgggccccaccttttttgttccgaacaactcttatgcgggtcgtacggttaattcattttcacactagaattccttttcacactataatttcacttttccccctaaaatttcatttcccccaataaaataaatttttaaaaatcctatattcctatattattaattaaaataagaaaaatttaacaattgagagaatttcaagatcaaatccaaatccgtaccgtcgttattaccggtgtggttttgctgcagaaagaaaggtaatatcttatttttattttgatgctttgtaaacaatttttatgtgtgaaactttaacaatttatacatagatatatcgtttatacatggatcgtttagcatagatatacctaatttgactagtgtctaaaatacctgatttatattcgatgatagatatacctagtttatacatagatatacatgttattttacaatttttacaatttcaaaatgtagcttatgaacgacaatcatgtgtttaagtgggtagatgaggcttttacacatgagattgaacagttggaatttcaactcggtgttcttgaagaagaagtaagagtgatgaagatggaaaggaaccaagagaggatggaaagagatctgatggaaaagaacaaaaaggggaaggactttaagatggtaatcgtttttagttgtggctgtttaatcaccatggcaattgttggcatgttctgt

SEQ ID NO: 163509 - DNA, 980 bp, Arabidopsis thaliana landsberg
atggattccgagatcgccgccgactactctccaatgctcataatctacaagagtggccgcattgagcgactcgtgggtgaaaccaccgtgccaccttcttccaacccacaaaacggagtcgtttccaaggacgtcgtttattctcctgacaacaacctctccctccgcatttacctcccggagaaagccgccaccgccgagaccgaagcctctgtaaaactccctctcctcgtctacttccacggcggaggattcctcgttgaaaccgctttctccccgacttaccacactttcctcacggcggctgtctcagcgtcagactgtgtagcggtctccgtggattaccgacgtgcaccggagcatccgattcctacttcttacgatgattcttggacagctctcaaatgggttttctcccacatcgccggatctggctcagaagattggttgagcaaacacgccgacttcagcaaagtgttcctcgccggagatagcgccggagcgaacataacgcatcacatgacgatgaaagctgcgaaagataaactcagtcccgagtctttgaacgagtcaggaatctctggaatcatcttagttcatccttatttctggtcaaaaaccccagtcgacgacaaggagacgacggatgtagcaataaggacgtggatcgagtcggtctggacgttggctagtcctaatagcaaagatggaacagatgatccgttgctcaacgtagtgcaatcagagtcggtggatttgtctgggttgggttgtggtaaggttttggtaatggtggctgagaaatgatgtgttggctaggcaaggttggagttacgtggcggagctggagaagagtggatggaaagaagaaagtgaaagtggtggagactaaggaagaaggtcatgtttttcatttgagggatcctgattctgaaaaggctcatgaactcgtgcataaattcgcagggtttattaaggga

SEQ ID NO: 163510 - DNA, 1113 bp, Arabidopsis thaliana landsberg
gccatgaatagacggaagaacgatttcttggttcgccctaaaagaattcgatgctacacacaattatccacgcttcccatcgatctcatcattgagatactctcaagattacctatgaattccatcgcaatatgtcgtctcgtgtcgaagcaatgggcttccatacttcaaagttcagattttacggaatcgttcctcataaagtcaccgcctcgaccacgtcttttgttcaccatccgatacggcagcaagtggcatctcttctcagcccctcagcctcggaattttgatgagaacttccctgttgtggcaacagactatcataagggtttttcaggaaattggtgtatgcaaagttttcagttggttaatggatttatctatctgatcaataggctgagtttaaagggaaagatagatagggtttctgttatatggaaccctagcacgggtcagcaaatacctttgcctgacttgggagtgaagaatagtcattcgaaaagctttttcgggtatgatcctatcgagaaacaattcaaggttttgtgtataacatcctccaaagagcatcaagttcttacactagggactggaagaaaactttcgtggagaaagattgaatattcgtatccgcattaccctcggaaaaagagcaatgggatatgcatcaacggggttttatattacagaaatactaatgctatgatagttcgcttcgatgttaggtctgaggaatttcgttttgtagaaataaaaatgtacgtcgagattttgagtctaataaactacaagggaaaactaggtgtgctttttcctaacactgatcttgctcagctatgggttctagatgacaccaacagagtggaatggtccaagcacaacttcgtttttccagatacaacttttgaggctataagggcaactgatacgggtgaaatgttttgtgcgtcaagttgttggcgcgattcactctatgtttcctactatgatttagagaaagagagtgttaagaaagttaaaatcaaaggaattgaagacaagttatcgataggtaagcatcacgctaacgaattcttcatctttccaaatcatgttgaaaatgtaatggaaact

SEQ ID NO: 163511 - DNA, 777 bp, Arabidopsis thaliana landsberg
atgtttaggatagttttgcatgcatgttgcatatttgcgttgatttgaggtgatttggagctgttgtcgagctatctggaagaagcggacctgatcatgacaaaccactcgacccaggggtcgagtaggagcttcaagatctcaagagaccactcgaccaccaggtcgagtagaggacatcaccacttcactttaccactcgaccacgaggtcgagtgccctcatctgcatcaccagactatcactcgaaatcacactcgaccatgaggtcgagtgtcttcacctccattatcagaccaccactcgaccacttcactcaacctggaagtcgagtatcttctaacaccactcgatcacatcactcgacctgcaggtcgagtgccttcaccttcactcccagaccactactcgacctcgtcactcaacctagaggtcgagtatcgccatcacaacacttgactgcatactcgatgacaagctttagagccttcttcattccgcactcaaccagacactcgagcacaaggaagaaaagaagactccaactattcactagacctctcactctaccacctgggtcgagtacagatcttaacccgtccaaatccttcagtcgttttagtattagggtttcgggatatttggctataagtagcatgtacttctcattttcgaagacaagaagttttttacctagttttatttccgcagaccttgtgttctagactttttgtaatacggatttctctttatctattcagtattcagcttttgttc

SEQ ID NO: 163512 - DNA, 1194 bp, Arabidopsis thaliana landsberg
atggctcaaacaggtgaagatgttgacaaggcaaagtccttccaagttgagtttgcttgtggaaatggtgttgatgatgaggagaagcttcggtcgcagtgggcaacagttgagagattaccaacttttaaaagggttactactgctttgttacacacaggagatgactcgtcagatattattgatgttactaaacttgaggatgctgagagacggttgttgattgaaaagcgcgtcaaacaaatcgaagctgataacctccgtttaccaggaaaataagaaagagaatcgacgagtaagtcactacataatctctttttttttttgtttctggtgttagtgaccttttaatctgtttgcatgttagtgaccttttaatctgtttataacatatatgattgtagagttggtatagagttaccaacggtggaagtgaggttcaatgacctctctgttgaagcggaatgccaagtagttcatggaaagcctatcccaactctttggaatactatcaagggctcactatctgtaagtactcaaatgtatttgctgcttccatctgattacgagcgcttttctgctttccatgttctttattcacgcttttccgctttccatgttacagaagttcgtttgttcaaagaaagaaaccaagataggcatcttgaaaggagtgagtggaatcgtaaggcctggaaggtaattttttcaagaggcatatctttagtcccttaagttgcatggaagaagaaatgaaagatcactggctagtttgtgtagctttttctagaaagtaattttcatttcagagttcaaaagatgtactggttttcttgcagaatgacattgttgcttggtcctcctggttgtggtaaaaccactcttctacaagcactttctggaagactttcccattctgtaaaggtttgactaaaatacataggactgttgaactaacatcgaataatatattaaagatcacaagggttatcttcactctacaggttggaggaaaagtaagttataatggttgcttactttcagagtttattccagaaaaaacgtcaagttatatcagtcaaaatgatctacacattccagagctgagtgtgagagagactctcgacttctctgcgtgtataccaaggcataggaagccgtatgggtgaggacctgatttgtcatattgattcg

SEQ ID NO: 163513 - DNA, 1180 bp, Arabidopsis thaliana landsberg
agtccataactcactaataatcacaatggggtctgaaaatggcagcttgatgagaagaaacgaagtagacgagaatgtagcgttaatctttggcgtcaccgggcttgtgggtcgagagattgttaagacgctattaatgtctaaaccaggatggagaatctacggcgtagcgcgtaacccggagatcaattccatgacgaagatgtacaacttcatctcctgcgatctgcttaacgcatctgagactaaacagaggttgtctccattacaagacatcgtgagtcacgtgttttgggtcacgtggtctggtgagtttccattggataccgacgaatgttgcgtacagaacaagacgatgctgatgaacgctttggacgcgattctcccaaacgctaagaggttaaagcatttctcgcttcaaacggggatgaagcattatgtgtctttggtggaagagacaatggctcgtggagaaggttcgagtttgtattattacagcgaggagtgtccaagaaagagctctgggaagaatttctactatgttttggaggacttgctgaaggagaagatcactcgtagttccgttgtttggtcggttcaaagacctggtttgctaatgggaagctcttcaagaactctgtacaacttcatgggaagtctttgtgtttatggagcgatgtgtaagtatttgaatcttccttttgtgtttggaggaacaagagaatgttgggaagagagttacatagatggctctgattcgaatttagtcgcggagcagcatatattcgctgcaacaagtgggaaagtacgcgagaaaggggaagcttttaacgccattaatggagtagggtttacttggaaggagatttggccggaaatagggaagaaacttggtgtacaagttaacgaaacaaccatgtttgatgaaggtttctggtttgggagagagatggttgagagaaaacatgtgtgggatgagattgttgtgaaggagaagcttgttaggacagagattgaggatttggcgaattggtatttcttggatgctctgtttagatgtccgtttaagcttcttgggaaaagagaaaaagtagataggtttgggtttaagaggaaatatagaaccctagattcggttttgtattggattgatgtgatgagagatgaaaaactcattcct

SEQ ID NO: 163514 - DNA, 946 bp, Arabidopsis thaliana landsberg
cggaatcggaaagacaaagtcgtcgtcattttaggagcaaccggcgccggaaaatcaagactttccgtcgatctcgctactcgtttcccttcagagatcataaactccgataaaatccaagtctacgaaggattagagatcacaacgaatcagattacgttacaagaccgtcgcggcgttcctcaccatctcctcggcgtcatcaaccccgaacacggcgaactaaccgccggagagtttcgctccgccgcttcaaacgtcgtcaaagagataacttctcgtcaaaaggttccgattatcgccggtggatctaactctttcgtccacgcactcttagctcaacgattcgacccaaagttcgatcctttttcatccgggtcgtgtttaatcagctccgatttgcgttacgagtgttgtttcatctgggtcgatgtatcggagactgttctctacgagtatcttctcagaagagtcgacgaaatgatggattcaggtatgttcgaagagctgtctagattctacgacccggttaaatccggtttagaaacccggtttgggattaggaaagctataggtgtaccggagtttgacggttacttcaaagagtatccaccggagaagaagatgataaagtgggacgctttaagaaaagcggcgtacgataaggcggttgatgatatcaaaaggaacacgtggacgttagcgaagagacaagtgaagaagattgagatgctaaaagacgctggttgggaaatagaaagagttgatgcaacggcgtcgtttaaagcagtgatgatgaagagttcgtcggagaagaagtggagagagaattgggaagagcaagtgttggagccaagcgtaaagattgtgaagcggcatttggtgcaaaattagtttttttttttgttttttccagctattttacagctcatttttgggaactatt

SEQ ID NO: 163515 - DNA, 1410 bp, Arabidopsis thaliana landsberg
cttaccttcttgcgattcccaattccccgcgagatcttattgtgtacggaagatgataccatttccattaactctgtttcatcttaaaacgcaaaacgtagcgttttacgcacaacttttatgtagtcatgatccctatggaccttaatccaatacaaagctctgacttggatttcgatatttaaagataattgtttgggcctttgatgggcctcattaatcagatgttttacttccctgatctgtggataaatttcttaaccaaacaaaactcaaaacccggaagatagatagagaaagcaacgtaaagatcatgaacatcaaaattctcagtcgtcaaaaaaccaaaaaaccttttctttcaaatttgataatctcttcagaagctaccaagaagaagaagagaaagaagagcgttttctaaatggaagaagagaaccttctcaatgagaaccttctccatcccaacgagtcctcaccggaagaaactcaagtcaccaccgtatcaaaatcgaaatggaccattcttgtactagccatgatcctcctcttggtctacttaaccttcggggtttgcacatactcattctttcgagaccaattctccggaaccgagaccaatcttttcgtcgacgctttctatttctccatcgtcacattctctacagtcggttacggggacattgtcccgtcaacttcaacgaccaagatcttgaccatcgtcttggtatcaaccggcgtcgtatttcttgattatctactcaaccgcgtcgtgagtcacgttctaagtcttcaagaaaacgcgattcttgatcgaatcaacaagacaagaaacagagcgattagagatcacattgccgaagatggcaagataaggttaaagtggaaactttgtttagcgttttgcgccgttggtctctgcgtcggaagtggagctttgtttcttcacgttttcgagagattggattggttggattcggtttacttgtcggttatctccgttacgacggttggttacggagataaaacgtttaagacggttgaagggagaggcttcgcagtgttttggcttcttctttcaactattgcaatggctactctgtttctttacttggctgagatgagaatcgatcgtactactgtcatgaaattgcccccgaggtaaacatttgcaactctgtttctttcattcgaaattctgtttttggttactgattgatttttcttgttgttggtttgtgattagtgaatcagagtttattgtgttcaagcttagagaaagtgggaggattagtgaggatgatataaagcagatcgtaagagagttcgagaatcttgaagaagtgccatcaagcggatcatgacaatttgccaaagatcacattgccctaactcttgtctggtactaga

SEQ ID NO: 163516 - DNA, 1115 bp, Arabidopsis thaliana landsberg
aaaaagcttccattagatctggaagaagagatactctttcgagttccacctcgatctctcgttcgcttcagatccgtttgcagagaatggaacactcttttcaataataagagattcatcaacaatcactttgcttgcggtcggccagaaatcatgttaaatacacattcccatatttattcgataaacgtcgatttccaagacgaaaatccaactataaaggtgcgtgatttacgctttgatcatttaagttgccgcggttatcatctgtatgggatctgcgatggtaacttcttcatatatagctttcttaatggaggcggaggcgttgtttggaacccgttgttgtggagacagactaaatggattgccaaggctgagaatacatgtggcaaggccattggttacgatggtagtagacccgaaaagagttacaagattatcggaaggagtagttgttcttggcagggtaaagttactgatacatattcagtcttcgaatttgcaaccaatgcgtggaaggttactgatcatacccgttttcacgaaaagccagaattaatgaacgactccggtagggtctccctgaatggaaatttgtactggacagcttataattctccccacactggtcagtatttcatccaaatgctcgatttttcgaaagagatagaaaagagtcgaaagatcttttgttttaccgtgtaaggggaaaaaaagtactacacatactcgtatcctctcgatttacaagggagatcggttttcagtgttagaacaatccaaaaaaaccaagggagattgagatttgggtgacaaaggataaaattggtaacggggatgatggagacgatgtggtgtggattaagttcatgactgtctcaagacctgacttccccatattacttagtcacatctcaacaagttactttgtcgataatgatatctatgggaagagctttgttctgtgttgtcctagcaagagacctaaagcagcttgggtgtatattgtgaggggagatttgtgcaaaaagattaagatagatcaagtgctatgtgagtttcaatcctctgtctatgttcccagtttgatcaccattccttgagagttgaga

SEQ ID NO: 163517 - DNA, 792 bp, Arabidopsis thaliana landsberg
ttagggtttcatataatttttagccaatttataagactatatttacacacacacccatatatatatatatataggggtgtcaaaatgggtaacccaactcaactcaactcataatcaaatgagtttagggttaaatgagttatgggttgacccaactcatttaatttgatgggttgagttgttaaatgggttaacccatttaagtaataatttaattaattatttttataaatcaatgataaataattatcattattaataattattaatttattatcatcaaacttaggatatttacagattctgatatttacgggtttacgtttttggcgggaaaatcacgggtttacgtttttggcgggaaaatcacgggtttatgttttttggtgaaaaaatcacgggtttacttttttggcgggaaaatgacgggtttttgtttttggcggggaaatcacgggttttcgtttttggcgggaaaatcacgggttttcgtttttggcgggaaaatcacgggtttacgtttttggcggaaaaatcacaggtttttgtttttggcgggaaaatcacggattttcgtttttggcgggaaaatcacgggtttttcgtttttggcgggaaaatcatggattttcgtttttggcggaaaaatcacgggtttacgttttttgcgaaaaaatcacggatttttgtttttggcgggaaaatcacgggattatgttttttggtggaaaaattacgagtttactttttttcaattcatcgcttgtatatttaagaaatttgaaaaaatat

SEQ ID NO: 163518 - DNA, 740 bp, Arabidopsis thaliana landsberg
aaggtcggagtttgttacgaaaaaagcgccgacgatcatccaacaccgtcaaaagttgttcaattgattcaacagcacaacatcaaatacgttagaatctacgattacaattctcaagtcctcaaagcatataggaaacacaagcattgagctaatgattggagttccaaactctggtcatgacgctttctctcaatcccaatcaaatgtggacacctggcttaagaacagcgtcttaccattctatccaacgaccaagatcacttacattaccgttggagctgaatctacagatgatccacacatcaatgcttcgtctttcgttgtccccgcgatgcagaatgtcttaaccgctctgagaaaagtcggtttgagtagaagaatcaaggtttcgactactctttccctcggaattctctctagatctttccctccttctgctggagcattcaacagcagctatgcttatttcttgagaccaatgttagagtttcttgcatagaataagtctcctttcatgatcgatctttatccgtactacgcttacagagactctccgaacaatgtgtctttggattatgtgttgattgagtcttcctctgaagtgattgacccaaacacgggtttgctttacaagaacatgtttgatgctcaagttgatgctctttattaccgctctcacggctttaaacttcaggacaatcaagattatggttactgagactggatggcccaccaaa

SEQ ID NO: 163519 - DNA, 1214 bp, Arabidopsis thaliana landsberg
aactacattcacaagaaattcacaacttatctgacgtagaaagatttgagttatagactttggaaaatgagcaaatagaagaatttttaataaatccaacgttggattactatgagcagcactttcaaaaaggactatccaaaacaggtggaggattgggatggctaattctttgggatcgtattcaaaatgacaatgctgcatgtctacaattattgagaatgtcgtttgctaccttcacaggactatgctctattttaaaagaaaattatgggttacaatcttcattgaatgcaagtgttgaagagagtgttgcaatgtttctacgagtgtgtggacacaatgaaattcaacgagatattggtttacgattcggacgaaaccaagaaaccgtgaatagaaagtttagtgaagtgttggaagctacataacttcttgcctcagattacatcaagacaccaacaacacaacaattacttcggattcctcaacgtctacaagttgatcgacgatattggccatatttaagtggttttgttggagttatggatggaactcatgtgtgtgtcaaagtaaagcctgagttacaagccatttattggaaccgacacaactacgcaagtatcaatgtaatggcaatatgtgatataaatatgttattcacatatgtatggaatggagcaccgagtgcatgccatgatacagctgtcctttcactcacgtaaaatggtgattctgagtttcctttaccccgggagacaattatgtagttgactctcgatatcctaataagcaagggtttttagcgccttataggtcaacacaaaatagacttctgagataccacatgtcacagttctataccggtcctcctccgaaaaacaaggaagaattgtttaactgatctcatgcatctctttggtctataattgaacgcactttcggagtatggaagaagaaatggagaattttaactgattttccaagatatgatttggatgttccaaggagactaattatcgcaacaatgagtttccataattttataagagtttctaattttacaaatgcatattttgttgaatattttaccgagacttaaactgaagatcagaacaatgcatcatttgagcttgatgaagcagaaaatgcatatggcaaatattcgagaaacgattgcaaatatgttatcggaaaatcaaaatatttgattt

SEQ ID NO: 163520 - DNA, 1026 bp, Arabidopsis thaliana landsberg
agcctctcctatacacaactcctaggcctcctgtcctttatcctcctcttggtcacaaccaccactatggcggttcgtgttggagtcattcttcataagccttctgctccaactcatcctgttttcagagaagccccggcttttcgaaacggtgatcaatgcgggactcgtgaggctgatcagattcatatcgccatgactctcgacacaaactacctccgtggcacaatggctgccgttttgtctctccttcaacattccacttgccctgaaaacctctcttttcatttcctgtcccttcctcatttcgaaaacgaccttttcaccagcatcaaatcaacctttccttacctaaacttcaagatttatcagtttgatccaaacctcgtccgcagcaagatatcgaaatccatcaggcaagcccttgatcagcctcttaactacgcaagaatctacctcgcggatatcatccctagcagcgttgacaggatcatctacttagactcagacctcgttgtggtagacgacatagagaagctgtggcatgtggagatggaaggtaaagtggtggctgctcccgagtactgccacgcaaacttcacccattatttcacaagaactttctggtcagacccggtattggtcaaagttcttgaaggaaaacgtccgtgttatttcaacacaggggtgatggttgtggatgtaaacaaatggaggaaaggaatgtatacacagaaggtagaagagtggatgacaattcagaagcagaagaggatataccatttgggatcattacctccgtttctgctgatattcgccggtgatataaaagcggttaatcataggtggaaccagcatggtctaggaggtgataatttcgaaggaagatgtagaacgttgcatccgggaccgatttgtcttcttcactggagtggaaaagggaagccatggttaagactagattcaaggaagccttgtatcgttgatcatctatgggcaccgtatgatctgtaccgttcatcaaga

SEQ ID NO: 163521 - DNA, 1639 bp, Arabidopsis thaliana landsberg
ctgttttctagggttgttccaatttctgaggaaatgacactaggagcgtttaagtcagcgatttcgaaagagttcggaacaaatggtgtaaatacttcgttgagttatgttgcaccggataaagatatgttcacaacaaaggagaagactcctcaagttttggttacaagcgaggttggccttctgtactatctaagtgcacttagagaaaacagaggtcttaatttgtttgagaagtttgaagaaatggaggaagatttacagagttttgatacatgaggagatagtagcactaaacgaccgcgtcaaagcagtatggaggaagaaagtggttcaaaaacgcctaaaagtggtgtcatatctgttcgcgatatatcgtttgtgggttcaaaaactcctacaattttgttgactcctcgtgatgacgaattcatggaggaattggaacaagcagaagcaaacatatgaagtaacaatgggcagaaatcgtcacgaaatgatattgagaatgaaggttttaacattgatgttgaaaacttgtttttcgttgataacgatacagaggaagttaaagcagtcacggaaaaacctgaagatagtatgcccttttgcggttatgataaggagttttggtcaaatttcctaacagataattatggtggctccaatgctaatgagttgatggcatcaggaggtttagatgtaaggtacgggtctaacaataaggttgtgggctccaatccggatgaagtagttttctgtactggcagcggagtttctgatcacgctatatatgtgaacaagaccgaacaagttatgaacggtaaagatggtcggtggagttggaagctctcagggaacaaggaaggaggtcagaaagttggaggaagtggatgacgaggaatttggcattccacctttgttgggggacatcgagtatgaagtaggtaacttacatgatttggacattgatgatgatggtaaaggtatataccagggaaaagtgtatgcgagcaaagaagattgccaaataggatttgctatatatgcgataaagaatcagtttcatttcaagcaaacaagaacaaaatggaattattttgttcttagttgctcagatgagaaatgtgattggagaatattggaaactataatgaatggcgttggttactatgaaattaagaaagcgcaacttcaacacacatattcggttgagactagaacgcagtacatgaagaaagcaacatcaaaggtgattgcatctgtatttaaggcaaaatactatgaagtttctgttggtcttgttccaatggatcttcagcaatttgtactagaagatttgagggtttctgcatcatacaaaaagtgttggagagctagggaatcaactttaacagatgctggcgggagcgatgaagagtcgtatagcattttggctgaatatttgcatcttttgaagttaacaaatccggggacgataacacatatagaaacagaacctgatattgaagatgaaaggaaagtgaggtttttatatatgtttttagcttttggggcttcaatacaaggttttaagcatctaagaagggttttggttgtggatggtacacatttgaaaggaaaatacaagggtgtttta

SEQ ID NO: 163522 - DNA, 1092 bp, Arabidopsis thaliana landsberg
atggcaaatgaaatttggcatgatctacaatacatggtgttgggacgtgatgatcctgaactgtttgttccccaagcagcatatgctcgtgttgttgctggtaacagactgagtgtcattgggagacctctcaacacacatgcacaacatcttcgaaggtttatgagagccttacctcgcagctggggactagctactcgggttcatgcacgtatacttgatgacaggcggatccagtttcggtttcagtctgcagttgatctagcttcggtgatgttaagaggaccatggctgtttaatcactggtttgttgctttacaacgatgggaagactttccacgtcctgatttccttactttcattgacctttgggttcaagtaagaggaattcctgtcctgtatctgtctacaatgactgttagatttatagcaagtactctgggaccagttatgggacttgattttgatgaagaaacaacaacacaggtagagtttatccgtgttaagatccgcctcagtattacagatcgtttgaggttctttcgacgagtctgttttgaatccagggagagagcgatgattggatttgaatatgaaaggcttagaaggatttgctctaactgctgtcgtattacacatgatcttgatcactgtccttacttagctcatcaggtgaatcctgataatggtgatgatgatgaagctgatgtcttggcagtccctgtttgggaagagggagcaggttctaacaatccaagtccaccacctcctgagaaggaatcatctagttcagatatttcttctgacagtcctatttctcaaccaccaaatcctacatcaccagccttagatttgaatatgttggtttcggaacatcaggcgcatctttgcaaccatactcatggcaaacatgcatctgatgatccttctacttctagtgatcgcaaggataaagggaagtttgagcatggtgagagctctaaacgtaaaaaagacaaacaggttgaagtcactactaaacgaagcatgagacgatgtaggtcagcacatggagtcagattttactcaagtccatctcagcctccatatctc

SEQ ID NO: 163523 - DNA, 775 bp, Arabidopsis thaliana landsberg
atgtttaggatagttttgcatacatattgcatttctgagttgttttcaggtgatttggagctgtcgacgagcaaattggaagaagcggacctgatcatgacaaaccactcgacccagaggtcgagtaggagcttcaagatctcaagagaccactcgacccccaggtcgagtagaagacaccaccactctatcacatcactcgacccctaggtcgagtgacttcatctctatcttctgaccaccactcgatcacatcactcgacccccaggtcgagtgacttcatctccatctcctgaccaccactcgatcacatcactcgacccccaggtcaagtgtcttcatccctttgccagacaactactcgacctcatcactctaccaggaagtcgagtatcaccatcacaccacttgactgcatactctaccaggaagtcgagtatcaccatcacaccactctactgcatactcgatgacaagcttcagagccttcttcattccgcactcaactagacactcgagcacaaggaagaaaagaagactccagctattcactcgacctctcactcgaccacatgggtcgagtacagctcttaacccatcccaataattcgtcgttttgagtattagggtttcagaatatttggctataagtagcatgtacttcacattttcgcagacaagctttttatctagttttattccgcagacactttgtgttcttgacattttgtaatccggatttctctttatctattcagtattcagtattcagtt

SEQ ID NO: 163524 - DNA, 2214 bp, Arabidopsis thaliana landsberg
tcagacatggggatgaccgtcgtaattattctggtgttctcatttttcgtagcgattgtaacggcggagacctctccttacatcatccacatggacttatccgctaaaccgttgccattttccgatcatcggagctggttttccacaactcttacttcagttataaccaatagaaatccaaagattatctacgcttataccgattcggttcacgggtttagcgcggttctcaccaactctgagctccaacgtcttaaacacaaacccgggtatgtctcgttcaccaaagatttaccggttaagcttcataccactttctctccaaagtttatcgctttaaattcgacatccggtacatggccggtctcgaattatggagctggtatagtaatcggtattatagataccgggatttggcccgatagtcccagctttcacgacgatggggttggttcggttccgtctaaatggaaaggagcatgtgaattcaattcttcttccttgtgcaacaagaaactaatcggtgctaaggtattcaacaagggtttgttcgccaacaaccctgatttgagagaaaccaagattggccaatactcttcaccgtacgatacaatcggacacggcactcatgttgcagccattgcagctgggaatcatgttaagaacgcgtcttacttctcttacgcccaaggaaccgcctcaggaatcgcaccacacgcgcatctagcaatctacaaagccgcgtgggaagaagggatttactcatcagatgtaatcgcagcgattgatcaagcgattcgagatggagtccatgtgatatctctgtcgctaggattgagttttgaggatgatgacgacaatgatggtttcggtctagaaaatgatccaatcgcagtcgcatcttttgcagcgattcaaaaaggcgttttcgtggttacttccggcggtaacgacgggccatattactggagtttgattaacggagcgccgtggattatgacggttggagcgggaacaattggtaggcaatttcaaggaaccctaacgtttggaaacagagttagtttcagttttccatctctgtttcctggagagttcccttcggttcagtttccagtaacttacatcgaatctggcagcgttgaaaacaagactctcgcaaacagaattgttgtctgtaacgaaaacataaacatcggtagcaaacttcatcaaatcagatccaccggagctgcagcagtagttttaataacagataagttacttgaggagcaagacacaataaaattccagtttccagtagcattcatcggctcaaaacaccgagaaactattgaaagctacgcatcaagcaacaaaaacaacgcgaccgcaaagctggagtttcgtaaaacggtaatcgggacaaaaccagcgccagaagttggcacatacagctcaaggggtccattcacaagcttccctcaaatcctgaaaccagacattctagctcctgggacacttatactctctgcttggccgtcggttgagcaaatcaccggaactcgagcactaccgttattcagcggattcaatctcttaaccgggacatcaatggctgcacctcatgtagctggagtcgctgcgcttataaagcaagtccatccaaattggagtccatcggctataaaatctgcaattatgacaacggctttgactttagacaacccattagccgttggagcagggcatgtgagtacgaacaaagtcttaaaccctggcctaatctatgatacaactccacaagatttcataaacttcctttgtcacgaggcaaaacaatcaagaaaattgatcaatatcatcacgagatcgaatatctccgacgcttgtaaaaagccatctccatatctcaattacccttcaatcattgcctacttcacgtctgatcaaagcagtcccaagatctttaagaggacattgacaaacgtgggagaagcaaagagaagctacatcgtgagagtgagaggcttgaagggtctaaacgtcgtcgtagagccaaagaaactaatgttcagcgagaaaaacgagaagctaagctacactgtgagattggagagtccaagagggttacaagagaacgtggtttatggattggtgagttgggttgatgaagatgaagctgagtttgaagtgagctgttctgtggtggccacgagccttgtccaagagtct

SEQ ID NO: 163525 - DNA, 1116 bp, Arabidopsis thaliana landsberg
cagtccgatcttccacatgatttggtggaggagattctctctaggcttccgttgatatctttaaaagcaatgcgatctacttgcaaaacctggaacgttctatccaaacatcggagctttgcaaataagcacatcggcaatgtaaccgcatcagggaaaagagatttgataatgattaaagattgtaaggtttattcaattggcgtcaatctccatggtattcagaacaacaacaacattattgatctatctataaagaataaaggtattcttcacctagaaaatttagatctaatattcaaggaaatattcaatgtctttcactgcaacggtttattgttgttatacggaagcatcactgatgatagtattaggcttgtggtttgtaacccgtattgggggaaacgtgaatgggtcaaacgcataaataattttgcaagttttgacaaacttgctttcggatacgacaaatcttgtggttgccacaaaatcttaagggttttcgatagttaccctaatagacttgaaatctacaatttgaggtctaattcacggatggtttctagtttccctcttaaatgggatatagcgtttatgcaagatggcgtgtctttgaagggaaatacttactggtatgctaaagatagaagatcagaagattgttatttaatatgctttgattttactagagagagattcggaccgcgtctgcctctacctcaacccttcatcgatgaatttttggggagtctatatgtggtaagagaagagaagcttgcggtgttagtaaagcggtggcggcgtggcaaatctgagatcgatatttgggttacgaacaagattgagcccgatgaagtgtcgtggagcaagttcttaaaagttgaaatgaaactacgtgttctgtcttggaatttcttgattgacaaggaaaagaaattcgcagttgtttttgataaagacaaggcaaaggggtttaaaaccaattacgacatagcttacgtcattggagaaaatggttattacagaagagtggatctccgtgaatctccaaacaaaccactttgccgtattgtgtcttgttatgttccaagttgtgtgcaaatcgagtaaaccagg

SEQ ID NO: 163526 - DNA, 2612 bp, Arabidopsis thaliana landsberg
gaatcagttgctgcagggatacagaatgtgatacaacgccataaacaggtattccaacttcccaaaggactaccaccctctaggaacatggagcacgccattaacttgcagtcatgcacaacacctatcaactccagaccctatcgttattccttcacacaaaagaatgaaatggaggcattgatcagggaaatgttacctgtagagattatttggcccagcataagcccattctctagtacagtgctattagtcaagaaaaaagacgggtgctggaggttctgcgtggactaccgagcactcaacaaggctactataccggacagatatctgataccagtgatagaagagctattagacgagttgcaaggcgctactgtgttctcaaagctggacctgaaatatggctaccatcatatacgcatgagaaaggaggatgtagagaagactgcgtttaggatacacgaagggcactacgaatttctggtcatgccgtttggtctcaccaacgccctagcaacgttccaatcggtgatgaatgatttattttgaccctacttccgaaggtttgtcttagtcttcttcgacgacatcctagtttccagtccgaccgtggagttacatgagaagcacctagagttagtgatggaattgctggaacaacactagttctatgcaaatgaaaagaagtgcagtcttggcagtaaaaaaaatctcttacctgggtcatgtgatatcgggagatggagtttcagctgacctagagaaagtggtagccatggtgatatggcctcaaccaaagaacataacagagttgagggtttttttgggactcactggatactacaggaggtttgtggctggttatggtaagatagcaagaccactaacgtcgttactgaaaaaaggcagttttgagtggtctatggaagcaactgcagcgtttgaaaagctcaaagaagtggtcacacagctacccactctagcgttaccagattttggaaaaccattcaccatcgagaccgacgcttcgggagaaggaataggggccgtattgtcacaagggaagcagcccatagcctttatcagtcaaggtttttcgtcaaaagggaggatgaaatcagtctacgaaagggagctgctagcaattgtgttttcagttgacaaatagaaacattacttgactgggaagaaggttattataagaactgaccatagaagtctcaaacattagctaaaccagaaagcgatctcagcaattcagcaaagatgttttatctagacatcctactactactcagctgcttaatttggttcttacagctcctgcgaatttggatagagaggagctacaaagacaggtattacatgaccccgtcttatctgtcattgtgggagagttagaaaagggagaaggttaagctgacggttatcacattaaggaagggactttgtacaaagaagggagaatcgttataccccaagattcaccaatcattccaaagctgctagagatgtttcattctagccacactggtggccatggcggagtgctgaagagttttaaaagactcactagtgaagtctattggaagggaatgaggaaagatttggtggagtatattaagggatgtcaagtctgtcggcaaaacaagtattctactcttactgctacttgtttactttcccctttacccattccaacgcagatttggtcaaatatcagtttggattttattgaaggccttcctttatccaaaagttttgatgttatcttggtggtagtggataggttaagtaaatatgcccacttcatacctctcaaacatccctttacaacaagaacagtggcagatgtgtttctgaaagaagtggtgaagcatcatggatttcctgagacgatggtatcagaccgtgataagatattcgtgagtaatttttggtctgagttgttcttagctcaaggcacggcactgcacaagagcagcgcgtaccactctcagacatttggccatacaaaggtgctcaacagatgcttggagacctatctacgttgttttgtgagtggtaaacccaaactctgggttcaaatgctgatgtgggccgagttctggtacaacacgtcatttcatacggctattcagatgacaccattccagacagtttacgggagagaacccccaaggttcttaagattcggagatgtcccaacgacgaatgctcaggttgaagagctgctaaaagagcaggacgcattgatcaagacgctgcgagaaaatctgcaattagcacatgcgagaatgcagaaaagtgcaaacaaacatcgccgagagctgcaatttaatcaaggagattgggtctatttgaagttaagaccttacaggcaatccatagtggctcagcgtcgtaatgagaagttagctccgagattttttggtccttatcaagtcattcagcggattggaaaggtggcatacaaactgcagcttccacaaggcagtgcgatacatccagtcttccatgtgtctctgctgaaacaagcactgccttcttgtgttcaagtgcaaacgcttccagaaattttgaattcaaacttggaatgggagactgaa

SEQ ID NO: 163527 - DNA, 1811 bp, Arabidopsis thaliana landsberg
atagatgaggctgaatcttcatcttctagacgagaaagagaacatagagaatttgataacttcaggagaaaagctgagatagctcgagggaagagagcaatgagagagaggtatgagctgatagatgaagagctggaggacgggtaaatgcctgagcatactcacaaagccacaaaacttatgcacaaacctgatgttttgccatctgaggagtatataaggctcttcaagctaaacgagttctgctcgactacgctggcacagcttggattactagaggatgttcatcacatgcaccagagttgtcacctggacactctgatggcttacccataaggagcctatgaagaagaaacgattcaattcctctccacactgtggagctttaccagggtatgacctctgatgatttggaaagtgaaggattgggattcttgcgattctctgtgtatggtcatgagtataggttatctatcaagagcatgaaaggattgtttggtttccccagtggaaagggaactaaacccaagttcgagagagaagagttgaaagacttgtggttaaccattgggaatgatatagcgctcaactctgcgaggtctaagagcaatcagatacgtagccctctcatcaggtacttccagcgttctatagccaatgtactctactcccgagagatcatagggactgttactaattctgatatggagatgatcgttatggctctcaaaggcactctccgccaaactaagaacaacatgtctctccaaggtgaaatcaatgacacacctctctctgtacttattctgatccacctgtgtggatacaagagttgggctgtcatcaataaccacaagagagcacgaggcgctctgtgcataggtggtgttgtgacaccgattctgatcgcttgtggagtcccaatcacatctgatggacttgagccacgggcaatggatatcgagcatctacgtcactgcgaattcctggagttcgcaatggttgggaacttgcaccggttcaggtttgagcactctacagataagagagctagcatccttctccctagcactgaggttacacggataatagagggagataacattgattttcggcctgagattggaaacctctactaagagaacgctccgccattggatgaggatgatcttatagaagaagctgctgaggatgggatggatgaagacagagtagtggagttcgacactagcatgtatcattttgatgaacatgtacctccagcgagggagagcaaatgctttagtgaggctcataggaacaacagtaagctgcagaggtggtgcaagaagcaggataagctgctcgccaagtgtttcaagactatcaagtttctgacagataagttgagctgttcctcttctactacaactattttgcagggacatcctcctctagagatgccatcgaggagatttgatgagcctgagcacacgcctgagcacacgcctgagcttagtgagcagagagtctcacttgtcccggctaggcattcgtcattcgactcccgggagcactagagaagaaggatggctacactcactcgatctagcagcagatcacgcctaattcactcgaggagatcactagaccgcggtgctggccgcagcagaagaagagaggtcgagtatcctcagagcggtgctggccgccaaagagctgatgaggtcgagtacccacctactgaagctgataaaaaacagggcggcttgtctatggcctgagagcaatcacaagcagccattgatgacaaacttaaatcattcttcgac

SEQ ID NO: 163528 - DNA, 811 bp, Arabidopsis thaliana landsberg
ggaaacaactcctctttcattggcccagaaatcaaagctctgaaagcacaagtgtggaaagtgcaatgctcgcctaagttgcgccattttttatggcaaatattagcaggctgcgtgccagtaactgagaatttacggaaaagaggattaaattgtaattcaggatgtgtcagattggcactatagaggaaacaataaaccatactatttttcagtgtcatccggtaagacaaatatgagctctttctaagattcctacggtcccacgtttttcccacttattaagtttatgcaaatttggattttattctaaagaatccctttagaatttgattcatccgcatatccatggataatttagaatactggaaagcaaggaatgaaaaagtgtttgaaaatgtggataaggacccgctagacgtgttatgtctagaagaaaaagaggctcatttatggcagttagctcaagtagagctcaatactgaaaaccaagtctcctatcgatcggaaaaccaactttgggtgagggatatctcacaagacattgtctactctggctgtcgttgatttgtggacggttcatggaaagaaaccgacaagttttcatgtctaggttggctttgtacttcatttaatggaggtgacgtcaacaatgggagctgctaatctgcgtaaaagtctttctcctctccatatcaaagtcgaagctttactttgggcaatgaagtgtatgattggagtcgacaaccaagaagtagcttttttaacagactgttcagacctgatgaagatggtgtcttctccaaccgaa

SEQ ID NO: 163529 - DNA, 1003 bp, Arabidopsis thaliana landsberg
atgaggaaaagaggaacaaaaagaaagattgaaattgagaaacgcatgactaaacaacaacgatccgtcgcttgcagcaaacgccgtcccacactcttctccaaagcggctgatctttgccttctctccggagccaacatagccgtttttgtaacttctcctgacgagaactccgatgtcgtttattcattctcgggctactctcatgcctctgaaattgttgactgttacctcaacaacaagtctcctcccaagactactattaaccctgaatcagccaagttttggtgggaagagcccgatctttacggtgattgtgacgatctgtctgagttaagaatcatcgaagatcgtctgatgagaacgaagaagcatctcatggattgtcttgagaagaaagaaaaatcatactctgtttctaaatctgatcaaaaccctaagaacaacggtgggtcttcttcttcttcttcttcttcttcttcttctcaaattgcttctgattttggtcaaaaccctagtacctcttctccgttttttgatcaccactcttactcctcgcttgagccttcgtcacaagttactacttgttttgatcaaaaccctattttctctgttggcagcgagtcatcatctgatcaatttcgttacttggtgaatgaagatgctggatttgttgactgcttatgtgaaacagaggaggagaagaacagaatgattgtaccccaagaaacacaaacacaaccgatgttctctgaggaggatcagagcttttgggaaaacctagatgtcgacgacgtgtttggtctttttaaggacgacaacaatcttgaggttcctcttcaagatcattcctcaaccaacgaagacgacgagttattgatcgacataagtgaatacttaagcgaagaagcaatggaatgcccatgttttagttagttctcacagcttgattaagcacgatctcatagttaattacggttttagttagttcattaggtaatta

SEQ ID NO: 163530 - DNA, 675 bp, Arabidopsis thaliana landsberg
acgggtttacgtttttggcgggaaaattaaaggtttacgtttttggcgggaaaattacgggttgatgtttttggcgagaaatttacgggcttacgtttttggcggaaaaatctaaggtttacgtttttggcgggaaaatcacggatttacgttttttggcgggaaaattatgagtttacgtttttggcgggaaaattacgggtttacgtttttggcgggaaaattacggattaatgtttttggcggggaaatcatgggtttatgtttttggcgggaaaattacgggtttacgtttttggcgagaaaatcacgggtttacgtttttggcggaaaaatcacgggtttacgtttttggcagaaaaatcacgggttttcgtttttggcagaaaaatcacgggtttattttttggcggaaaaatcacggatttacgtttttggcgggaaaattacgggtttacgtttttggcagaaaaattatggatttacgttattggcgggaaaatctcgggtttacgtttttgacgggaaaatcacgggtttacgtttttggcggaaaaatctctggtttacgtttttggcggaaaaatcacgggtttatgttttttagtggaaaaattacgagtttactttttctcaatgtcatcgcttgtatatttaagatatttggaaaaatat

SEQ ID NO: 163531 - DNA, 1072 bp, Arabidopsis thaliana landsberg
atggctgacaatctgagaagggctgttcaggatatcaatctgggggtggatgatgcataggtagcactaccactggaggtagtggcgaatgcagaggcggaactccggttcctcatcatgggacgaccggtcatgccacgaagacagaacctgagatcaatcattgcgtcgatgcctcgcgtgtggggacaattcggtctgtttcacggtcggatcgttgggggaaaccaattccaattcattttcccgagagaagagtcactggatctggttatgagaagaggattgtgggccttcaacgacagaatgcttatccttcaacaatgtaatcctctttacaaccaacctctaatcgatttcatccctttctgggtccagatccgagggatcccatatcattaccttaaccgtgaagtcatctctcacattgggagatcgcttggaaacctcatggaggtggattatgatgctgaatctgcggcgcgtgtggaatttgtcagagttcgaattgattgggacactcaactccctcttcgcttccaaaggcatttccagtttcaggctggagaaaacactctgctcaggttccggtatgaacggctgtgaggtttctgtgaagtttgtggtttgttaactcacgacaccggcgcctgtgtgactcagaacggaggagaggaacatcactctgatgatgacaatgatgaagacgatcttccccctgcggagcaccacaaccaaggagtcataattcgtgagatcaatgaagatgaggaaaacggagttccagatcagaatgtccacaatgctaatgagggggcagaggatatggatgcccatcatgaagccgtggaagatttccaggatttggagccatgtcgttactccacgtaccatggagagatggaaacaaataatggagtgaacagagactatgttcgtgaggatgtggcagcggataggggcaaacgcaagagagaggacaccatcgaagaagatgaagaacacgagcctactaagatggtgatccgtgaggctggggaaagcagtggttgctctggagagacggttcagc

SEQ ID NO: 163532 - DNA, 2439 bp, Arabidopsis thaliana landsberg
tgcagcgctatcatacagaagaagatcattcctaagaagcttagtgatcctggtccattcactttaccatgctctttaggtccattggctttcaatagatgcctatgcgatttaggagcatcagtcagtctcatgccgctctctgtcgccaaaagattggggttcactcaatacaagtcctgtaatatatccctcatcctagctgacagatcagtaaggatccctcatggtttgctcgaaaacctcccaattaggatcggtgttatggagataccaactgactttgtagtcctggagatggatgaagagcccaaggaccctttgattctagggagacctttcttagacactgcaggagctatgattgatgtcaagaaagggaagattgatctaaaccttggcaaagactttaggatgacctttgatgtcaaagacacgatgaagaagcctaccatagaagggcaactcttttggatcgaagaaatggatcagttagctgatgagttactggaagagctggcagaagaagatcatcttaacagtgctttaaccaaaagtggtgaagatgggtttctgcatttggaaacatggggataccagaagctgttagactcccataaagcgatggaagaatcggaaccctttgaggaattgaatggaccagcaacagaggtaatggtaataagcgaagaagggtcaactcgagttcaacctgcactctcgaggacgtactcaagcaaccactcgaccttgtctaccgacgaacctagggagcccatcattccaacttcagatgactggtctgaacttaaggcacgaaggttgatctcaaaccgcttccaaaaggtctaaggtacgcgttccttggtccaaactctacttaccctgtgatcattaatgctgagttaaatagtgatgaagtgaacctactattatctgagcttagaaagtatatgagagcaattggttattcattatccgacattaacggaatttcacctagtttatgcagccataggatccatcttgaaaacgaatcctattccagcattgaaccacagaggaggttaaatcccaatttgaaagaagtagtgaaaaaagaaattttgaaactgcttgatgctggtgtcatctaccctatctctgatagtacttgggtttctccagtgcattgcgtccctaaaaaggactgttgtcaaaaatgaaaaagatgaactgatccctactagaactataactggtcatagaatgtgcattgattataggaagttgaatgctgcatctaggaaagatcattttcctttaccattcattgaccaaatgcttgaacgtttggctaatcatccatattattgctttcttgatggatacagtggtttctttcaaataccaattcaccctaatgatcaagaaaaaaccactttcacgtgtccttatggaacttttgcctataagagaatgccatttggtttatgcaatgctcctgcaacatttcagaggtgtatgacctctatattttcagacttaattgaggagatggtggaggttttcatggacgatttttcggtctatggcccctctttctcctcatgtttgttgaatcttggcagggtattgaccaggtgcgaagagacgaatcttgttctcaattgggaaaagtgtcatttcatggtgaaggaaggcatagtgttgggtcacaagatatcagagaagggtatagaggttgacaaaagaaaagttgaagtgatgatgcagttgcagccaccaaaaacggtgaaggacatcagaagcttccttggtcatgctcgattctatagaagatttcttaaagacttctccaagatagcgagaccgttaaccagactattttgcaaggaaaccgaatttgaattcgatgatgactgcctcaaatcctttcaaaccatcaaggatgctttggtatctgctccggttgttcgagcgcctaattgggactatccatttgagatcatgtgtgatgcatcagattatgcagtaggagctgttttaggccagaaaatagacaagaagcttcatgtcatatattacgccagccgaacgttggatgacgttcagggaagatatgcaacaactgagaaggagcttctagctgttgtattcgcatttgagaagttcagaagctatttggttggatcaaaggtaactgtctatacagaccatgcagctttgaggcatctgtatgcaaagaaggatactaaaccaagactgttaagatggatacttttattgcaagagtttgacatggagatagtagataagaaaggcattgaaaatggtgcagcggaccatctatcaaggatgagaattgaagaaccccttccgataaacgattcaatgccagaagagtagctcatggctgtagagttcttccgaaagagctacaatgggaaagagttgcac

SEQ ID NO: 163533 - DNA, 1760 bp, Arabidopsis thaliana landsberg
  unsure (1)..(1760): unsure at all n locations
acagtgaagatcaagatggggaggatttaagtctcgagcaaccactcgaccgtgctacttgacctatcttcccagcagtatcatcaactcctccaaaacccgttgctgtcaaaaacaaagaaaaggtctttgtccctcctccctacaaaccgcagcttccatttcctagtcgtcacaagaaagcgttagcagacaagtatagagctatgtttgccaagaatattacggaggtcgagttgcggatacctcttgttgacgctctagcgttaatcccagactctcacaagtttttaaaagacttgatcatggagagaattcaagaagtgcaagggatggtggtattgactcatgaatgcagcgctatcatacagaagaagatcgttcctaagaagcttagtgatcctggttcattcactctaccatgctctttagatccattggctttcaacagacgcctatgtgatttaggaagattttcatggtatgctgatcacgtcaattacttgccatgcagagtagagcctcccaacctgatcaattatgaaaggaagaagtttttcagagacatacaattactactgggatgagccttatatttacactctctgtaaagataagatctacaggagatgcgtctgagaagatgaagtagaaggtatcattctgcattgccatggctccgcatatggtggtcactttgcgacattcaaggcactgttaaagattctgcaagcatgcttttggtggccaacaatgtttaaggacgctcaggaatttgttttaaaatgtgattcatgccagaggaaaagcaacatcagcagaagaaatgagatgcctcagaacccaatcttggaagttgagatctttgatgtatggggaatcgattttatgggtccattcccatcttcatacggtaacaagtatatactggtcgccgtagattatgtatcaaagtgggtcgaatctattgtcagtcctaccaacgatgcaaaagttgtgctgaagctgttcaagaccatagtcttccgaagatttggagttcccaaggtagtaataagtgatggtggaaagcatttcatcaacaaggtttttgaaaaccttctgaagaagcatggagtaaaacacaaggtcgccactccttatcatccacatacaagtgggcaggttaagatttccaacaggtagataaaagcaactatggaaaagactgttgggattacaaggaaagactggtctacaaagctcgatgacgcattgtgggcttacaggacaactttcaagacccccattggtacaactcctttcaatcttctctatggaaaatcatgtcacctaccttttgagcgcgagtacaaagcaatgtgggcggtaaaacttctgaactnnnnnnnnnnnnnnnnnnaggagaagcgattgatccaactcggtgacctcgatgagatccgtctagaagcttatgaaagttctaaaatctacaaggagagaaccaagcttttccatgacaagaagatcatcactaaggatttccaggttggtgatcaggtgctgctattcaactctcgcttgaaactctttccaggaaaacttaaatccagatggtctggccccttctgcatcactgaggtccgtccttatggagcagtcactctagctggtaagagtggagattttacagtaaatggtcaaaggctcaagaaatacttagcagaccaatccttccagaggtgacatcggttcatctccaggagcttcttgatgat

SEQ ID NO: 163534 - DNA, 650 bp, Arabidopsis thaliana landsberg
  unsure (1)..(650): unsure at all n locations
atgtttaggatatttttgcatgcatgttgcatatttgtgttgatttcaggtgatttggagctgttggcgagctaactggaagaaccggacctgatcatgtcaaaccactcgacnnnnnnnnnnnnnnnnnnnnnnnnnnnnnnnnnnnaccactagaccacttggtcgagtagaagacctcagcacttcacgtcaccactcgaccaccaggtcgagtaccgccaagagagacactcgatcacatcactcgaccccctggtcgagtatcatcacctccaccacctgaccatcactcgatcacaccactctaccaagaagtcgagtatcaccatcaccatcactcgactacatactcgattgccagcttcagagtcttctccattccgcactcaaccagacactcgagcacaaggaagaaaagaagactccagctaatcactcgaccactcactcgattacctgggtcgagtactgttcttaatccgtcccaatactgcgtcgttttgagtattagggtttcagaaatatttcgctataagtagcatgtactttacatttttgttaatctaagttttattctgcagacactgtgtaatccggatttctcttaatctattaagtattcagcatttgctttagattttgtttac

SEQ ID NO: 163535 - DNA, 1185 bp, Arabidopsis thaliana landsberg
atgatctccgaagttgaacaaccaaaagagaagagaagtttgagttctgagccaccgtcgttgatgtcactcccatacgaaatcatagagaacattcttgcacgtatctctaaatggagttatcctaatctctctctcgtctccaaaagtttcctttctcttctctcttccccgcaactatacaagacgcgatctgaaatcggaaccaccgagccatgcctctatttctgcttggaatcagctaaccattcatctccacagtggtacactctttggatgaaacctgatgaaaccctcaccggtaccggtactatacatgactattcgttgattccgctaccttcgtcttcaccagtacttcgtacatccacggtagcggttggttcggaaatctacgtaatcggtggacacttcaaccgctcttcctcagtgcggatatttgattgtcggagtaacacgtggcgtgacggtcctaacatgacggtagctcgatcggatccagtcgcggttctcatcgaccagagaatatacgtcttgggaggtcgcgagatggacgagtctgacgattggtttgaggtgttcgacatcaagactcagacttggagagccttgcctagttttagggctggccttgagttacgccgctacattgtgtggcccaacagatactttccgcgtcttggtgatagtcaaactgcagtcagattaattaacgtcaaccccaatgctttggaaggaaagctttacgtagcggcacagataaatgactacacttacgagcccaaagatgatacatggaaagttgtaagcaaatcaagtataagaagagtaaaggtttggtgtgtgatagagaatgtaatgtacgcttgccatgacgtctttctgaggtggtatgattacgaggatagacggtggagagagatccagggtttggaagaattgtgttaccaccctacgaggggtttcagtggggcggaaagaatagttaactatggtgggaaacttgtagttatgtggcgtccggtgcaaagcgacggaaaagataaaattgaaatttggtgtgctcagattgcgttagagaagcgtagtaaagatgagatctggggtaagatagagtggattaattctgtgcttacggtccccaagttgtgtgacttgtgctacagttgtgtggttgtttcgatt

SEQ ID NO: 163536 - DNA, 984 bp, Arabidopsis thaliana landsberg
atggatgcaacgtcagaatcagaaagaacaagcttggacctatctatttcatcacctaaacaagcttactacgtagagagtccttcaagcgtgtcccaattagacgatggtgaaaaatcctcatcctctgcttcgcttattcaggttcataccccaaactacaccattctcagtgagtcacgtctctcctcttcgagccgtacctctaatgggacaagcggtatgggatttcgatggaaaggaagctcccggaggagtaatatgtattggccggagaagccatacacgattaatgaagatgaggtttatgatgataacagaggattatcagtgggacaatgcagagcggttttggtaatattaggtactgtggttgtgttctctgttttttgctctgttttgtggggagcttctcatcctttctctcctatcgtctccgttaagagcgttgacatccatagcttctattacggagaaggaatagacagaacaggagtcgccaccaagattctaagctttaacagttcagtgaaggtgacaatagacagtcctgctccttactttggcatccatgtctcttcttctaccttcaaactcactttctctgctctcacactcgccactggtcaggtactctgtgttttcatatctcactcattgctcctatactgtcatcatcgtaatctgatattcacattctggttgtgaagctaaagagctattaccaaccaagaaagagtaagcacatatcaattgtaaagctcactggcgcagaggttcctctgtatggagcaggaccacacttagcagcttccgacaagaagggtaaagctccagtgaagctggagtttgagatcagatcaagaggtaatctatcggggaagctagtcaagcacgaagcacgagaatcacgtagcatgctctttcttcatctcctcctccaagacttccaaacccatggaatgcacttacaagacctgtaaa

SEQ ID NO: 163537 - DNA, 1058 bp, Arabidopsis thaliana landsberg
aagatgttcgatcttccaattgatatggaggaggaggtgctctctagggttccggtgaaatctctggggaaactgcgattgacctgcaaaaagtggaacactataacgaaaagtgagagctttttaaagaagaaacagaggaatggaattgaggtggtgatgatgatggactatagagtttccttgatgagcgtagatctactctctccgtctatagatcctataggtaatctcaatgcagatggaatcaaaatatctaaaatctttcactgccaagggtttattcttatgcatcaacaaggacagagacaaagactcttctagggttgttgtttggaacccttatttgggacaaacaaggtatatcgaattacctagaaattctatctaccacaagtgcgtgaagtacgctctcggatacgagaaaaagaatcacaaaatcttgagattcgtgaatgagtacttggagaccagtagggaccgaattcgtgagcttcagatttacagtttatactccaattcatgggaggtcattgatgatttcactccagactggtatattttgtacaaacacagtggcgtgtctctaaagggaaacacttactggtatgccctagaagagatcccatttcatggtctaccatcactagatcaccctgattttctactatcctttgatttcaagatttgaaccgcgtctgcctctgcctttccgagccgtatttggagatactgtgacgcttgctagtgttagagaagagcagcttgcggtgctgtttcaccgggcatccgtcgtcgagatatggattactaataagattgagcctaatgcagtgtcgtggagcaacttgttatttgctgttgatatgaaaccagtcgctggtttttggtttcctaatgtcggtaggagtttcttcgttgacgaggagaagaaggtcgcggttgttcttgataaagagataatagacaaatgtcacctttccgctcgcaatatttgttacatcatggaaaataatggaatcttgagtaaagtggaccttggaatgtctgtagacaaa

SEQ ID NO: 163538 - DNA, 5361 bp, Arabidopsis thaliana landsberg
tcctccggcttcgcgattgagtgaaactgagctgctagcttctccttgtatgcgatagtgatttgccctggcagggctccgaggctgcgatagaacacttttgcttaaggcgtcattggtcattctgactttctgttctgtatctccactgtttgaactccaaaagcatccaaagtacctgaaaacaaccaaatatgcagtggacatgcaatcctaatgcaaaatcgtcctaagtatgcaaaacacactaaaacgactcctaatgagatgaaatttggatgaaacaatgacaaaatggtgaagaatgaatgcctaaatcatgcaaattatagacatatcactaatgaagagcatttccaaatgcaagaaggggggaatgaccaaactgaagagttgtgctacatccagtagcaaggagggttcaacaaggggtacaacaactacaaactcaacccaaacctctcctacagaagcactaatgtagctaacccccaagatcaagtgtatccaccacaacagaatcagtctaagccttttgttcagtacaaccaaggttacgtccctaaacaacagtttaatggaggctaccaacagcagaatccaccacaagggttcactccacaatcacaacaagccccaacagctcaagatcctgacacaaaacaaatgcttcaacagatcatccaccctaaacaacagtttaatggaggctaccaacagcagaatccaccacaagggttcactccacaatcacaacaagccccaacagctcaagatcctgacacaaaacaaatgcttcaacaaatcatccaccctaaacaacagttcaatggaggtttccaacagcagaatccaccaccagggttcactcaacaaccacaacaagccccatcagctccagatcctgaaattaagtaactcattcaacagatcatccaaggacaagctactggagccatggcttttgaaaagaagatagttgaatcacataacatgatcgattgttcttacaacgatcaaaatgtcaagttcgaagctctgaattcaaaaatcaaatatgtggagagaaaatttgcatcaacctctgctccgaagcatcctcagcaactaccagggaaagcagtccagaatcctaaggactatgctactgctaatgctatcaccatccaccaagaagatgagtctccaccaagtaatcagactctcaatactgagaacagtatgattcaagaggggggggattcaactcacattgttgcacctgctaccccactcagcaattcatctggactatagagcacacacctttgctgaatactcaacattctggaaaaagattcaaaattaaaaaactcaagaaagagcagaatcaaaagatgattaggagtgccagcactcaagaaacatacaagaagaaagtcatcgaagaaaagcttgatgatcccggttcattcactctaccatgctctctaggaccattgacattcaataggtgcctttgtgatttgggagcatctgttagccttatgcctctctgtacagctaaaaggatagggatcatggaattcaagttctgcaacttagccttactcttagttgacggttctgttgcacatcctcatggtctaatagaaaatctgcctcaagattggaaatgttgagatacctacagactttgtggtataggacgtagatgaagaaggcaaggatcccatgatcctaggcagaccattcttagcttcaggtggagcagtcatagatgtcaggaatggaaaaattaatctgaaccttgaaaaaggcatcaagatgaagtttgacatcagagaagcttcaaagaaatcaacaagaggaggtcagagttttggaattcaagatatggatgttgatgaagaaacataagctgaaacctcaccaaaagtcaactatacttctcaactcagcaagctgaagagaacttttgaccacaagaagagagcaacagaaaggctatctcagactgaagatcctacagaagatgattggtatgagatgagaaaaaaatttaaatgtcaaagcagagtcatagaggggttatcttcaagagtgatgaagctgaaagatcaactttgggattttgaaaaaagagttaataagtattcaatgagtatttatccagagaagatggaaattgcactagctatccaagaggacaatgattttacaacagaatggtttgcaccagaagatcagaaaggagttcattcagaggaaggaagcttagaggatgagttgttgagtgaggaagaaacccctattgcgacttattctcctgaagtgcctaaacagcccatcaatccctctactgaagaagaagacttaatttttgattctgttgctggagaacttttggaactcacgatagagtacaaagctcaagaggataccattggggagctaacttacaagatggaaggactgaaccatgcaatcttggatcttcaagaaatggttaaaggctaccctagttttgaatttgaggattggtcaaaggagcctggttcagaagaagaagattactatgctgatcagaaagaagcttactttgaagaaaaattaaatgagtactcatctttccatatatcaagagaggatgcagagtatgattcaagcactgaaaatccacccactgaagatgaggacttctctgttcctcctttcaacctttttttgactaagctttgtaagagtcaagcttagtgacttaaaccaagctcacttgggaggaagtcacatgtctacctatgtatataactttctatttccttgttatttttgatgttttcgtttaagtgtgtcaggtttatttcattgactctgaggaagtcaacggtcgagtaaattcaaaccaagtcaagaaccatctcaaccaatgatcgagtaaaatgaagaggagtgttctcagccattggattgaatgaccaaatgagagaaatcatccccaccgtttgatcgagtgatcaaaagcaaagcattctccatcgtttgatcgagtattgcgcatttcaaaaggatgctcgaccatttactcgagcttaaattatttagagaccaaggcataagtcgcgtgaccccacttgttcccccatcatttcactactcgatggacaaaccatttacccatgccccacactatttacaactcgcttttctatctcttccaaagcaaaccaaagaccaatctcctccacccattgatttcgacaaaccctccatgaaactctctctttcatcatctcgttttcgcaaccccctcacaaagctttgaagtcttcattccaaacccttccccaaaacgctccctatcactctttaagaattcgttccccttcaccaatacttcaccaaagttacttgaccactccaaagtctttcctcaaacattcaatcggtttcaagctaaaaattacatcaccaaagaaaccaattcctttcttctttgatacctcttggagaattgttgttgtttgccctgtcgaagctcaccaccaatctccatggattcaagaaggaagagttcatctcgggcaagaagatcctctgctgataatgaagaagttgaggcgtttgacatgagtggcatgactgaacgccaaattcgccatgctcgccgtgctcaaagatcaagctcgattcaaggaggaagctcaagccgctcaaccatgcaaagagaagaagtagctcggggaaagagggtcgttgaagctgaagaagaacaccatgaagaggcaccctttgaagaagcggtttctgaggaagaggttgagatcattggggatgatacaccaacccctgttgggagaagaaaccgaccaaggaggaagagagaaccaacacggagcgagtactatcaatatttgaaggagttgaagtttgagggaactagataccctcgtaaggaaatgatgcaagagcttggtatttgtggtgatgtggaatacttgatggaattggccaatcttgcaacattcatgagctgccaatgtgggggatacaaagaggagagctgccaactccttgcaaccctcaaggttcatttttgtgttgatgattcggagaaagaagagagaggtggtcttggttacataactttcaaggttagggatgtcgagtatactcttgatatatgccatcttgataccattttcgtgttcccaagtggagaaggaatccgccaaaactatgatcaagaagagcttaaatctctttggaaaacaatagccggtccgaagcccttcttaccaaccaagagtaagagttcttcaatccgtaatcccgtgattagatacctccaccaatgcttcgccaacaccctctttccaaataaggctaccagatttgttagtgaagaggagctatgcatgatagaccaatctttggtcttcattttgagggagacaagagatgggaggaagatgacgggtgataagagcggacacttcgttgagtgttgttctcttggatcaccttttgagctacaaggagtatgctgcaaccatccatcgctcgggaattcgcagaagtctttgtgttggtggtctcttaacgccaatactgggagctgtggggatggaattcggaatccctgacgtgttccccaagttcattgacctcgactatctcaaggggaaggattttcttgcgaaaaaaactccgacagatcgctatctcttcaagttcaaccatccggagcttggaccttctctgttacccctaccatgcgagaaccgaactttggtgaagacaaggcgcaacatcaatttcatgccatctccctctgtcttgaacatcaacattggagtaggtcgagaagatgaaccagaatatagtcaagctgactatgagcaacaggagtatttcactcaagatgactatgagcagcaaaccgagtttgagcaacaaagcgagcaaccggagcaagaggcgaacgaattcgagcaagctcaccaaagagaaaatgcggatcaaggaggagatgagatagctgaagttcacaagaagctcggtgtgcttgaagagcttgggaaccttcacagcaaaacagtaaagggtttcaagaagaagatgagaacaatgaataagtcgctgaagagtatggctgctcaaatcaaggacttccagagcaagccaaggccaccatctccgacccccgaagtaagaagaagcggttccacaagctcagctgcaaggagggctgaaaggattgatcaaccccgagcttcatcttttgagcctcgggaagtgatctctgagttgagagagccaaggagtaggcagagacaagcttccacacgctcgaccaactactcgaccggacagaacgag

SEQ ID NO: 163539 - DNA, 2069 bp, Arabidopsis thaliana landsberg
  unsure (1)..(2069): unsure at all n locations
atgtgcatcgattacagaaagatgaatgctgctacccgaaaagaccatttccccttaccatttatcgatcagatgttggagaggttaacaaatcataagtactattgcttccttgatggatactcatgattctttcagatcccgattcatccagatgaccgggagaaaatgactttcacctgcccctgtggtacatttgatatcggagaatgcccttcggtctctgtaatgctcctacgacattttagagaggtatgatgtctatcttcacagacatgattgaggatatcatggaggttttcatggatgatttttcagtttgtggatcatcgtttgaggattgtagagaatctctgcaaagtgttagcgagatgtgaggagaaacatctagttttggattgggagaaatgtcactttatggttcaggatagaatagttctcggacacaggatttctgagcatggtatagaagttgatagagctaagattgagatatgaaaagtcttcaagcgcttgataatgttaaagcagtgaggagtttccgtggacatgctggtttctataggagattcatcaaagactttagcaaaatcgcaagaccactgactgctttactctgtaaagaagtcaaattcgagtttacacaagagtgtcatgatgcctttcagcagataaaacaagccttgatcagcgcactaattgttcagccaccagattgggatttaccttttgaggtaatgtgccatccccgtgattttgcagttggagcggttcttggtcaaagaaaggataataagtttcatgtcatctactatgcaagtaggactctttctgatgcacaagttaagtatgccacccaccgaaaaagagctccttgctatagtgtttgcatttgagaagtttagatcatacttggttggttctaaggtgnnnnnnnnnnnnnnnnnnnnnnnnnnnnnnnntctattggcaaagaacgatgcaaaaccaaggcttttgagatggattttgtttctacaagaatttaacttggaaattaaagacaaaaaaaggattgagaatggtgttatggatcatttctcagttgaggattgacaatgatataccaatcgatgactctcttcccgaggagcaactattggcaattcggcttttggatgcaagtcatgagacctatatgaaacttgaggaagtcaagagattgaaagacaattgtccatggtatgcggattatgttaactatttggcatgtgggaaagaacctccaaatttgagtagctatgaaaagaagaagttcttgaaagatataaaccacttctattgggatgaaccatttctttatactctatgtaaagataagatctatagaagatgtgtctcgaaagaagaagtagaaggaattttgctccattgcaacggttcaagctatggaggtcactttgcgactttcaagacggtcaccaaggttctacaagcgggtttatggtggccaacgatgtttaaagacgcacaagagttcatttcgaagtgcgattcatgtcaaagaaaaggaaacattagtatgcgaaatgagatgccccaaaatccaattttagaggttaagatctttgatgtatggggaatagatttcatgggaccatttccttcttcatatggaaatagctacatacttgtggcggttgattatgtgtcaaaatgggttgaggcgatagctagtccaactaacgatgcaaaaattgtattgaagctattcaagactataatatttccaagatttggtgttcctagagtggtaataagtgatggagggaagcatttcatcaacaaggtctttgagagtttactcaagaagcacggagtgaagcacaaggtcgccacgccttatcaaccgcaaacaagtggtccagttgagatttctaaccaggaaatcaaagctattctagagaaaacggttgggactacaagtaaagattggtcggtaaaacttgatgatgcattgtaggcatatagaaccgctctttaagactccgataggtactactccgttcaatcttctctatggaaaatca

SEQ ID NO: 163540 - DNA, 1085 bp, Arabidopsis thaliana landsberg
atagaagcttatatagctcatgtacaaaatcaagcgaagcaattcgacgagtttgagttaaccagaattcccagaggagaaaacacggcggccgacgccctagctgctctggcctccacatccgacctgaacctgaggagggtgatcccagtcgaattaatcgaaaagcctagcatcgagctcgacaaagaggaacatgcttttcccgtgcagagtgccgcgaattgcgaagatgcttcgaagtcgaatgacgtctcagacttggattggattcaaaatggatagaacccatcaaaagctatatatccgaaggaaaattgccctcggacaaatggaaagctcggaaactcaaagctcaggctgcacgtttcgttctagtagatgaaaaactctacaaatggcgattatccggacccttaatgacatgcgttgaaggagaagcagtttgcaagatcatgaaagaaattcacggtggctcgtgcggaaatcattccgggggaagagccttagccatcaaaataaaacgccacggattcttctggccgataatgatcaaagactgcgaaaagatttcaaaacgatgcgaaaaatgttaaaggcacgcgccaacaatccatcaaccagccgagctcttgtcatcaatcgcctcgccgtatccattcatgcggtggtcaatggatataattggacctatgcatccctcgaagcagaaaaaattagttctcgtcttgaccgattatttctctaagtggatagaggccgaatcttacgccagcataaaggacgctcaagtcgagaacttcgtgtggaaacatatcctatgtcgccacaggataccttatgagatcgttacggataacggctcgcagtttatatcaacccgcttccaaggcttctgtgataaatggggaattcgacttagcaagtcaacaccacgatatccccaaggaaacgaccaagccgaggccgctaacaaaacaatcctcgacagattgaaaaaccggctcgatgctaaaaagggctcgtggtccgacgaactcgaaggtgttctatggtcgcatcggacaactcctcgccgagccaca

SEQ ID NO: 163541 - DNA, 1280 bp, Arabidopsis thaliana landsberg
tttcacatactggtaatgatgaattcgtttccgaatgatgatctcgtttacgagatactcttgagactgccagcaaaatcagttgcgaggtgtagttgcgtgtcaaagctacggagatccatccttcgccatcaagttttcaccgagttgtttctagcaaggtccaaggctcgtccacgtctcttaattggtgtacaacaagacggtgagtggaggttttactcaacgcctcagtctcagaatccatgtgagaataggatgtcccctgccgatttccatatgaagttttctaaaggcataagcaattattcttgtagttatgcctctggtttgatttattttgatggtatgtgcatccgaaaggaggatgaggatgcaaagcatgtgttatgtgaccctctcacaggaaagtatgtgatcttacctgaacttagagtaggtgattcgtatagctatttagggtttgatccagttgataaggaattcaaggtattgttcatgactactcctgattatatagcttccaaggatctagatcattatattctgacattgggaactggggaatttaaatggaggacgatccaatgtccttttacccatgagcctttgtggacaaggatttgtatcaatggagttttgtattactcagctatgaattctgatggaaattatgtgatagtttgttttgatgttagatatgagaaatttaagctcgttgacacaaaatgtcgttctgaatttaatggattgataaactataaggggaaattatgtggggttaagttgaagtatgcttatcgtgttggatttcccgttaagttatgtatgcgagttctagaggatgttgagaaagatgaatggtcgacatatgttaaggttaaggttacgcataatctttccgttgttgggatgattgctaccggtgacattgttttgttcatgaaatttgcgtctaatccgttttatgttttctacttcaatccggaaaggaactctcatccaagtccaaagtgttgaaatccaaggtcttggagctaatcctgatcgcatagcttgcaacgcctttgtagattatgtagaggatcttagtgttaacgatgcaatgctgcaactcaactcaatccctttacaacaagactgaaatatcgtaaccataacaatgctggcatacatctagtgatctctccaagtctttgaagaacaagcatcagaacaagtatgaattcctagctaacaggctccatcactctattggcctaactattttgtattcttgt

SEQ ID NO: 163542 - DNA, 503 bp, Arabidopsis thaliana landsberg
ataactttttttttaagaagacgccatggataacgtcttattggtagttaccgttgtttcagttcagattggcttatcgataatgtcaatcattgcaaaatatgttctagataacggagatttctccgagaatcttgtttgctgagcgtctagttatcgcagctacaatactatcatccctttctcttgtatttgaatggtacgactaccataccttattgtttgtttctatgttttttttttattttgttttgtttcttgcgctcgtaataacttcaaaactataggaatacaagacctcaaatgactaccaagtgattcagttgccgtagaccaggtcactgcacgccaagaagattcacaggcatgatgaagacatcctaagaggagggctagtgcttgtgtccagctgcttgagttggagcttctatgctattcttctggtaaaaaacttgtagatcataatgtttctttaataattttacttagtttggcttggcttt

SEQ ID NO: 163543 - DNA, 885 bp, Arabidopsis thaliana landsberg
atgtcgaataaacaatcatctcagctcatttcattgcacaaagatggtttataccttctagaccttaatgaaaccacgtctttgaagctaaacgtgccctttacattaccggcccaaactgaaccagtctgtattctttcttgccgtggagtgatatgtctcaccctcaaagacaacaatgagttagctatttggaaacctacttcaaaaaaattcaagagagtatcgatgattaaaccgggtcaaaccaaaaatctttgggattcggttatgatcgggttttagatgattacaaaattgtgacgattatcgatcagaaaacctatatatttacgttcaaagaaagttcttggagagtaagcaaactaattccctctagtgattgcttcttcaaagagaggaccggtacggttgtcgacaattgtatgtattggatagcaaaccggttcaacaaagaaaaattcatcttatgctttgatttcgttaatgaatagtactcaaaactaaacgttccgatgatgctatcaggattggagttcaattcatggttagatgtttcaaggagagaactatgtgttatcaatcactacccaagtgtagatgacaatttatgtgtatgtcgacgagaaattagaagcggcaagaagattgcgagatgggatagcgacccgtggatgaatgtagcgggaaacgatgacgaacccgttgatattaggtttgtatgcatagcaaaaaacgatgaagtctttagtggtgcgatgtcgtagtaaagaagaagaggacaatgtttttgtgtacaataaggaacaaaacgagttcattgaagttttattttctagtcatttgaaagtgttgggatgtatgactaaacttatgtaactcctt

SEQ ID NO: 163544 - DNA, 1815 bp, Arabidopsis thaliana landsberg
agctctccagcggaaaatactcgatcccgaaagtcgagtaagctttctgcaagagaattctcgaggaacaaggcagatatcactcaagggaaaaagcccgtggggaggaggttggagctggtagatgaagactccgaggaagatatggcttcacccgaggaagatgatcaaacggagaaaggaggcgatgatgatttggaatcggagaaatgtgcaactcgaaatgagtactacaagctgctgaagcgcaatgagtttttaggaactcggtactctcatcccgggaccatggagagactcggcatctatgatgatgtagactacatgtttaagcagtgcagcctgaatattcacatgtttcggccaatggaggggtatgaggaagagaccattcagtttctttcatccgtggagttgctcttatatggagagtcagaggacgatgaaatcaggccagacggaagtttgggatacttggagttttgtgtgtatgatgtagagtatcggcttccaatagagcatctcgagctgatgtatggatttccaagcggaaaagacacgagtcatcgttttgacaagaaagagcttcagtcattttgggccacgcttgggtctaagcatgtattatcattctttaggaccaagagcaacgagataaggagtccggtggttagatactttcataggtccttggctagtgcgctatttgcaagagagcggaatggaacctttgttaatagagaactagagttgatggagatagtactgcaagagttgcttggtttagcatcagacggtacagttctagctagagatcagacagacacttcggtctcattctacctaatcgagcacctgctgagttacagaggatgggctaagggacttaagaaaccaggaagaatggttgtgggaggagttgtgacactaattctgagagcttgcaatgtacctctacattcaaagccgattcccccgagatggattgatatgcaacaccttatcaattccaagagtttttggtcgcagcagaagaatgacctatataagtataggttcgatcaccccacagcaggacaatatatttttctcctcccaaatcccgctttcacttcgattagagatggtggcaacattgagttttgcccaccattagagaacctctatttttcaggtgatgaatgttgtgccgatggaaggaatgaataatgatgagaccccaatccatcattcagataatgaggcagaaccatggacgtgtcttacgcaacacaacaattttactttgaggagtactccgcaccgagtcaaagtaaagactcaaaggaaattcacaagcgccttggtttcctccagagctggtgtatgttccacaacaaggctctcgcgacactcaacaagaagtttaacaatctccaactcaagatcaactgttcttcttcaactacaacaatgccacataacatgccttttgggagaaacggatccactcgtcatgaacctatgcatttcgatccgccttcaaccaccaagacagtcgtcatatgagccgagggaacaccatgctgcactttcaccaccaaggcaatcatccttcgaacctagagaaaggaaaagaggagcaagttgaaaaagcgaagaagaacaaggaaatcagatgctggagtaagccactctaccgcaccacttgaggagccactcgatcaacaacccgagaaaagggtcgagcatccagctaatccaagttcagcataacccgttccttggagttatacaaaggagagtatggatgattttgtctcctcctacttcacc

SEQ ID NO: 163545 - DNA, 1008 bp, Arabidopsis thaliana landsberg
ttgtattatccggctctctccctggtctccaagagctttcgatctctcatagcttcaccggagctttacaagacccgatcactcttggaccgcacggagagttgtctctatgtgtgcttaaagttaaatccttaagatgagaaaccgaggtggtttactcttttccgtaaacatactggaaccctaaagtcaagtgggtatgttttggctacagtcccatttccacatactcctcttgagtcatcttcttcgagcattgtgtcggtttgttctagtatctacaacattggcggatatgaattgccttcctctagcgtctagattctgtattgcacgtctaacacgtggcacgagggccctaggttgcgggtgaagctaatgtcatgtactgcttgcgttcttgatgaaaagatatatgtatcaggaagatgcaaagatggcgactccatgacgttccaagtgtttgacacaaatacacaaacttgggatcctttgtctgtcccttgcagcgagacaaaacacgactttcactacaaaatcgtaaggtttgacggaaaattgcacctggtgagctacaaaggtgtggatgcttacaattccaaggaaggtagatgggacctggttacaccaagcatagaacataataagtatttatatgattgttatcgcaatatagggaatgtttggtacactattgtaaaaggagatatctcaacgtccgtatggtggtatcacagtgaggaaagagagtggagagacttgaagggtatggtaggattacctaagttccctattgatgcttgtcttagaatggttgattatggtgggaagatggcagttttgtgggacgactatttgcctgggcgccgaaagaagatgatttggtgtgcggagattgcgcttgaaagacgcggaagtttggaaatatggggaaaagttgaatggtttgctcatgtgcttacagtccctagacaatatgaattcgtcaaggttcttgctgctactctt

SEQ ID NO: 163546 - DNA, 2777 bp, Arabidopsis thaliana landsberg
  unsure (1)..(2777): unsure at all n locations
gctgcaatcgatggggagctcagagttttcatcgtctccggcgaagtttccggcgataacatcgggtctcgtcttatgtcctcgcttaaaaagctctctcctttacccatccgtttcaatggagttggagggtaagcacttgggtttcccccaatttagaagtttcttatgaaaagttttgattctcaattgaaaatttcataaagttggaacatttgtatctttgcttcttacaaattgatagatccttgatgtgcaagaaaggattgaattcgttgtttccaatggaggatttggctgtaatgggtgtatgggagcttttgccacatttgtataaattccgtgtgagtaaccttttgaatggtttgatataaagctactctagattcttttgattgactagtctagtttttgagatactaggtgaagttgaaggagactattgatgctgcggttaagtttaagccacatgttgttgtgactgttgattcaaagggcttctctttccgtttacttaaggagttacgaggtaaacaacacaaaacttgtttcatcaaacttgtacgagagaatcattgagctttagtgaatagaatgcttgctaaacagtgtcgcttaacgactaagacatactaaattcaaagcttcattgtggttttcgaaaagcacagttttcttgaatagtaccaagatttatgtatggaagcttcttctccagtaggaacatgtttttgcgtaatttgacactaatctctaggatgatgtccttgattttgttttctgtagtagaagttgaaaaagtagagaaataggaaccttagaaatggctttttgaagccaaccattcctgaatgaagtcatatatatcatgtaggacaatggaggaatgctttttggctttgcagctagatacaagcagcagcggttggaaaattgttctgtgcattttcactatgtcgcaccgtcgttctgggcttggaaaggaggagagtcaagacttggaggtctgtctgaattcgttgatcatcttttctgcattcttccgaacgaggaaagggtttgtagggagcatggggttgaagcaacgtttgttggacatcctgttcttgaggatgcttctgagttcgaccttgtatgcgttttcttcttcttcttcttgaattacctcagtttctatgacactctgtcagaattctaagtgaaatggtgctcttttctgccacaggtgagaaggtgcaagcctcaggaactgaaacttgaaggcttgagttttagcgaacactcaataccttctggtaatgtgaagtttatcaaaatgatttaacttttctacagattggatatctacttttattgatatctcattgttcttctgctgcattgcataacttttcatgaaacaagactccactgtcatttcggttctaccggggagcagattacaagaagttgaaagaatgctacccatattttccaaagcaatgaagctactcaaagatccgtttccaaaactagtaacgcttatccacgtcgcatccaataatcaagttgatcattacattggaaaatctttcagtgagtggccagttccagcaatactagtccctagtggatccactcagcttaaatatgatgcctttggcgtaagtctttgaaacctcgttctaagtgtctcatctgtttactcctctcattntgcggtgttccataataacaggcgagtcaggctgcattatgcacttcaggaacagttgctgttgagttgcagcttgctcatctaccttcccttgttgcttaccgagcacattttctaacagagctattaatccgttacaaagccaagataccttatatttctctcccaaacattctcctagactccccaatcattcctgaagctttgtttcaagcttgtaacccttcaaatctcgcatcgatactagagtatatctttttcttttcacccacttttactttatattttgttatctggcaattgagaaatgggcatgatgatgacgtgagatgttgtttgaaactgtaggagactactcttggatgaaaagatgagagaaagacaagttgttggtgctgagaagttgatacagctcttgcatccgtcagaaagcagaatgggcaactcaattcattgcactggtttggaatctcatcgatatacgccaagcattttagcagcttcgactattcttagttatgccaggcgttaaaaactatcgtgagtcacatgcctttgtttgatactagagtacgctgagatacttgctataatctaaggttgaatttttttcataagagttctaacatatggtaaattacagttaaaggcgaaatgatccatgtagattagaatgtctcagcttatttggtttgcagtctaagacaaacagtcaaaaagggctttcgaaagcataaaaggataaagtgaaagtattgaatgtctaagcttatctgctttgcagaaacagataagatcctactagtgtggcttgtcataactggtttaatagtatatttcgctgtaaagatcgatacagaattgtgggagagtgaggaataaaccagacaaagatgcttccaatctcatgttctcaaaccccaaactctctcaagcaatgcaccaatctccatgtacaaaaaagaaaaagaaacattctcacaacagtatatttgttgatgaaaattcttgcaagagtatatgattatctggttctaagagccatccattgcaatatcaccaccagttgttggctttggtg

SEQ ID NO: 163547 - DNA, 692 bp, Arabidopsis thaliana landsberg
atggagagaaacgttgagaagatgctgaacagagtttcagtcgtgttcttaagcatcggaacaatgttaatggtgattatgattctccagacgccaaaacttgtatttcaccagaagctccatcgaaacctcatacgcattttctgagatctacatgcgattcatcgcctcgtcagcatcttcctctcccaaagaagaacgctcgaatctggttctctggagcttggaaatcgcgtctatcctccttctctacctacttcccctgatttcgcgatctcggattcattcaaaatcacaccaaagctctctgtctttccgacggagcaggccatgctccgatggctctttctcagatcggattatccgacgttaccgcagttgaattggttgattcgattcctcttgtgaaaagagctgatcctcataaccttccgtttttcgaccgtgtctttgattttgtctttactgcacatctagttgaagttctgtttccgtggcggttcgtggaggagatggagaggacggtgcgacgcggtgggttttgtgtggttgcggttgatgaatgtagtggagatgatgttagagacattgctaagttttttcataattccaaggtcgttgatgttgctaatgtaaccttagaaagagtcaaaagaactagtatactattcaaacttcaagactctaaaagg

SEQ ID NO: 163548 - DNA, 1788 bp, Arabidopsis thaliana landsberg
cctgatgaattctcctctgcttcctcttccttttcttcttcaccactcccaacccctaaccgctactctttaaccgtcactaacctatcctacaccatcaatcacaccccaatactcaattccgtttcattagctgctgaatcctctaaaatcctagccgtggttggaccgagtggaacaggaaaatccactcttttaaagatcatttcaggaagagtgaaccacaaggcactagatccgtcttccgcggttttgatgaacaatcgtaaaatcactgactataaccaactacgaaggctatgcgggtttgtcccgcaggacgatgacctactgcctctacttaccgtgaaagagacgttaatgtatagcgccaaattcagtttgagagattcaacggctaaggaaagagaagagagagtggagagcttgttgagtgatctcggtcttgttctcgtccaagacagcttcgtgggagaaggagacgaagaggatcgtggcgtttcgggtggagagaggaagagagtctctatagccgttgagatgattcgtgatccaccaattctgcttcttgacgaaccaacctctggtttggatagtcgaaactcgcttcaggttgttgagcttttggctactatggcgaaatccaaacagagaaccgtcctcttctccatccaccaaccaagttataggatcctcgattacatctccgattacctgattctttctcgcggatcggttatccacttgggaagtcttgaacatctcgaggactcgatagcgaaactagggtttcagattccagaacagctgaatcctatagaattcgccatggaaatagttgagtccttgagaacttttaagccaaactcggtagctgtcgtagaatcatcatcaatgtggcctgaaaacaacgaaaacgatgggattatctctaagaaagaagcgtttcgtgtcctagacgtcaccgagatctcatacctctgctcaagattctgcaagatcatctatagaacaaagcagttgttcctggcgcgaacaatgcaagcggttgtagctggattaggtctaggtagcgtctacacaagactcaagcgtgacgaagaaggcgttgcagagcggcttggactctttgccttcagcttaagcttcctcctctcttcaacagtcgaagcacttcccatttacctccgagaacgtcgcgttctgatgaaagaatcatctcgtggatcctaccgaatctcatcctacatgatagccaacaccatcgcatttgtaccgttcctcttcgttgtatctctcctcttctccatcccagtctactggatcgtaggcctaaacccatcgattcaagccttctccttctttgtcctctgcgtctggctcatcattctcatggccagttctctggtgcttttcctcagcgctgtttctcctgacttcatctctggtaactccctcatatgcactgttcttggagccttcttcctcttctccggctactttatcccaaaagagaagatcccaaaaccatggatgttcatgtactatgtgtccttgtaccgttacccgctggagtctatggtggtgaatgagtactggagcatgcgagaggaatgcttctccagtgggaacatgggctgcttgatgaccggagaggatgtgttgaaggagagagggcttgacaaggatacgagatggatcaatgtcgggatcatgctcgcctttttcgttttttatcgaatcctctgctggggtattctactcaggaaggcttccaagtcaacccat

SEQ ID NO: 163549 - DNA, 1632 bp, Arabidopsis thaliana landsberg
gttgaaggatacacctttccgtttcatgatcatcctttatcatatgttgttcgtgctgttgaacactgcttattgtgctcccgtcctagccgaagatcctctaacatctactatcactgcaaggagtgcgacgcttatatgcacgaagaatgcgttggccacttactttgtcagccatttatgtgcaatcacgttctcaaggtgttctttgatacaattctctcaccacttgacagcataactgacaactgttgctatctttgtcgagacgagctatggcgttggtttgctcgttgcaccatatgcaacataagcatggatgttagatgtctggcaaaacgacaaccactcacaatttctgaaccaaagaaccacaagcatagcctcaccctcttgttcaggttagtcacctttacttgtaatgcttgtggtgtggaagacgaccgcaatccttatgtatgtcttgaatgcaatctgatggtccacaaagattgtattgagtatctaccgcgcgtcataagcatcaatcgccatgaccatcgcatatctcatacttttcatcttggtcaaggcgaaggagataaagagtgtggcgtttgtcggaagacaattaattgggtctatggaggttatcaatgctctcgatgtcctagttatgccgttcattcaaggtgtgcaacaagaagagaagtgtgggatgggttagagctcgaagatgtgcccgaagaagaagaagaaatagaagatccattcaaggtaattaatgaaaagggagatatcgttcatttttgtcatgaaaagcatattctcagattggatgagaattatgttactgatgatgcttacatgcaatgtcggtgttgcattcttgctatcaacggtgatccatgctacaaatgcgtggaatgtgatttcatccttcatgaagcgtgtgctaatcttcctcgcaagaagcgacatttattgcacaaccataaactcactcttttatcgacacttgatccatatattaagtgtagagcttgtggagtctatacagatggtttcatatataagtgtcttcatgaagattgcgaaggtacgaattttgagtatgatgttcggtgtagttcagtgtcggaaccgtttcaccatgatctgcatcaacatcccttatattttaccttgcaaagttccagaaaatgtcagatttgtgacataaaaatatctgataatcccttaagttgtacggtttgtgatgagtactctttatgcatgaggtgcgctactttaccaagaaaggtaaaacacagatgtgatgatcattttctgtcattatgtcaaggttcttctgtgtacgataccggtgacttatggtgcgatatttgtgagacaaagacaaatccgagtttatgctactatacttgtgatgagtgtggtctaagtctccatactaattgtgtacttggaagtttacattatatgaagcttggaatcccaaaacctgatgttgaaatacatcccaacaatggtgctactcgacctttctgcacgggttgtaaagttcgttgcaagtccaccttccttatgaagcaaactctaggagaccttgttcgttacttttgttcaatacgttgtattcctagagcaagg

SEQ ID NO: 163550 - DNA, 708 bp, Arabidopsis thaliana landsberg
atgtttaggatagttttgcatgcatgttgcatatttgtgttgatttcaagtgatttggagcttttgacgagctaattggaagaagcgtacctgatcatgtcaagccactcgagcccctggtcgagtagatgcttcacgacttcaacagaccactcgaccccttggtcgagtagaagacctcagcatttcacgtcaccactcgaccccctagttgagtaccgccaagagagtcactcgttcacatcactcgatcccctggtcgagtatcatcacctccaccacctgaccatcactcgatctctgtactcgaccccctggtcaagtatcaacacgtccaccacatcaccttcactcgatcacactactctaccacatggtcgactcccttatcatcattcactcgacgtccttactcgactgccagcttcagagtcatcttcattccgcactcaaccacacactcgagcacatggaagaaaagaagactccagcttgccactcgacctctcactcgaacacctgggtcgagtacagttcttaatccgtcccaatactgcgttgttttgagtattagggtttcagaatatttggctataagtagcatgtactttacattttcgtttatctaagttttattccacagacattgtgttcttgacattttgtaatccggatttctctaatctattcagcgttttgttcttgatt

SEQ ID NO: 163551 - DNA, 627 bp, Arabidopsis thaliana landsberg
gcctttgccatgaatgaagagcgcgtgctcgcggttgccggcctgttccaagccacggcactggcgcagcaactggccaacgaaggtcgctgcgacgagcaggcgctggaagccagcctgaagagtgtgttccgcatcgacgcgccgtccgtcgtgggcgtctacggcaacgtctccggcgtgcggctgggcctgcgaacgctgatcgcgcaactcgacgagaacggccgcgacatggcggtaacgcgcatggcagtcacggtgatgcgacttgaacgcagcctgtcatcccgccacgaactgctggatcaactgcaacaaggcatcgtcgccgcgcaacgacaagtggaccacttcggccaagactcgccccaggtgatcagccggctggccgccgtgtattcgtcgactttgtccacgctgaaaccgcgcgtgatggtcaccggcaacccgcaactgctgcaacaggagaccgtggtggaaaaagtccgcgccagcctgctggccgcggtgcggtcggcagtgttgtggcgccaggtcggcggtcgtcagtggcagttcctgctcaatcgccgccagtgcagcatgctggctcgcggcctgctcaccggcaccacgctggacaac

SEQ ID NO: 163552 - DNA, 1374 bp, Arabidopsis thaliana landsberg
atgttcttgaaagctcgagctttatcagtagctacacagaatcctcctgatctcttctggcttctacatcattctccaaacgctaaacatctacgccatctccacgctcaccttcttggtacatttctctattccaacgttgtgctcagctccaagctcgttctcgcttactccaaacagaatcatctctttcccacttcgctttctgtcttctggcacatgccttatcgcaacattttctcttggaatataatcatcggtgagttctctagagcgggttttgcttccaagtcaattgatttgtttcttcgtatgtggcgagagtcttgtgttagaccggatgattttacgcttcctcttgttctacgagcttgctctgcgtctagggaagcgaaatttggagatttgattcatgttctgtgtttgaaacttgggtttagctcaagtttgtttgttagttcggctttggttataatgtatgtagatatggggaaaattttatatgcacgtaagttgttcgatgatatgcctgtgagagactctgttctctatacagctatgtttggtgggtatgttcagcaaggagaagctatgttgggtttagccatgttcagagaaatggggtattctggatttgcgctggattcagtggtgatggtgagtttacttatggcttgtggacaacttggagcgttgaagcacgggaagagcgtccatggatggtgtatcaggagatgctcctgcttgggcttgaatctcggcaatgctataacagatatgtatgtaaagtgctcgattctggcctatgcgcacacggtatttgtaaatatgtcgagacgagatgtgatctcttggagctcgcttatattgggttatggcttgggcggaaacgtggtaatggctataaaactctttgaagagatgcttaaggaaggaattgaacccaatgctgtcacttttcttggtgtattatcagcttgtgcccatggcggtcttgtggaaaagtcttggctgtatcttagagtaatgcaaggatataaaatagttcctgagttgaaacattatgctagtgtggcggattgtatgtctcgagcaggtcgtctggaggaagcagagaagtttctggaagatatgcccgtggaacctgatgaggctgttatgggtgcggtgttgagtgggtgcaaggtgtatgaaaatgtagaagtaggggaaagagtggcgaggaagctgattcaacttgagccgagaaaagctagctactatgtaacgttggccggtctattttcagctgcaggtcggtttgatgaagctgagagtttgaggcagtggatgaaggagaaacagatttctaaggttcccgggtgtagctcaata

SEQ ID NO: 163553 - DNA, 1523 bp, Arabidopsis thaliana landsberg
atggcttctgtaagcttacttgacgttgccatagccatcatttgccttttcttcttctattacatgtacttcaagaaacctcatggtcaggtttttcgaaactggccagttattgggatgcttccaggcttcctgatggttctccaccgcatctacaacttcggcgtggaggctcttgaaatgagccacttaacctttctatttaagggaccgtggttcgctgaaatggatatgttgttcacagttgatccagctaatattcactacatattgagctcaaacttctccaactataccaaaggtgccgactttaaagaggtctttgatgtctctgagaatttactttattcgactcggggcttggaggaataaagaaaagctcccaacttatgcttaatataaggctttcaaaagctatcattgagtgcaacgaggagtagctttacgatggtcttgttcctcttttcaatcaatgttgtgaggaagagaaggtcgtggatttgcagcaagtgtttcaaagattcacttttgatacaactttctttattgttaccgggtttgatcctaaatctctctctattgaaacgccagaggttgagtctgctaaagctctcgacacaatagtagaaggaataatgtataggcacgttaaacctagattctcgtggaagctacaaagctggatcggagttgggatggagaagaagatgatagaagctggtgccatttttgatcgagtgtgtgggaaatacatatcagccaggagagaagaggtaaaaagatcacaagtgaataataatgatcatttcattagagatagtcatgcaaatcttttgacatctcacataaagcttgatacaacccagtaccagctcttggatcctatcaatgataaattcttaagagacaccatcttagctttcaatcttgctgggagagacacaacgtcttctgctctctcttggtttttttggcttctctctgaaaaccctcaagttgtaacaaagattcgtaaagagatcatcgacaaaaatatttcaaaagacggaagaaatggccaagagaacttagacaagttggtctacttacatgcggcgttgtatgaatcaatgaggctctatccaccagtttcctttgggcgcaagtctcctatcaaatcagatgtgcttccaagtggccataaagtccaagcaaactctaagattataatctgcctttatgcgttggggaggatgagagcggtttggggagatgacgcattggaattcaagccagaaagatgggtttctgacaagggaagcttaagacatgagccctccttcaagttcttatcgtttaattctggtccaagaacttgtctaggtaaacatttagctatgactcaaatgaagatggtggccgtggagatattacacaactatgagattaaagttattaaagggcaaaagattaagccagttcttggtttcatattgtctatgaagcatggacttaggatcacaattactaagagatgtccatat

SEQ ID NO: 163554 - DNA, 671 bp, Arabidopsis thaliana landsberg
atgtttaggatagttttgcatgcatgttgcatatttgtgttattttcaggtgattcagagctgttgacgagctaattggaagaagcggaccttatcatgcaaaaccactcaacccccaggtctagtagacgcttcacaatctcagcagaccactcgaccccctggtcgagtagaggacatcaccacttcacctcaccactcgaccccgaggtcgagtgtcttcatctccatcaccttaccatcactcgatcacctcactcgatcccacagtcgagtgtcttcacctccattaccagacaaccactcgatctcaccactctaccttgaagtcgagtatcaccatcaccaccactcgactacacactcgattgcaagcttcagagtcttcttcattccgcactcaaccagacactcgaacacaaggaagaaaagaagactccagctattcactcgacctctcactcgaccacatgggtcgagtacagttcttagcccgtcccaatacttcatcgttttgagtattagggtttcgggatatttggctataagtagcatgtacttcacattttcgacgaaaaaaagtttttatctagttttattccgcagaccttgtgtgctagacctttgtaatccggatttctctttatctattcagtattcagtattcagtt

SEQ ID NO: 163555 - DNA, 2081 bp, Arabidopsis thaliana landsberg
gcaactacatcattctcattaccaaatcataagttcgggatcaaactaatgttgttcctagtcttgaacctcttgtcccttcagacttcagtatttgcccattcatcaaactctaaattcacaaaaatctcaagacacccaaactccgattcatcttcgagaaccaaaccctcaacttcttccaacaaagggtttctcagctcagtccaactcagcttggaccacgctctctttgctcgttctctcgcctttaatctcacgctttcgcaccgtacttctcaaaccctcatgctagatcctgtcaacgactgccttgagctgcttgacgacaccctcgacatgttgtatcgcatcgttgtcatcaagcgtaaagatcacgtcaatgatgatgtacatacgtggctaagcgcggcgttgactaatcaagagacatgtaagcaaagcctcagtgagaaatctagcttcaacaaagaaggaattgcgatagattctttcgcaagaaacctcaccggtttactgaccaattcactagacatgttcgtgtctgataaacagaagagttcttcttcgtctaatctaactggtggccggaaactgttgtccgatcatgattttccgacgtgggtttcttcgtcagaccggaagcttttagaagcttcagtagaagagctgagacctcacgctgtggtggcagccgacggaagcgggactcacatgagcgtagccgaagcgttggcgtctttggagaagggaagtggcagaagcgtaatccatttaacagccggaacctataaagagaatctgaatattccgagcaaacagaagaacgttatgttggtcggtgacgggaagggcaaaacagtcattgtcggtagcagaagtaacagaggcggctggaatacttaccaatccgctactgtcggtgagattttcactaaaattaattactaaattattcaattcagtgaacaatttttttttttaataccattgcatcaaatcatttagtaaatgactttttatagtatagaattttttttccccttcatataggctgtttttctattcaaatttagaaaaccaaaatttctgaatcaagaactaatggctatccttaaataagtcaagatgtttaaaagatccaagtaataaattattgtattcttatgtgttattttaggttagttttttcgtttaaatatttacaattttacaagttgattgtgttaaaatactctcatgtttttttctttacatgtaactaaggtaattcagagaagtgttatattttctatttatgatattttatgctgtattttaaggttttgtttcggtcaacttcacagttttatattttaaggtttgtttctcattgaagtactaaaccctttccaaattttggtttaattatggaagccgccatgggagatggattcatagctcgagacataacattcgtgaacagtgccggaccaaactcggagcaagctgtagcattacgggtcggatcagataggtccgtggtatacagatgctcaatagatgggtaccaagactcactctacactctctccaaacgacagttctatagagaaaccgacataacaggcaccgtcgatttcatcttcggaaactctgccgtcgttttccaaagctgcaacctcgtatctcgtaaaggctcctcggaccagaactacgtcacggcccaaggccggtccgacccgaaccagaacaccggtatttctatccataattgcagaataaccggttcgaccaagacttacttgggtcgtccatggaagcagtattcgaggactgttgtgatgcaatcgtttatagacggctcgattcacccttcgggttggtctccttggtcgagtaactttgctttgaagactctttattacggagaatttgggaattcgggtcctggatcatcggtgtcgggtcgggttagttgggccgggtatcacccggcgttgacgttgactgaagctcaagggtttactgtttcgggtttcattgacgggaattcttggttgccgtcaacaggtgtcgttttcgactctggccttttataa

SEQ ID NO: 163556 - DNA, 2779 bp, Arabidopsis thaliana landsberg
tttgcgatgaatgtgaagatcgacaagttttctgggagaaacagtttcagtctctggcagattaagatgcaagccctgttaaagcaacaaggcttgtgggcgccgctgtctaatgacagtaaagggaagagtgacgttgctgagatggctgtcatggaagagaaggcacactccacaatcatgttgtgtcttgaagatgaagtcatcattgaggtttcaggagaaaccacttctgccaatctgtggaagaagttagagaatttgtatatgacaaagtctctacagaacaagttgattctgaaacgacgtctgtttgcattaaggatgcaagaaggtacgccactcaaagatcacttagatcagttgaattcagtattactagagctgcgtaatattgatgttaaagttgaagatgaagatgctgccttgcttctgttggtatctttaccactatcatatgagaactttgtggaatcattcatagtgaataaagctacagttactttggaagaagtcagatctgcgcttcacagcagagtgttgcgtcatcaggcggctggtacagttacagattatcaagcctcaggactagtagccagtggcagcagtgggctgggacacgctaagaagaacagaagcagaaatggtttttctaaaagtcctaagccagatgatatctgctattactgtaaggagaaagggcattagaaatcagactgtcccaagaggaagcaacaaggatctgctgctgtagcagaagatgacaataagtctgaacatgatgttgctcttgtggctgctggaaacgcccacaactctgatgtgtgggttcttgatagaggagcatcatatcatatgtgtccatggagagagtggttctcaacttatgcacaggtagaaaatggctgcatcaagatggctaatagttctgtcagtcaggttgctggaatcggctctattcagatcaggacacatgatggcagattttgcacactgaacgatgtcagacatgttccatcgatggaaaagaatttgatatcactgagtctgcttgatagcagaggtctgaaatattctggtggagacggaattttgcaggtctatcaaggttctcatgtgattctgaagggtgttataagtggtactctgtatatactacaggggttcactgttataggcacatcgaatgttgcatctgcagagattcacaaggaggatatgactaagctatggcatatgaggcttggtcatatgagtgaaagagggatgcaaattttatcaaaggaagatcttttgtgtggtcatgaggtcaagagtcttgagttctgtgagcattgtgtgtatgggaagcttcaccgtagtaagttccctaaggctgttcacataaccaaaggcacattagattatattcactcggattcttggggtccagctcaagttgaatctctgggaggtcatagatattttgtgtcgatgattgatgattactccaggaagagttgggtgatcaagctaaaacacaaaagtgaagctttcaataacttcagggagtggaaaattttggtggaaaatcaaactggaaaaaagatcaagaggctgcggacagacaattgtctggagttctgttcatcagagttcaatcagctgtgtaaggatgaaggggttgctcgtcatcacactgtcagagatacaccataccagaacgttgtagctgaacagatgaatcagactttattgaagagagctaagtgtatgctctctaatgcttgtttagaaaaaagattctaggctgaagcagtaaatatagcctgttacttgatatttcgtgggccgcacacatgaatcaagtgtaggacacctgcaaagatgtggtctggtaaatctgctgattactctaatcttaagatttttggctgcacagtttataatcatgtaaatgaaggtaaattggagccaagagcaaggaagggagtatttctaggctatggagatggagtcaagggattcagggtttggtctccatcagagaagagagtgattttgagcaggaatgttgtctttgacgaagtttctatgctcagacgttcagagaagtctacaactacagaagagaacagtagttttgataaataggtggagctgacagctaatcagaaagctgatttacagaaaccagaagacagtaaggagctacaggcagcagataggtcagctgacactatcaagccagaatcaaaaccttacagtatcgctcaaatccgaacaaggaggattggagttggaccaccacaaagatacggttatgaggatatggcaggattctgtcttgaggatatggcagggtatgctttacaggttgcagaagaagtggatactcatgagccagccacttatcgagaagatgttttagggattgaggctgagaaatggtttgctgcaatgggagatgagatggaatctcacaataaaaatcagacatgggatttggtcaaacgaccaccaggaagaaagattgttacttgcgagtggatcttcaagataaaggaagggatatcaccagttgaaggggttaagtacaaggctcgagttgttgcgagaggtttcaaccaaagagaaggggtggactacaatgagattttctcacctggggtcagacacacttaaatcaggatgctgctagcaattgtggcaaatcaggacctgtaacttgaacaacttgatgttaaaactgcttttctacatggtatatgagaagaagaaatatacatgacttcactag

SEQ ID NO: 163557 - DNA, 612 bp, Arabidopsis thaliana landsberg
atgtttaggatagatttgcatgcatgttgcatatttgcgttaatttcaggtgatttggagctgttgacgagctatctggaagaagcggacctgatcatgtcaaaccactcgaccccgaggtcgagtaggggcttcaaaatctcaagagaccactcgacccccaggtcgagtagaggacatcactacttcaccacatcactcgaccccgaggtcgagtgtcttcaccttcattaccagaccactactcgatctcaccactctacattgaagtcgagtatcaccatcaccaccactcgactacagactcgattgcgagcttcagagtcttctttattctacactcaaccagacactcgagcacaaggaagaaaagaagactccaactattcactcgacctcccactcgaccacacgggtcgagtacagttcttaatccgtcccaatactgcgtcgttttaagtattagggtttcgatatatttggctataagtagcatgtacttcacattttcgaaaagaagttttttatctagttttatttccgcagaccttgtgtgctagaccttttgtaatccggatttctctttatctatttagtattcagtattcagct

SEQ ID NO: 163558 - DNA, 837 bp, Arabidopsis thaliana landsberg
atggctacatctcttcaaaccaaatacactctaaatcccatcacaaacaacatcccaagaagccaccgtccatcgtttctccgtgtcacttccaccaccaactctcagcctaaccatgagatgaagcttgttgttgagcaacgacttgtgaatcctcctctctccaacgacccaactctacaatctacatggactcaccggttatgggttgcagctggctgcaccaccgtgtttgtctctttttccaaatcaatcattggagcatttggttctcatctctggctcgaaccatctttagccggtttcgccgggtatatcttagcagatctaggttctggtgtgtaccactgggccaccgataactacggtgatgagtctatgcctctagtaggaatccatatcgaagactctcaagatcatcacaagtgtccatggacaatcaccaaacggcaatttgcaaacaatctacattttatggctcgaggcacaaccttgatagttctcccactagaccttgcttttgatgaccatgtggatcatggctttgtaagcatgtttgcattctgtgtattgctttgccagttggtccatgcttgggcacatggaaccaagagcaagcttccacctctcgtggtcgcgttgcaggacatggggttacttgtttcacggagacagcatgcggaacatcatcgagcaccgtataacaacaattactgcatcgtgagtggagcatggaacaatgttctggatgagagtaaggtctttgaggcattggagatggtgttttatttccagcttggggtgagacctaggtcatggagtgagccaaactctgac

SEQ ID NO: 163559 - DNA, 1158 bp, Arabidopsis thaliana landsberg
atggcgaataaggagaagcttccgtgtgaactgattgaagagatactctctcgtgtccctcctgaatctcttgttcgcttcagaaccgtttctaagaaatggaacgccctcttcgacgataagatgttcattaacaaccacaagatgacatttcgattcatcttagcaaccgaatctaagttctactcggtaagcatcactccaaagatagaagtgcgtgagttaagtttggatattcccggtttagaacttaaacctaaaattttgattgattgcaatgggttcttgctatgtggcatggaaaaagaaggcatcgtggtttggaacccgtggttaagacaggctaaatggataaagccaaaggtaaaccaacctagtttgtgtttcaatggcataggttatgataataataagagagttgaggaaattgtttacaaaacactttcggtttatatgaaagacttaggctctcaatatacgtggaaaatccatgactttgcctccgatacgtggatagaccaagagattgaaaagacaaaatatagtagacgaattactgagggaagtgttaccattcgcttaacaaacttaagtgtggtatcgttgaatggaagtttgtattggcttgctcattatcacaagactcatgtcaattatcccttgttgttcttcttacttagcttcaatttttcgtaagaagaattcttcaagttttgtgatctaccaagcgggaagaaccgtcgtcgtgatgctcttgcccttagggtttttagggaagataggttttcgttgttgaggcagtgtcatgtaacaaagaagattaagatttgggtgacaaagaacaagattgataatcggtatggtggggatgtgaaatggatgagtttcatggaggtgtcaattcctaccatgccggatttagaacatcccaaatttaactctcagccaagttacttcattgatgataaaaggctcgtcatttgttcttgtgatgaaactggtcgggcttggatctatgttgtggggggaaataagttggtcagtaaaacccaattggattctgtggttgatccttggcctttgcattgtacctattttccaagtttggtcctggttcctggaggtcaaagagaagaagcagagttacaagttcaattt

SEQ ID NO: 163560 - DNA, 2039 bp, Arabidopsis thaliana landsberg
atgtgcattgattataggaagttaaatgctgcatctaggaaagatcattttctttttccattcactgaccaaatgcttgaacgtttagctaatcatccatactattgttttcttgatggatatagtggtttctttcaaataccaattcaccctaatgatcaagaaaaaactactttcacatgtccttatagaacctttgcttataagagaatgccatttggtttatgcaatgctcctgcaacatttcagaggtgtatgacctctatattttcagatttaatcgaggagatggtggaggttttcatggatgattttttggtctatggcccctctttctccttatgtttgttgaatcttggcagggtattgaccaggtgcgaagagacgaatcttgttctcaattgggaaaagtgtcatttcatggtgaaggaaggcataatgttgggtcacaagatatgagagaagggtatagaggttgacaagggaaaaattgaagtgatgatgcagttgcagccaccaaaaatggtgaaggacatcagaagtttccttggtcatgctggattttacagaagatttattaaagacttctccaagttggcaagaccgctcaccagactgctgtgcaaggaaaccgagtttgcatttgatgaagaatctttgacaccctttaagttaatcaaggaagctttggtcactgccccaatagtccaagctccaaactaggacttcccatccgagatcatttgtgatgcttcagattatgcaataggagcagttttgggccagcgagcagaacgatggatgatacacaagtaaggtatgccactacagagaaggaactactagctgtggtatttgcattcgagaaatttagaagctacctagcgggttctaaggtgacagtctacactgaccatgctgctctgaggcatatatatgcgaagaaggataccaaacctaggctgttaagatggatcttattgctccaagagtttgacatggagatagttgataagaagggaattgaaaacggtgtagctgatcatctgtctaggatgagaactgaagacgaggtccctattgacgactccatgccagaagaacagctaatggcaattcagcaacttaacgagagtgctcaaatttggaaatcactcgaacaagtttgttcgattgaagaaaagcttccgtggtatgctgatcacgtcaattacttggttagtggtgaagagcctctaaatctgtcgagctatgagaagaagaagttcttcaaggacattaaccatttctactgggacgaaccttatctctacacactctgcaaagataagatctacaggacatgcgtctcagaagacgaaattgaaggcatcctattgcattgccatgggtttgcctatggtggccactttgcaacgttcaagacaatgtcgaaaatcctgcaagctggtttttggtggccatcaatgtttaaggatgctcaggaatttatctcgaaatgtgattcatgtcagagaagagggaacatcagcagaaggaatgagatgccttagaatccgatcttagaagttgaaatctttgacgtttggggaattgattttatgggtccgtttccttcctcttacggaaacaagtacatactggtcgcagtagactatgtatcaaaatgggtggaagccatagccagccacaccaatgatgctagagttgtgctaaagctgttcaagacaattatcttccctagatttggagtcccgagaattgtgattagtgacggagggaaacattttatcaacaagggttttgagaaccttttgaagaagcatggagtaaagcacaaggtagccactccttatcatcaatagacgagcgggcaggtggaaatctccaatagggagataaaagcaattttagagaaacctgtgggaagtacaaggaaagattggtctgctaagctcgatgacacactatgggcttacagaacagccttcaagacccctattggcacgactcctttcaacctcctctatggaaaatcc

SEQ ID NO: 163561 - DNA, 973 bp, Arabidopsis thaliana landsberg
gcgttttccatagttattagtaacctttctaggaagaggagagctagtgaagctcagtcgtttttcgatagtttgaaagatagattcgagcctgatgttatagtttacaccaatttggttcgtggttggtgtagagctggtgaaatctctcaggcagagaaagtgttcaaggacatgcagttggctgggattgaacctaatgtgtatacttacagtattgtgatcgatgcgttgtgtagatgcgggcaaatcagccgtgcgcatgatgtgtttgcggatatgttagattcaggttgtgcgccgaatgcgattacttttaacaacttgatgagggttcatgtgaaagcaggaagaacagagaaggttttgcaggtttataaccagatgaagaagctaggatgtgagcctgatactattacttataacttccttattgaggctcattgcagagacgagaatctggaaaacgcggtcaaggttttgaacacgatgatcaagaagaagtgtgaagtgaatgcttcgactttcaatacgatatttaggtacattgagaagaatagagacgtgaatggcgctcataggatgtattcgaagatgatggaagcgaaatgtgagccgaatacggtgacttataatatactgatgaggatgtttgtcgggtcaaaatctactgatatggttctgaagatgaagaaagagatggatgataaagaagttgagccgaatgtgaatacttataggcttttggttacgatgttttgtgggatgggacattggaataatgcttataagttgtttaaagaaatggttgaagagaagtgtttgacaccgagcttgtctttatatgagatggttcttgctcagttaagaagagctgggcaattgaagaagcatgaagagctggtggagaagatgattcagaagggactcgttgttcggccattgtaggaaccctttcaagtttcaaagaaga

SEQ ID NO: 163562 - DNA, 661 bp, Arabidopsis thaliana landsberg
atgtttaggatagttttgcatgcatgttgcatatttgcgttgatttcatgtgatttggagctgttgacgagctatctggaagaagcggacctgatcgtgacaaaccactcgacccagaggtcgagtaggagcttcaagacctcaagagaccactcgacccccaggtcgagcagaggacatcaccacttcacttcaccactcgaccacgaggtcgagtgccctcgtctccatcactcgatcacttcactcgaccatgaggtcgagtgtcttcaccttcactgccagaccactactcgaccacatcactctgcctagaggtcgagtacctccatcacaccactcgactgcatactcgatgacaagcttcagagccttcttcattccgcactcaaccagacactcgagcacaaggaagaaaagaagactccagctattcactcgacctctcactcgaccacctgggtcgagtacagttcttaacccgtccaaatacttcgtcgttttgagtattagagtttcgggatatttggctataagtagcatgtacttctcattttcgcagaaaagaagtttttacctagttttatttccgcagaccttgtgttctagactttttgtaatccagatttctctttatctattcagtatttagctttggttc

SEQ ID NO: 163563 - DNA, 669 bp, Arabidopsis thaliana landsberg
atgtttaggatagatttgcatgcatgttgcatatttgcgttgatttcaggtgatttggagctgttgacgagctatctggaagaagcgggcctgatcatgtcaaaccactcgaccccgaggtcgagtagaagcttcaagatctcaacagatcactcgacctcctggtcgagtagaggacatcactacttcaccacatcactcgaccccgaggtcgagtgtcttcatcccatcacctgaccatcactcgatcacatcactcgactccgaggtcgagtgtcttcaccttcattgccagactactactcgatctcaccactctaccttgaagtcgagtatcaccatcaccaccactcgactacatacccgatggcaagcttcagagtcttcttcattctgcactcaaccagacactcgagcacaaggaagataaaaagactccagctattcactcgacctccaactcgaccacttgggtcgagtacagttcttaatctatcccaatactttgtcgttttgagtattagggtttcgagatatttggctataagtagcatgtacttcacattttcgcaaacaagttttttatctagttttattccgcagactttgtgttctagaccttttgtaatacggatttctctttatctattcagtattcagtattcagct

SEQ ID NO: 163564 - DNA, 1350 bp, Arabidopsis thaliana landsberg
ttgtttactctactgttgtttactgcatcttgtcatctgttgcttagtttctgcaattctttcttgttactcgatctcgtactcgatcacccagttgtctggcaacagactgtgcagtcgagtacctgtgtttcatttcctgtctgttactcgacctgtcactcgacctcacccagagctctgcaaagagctgtgttggtcgagtgttttactgtttctgtttgattttctgttttctgcatgttcacttaggactgcaggaacacaccaaaacctgttatgcttggcttgacttagtgacttctgatcacatcttgattgttagcatcacacccatttggattgacaacctaaaatactacaatgacatgattggtgttttaggataattgactaaaaacctattatcactttcatggtgtagccaaagtccatatgagtctttggctttgtgtcttctaacaaagatacaattcttacgcctttaagatccggttgcggtttaagttcttatactcaatcatacacatgatatgtcatattcgactcaaaaacactaaccaaccttcttcttgcttctcaaatctttcatggtgtagccaaagtccatatgagcctttggctttgtatcttctaacaaggaaacattacttaggcctttaagatcaggttgcggtttaagttcttatactcaatcatacacatgacatcaagtcatattcgactccaaaacactaaccaaccttcttcttgcttctcaaatctttcatggtgtagccaaagtccgtatgagtctttggctttgttgttctaagaaggagcttcaagacctcaagagaccactcgacccccaggtcgagcagaggacatcaccacttcacttcaccactcgaccacgaggtcgagtgccctcgtctccatcactcgatcacttcactcgaccatgaggtcgagtgtcttcaccttcactgccagacaactactcgcccacatcactctgcctagaggtcgagtacctccatcacaccactcgactgcatactcgatgacaagcttcagagccttcttcattccacactcaaccagacactcgagcacaaggaagaaaagaagactccagctattcactcgagttctcactcgaccacctgggtcgagtacagttcttaacccgtccaaatacttcgtcgttttgagtattagggtttcgggatatttggctataggtagcatgtacttctcattttcgaaaaaagaagtttttacctagttttatttccgcagaccttgtgttctagactttttgtaatccggatttctctttatctattcagtattcaatattcagtt

SEQ ID NO: 163565 - DNA, 1152 bp, Arabidopsis thaliana landsberg
atgtctaatcttcctaaggatttggcggaagaggtgctctctagggtttcgttaacatctctgagaaacgtccgacttacttgtaaagattggaatactttatctaaaggtgagagctttgcaaagaatcaccttggttatcaagcaatagtagcagcgaaggaaaaagagtttatgatggtcctgatgatggattttagggtttatttgattcgagtcaacgttcacaatgacattgagtcgtgtattaagcctgaaggtgagcttattagcttgggcgatgaagtcgatgtatctcaagtctttcactgcgacggtttattgctatgcatcacggaagataacgctaaggtcgttctttggaacccgtattgggggcaaacacggtggatcgagtctacaaataatttccacaaattggacatgtatacgtatgctctcggatacaagaagagcagcaaatcaagccgcagctacaaaatcttgagatttattgatttttctcccacttgttctgagttcaaaatctacaatatcaactctgattcatggaaggttcttgatgtgtctccagactggaagatagattcttatattcgtggcgtgtctctcaagggaaatacatactggtttgctagagagaattataccgaaacaatggacacagaccattttttcttactctgttttgatttcacaagcgagacatttgggccgcctttgcctcttccgtttgagtttgctgtttctgaagatactatgagtgtatctagtgttagagaagagcagcttgttgtattatatcagccgtgggattatttatagttggacatctgggtgacgtctaagattgagcccaacgctgtgtcgtggaacagcaaggtgttcttatcagtgagtttaaaacaactcgtcggccctcagcttcagttaacttttgggagtttcttcatcgacgaggagaagaaagtcgttgtgctttttgatagtaaagagatcaagacctgtcgctaccaaatggcttacatcgttggagatgatggatacttcaaatctgtcaacattggagtaagtccgaattcccagcggaaaccaggcagacttgtgtgctcttcttatgttccaagtttagttcaactgcaaatcaaccaa

SEQ ID NO: 163566 - DNA, 749 bp, Arabidopsis thaliana landsberg
ataagttgtaacagtgtggcatctaagactgaggtttctaacaatgaaaatgattatgcaaataaagaagatgtcgatgatgaggcttcatctcttgtttggactgacagtgctagagacacaagtcttgtagaataaaacaagtccttgaaggatgcctctcagtcagtagaaactggtggtaaggcgtttaacaatgtggcatctgttgcagagacttcaaataatgtgcttacagagattccaccagcaaaggaaactacggatgtcaatgggtttgaggtttttatgtcccaggttagaatgggtttcatcatagttcactttgttcttgctagcaggtagaatcggtaaaccatatcttcaaaagagacccaaacatagccataggcttccgaccaaagaacaaacagatcagaagagcttatataaatgcactccttagcctcacctagacgctgtgccagtcgccagagaagctatcagaggatgatctgagcaaggctgatgtaacacttgttgatctgattgatgctggctttgagttggattggctgtagacaaagctggatgaggtctctcggaagaagaagatggagcagagtagtggcccacggctacaaacaatggaggaacggttgcagaagctgaagcttttgttcgtggatcttgaatctcagctgcagaaggaaaaagtggaggctttggttgcgagagctcctctctcattcaacgatggtgtttgcaga

SEQ ID NO: 163567 - DNA, 1093 bp, Arabidopsis thaliana landsberg
actatcaacctaaatatgcattcttaacgagttcaattgttcatcttagtaaataggccgattcttattactcacctattaaataggccgattcttattacacacccagactcatcaaataataaatccaactacagatacctatggattcaagatctagttaattactctaaatctagcattaagcacaattaaagatgaagaattctatagataacctagcaaatggggtaatctactaaaccatatgaatccctaatgagaaaccctattcctaacaggcatattactcagacatattggatgaagcaaacaacatatttgagtgtgaaagcttaaacacagtaaatagagaaggggaaagaagggatctcttcactgtatataaatctgaatgaaactctgaaaacaaatcgatgaatagcttatgtctctcacaatagggttttgcaaaagcttgataaaagacttgatataagaaacctaggtctaaaaacaatatatatagaccctaaaaacgtccagggcctaataatgcaaataaggaaatcttctggggcaaacttgatcttctataaacttcaaagcgtctaggatttttgttgggccgaaactggtgtcgatcgaccacctcactcgaccccctggtcgagtagaggacatcaccacttcaccttaccactcgacctcggggtcaagtgtcttcacctccattaccagacaaccgctcgatctcaccactctaccttgaagtcgagtatcaccatcactaccactcgactacacactcgactgcgagcttcagagtcttcttcattccgcactcaaccatacactggagcacaaggaagaaaagaagactccagctattcactcgacctcccactttatcacttgagtcgagtacagttcttaattcgtcccaatactgcgtcgttttaagtattaaggtttcggaatgttttgctataagtagcatgtacttcacattttcgcaaacaagtttttatctagttttatttcacagaccttgtgttctaaaccttttgtaatccggatttctctttatctattcagtattcagtattcagtt

SEQ ID NO: 163568 - DNA, 631 bp, Arabidopsis thaliana landsberg
atgtttaggatagttttgcatgcatgttgcatatttgtgttgttttcaggtgatttagagctgtcgacaagctaactggaagaagcggacctgatcattacaaaccactcgaccccaggtcgagtagaagacaccaccactctatcacatcactcgacccccaagtcgagtgtcttcatctccatcccctgacctccactcgatcacatcactcgacccccaggtcgagtgacttatccccattgcctgacctctactcgacctcatcactctacctggaagtcgagtatcaccatcacaccacttgactgcatactcgatgacaagcttcagagccttcttcattccgcactcaaccagacactcgagcacaaggaagaaaagaagactccagctattcactcgacctctcactcgaccacatgggtcgagtacagttcttaatccgtcccaatacttcgtcgttttgagtattagggtttcagaatatttggctataagtagcatgtacttctcattttcggagacaagaagtttttatctagttttattccgtagaccttatgttctagaccttttgtaatccggatttctctttatctattcattattcagtatacagcttttgttc

SEQ ID NO: 163569 - DNA, 670 bp, Arabidopsis thaliana landsberg
atgtttaggataggtttgcatgcattttgcatatttgtgttgatttcaggtgatttggagctgttaacgagctaactggaagaagcggacctaatcatgacaaaccactcgacctagaggtcgagtaggagcttcaagatctcaagagaccactcgacccccaggtcgaggagaagacatcaccacttcacttcaccactcgaccacgaggtcgagtgccctcatctccatcaccagaccatcactcgatcacatcactcgaccacgaggtcgagtgccctcatctccatcatcagaccaccactcgacctcatcactccacctggaagtcgagtatcactttcaccaccactcgactacaccctcgatggcaagcttgagagtcttcttcattccgcactcaaccagacactcgagcacaaggaagaaaagaagactccagctattcactcgacctctcactcgaccacctgggtcgagtacagtttttaatccgtctcaatactgcgtcgttttgagtattagggtttcggtatattttggctataagtagcatgtacttcacattttcgcaaaaaaggtttcatctagttttattccgcagacactgtgttctagaccttttgtaatccggatttctctttatctattcagtattcagcatttgctt

SEQ ID NO: 163570 - DNA, 2305 bp, Arabidopsis thaliana landsberg
atgaacacacacatgagaaagtgcaaagcttatttggatcatcttgaatctaattctcagaatgtcatagtctctagtggtggtggtaatggtgctggcatgataaaaccttttgatcaaaacgtgtgtaggcaagcaacggtaaaaatgattatcatggacgagttgccgttttcttttgtggagaatgatgggtttaaacatttttgtgagatggctgtcccttggtttactattccatcgcgaagaacaattactagggatgctgttggtctgtacagagttgaaaaaactgcattgaagactattttaagtcgaaataggcaggccatgtcgtttaccactgacatatggacttctattaggacattgagttatatggtcgttactgctcattttattgacatggattggcaattgcatagaagaattattagttttagtcctattcctgatcataagggaaagaccatcgccaatcagtttttaagatctttggatgattggggtattgagaaagtattttctatcacagtggataacgcaagcgccaatgataaagctattactgttttgaaagagaggctaagtaacagaaatagtgatgctttgatgatgaatggtgattttatgcacatacgttgtggtgcacacattcttaacttgattgccaatgaaggtcttgaagatataagtaatagcatcgtaagtgttcgtaatgctgtaaaatatgtgaggtcttctaattcaaggctggaatcatttaagcgttgggtggaggttgagaagataacaagaggaagtgtggtattggattgtgttactaggtggaattctacctacttgatgttgaaaagtgcacttaagtataaagttgcatttgataggatggctgatatggataaaccttatgatgcatggttcaaagaggttgattctaataaaaagaagagggacggacctccaatggcaattgattgggacaatgctcgtcatatggtaaggttcttgaaagctttctatgattcgactttagcattctcttcttctataaaggtgacgtcaaatggttgttacaatgagatctgcaaaattcagtcaagtgtgcaaaaaatggcttttagccaagattctgatttgagagagatggcttctgcaatgacggccaagtttgacaaatattgggaaggtacagaaaaaatcaataagatattgatagtggctggtgtacttgatcctcgtcgcaaaatggtatttacaatgttcagttttgaacttatctatggaaaaggtaatccaaaatgcgttgaaatgaaggaactcgtgatggatgttttggagaaactatttgacatatatagtgttcgatatgccacttcaaatctacaaccttctgtttcctgtgacgctgagaacgtaacccaagtacaccaagactttgagaatatggaggttgacaacattgatgatccttttctaaaatttatggttgctaagaagacttctatagcagtggtaaatgaattggtaaagtatttaaaagacgaactgcatgtaactactgaaaatagtttggggctcccgtttgatcttctagattggtggaagacaaatagctcaaaatacccaatcatgtctttaatggctagagaggttcttgcaataccagtatcttcggttgcgtcggagtctgcttttagcacgggtgatcgtatcctagatcaatatagaagttgtttgactcctgatatggttgaagcgttggttttgactcaagattggttacgtgcttcacttcgttcagaagcaatgaagtctcttgataagctagaggaagagaacaagtttatggattcacttgaagaaggtattttactttatttctttataataattatatgtgacaatcacttatagatttactctctgttcatgttagtgtctaatttttattttattttgttagagtttaatcctccatctcagaatgagaagtgagagcgataggtacatgtctaagtaaacgattagtgggagcagaaaaagattaaagaggtaatgatctttcctttctatatattagttttacgatgttggtgctatctgttgttgaaaagtttaaaattgttaatttatgtttttttctttctgttcttaatagtttatactctgttttggtttccaatattctagttaatactctgtttcagtgtaagaagtgattggttttattgttttcgtttcgtctttatatagttataaacttatatgcaagttattgacttgttgcagattcttcttgatg

SEQ ID NO: 163571 - DNA, 1380 bp, Arabidopsis thaliana landsberg
cagagaataacaaaaatggtcgacaagagagaagaagttatgcacgtagccatgtttccatggctagctatgggtcatctccttccttttcttcgtctctccaagttactagctcaaaagggtcacaagatctctttcatatcaacaccaagaaacatcgaaagacttcctaaattacaatcaaacctcgcctcctccatcaccttcgtctctttccctctccctcccatctcaggcttgcctccttcttcagaatcatccatggacgttccttacaacaagcaacagtctcttaaagccgcttttgatcttcttcagccaccgttgaaagagtttctccgacggtcttctccggattggatcatatacgactatgcttctcactggcttccttctattgcggccgagcttggaatctctaaggctttctttagtctctttaacgcagctactctctgtttcatgggaccgtcttcgtctttgattgaagaaattagatcaacgccggaagatttcacggtggtgccaccgtgggtcccgttcaagtcaaacatcgtgtttcgttatcatgaagttactagatacgttgagaagacagaggaagatgtaaccggagtctctgactcagttcggtttggttactcgattgacgaaagcgatgcggtttttgtccgtagctgtccggagtttgaaccggaatggtttggtttactaaaagacctgtaccgtaaaccggtatttccaatcgggtttttgcctccggttattgaagacgacgatgccgttgatactacatgggttcgtataaagaagtggctcgacaagcaacggcttaattcagttgtttacgtgtcacttggcaccgaagcgagtcttcgtcatgaggaagtaactgagctagctcttgggttagagaagtcagagacaccgttcttttgggtcctaaggaacgagccaaagattccagatgggttcaaaacacgagtcaagggacgtggaatggttcatgttggttgggttccacaagtgaaaatacttagtcacgagtcagtaggagggttcttgacacattgtggttggaactcagtggtggaagggttagggtttggtaaagttccaatcttttttccggtgttgaatgagcaaggacttaatacgaggttgttgcatgggaaaggacttggtgttgaggtttcaagagatgagagagatgggtcgtttgattctgactcggtcgctgactcgattaggttggtgatgattgatgatgctggcgaggagataagggctaaggctaaagtgatgaaggatttgtttgggaacatggatgagaatattcgttatgttgacgaacttgttaggtttatgagaagtaaagga

SEQ ID NO: 163572 - DNA, 2021 bp, Arabidopsis thaliana landsberg
atgagtttatgctctgatctcactgagaaattagacgaggagattttagaggacttgacgtccaatgtgaagcaaatacaagacaacgtattggaggagatactcacacttaatgctaacacagagtatcttcgacgttttctccatgggagctctagtaaagagcttttcaagaagaacgtccctgtggtgacctacgaggatgtgaagccttttatcgatcgtgtcacgaatggagagcccctctgatattatctttggcaaccccattaccggattccttctaaggtatatacttttcatttcctggcttttttcttcttttcaaaaattgtattagagcaactttatcattggttattatacaatcaatgtgagtgatgttagaaactctagagattatgtgctctaatggttttcactgtagtctggaacatcggagaaaacagaagatgtttcctcgtaacaacaagtacttggaaaacataaaattcatcttttattaccgatcgctcgttataagcaagtaatgatgataacacaacatattcttttaataaaacatttttatatttgtagattattgatgaaagtctcttttggtgtcatgataggcatatagatggtcttgaacatggaaagggaatggtatttaacttttgtacatcagagaacacaactccttctggtttgccatcatcagctgcatcgacgagcttcttcaagagtgattatttcaagaaccgaccatcatattggcattggtcttacacaagccctgacgaagtcatattgtgttcagacaccaagcagactttgtactgtcatcttctatgcggtcttgttcaaagagacgatgttgtcaaggttggtgccgcctttgttactattttggtccgagcaataaatcttcttgagaattcttggaaggaaatttgcactaatatccgttttggtcatcttagtgagtggatcactgatattagttgtagagactccgtttcaaagattcttggagagcctaatcctgaattggctgatctcatagaaaatgaatgcaacaataaatcatgggaaggtatagttccaagactttggcctaaagccaaattcatagaatgcattgcaaccggtcaaatggctcaacacatcccaacattggagttttactctaacaagttgccattgatttcctcgagttacgtatcttctgaaactatgtttggtattaatatgagtcctctttgcaaaccagaaaatgtatcatacacatttctgcccaacttgtcatattttgagttcctacttgttgatgccggtgacaaaaccgaaattgttgatctcgtggatgtcaagttagggtgctattacgagcccttggtcacaaatcattccggtgagtacttaggaaaaattattgatatatatacatacactcgactaatcgattaattatattgtttttgtttttgctaggcctacacagatataagatgggtgatattttactggtgactggattttataataatgcacctcaatttagatttgtgcgtagaggaaatctgactctaagtattcatttggagataactacagatgaagaccttttaaacgcggtcacagacgcaaagatggttcttgaatcatcaaatttgatgttgatggacttcacaagctatgcggatatttctactactccgggtcattatgttctttattgggagctcaaagcaaaataccgcaacgacattgttgaaatcgataagaatgttttggtagaatgttgctatgtggtggaagaatcattgaacaattcttatagagtatataggagtaaaggtggattaattggagctttggagataagattggtgcagcaaggaacttttgatgctctcatggagtttttcatcactcaaggtgcttcttcaactcaatacaagacacctatttgcatcaaatctactgaggccttggtgattttagaataaaatgtccacgcttgtttctttactgat

SEQ ID NO: 163573 - DNA, 1680 bp, Arabidopsis thaliana landsberg
ttcaagaacaaccttaacgccgtcgtgatatcattcttcttcttcttcctctgttccacgtcggatttgctccttccacgttcaccgttagctattctcaccggcgggaggtgggatcttctgcagccgagtgtaggtatatccgcaatgcacatgcagcttctacacaacaacaaagtcgtcatctttgaccgtacggattatggaccttcgaatgtttctctcccttctcaaacctgccaaaacgccaccgtttttgactgctctgctcattcaatactatacgacgtcgcttcaaatacctttcgcccacttacactacgttacgacacgtggtgctcttccggttctttaaacgcttccggttctttaatccaaaccggcggttatggcaacggcgaaagaactgtacgggttttcacaccttgcgacggaggagttggaagcgtttcgtgtgattggattgagaacagagcgtatctctcctctcgccggtggtattccaccaatcagattcttcccgatggtcggattatcatcgtcggcggaagaagagctttcaactacgagttttaccccaaggatccgggagaatccgttttcaatctcagattcttggcggagacgagagatccgaatgaagaaaacaatctttatccgtttcttcatcttctccccgacggtaatctcttcatcttcgccaatcggagatcgattttgttcgatttcgtcaatcaccgaatcatcaaggagtttccacagattcccggcggcgataaacggaattatcccagcactggctcctccgtgctcctccctctctttctcaccggagacattaacagaacgaagataactgctgaggttatggtatgcggcggtgctccgccgggagcgttcttcaaagcggcgaggacgattcctaaaatcttcgtcgcgggatcacgcacgtgtgggagattgaaagtgaccgacccggatccgaaatgggtcatggagcaaatgccatcgccacgtgtcatgtctgatatgttactgttaccaaacggtgacgttttgatcattaacggtgctgctaacggaaccgctggttgggaagacgcgacgaacgctgttctcaacccgattttatacttacccgaggagcctgaccagacccggagattcgaaattctcaccccgactcgaatccctagaatgtaccattcggcgtctcttcttctgtcagacggcagagtcttagtcggaggaagcaatcctcatcgaaattacaatttcacggcgaggccgtacccaacggagctcagcctcgaggcttatctcccgcgttacctggatccacagtacgcacgtgtgagaccgacgatcatcacggtggagctcgccgggaatatgttgtacggtcaggcttttgccgtaacgttcgcgattccggcattcggaatgttcgacggaggggtatcggtgaggctcgtggcgccgtcgttcagcactcactcaacggcgatgaaccagaggttgttggttttgcgcgtcaggcgcgtgagtcagttatctgttttcgcttataaagctgacgtggacgggcctactaactcctacgtggcaccacctgggtattatatgatgttcgtggttcaccgtggaattccgagtgtagctgtttgggttaagatttaa

SEQ ID NO: 163574 - DNA, 1211 bp, Arabidopsis thaliana landsberg
gaagaattgttaccacacgatgtgatagagtatcatataatggtgaggcttgatgtgaaaaccctcctcaagttcaagtctgtatcgaagcaatggatgtctacaatccaatcccctagtttccaagaaagacagttgatccaccatcttagccaatcatcaggagatccacatgtgcttttggtgtccttatatgatccttgtgctcgtcaacaagatccaagcataagcagctttgaagctctgagaacgtttttggtggagtcatctgcagcttctgttcagatccctactccttgggaggacaagttgtacttcgtttgcaatactagctgtgatggtctgatatgcctcttcagtttctatgaactgccgagtattgtcgtcaatcccaccactcgatggcatcgaactttccctaaatgcaactatcaactagtcgctgccgacaagggtgagagacacgagtgctttaaagtcgcatgccctactcctggattcggtaaagacaaaatcaatggcacatacaagccagtttggttatataattctgctgaattaggcggccttaacgatgacgacgaggactacgacgacgaagacaaaaacaacattagtatgatttgtcaaggcaacaacaacactagtactttttgtgaagtttttgattttaccaccaaggcttggaggtttgttgtcccggcgtccccctaccggatacttccttaccaagatcctgtatatgtagatgggtcacttcattggctcactgagggtgaaaccaccaatgttttgtctttcgatcttcatgccgaaactttccaagtcgtgtctaaagctccctttctccaccaccacgactactctagtagagagttgatcatgtgcaaccttgatgatcgtttgtgcgtatcagaaaaaatgtggcccaaccaagtgatatggtcgttggattcagatcacaagacatggaaggaaatatattccatagatctcaatataacttcttctttgtttgggagtaatggattcgcactcagaccactaggagtttttgacaaagacaagttgttgttttgtaaacactaaatacgggggatcaattgataacacatgatcccaaaacaaaatcttatgaatttgattacagatttttttccccgacgactgcactccctggttgaaaattccagagtttgaactctattttc

SEQ ID NO: 163575 - DNA, 617 bp, Arabidopsis thaliana landsberg
atgacgatctcggatgtcgcctacatcagatctctccccgtcaacggtttgttttgctacacgcgtggtgattcgatcgcggtttgtaatcccaccactagacaaatagttaaattgccagatgtggaatccaacggaagagacgtatacacacgtcttgggtatgatccggttcaagaccaatacaaagtgttgtgtgtaatgatgttcgatgaacacgacgccaatcaacaagatatccaacaggaacacttcgttttcacgctaagctctcaacaaaaagagtggagaaagattgacataaccaaagaagaagatccttaccgccacatgaaaggtgggatttgcatagatggtgctatacactatggagttttgtatagaaaaatagctagatttgatgttagaaccgagaagattgagttcattcaaggaccagaagactttaatgcaatctcatgttattcaacacttataaataaccaaggaaaattagcatgtgtagcgtttgacccctactgtaacactgagatgggtatgtatattctacaagatgttgagaaacaagaatggtcaagcatcataacttgtgatgtgcctagtgagtggggagattt

SEQ ID NO: 163576 - DNA, 680 bp, Arabidopsis thaliana landsberg
atggccaagccggagctgcctgatgagatattggtagatatcgtgagaagagtgggcaaggcgtcgtgtttacacatgggggcatttttaagagcaggaagtagaggtctggtgcaagtatacagtaaggaagtgttgatggaagctaatctagatgagttgtgcgttgagcctcctcaaattttcagcaaatcgataaacccaatcaatgggtttatcttcaaagcgggactgggtagatgtttcttcgagaagtgtttacattacaaaaaccctacggcagtctactttgaatcgcttagattagttacaagagaacaagatctagatggggctttggcaatggtcgcttctcttgtgccttattattcagtcccaacatttgcatatgcaatgttcttgctttgcgcagggaagtttgaaattgcagatgagattttcaagaccttctttgttgtacatgctcgtgaacgtacgaaggaaattcgagaaattggggagaaattatttgaagacctcaaaggattctaccctccttcacaaaacacgttcagagataagtgggtttatctaaacaccgacacacttagcttccccgagtgcgctcagtggcactattatcgaatcagttgtgacgactactacctattctggtgttacttcgcataagagaattgttg

SEQ ID NO: 163577 - DNA, 1251 bp, Arabidopsis thaliana landsberg
taaacatttggtatacaggcccatttgttagaagagatactctcaagacttccattgaagtctacgagagcagtgagatcgacttgcaaaaagtgggactctttattcaaaaatcggagctttattagtaaagcagcagcagcaagagaaggagagtctcagatggtcgtgttgatggatcacaatcttcatttagtgagctttttcttcggcagtgatacttctgtagagattaaaggtaaacgtatttgtctaaacgacgattcagattcagaacaagtcaagatatctcaagtttttcactgtgagggtttgttgttatgtatcttgaaagatgataactttagtcttgttgtttggaacccgtattggggacaaacaaggtggatcaaaccaagatgttctttcgaaataccccagggatgtgacatgtacaggtacgctaaaggatacggcaacaagagacgcaaccacaagatcttgaggtttatagattatgaattccattaccctcgagacaacgttgttttgtggtatgaaatctatgattttgagtctgatttatggacgactcttgatgttactactccacattggttgataaattgtggtaaccgtggtgttactctcaagggaaacacttactggtgtgctaaaaaaaggaactctgacctttttctcaatgctgatcatataatctgttttgatttcacaagtgagaggtttggtccgcttctgcttttgtcgtttagtgatttggatggtgttgttactctagcttgtgttagagaagagaagcttgcggctttagtttgtcacgaggatgttgttgaggtttggattacgattaagattgaggccaatgaggtattgtggagcaagttcttgacagtgaatgttgatttgggtgatgagattccgagttcactgacatatggtagttttttcatcgacgaggagaagaaagttgctatgatttttgataaaactttggatcgcggcgacacagttcacatcatgggagaggctggatatggtggtcaagttgatctcggagaaccggttaataaaagacgttgcccacttgtgtgctcttatgttccgagtttagtgcaaatcaagaaacctgcaggattccaaaggaaacagcaaagcaagttagaaaagcgtcaatatgttcgaaacatatcgaaacttcgcgcacttaaaacccaaagttcttggacattaagtatgtcacttgaatgtcat

SEQ ID NO: 163578 - DNA, 1997 bp, Arabidopsis thaliana landsberg
agtgattcaatcagcaatctacccgacgaaattcttcaccatatcctctcctttattcccgagaccaatttagtgatcagaacctcggtcttgtcgaaacgatggagacatgtatggtgtgatacaccttctctttcatttaatgattacagactggaggctccatttatagacgaaaccctaactcgctatacagcttccaagatgatgcgttttcacctccataccagcttgatcaacaatgttccccacttagaaagttggatcaagttcgccatgtcccgtaacgtggatcatctgtccctggatctctggaatcaagttgccaataagtttaagtttcctgatttcttccacatcaattcatctctcaagcaactcactgttgtgttagacttttctgatacgatgattgccatatgctcctccgtgtcttggacatccttgaagaagttttccttgagttattgtgggttacctgatgaatctgctaagattttatctggttgtccgattctcgaatgtttaacattgtatacactgcagaaaactcaatgttcttgatctcaccaaatcgctgcgcttgagaacattagaaataaacagcgacattagaatgccagggccaatgcagattgtggcaccacagatccattgtctcaaattgagaaacactcaattaccatgtactttagttgatgtctcatcactgaaggaagctaacttaacatttgcattgactcattttctaaaaccatcaaggctgactttcttcaagtcacgctgttaaagatgttggaaaagttgcccacgtgaagaagctactttgggtgaaaactttcttcaggtaaatgattagttattattattttcctttaggttaggaatgtttaatctatggtatatgcatggtctgaaatacagcgttatctttctgttagatgttatctactgacgagcttcgtggtgtcccttttccgatgtttaaggttaagtctttgactcttgacacagtcatctttcagtatgtgattcctggtatagaaagagtgttacaaaactcacctgatttaaagaagctaacattactcacaaaggatttctaccataaaccggtatattttactaccatatatataaacctcttttattttccatgattaccttttttgtcatccaagaaccatgttttttttttctgttgtgcagggtgagtatcttggcgaccacatggatttgcaaggctttaatctcgatcaatgttggaaatcaaaatatggtgtcttttggaacaagtcatgtttggatgtagagtcagagcacgttgtttcattcgtggaacttatgcttaaaaacacaaaggcattagacaagatggtcgtactgttggaagaccattacgttaggtttaaagaggtggttccaagactttctcacaactataatatctccattgccctctacaccttcaagccgcaaagttagattagaggtgaatatgatcattgagtcttattgagcattttaccccaagttagattcttgattttgattttgatgaaaaccagctgtataaccggtgaaaaccagcgttgattatgtccaagatagtattaaaagaagagatagtagttagttagttttttttgtgtaagtcacaagttcttacgaaattagagagggaaaaattattgaaatgtgtgttgctattaaccttttggatgtaatctctctatcagattgttaatttactaattcttttgaaccctgatattggaaatttacatctagttctagctctagctcaaaaacgatgtaaattaagctctaatttttttcagtcggtaagttttcaattatagaataacatgtcagtcagtattttgtttttgttatgccgataacatttcaattttggtgtggaatgtgtagttctacttgacatgataacgaacgaagcctcaagcctgtatatacgagataaaatcgaagtagat

SEQ ID NO: 163579 - DNA, 1296 bp, Arabidopsis thaliana landsberg
gacactgttacaacatttcgctacaatactcgatcttcgagccgccatggaatctctaacactctcagagtcgtggaatcaacaacatcggcgtcgtcacctagggttaggagacggaggaagaaggtttcagatgaccggaggagcacaaactcagatctgcttccgatggatctgataaaggagattcttaaacgcttaccagccaaaaccctagcgaggttcctctgcgtatcgaagctctggtcatcaatcatccgcagccgagatctcatgaaactgttcctcaccgagtcttccgctcgaccaggtcgtctctttttcaccttcagacgtaaagatgattgtttcttattctcgtctgaagaatcctctgtagctacttaccttttcacgattcctgcatctggatacacaaacaattgttcctttgttcacggtttgatgtgctatggaactactgcttatgcttctcaacttgtggtatacaattccagcaccagaagatccatcacattgcccgaaatcgatgcccggagttttgtcgtgaaacacttgttgggctatgatcccattgatggggtttacaaagtcttgtgtatgacagtgccaaggcttgttttacagaagaagaagaagctacgggagaagcagtttcttttacaggataagcctttacctgttatacaggttttgacattgggaaatggtaattcgtggaagatgattgaagatccttactctcattatcctatctatagccagatttgcatcaacggtgttttatattatcaagctcgtgctgaaccagatttagagcaactttcattcatgagttttgatgttaggtctgaaacatttgatcttattaaagcacctggtaatgactatcgtccggatgactgtgtttcaactatgacaagctaccaggggaagctagctatcgtgtctcacgaattttctgttgatggtgctagtatggttttgtgggttctagagaaacatgaatggttgaagaagaactttgttttgcctaattcatggacaagttcgcacttccttacctatcattgtttcgttaacgtcactgatgctggggagcttattttggcaccgatttctttgcctgatccaccatattatgttatctattatgatccgcaaagacagtctacgagaaaagttgtgatacaaggaatcacagagcataaccgtaagctgtcccgttgcaagaaacgacatccatgtattctatactatgtattttctagtcaggttgagagtcttatgtttatg

SEQ ID NO: 163580 - DNA, 4254 bp, Arabidopsis thaliana landsberg
atggacaagatcagtcagttgcctgatgaattgctcgtgaaggtactatcatttctttcaacaaaagatgctgtaagcacgagtatcttatcgatgcgatggaagtctctttggatgtggctgcctaaactggagtacaattttaggcattattcagtgtctgaaggccaggggttagctagatttattacttcgagtctgcgagtacataaagctccggctattgaaagcttgagtctcaagtttaggtatggagcaattggatcaattaaacctaaagatatttatctctgggtttcacttgcagttcatgttagcaacgtccgtgagttaagtctaaagctttttaattttgcggagcttccaactaaattgcccaaaagcttatgtaaatgcaaatcgattgtgatcttgaaactgaaagacgagattctcgttgatgttcctcgtaaggtatgtctcccctccctgaaaacattgttccttggacgtgtgacttactcggatgcaaattctcttcaccgacttctttccaactgccctgttcttgaggatctagttgtggaacgagataaaattgacaatttggggaaattgagtgtggttgtcaagtccttgcagagactaaccctaaagatgtctcgtccttgtcatcttgatgggattatgatgaatactccttctttgaagtatttgaaagtcactgatgaaaggctagagagtgatagtgataatgagagtgacagtgatagtcctcgatacttctacgattttgaagatatgcctaagttggaggaggcagattttgtattgacattccaaaatatcaaaaagttctttggatcaatcacatctgttaagcgtctttcgttatgcttgggagtctacaccgaataggtaatctgtttccatcactctatccatctcattgttgaacaataaaccaggttttcttgaagttgaatcttttgtcatcttatgcagtctttatatcatgagggtcttgtcttcaaccagcttgaacaattgaagatatgttcatgtgattcagattggtcaattttacttgcccgattactcaaaagctctcccaatttacgagagctcgaggcttacgtgatagaagtaagtttgttccttagagacctatactcttggttcaattaactatattgtttaagccaaacttctcatgtttgatcacaggatcatccagataggcgtgtggatctaccaaatcagtggggcaatcagctgaattgtgttcctaaatgtttgttgtcgagtctcgaaacgttcaagtggagtgagatgtatggattgctgcagaaccagatggatgtggctaaatatatcttgagaaatgctcgatgcttaaagtctgcgacaatcttttttccgacaacctatgctaaagaaacaagagatgagatgatcgaggagttgtcactttcttttcaaggtccagagacatgccaagtcttcttccattgaggatgtgaatcataaggattcaaacttgcatttccatagacactaccctccatattacaatggttttttatttgcagcaacttgatctaaacttaaggtgttttttttgtctttgttttttttgtatactttatctttgagcatactatttttcttgagacattggctttatctttttctgagatcttaacaaataaccgaactttgaagagacaagacatgacatgaacttttatttgcagcaacttgatcataacacaagactcaaacacaagactcttcagcttatagatcataaagtagatcaatagcacaaaaagatatcaattagaagatcagtcaacaatatagatgttgtagaaatttgcatcctaataaagttcattacaaagaaatgacccaagtttcccacacatatccgcatcaaaaaaacaagtgccataacattgcattaagatttatattcatattaccaaacagagcacttgcacacatacatcaacacaaaaccggcaagaacatcatagggaacactcatttgaaaaaacccaaggaatagattagactatgtaaacacaaacaagtatctaggaaaatcaaaaacgtaagtaatagaagaatatgttaccttcaaagaagaacgagatttctcggcgctctcaaacccgggttctcaaacccgaaccggaccggaaccggaccattacccatttaacccgacggtttacccataagccgagccctaattttttcaaagaaaagggccctaaacttttcgtcttctcgcttcccttcctctatctcgtcttctcgcttcccttactctatcccatagaaaaaccctgaatttggtttggccaatgatgtcaaaactcttcattgatacttaagaaagttttctccattgttcttcttatggactcattcacatttggtaagtctcttcaacgattttggttttgtgagcacttacttcttcttacaagaattacatgtctttgttcaggttgtaactgttggtctgtttctgtcacagaatgggttcgaaaaagaagtgttttgatggttctagagatggaatcagcggcttacacgatacaatgatttgtcacatattatcatttcttccagctaaagtagctgcttcaactaccgttcttgccaaaagatggaagcctttgcttgcttttatgccaaaccttgactttgatgaatccttccgtttcgatcctctaatgtcttgtgtagagaggagtaagggttctgaaagttttatgcttgtcgtggatagtgtattgggtttgcaagcgcaagcgaatgctacgttgtccaaattgtacgttgagtgtcaaggtgttgagcaaaactcggtgcttgaatggatacataaagtgttgaaacgtggtgtgttagatattgatctacatataccgtcatctcgcggttttggttccaactcgactttttatcctctaccttcagagatctttgtgagcaagacattggttaggctgaagatacagtttcaggatggtgtcaacgttaatgtggaaggtgatgtttctcttccaatgcttaagactctccatcttgattatgttaagatggatactagaatgtttcaaaaacttctttctggctgtcacatgctcaaagaattattgctgatgaatttcatatgggaggagtcttcagaacctgaaccttgctacttaaccgtgtctgtcccaactctgaagatactaaaattttctcgttttgaaaattttgtgaaggctaaagattttaaaccgatcgtgttatggtcatttgatattccaaatctattctttctagagtacttggatacaattgcggacaagtatcaacatgtgaggtttgactcccttgttgaagctcgtcttggtctttgtacgacctctaaacagattaaaaatgacaataataatgtaacaaagcttttcatgggaatatgtaatgtcaagattctttacttgactgaagatgctctcaaggttagtcacatctttctcctaatctttttaatttctactcagatattgacaagtgagtaattatatatgtcgttgatttggttttcttttaggtacttggttgctgccgtgaaacaatgccggtattcgagaacctgattcagttaactattaagacaggactacatgtaggatggaaatcattaccacctctactcaagaattgtccaaatctacaaacccttgtcttcgaggtactgtatacatcctataaatcaacgactgagatgcttttgaaacacacacataatcagactttgatactaattcttttatgtttcagggactgaatcatatatataggaaaagaagatcttgcggggacgagaataggccgtgcatgtgcaaaaatctggataatatgagggtgaagaaggatattgatgcttgcctatcatcaagttcggtaaaggttataaagatattgaactttggtgacactggtgatttttgccagttttgggagattgaagaagattgtgagttttgggaaattgttgaagatgtagcggatcacatagagcaggtcaagcaattcctaaagacaatgccggatcttgaacaagtgatattgtactacaatacaccaaaagatgaagatgtgatgaaagtgttcaagaaacttgagaagcttcctcgagtagcgtcagctaattgcaatgtccaaataacatcgaagaacctcagcttgtcatctacttcgact

SEQ ID NO: 163581 - DNA, 1491 bp, Arabidopsis thaliana landsberg
tcaaactctgcaaaattttcaacctcgtcaacgtaactttttttttttcttgtaccttttttgatttccttgcatttgaagaaacttagcataatggttactttggttttttacttctatccattttcatacttacgtatagggatttgacggttcgattctgttagacgatacgtcgagcatcacatgagaacaaaacgcggccctaaaccgcaattcagctagtgaatttaatgtgatcactgatcgataacatcaaatcagcggtttagaaagcatgttccgggttgtatcttgcggtgacatcttagccattgcagctagaaactctgtcgtaggcgtaagctccatgtttcttctctcaatcttgttttgaaacttaaaaaaaataaaccggtctaaaatatgaattcttctttatatatgttgaagcttggaggaccgaattaatatgtgaaagtaggaagaagagatgcaagaacggcgagtcaagcggcagcgaatagtaacattccggcaccgacttcgagtctgagccaactcattagtagtttcagtgctgttggactctccaccagagatatggttgctctctctggttcgtttcatttctcctctatcttaacccaactcctatttattatatacgcaactatatatgttttatagattatggttgattgcaaatttcaaaacatcgattactattacattgctaaaacattgggacgacagagaaattttcttaatctgtgattaattatctttaatttaagaatatttcttattcgttcaccatatttgtttaactaaaagaaacatagaaagaaatatttcaaaaggaccaagagtcaacagagtcgacacaaaataatataatttgattatgttttttgttttttgtcgactttacttttgtttccttgtgaatttgttttttcaacacatttttgtaacgcaccaccgacttttctgttttttcttcccaaaattacgtaatcatatttttcccaaagttacgtaatcatataaatgactgttaacaaataaacaagtcaactattaaactaatcattcaaattatttttgggtttgtttacaggcgcacacacgatcggacaatcccgttgcacgaacttccgagcgagaatctacaacgagacaaacatcaatgccgccttcgccacgacacgtcaacgaacttgccttagagcctccggttccggcgacggaaacctagctccactagacgtcaccacggcagcttctttcgacaacaactacttcaagaatctcatgactcagagagggctcctccattccgaccaagtgctcttcaacggcggctctactgactccatcgtccgtggatacagcaacaatccgtcgagctttaactctgacttcacggcggcgatgataaaaatgggtgatatcagcccgttgactggtagtagcggtgaaatccgcaaggtttgcgggaggaccaac

SEQ ID NO: 163582 - DNA, 1478 bp, Arabidopsis thaliana landsberg
aaaatggatttattactcatatccttaaccactatcataatcgccgcctacatgcaaaatctacgacgtcggggatccaacataccgccgggaccaccaacgcgatttctggtcggaaaccttcatcaactgaaaccattatggacgcagtctttctccgagtggtcacagacttatggccccatcatatcggtgtggttaggatcacagctagctgttgtggtctcgagctctgacttagccaaacaagtgttgagagacaaagactaccaactctgtaaccgacacagaaccgcaaggatgactcagaacggcagcgatctattttggtctgactgcggagcacattatgtgaaaatgagaaaactctgtacactcgagctcttttctttgaaaagcatagagtgtttcaggtcgatgagagagatggaagtaagttccatggttaagtcgattttcaatgacttcatgagcgatgatcagaaaccagtggtgttgaggaactatctagattctgttgctttgaacattgtttcaagattagttatcgggaaaacattcgaacccaaagatggaagagagtttagatcaattgtagaaagggagactcgcttgcccggcgcaaccaagatgcttgattacaccgtttggcttaaacgtctttcgtcatggttcactagcgacaaggcgttcatgaagcacatggctcggaaaagaaattggtttaaacgagctgtaatggatgaagtatatggaggaagagatcaaaagtgttttgttcagagtctgttagagttgaaagagaaggatgagctgaccgaggagactgtgatgggactggtctggaacatgttaactgcaggagctgacacaaccgccataactattgaatgggcaatggcagagatgatcagatgcccgaccgtgaaagaaaaggtgcaggatgagcttgattccgtggttggatccggacggttaatgtctgatgcagatatcccaaaactgccgtttctgcaatgcgtactcaaagaagctctccggcttcaccctccaacaccattgatgcttccacacaaggccagcgaatcagttcaggtaggtgggtacaaagttcctaagggagccacggtttatgtcaacgtgcaggcgattgctcgagatcctgcaaactggagtaacccagatgagtttagaccagagaggtttcttgtggaggaaacggacgttaaaggtcaagactttcgggttcttccgtttgggtcgggaagacgggtgtgtccagccgctcaactcagcctcaatatgatgacattagcactaggtagtttgttgcattgtttctcatggacatcctctacacctcgagaacacattgacatgaccgagaagcctggattagtttgttacatgaaggctccattacaggctctagcttcgtccaggctgccacaagagttgaccttaactttaatctagat

SEQ ID NO: 163583 - DNA, 1395 bp, Arabidopsis thaliana landsberg
atggttaagcttttgacttgttttcgagtgatttcttgactttactttgtttcttttgatagatatgggacgcgctaaagccgctgcaggcagttctagagcacgcatgagcaataccgaggcaccaacaaacgatgatcctaataaacgtcctatcacaggcacttgggatggcatggacacaaagatgctagtagacttaaagcatatcgatgtgaaggagttcatcgccacatgtcgactcacttacacggatcctgagaacccgaaaccaagtcaaggaaaactcacattcattcttaacaagaagcactacagcaagacactgtttgagatatgcgacatgtatggatttacaaaaggagaagcggttgagttccctaaattgtcttctgaggttgctgatgacttttggaacacgatagctacaagaccatatcagtcgcgcaaagcgaagatatccatattaggagtccggttgtgcgttatgttgcgaaagtcctcggtagcgttttgcacttcaagccagtgattgcagctgtgacagagaccgagttaccactacttttctacggagtcaaacatctactacccgcgtactcagatcttccagctcccgacactaatgtagctgcggttttgtgtgacaccttggtgaagatgaagaatactgttctacatcagccgggcagagcatcttcgctggtaccgcccttaccccattgttcaggggttgcaatttcgacctctctaagaccgaaacaatttgtcccccaacggtagcggaaatggatttgcagtacctgattcgcactaatttcaccaagccagatagtcaattataccaatttttgggtagagacggggttacttattattgcaggatacccaaccagcacattacctcatttctctccgcgacgaatctagcgttcgaaccggacgcgcagtaccttgttcgtaacccttccggagctgtcactagacgacgccagactgcagcggcccagcctacagctgaccatgttgtcggtaatgatgacgatcatgaggattatgctgatcaggcaccttccgcgcacgaccagccatacttgctgctacctgaggatccagcaccataccttgtttcatcaccaccagcgggtgacgatatctcccagcagatggcatggatgatcgaatcgacaaggaagaacaacagtatgatgcacatgatgtatagagccattttaaagatcaggccttgtgtttgcactcgcggaggaggagtggatgatggagaccgtgaacaccggtccaaggctactgaggatcgacatgctgagaggttggtccctgctgctggagcgtccacctcgcaaacaccaccagagcagtccctaggccatcggt

SEQ ID NO: 163584 - DNA, 1419 bp, Arabidopsis thaliana landsberg
aatactctccaacaccaacaccgtattcaccgcttccgccatatgtttacaacagtcctccaccatatgtttataactctccatcgcctcctccatatgtttacaaaccccctccatatatctacagttctcccccaccacctccttacgtctatagctccccaccacctcctccatatgtttacaactctcccccaccacctccctacgtctatagctcccctccacctcctccatatgtttacaagtctcccccaccacctccctatgtctacagctccccaccacctcctccatatgtttacaagtccccgccaccacctccttatgtctatagctctccaccacctcctccttatgtctatagttccccaccaccaccaccatatgtttataagtctcctccaccacctccttacgtctatagtcctccaccaccaccgccatatgtctaccaatctcctccaccacctccttacgtatatagctctccacctcctcctccttatgtctacaagtcgcctcctccaccaccttacgtctactcttctccaccaccacctccatatgtctacaaatctcctccacctcctccttatgtctatagctctccaccaccacctccatatgtttacaagtcgccaccacctcctccttatgtttacagctctccaccgcctcctccatatgtttacaagtctccccctcctcctccatacgtctacagctctccaccaccacctccatatgtttacaagtcgccaccacctcctccttacgtttatagttctcctccacctccaccatatgtttacaagtctccaccaccacctccttacgtctatagctctccaccaccacctccatatgtttacaactctccaccaccacctcctccatacatctacaactctccaccacgacctccatatgtttacaagtctccccctcctcctccatacgtatacagctctccaccgcctcctacatatgtttacaagtctccgccaccaccaccctacgtctacagttctccaccaccacctccatatgttttcaagtcgccaccacctcctccttacgtgtatagatctcctccacctccaccatatgtttacaagttttcaccaccacctgcttacgtatatagctatgcaccaccacctccgtatgtttacaagtcgccaccacctgctccttatgcttacagttctccaccgactcctccatatgtatacaagtctgcccctcctcctccatacgtctacagctctccaccaccatctccatatgtttacaagtctccaccaccgtctccatacgtctacaagtctccaccgcctcctccgtatgtttacaagtcgccaccacctcctccttacgtctacagctctccgccaccacctccctatgtctaca

SEQ ID NO: 163585 - DNA, 1350 bp, Arabidopsis thaliana landsberg
atggggtcaaagttccatgcttttatgttcccatggtttggtttggttttggtcacatgactgcatttttgcattttggctaacaaactagctgagaaagggcataaactaactttcttgctccccaagaaagcactgaagcaacttgaacctctcaatctcttcccagactgcattgtctttcacactcttaccatcccatctgtagatggcctccctgatggtgctgagacaacctcggatatccctatctcgttaggcagttttctcgcctcggctatggatcggacatgtaatcaggtcaaagaagcagtttctgttggtaaaccggatctgattttcttcgattttgctcactggattccggaaatagctagagagtatggagtcaagagtgtcaatttcataacgatttctgcagcatgtgtagctatttcgttcgtccctggtcgtagtcaagatgacttgggtagtactccaccgggatacccttcctccaaggtgttgcttcggggacacgaaaccaacagtttgtcgttcctctcctatccgtttggagatggaactagtttttacgaacggatcatgataggacttaagaactgcgatgtcatttcgataaggacatgccaagaaatggaaggaaagttctgcgatttcatcgaaaaccaatttcaaagaaaagttctcttgacaggtccaatgcttcctgagcctgacaatagcaaaccgctagaagatcaatggcgtcagtggcttatcaagttcgatccgggatcagtaatatattgtgcattgggcagccaaatcattcttgaaaaggatcaattccaagaactctgtttaggaatggagctgacaggtttaccatttcttgtagcggtaaagccaccaaaaggttcatcgacaatccaagaagccttaccaaaagggtttgaagagagggttaaagcacgtggagtggtttggggaggatgggtgcagcaaccattgatattagctcatccatcaataggctgctttgtgagccattgtggtttcgggtcaatgtgggaggctctagtgaatgactgccaaatagtgtttattccacatttgggtgagcaaatattgaacacaagactgatgagcgaggaactcaaggtctcggtagaggtgaaaagagaggaaacgggatggttttcgaaggagagcttgagcggtgcggtcaggtctgtgatggacagagatagcgagctcgggaattgggcgaggaggaaccacgtaaagtggaaggagtctctgcttcgtcatggactaatgagtggttatgttaataagttcgtagaagcattggagaaactagtccaa

SEQ ID NO: 163586 - DNA, 1062 bp, Arabidopsis thaliana landsberg
  unsure (1)..(1062): unsure at all n locations
atggagatactcgcgagggttccgaccgtatctttggtccgattacaatctacatccaaaagatggaacgttctgatcgaagataagagatttgctgagcagcactttactaatgcaccaaggcactctctgcttnnnnnnnnnnnnnnnnnnnnnnnnnnnnnnnnnnnnnnnnnnnntcatacaattcacaacaacaaggtaaacataataagtcaacttcgcctgaaagatcctctttcaaattttttagaagaagttgatatatgcaacgtctttcattgcgacggcttcttgctatgcaccaccgtagacaatagactcgttgtttcgaatccctgttctcgtgatactaagtggatccaaccaagaatttttacaagaaattcgatatatttgctcccggtaaatcatcatgcaccaagtccaaaatcatgaggatggatgaattttattattatgataggccagaaaaatattaactacgaaatctatgactttaactctaattcgtggagagttgttggtaagattacggactggttcataccaaggtgtatggacagtggcatgtctgtgaatggaaacacttactggcttgcttctactaataaagacttgaccagtagtagttttttacttggttttgatttttcaacggagaggtttgtaagggtgtctcttccgggtgatcatctctctgatcctgtttttgctttagcagttactagagaagatccaaaaatatgtgttgctatcattcaggaactccatatagatgtatggattgcaactacgattgagagtacgggagctgcgtcatggagcaagttcctatcagttgaattagcaaatctctacgagcgtatttgcttggatagttggatgaatttcttggtcgaccagaagaacaaagttttggtgtatcgtgatggtaactattggatctccaatgttttcttgcacgttgtgggagaggataaatgtatacaagtggatcatcatgattcagtgtctagatgctcacttgtcgtcaattatgttccaactttggttcatatc

SEQ ID NO: 163587 - DNA, 4847 bp, Arabidopsis thaliana landsberg
atggtcaacaatcaaatccccggtaacacagttgatgcagagggaaacccaatccctccaatccagacagacgttcctgaagccgctgctcccgcgaccctagcagaactaagaagtatgatggctcaacttagcagaaggtgaacgatcaagaacaggcaaatcgatccttggcacaacaactcgaagcagctacctcccaaggacagatcaggactactcgtttcggcgcgaggcattttcaggatcgacgagcagcagcagatctcaacccaacacggctcgtgttccacacttctggcaatactacaaggccccgcagcagaaccggaccggaaattggaagagatcgaaccgagccggcaatcttgggaaatcgggaaacgaatctagcggaaggaaatgatccgcaactccttcctccccgagcagaaattgcccaggtcgattagatcggggtcttggacgatgaagattcagaagagaacgttcggtgggctgaggagtacgccagagaacaggaaataagcgctatcaagctctccctagccaaggcagaaaacggatgaagctcgtaagatcccaaatgcataacgcagtctccttggcctcgaacattgacggcattctggaagagtcccacaacacatctttcacacacaggatctccaacgcaataatctcagatcccggaaagctaaggatcgaatacttcaacggatcttccgacccgaaaggacacttgaagtcaatcatcatctccgtggcccgagccaaattcagaccagaagaaagagacgctggtctctgtcacctgttcgtcgagcacttgaaagggctagccctggactggttctcgagactcgaagggaattctgtggatagttttcaggagctatcgacacttttcctaaagcaatattcggtgctaatcgatcccggcacatcagacgccgatctatggtcattatctcagcagcctattgagccacttcgagatttcctcgcaaaattccgatccaccctagccaaagtagaaggaatcaacgacgtggcggctctctctgctctgaagaaggcgctgtggtacaagtcagaattccaaaaggaattaaatttgtccaaaccacaaacaatccgagacgcattgcaccaagcactagactatgtttttcatgaagaagaaatagaactgctatcgaaaagatacgagccgccgaagcaaacgccttgtagcgaaaaatcccaacttagcgctccaaaccacaaaaagggcgctcaaggccggacgttcgtacaccatgaaggacggaattactccggaacccataattatcaagttgatacaccccgaggccgaggacgaggacttagaagaaatcggtgggggcgtaaccatcgaggacttagaagcggagaaagccaaaatcgagcatgtcaatgctgtggcaaatctcgagcaggcagctcccgcggtgaacctcgaaggacccaaaagaggcaaaggcaatcgcgaggcagatgacgacaagccagaagctgctcgaggaaggatcttcacaattttaggagattcggctttctgtcaagacacgacggcatcaatcaaagcttatcaaaggaaggccgactcaaatcataactggacgcggccatttagcggatcagatgacgaagttacttttcatgaaagcgataccaacggtttggatcgtccgcacaacgatcctttagtcattacactaaccattggtgatttcaacgtcgaatgagttctggtcgacaccggaagcacactggacatcatttttctgacaacgctacgagaaataaagatcgacttgacgcaaattgtaccaactccgcgaccagaactggaccatcaagttaccactccgagaaaccactatgactctcgggaccatcaagttaccagtccgagccaaaggggtaacaaaaatcgtcgatttttctgttaccgaccagccgaccgtgtacaatgcaatcatcggcacaccatggttaaatcagttctgagctgtcgcctcgacatatcacctatgcctaaaatttcccacaaacgacggcgtgaaaaccatctggggaaaccagaaaaatgctcgcatctgcttcatggcagcgcacaaactcaggaaccccgtcactgaatcgacggccgacgcgaatcataagaaggccaaacttggccgaaccgaagaaaagtcgatctccgagcagttatagcaattaaagatcgaagaagctcgggaatctacgataccaactcccgatccggtcatctcaatttgccttgacgacgcaaagcccgagcgatgcgtagaaatcggcggagatctaggagaagaactaacagctgaactcaccactttcctcaaagaaaacgtcaatactttcgcctggtccccagaggatttgaccggagtaagtgttaacatcgtatcacacgagctcaacatcgattcaacttttaaacccatcaagcagaagaggagaaaattgggtcgggaacgagcagaagccgtaaaagccgaggtagaaaaattattgaagatcggatccatcacctaggcgaaataccccgactggatcgcaaacccagtcgtagtaaaaaagaaaaacgggaaatggagagtttgcgtagatttcacagacttaaacaaagcttgcccaaaggacagcttcccattaccacacatcgatcgcctcgtagaatcaacttctggaaacaagctactgtcgttcatggatgcttttgctggttacaaccagattatgatgaaccccgaagatcaagaaaaaaccgctttttacacagagcaaggaattttttgctatcgagtgatgcccttcggactcaagaacgccggggcgacctatcaacgcttcgttaacaaaattttcgccttacagatcgggaagaccacatagcccacctgcgcgaatgtttcaaacaactaaacttatacaacgtcaaacttaaccccacaaagtgtcgctttgatgtaagatccggcgagttcctcgagtacctggtcacccaccgcggcatcgaggcgaatccaaagcaaatcgaggcattgttgggaatggcatcgcctcaaaacaagcgagaggtgcggccctcaaccgtttcatcttttgatcaacagacaaatgcttagccttttacgatgtgctacggggaaacaaaaagttctagtggacgatccgatgtgaagaagcttttcaagaatctcaagaagtacctagcaacaccacccatcctcgccaaacccgtgatcagagagccattatatttgtatattgccgtatcagatactgcagtcagcggagtgctattccgagaagacagaggcgaacagaagccgattttctacgtctcacagactttcaccggcgcggaatctcgctatccacaaatggagaaacttgctttagcggtcgtaatatcggctcggaagctacgaccctattattaatcccattccatcgtagtaatgggatccatgccactccgcgccatcttacacagtcaaagccaatcaggacgtctagctaagtgggcaatcgagctcagtgaatacgacatcgaatatcggaacaaaacatgcgcaaaatcgcaggtcctagctgattttatcgtcgaattacccaccaaagaagctcgggaaaacccactcgacacaacttggctcctacatgtagacggctcgtcatcaaaacaaggctcgggtgtaggcatccgcctcacctcgccaacgggtgaaatcctcgagcagtcattcaggttaaacttcgaagctaccaataatgtggccgagtacgaagcacttgttgccggacttaatctagctcgggggttaaagattgaaaaaatccacgctttttgcgattctcagctcgtcgcgaatcaattcaacggggaatatacagctcgggacgaaaaaatggaagcctacctgattcatgttcaaaagttagcaaaacatttcgacgaattcaagataacaaggattccaagaggagaaaattcatcggtcgacgccctagctgctctggcctcaacctccgacccgaacctgagaagaatcatcccagtggaattcattgaaaaaccaagtattgagctcggcgaagaagaccacgttcctcccgatacaaatcagcacggatcaagatgacccgaacgaatgcagcccaaagtggatggaacccatcataagctatatatccgaagggaaattgccctcggataaatggagggctcgtaaactcaaagctcaggctgcacgtttcgtcttactagggaaaaaactttacaagtggcgattatccggacctttgatgacctgcgtggaaggagaagcgacttgcaagatcatgaaggaaattcacggcggttcgtgcggaaaccattctgggggaagggctttagccatcaaaataaaacgccacggattcttctggccaacgatgatcaaggattgcgaaaaaatttcaaaacaatgtgaaaaatgtcaaaggcacgcgccgacaatccatcaaccagccgagctcttgtcatcaatctcctcgccatatcccttcatgcgatggtcaatggatataattggacctatgcatccctcgaagcaaaaaaagttagtcctcgttctaaccgcctatttctctaaatggatagaagccgaatcttacgccagtataaaggacgctcccctccagaacttcgtgtggaaacatatcttatgtcgccacgggataccgtatgagattgtcacggataacggctcgcagtttatatcgacccgtttccaaggcttctgtga

SEQ ID NO: 163588 - DNA, 1617 bp, Arabidopsis thaliana landsberg
tcaaggagacttacacaatcttacatggtatcagagcacatctctctttgattgcttcttctctcttatatctcttctctattctcttttccttactcaaaaatggccgctatcatgaacccagaaaagatctatggtgtctctaacatcaaatctcacattcctgtgattcttgacattgaagagagtaactacgatgcgtggagagaactctttctcacccactgcctctcctttgatgttcttggtcacatcgatggaacccttcaacctgccaacgccgctgatgttaactggcagaaacgtgatggaattgtgaagctctggctctacggaactctcacaccaaagcagttccaaggttcgttcgtctttggttcaacctcaagggagatctggctgagaattgaaaatcaattccgcaacaacaaggatgctcgtgctcttcgtttggacaatgagctccgtacgaaagagattggtgacatgaagatcgccgattactgtcgtgagatgaaaaagcttcctgactctctctcaaatgttgatgctccagttcaagatcggacactcatgatgtacgtgttgaatggtctgaatgctaagtttgacaacatcatcaatgttatcaaacatcgccagccacttccgcgcttcgacgacgccacaaccatgttacaagatgaagaggatcacctgaacggctcatcatgaagaccgaacccaacacatgtggaccactcatcctcctctactgtgctttttatctcagaggcgcctcatgtgaactaccaacgctcaggtcctactcagatgacttacagaggacgtggcggaggcaacaacaggtttcggggcggaggacgatcctcatatggttacaatcgtcaaggcttcaactcctggaacaggccaccattctatccaaacccgtatcagatgtggaatcatcagtggggatacccactgcagctgaatgccaatggacaaggcttttttggtcttttacctccttaccattctcagcagtcaaacgctcacttcaggactcctaaacctgagagcacggctgatcttgcagaagcattcaacaccttttctcttcaagatccccctgattctcagtggtacatggactctggtgcaacagcctacttgacttctggtgcaggtaataatctccaactttctctttatcctagcatcggaaaataagtcatttttgggaatggtggttgcattcctgttactgccactggatccttatttattgctaataaatctcgtcccttaactcttcataatgttcttgtcacacgtgacataatcaaaaatcttgtttcggttcgtcgatttactaaggataacaaatgctcaatagaatttgacccatttggcttttctataaaggatcttcgcaccaagaggactcttcttcgcaatgatagcagtggggatctatatccggtttttccagctttcaataaaacttcagctccagcctctacctttctagctcaatcgtctgacatatggcatcgaagactaccacaccctagcaacgatgttttgaagacgttaatttcttattcttattttcatccaaataaaaagact

SEQ ID NO: 163589 - DNA, 1177 bp, Arabidopsis thaliana landsberg
atgatgagaagacgcaacaaaaagaccaaaaccgtgatcagcaatccagaaacgttggaagagagaaacaagtttgatgaaatccctcatgacctagtgatcgagattcttgggagattgcctgccaaatctgtagctaggtttctcacagtatccaagttatgggcaactagtatccgcagtctagatttcatcaaatcttacccgcttggatcttcgtcgaagcctcgtaccttagttgcttctagtgaaccagatctcaatatggaacaccacgaatgatacttcttctcgcagtcttcctcatcaacgtctcttgtatcacgtgtgagtgtgacatgtccgctcccatattactatgatcatcactaatatcatcatgttaatgggttgataatcattggacatggtccagagcaagtcgtggctaaccctagcacaggtcgaaccatacctttaccaagagtcaaaaccaggagaacgatagcaacaagttttttcgggtatgattctgttagtgatcaatacaaagtgttgtgtatgacggtaaaagcgtatggtgatctgagggatgagtcatctcaacatcaagtattcacattgggagctaaaaagaaatcattcagaatgatagatactagtattattcctcaccgtccttgctctaacggtgtgtgcatagatagtgttgtgtattatgttgctaaaacgggggcgggaatgttgcatctatgcataatgagatttgacttgagttctgaaatattggatctttttactagtttgcctcaagagattcgacctccaagtgaattattgagaatttgataaactacgaggggaaactagccataccaacggaaactacttcatatacatatgttgtgtgggttatagatcaggattctgaaaaacatgaatgcttgaagaaattaactttcagtattgaaccagcttggaagaattcatttgttaatctacgcctcataggctacactactcatacgtgtgagtttattttgcatcaccacactataattatgagatttatgtctcccattgcaatcccgacacgaatagttttagacgcactaaggttgaagcatccgcagcgttcaagtttccttttataagagcaatggtttttccggattacgtagagagtgttaggatgttg

SEQ ID NO: 163590 - DNA, 2476 bp, Arabidopsis thaliana landsberg
tgaacctttagcatttgtaaagcggatcaccattctacacagattacttcttttgctgtcacttcttccattttgcctttccaccacctgttgttaagagtaaaaccgaagccatgttagaggaattacttagagagctctttgaaatatgaataaacattaggaaactccatcagtatgttttaacaaaggaatctatcaatgcagttgaactgttgagtagacaacaacaacacctcttcgagaaaccatctacgagatggactgagagcagccttccaattgcttatcatgctgttttgctggattgtgaagatgagttggtgcaagttgaaaagaatcaggttcattttcacactgtagaggtagtgtcggccgataccgaccactggtgtcgctcgacaccaacaactatataagagaagtcatgctgtgacaaagtcatttctaccagactcgacctcgacaatgtcgaccgacaacacctgggtgttgatggacaccagcacgaaacaaacgagctagtcttaacgtttgacagtgtaggatcggtgcaagacaatagtgtcgaccgacactcacctagtgtcgagcgacattgggcacatgctgcacctatcagccttgagtttccactggtccctaaacaagtctacatgcctacaattcccagtccaatgcctcaaaagtctaagaaagagattcaggaggagcggtgcaagggtccacataagcaggaggacaaaaggtagacattggttgtctcggaacatattgtagagctgaattgtagacagactaaggatagtcgagttgtagcacgggtgtcaatcaacaccaccacctgtgtcgataaacaaaaataattatatgttacctgataagtgtgtattttgcatgttttgagaatccatttgtcatcattttagcatcatatcatcactgttttataccatttcacatcatttgtaatcactttgcatgtttaggatagttttgcatgcttgttgcatatttgtgttgatttcaggtgatttggagctgtcgacgagctaactggaagaagcggacctgatcatgtcaaaccactcgaccccctggtcgagtaggagcttcaagatctcaagagatcactcgacccccggtcgagtagaagacaccgccactctaccacaacactcgacccccaggtcgagtgtcttcatctccatctcctgaccaccactcgatcacatcactcgacccccaggtcgagtgacttcatctccatcttctaaccaccactcgatcacatcactcgacacccaggtcgagtgacttcatcccattgccagaccttcactcgatcactctaccacgaagcggagtaccaccatctctatcactcgactgcatactcgactgccagcttcagagtcttctccattcttcactcaaccagacactcgagcacaaggaagaaaagaagactccagcttatcactcgaccactgactcgaccacctgggtcgagtaccgttcttaatccgtcccaatactgcgtcgttttgagtattagggtttcagaatattttgctataagtagcatgtactttatattttcgagaaaaagtttttatctagttttattttgtagataatgtgttcttgaccttttgtaatccggatttctcttaatctattcagtattcagtattcagtatttgttcttgattttgtctactgttgttcatcctgttatcatcttgctattactctgttgttatcatgtcttcattccattcaacgtttatgttctctacaatgatgtttgagtagtgaataggtttctgaggatgggttagagtagtttagaattcttagtatgctaggtggttgagtttgattgatagatcccttcaggattagttgttcttaatgcctattgctttctgatcaactggaatttgagcccagacatttccgcgcccaaaaggtgttcgatgaaatgtctgaaccactaattccagagattcgtggccctgtaccaagttattggttgcagggagcgttttggctttaaattgttgattctatactcgatcatatccttagattttccaatagcatttccgggttttccggaaatggttttttgatcttgcatcggttcttagtcttctccttggatacgaagtttctcccgagccgggtcaagttggtccttgggtcgcggtcgggcggctcgtgtcctggagatacgcctgagccggatgacgtttacatgaggcatttcgagatccgcttcaggatggttctctgaaatgacgctcgagctttttcaaggtcagatcgggataactccataacaacgtccgaggcgtttctgggtcggctcgggatggctctttgaagtgatgccagagacgtcttggggccggctcagtgtggtcctttgaaatgatgcccgagccaacgatcttggccttaggcattt

SEQ ID NO: 163591 - DNA, 718 bp, Arabidopsis thaliana landsberg
atgtttaggataggtttgcatgcatgttgcatatttgtgttgatttcaggtgatttgtagctgttgacgagctatctggaagaagcggacctgatcatatcaaaccactcgaccccgaggtcgagtaggagcttcaagatctcaagagaccactcgacccccaggtcgagtagaagaaatcaccacttcacctcaccactcgaccccgtggtcgagtgtcctcatctccatcacctgaccatcactcgatcaaaccactcaacctggaagtcgagtgtcttctgacaccactcgatcacatcactcgacccccaagccgagtgacttcatcccattgccatacctctactcgacctgatcactctatctggatgtcgagtatcaccatcaccaccactcgactgcatactcgatgacaagcttcagagccatcttcattccgcactcaaccagacactcgagcacaaggaagaaaagaagactccagctattcactcgacctctcactcgaccacgtgggtcgagtacagttcttaacccgtcccaatacttcgtcgttttgagtattagggtttcggtatatttggctataagtagcatgtacttctcattttcgcagacaagaagtttttatctagttttatttccgcagaccttctgttctagactttttgtaatacggatttctctttatctattcagtattcagtattcagtt

SEQ ID NO: 163592 - DNA, 728 bp, Arabidopsis thaliana landsberg
atgtttaggatagttttgcatgcatgttgcatatttgtgttgtattgaggtgactcggagctgttgacgagctaattggaacaagcggacccgatcatgccaaaccactcgaccccaggtcgagtagacgcttcacaacctcaacagaccactcgaccccctggtcgagtagaggacatcaccatttcacctcatcactcggccctgaggtgatgtgttttcacctccaccacctgaccatcactcgatctcatcactcgaccccgaggtcgagtgtcttcacctccaccacctgaccgtcactcgatctcatcactcaacccctaggtcgagtgtcttcacctccaccacctgaccatcactcgatcacgtcactccacctagaagtcgtgtatctccatcaccaccactcgactacatactcgatggcgagctccagagtcttctccattccgcactcaactataccctcgagcacaaggaagaaaagaagactccagctattcaatcgacctctcactcgaccaccttggtcgagtactgttcttaatccgtctcaatactgcgtcgttttaagtattagggtttctgaatattttgctataagtagcatgcactttacattttcgaggacaagtttttatctaggttttattccgtagacattgtgttcttgaccttttgtaatccggctttctctttatctattcagtattcagtattcagct

SEQ ID NO: 163593 - DNA, 1835 bp, Arabidopsis thaliana landsberg
atggcgtcaaatctcttcacaaaaatcccttcactctctgcaattttctcggtttacacatctctctctgccttcacgatcctcttcaaaaccattctccatgagttcattcccgtcaatatccgtgactttatcatctccaaattcacagactacttttctttttatctcaactccaatttcacgttcatcatcgaggaacagagcgattacgttatgaatcagactttccgtgcagcccaagtttacttgccgactcttctctccagaatcaccaccagaagtctcctcgtcagttcgagcgacctcaagaatccgatggctaaaccgaaattcggaatcccagtcaaagccaaaatcatcgatgaattcgaagggattcgtcttgaatggactcttctctctgcaaaagataatgataatccttaccagagtaaacaaaaacggtaactttcctctggatgtaaccctaataaacggtaaaaccctaaaatttgtcaacaaaaagggtacttgtcaacataaaaccctaaaatttgggatcttttcactcactctactaaacagagttctaaccctaaaatttgatttttttttttcttttcttgtgatcactcttctaaactgagtctacttacgtttatttgtcatcaattcgtatttttgacgttctattctcaatatagaaccctaaattttgggggtttttgttcacttaagtctagttacgtgttctaatgtctatgctgtgttttgtttatgttctgagttctgacactatttgtaattcccatttttcaatgttaattttggctttcaggtactttcatttgacgtgtaagaaggagtttagggacaagattatgtcagattacttcacatacattgcaaaatcatcggtgaagatattgacacataaagaaaatctcaatatctacaattacaatccagactgtctgagatgggaatcagcaatcttccaacaccacaccacatttgaaaccttagcaatggagcctgagctcaagaacacattgatccgtgacctagacgctttctccaatggaaaagacttcttcaaaaccgtgggacgagcttggaaacgcggttatcttctttacggtccacctggaaccggaaaatcatcgcttgttgctgcaattgctaattttatgaactatagtatctatgatcttcagattcagagcgttaaagatgatgcaatgcttagacagattcttacctcaaccgagaaccgctccattcttctcattgaagatcttgattgcagtggagcagatactacttgtagaaaggaaaataaagatgaaacagagtatggtgagaatcagaacaagaagaagaagaaggatcctaaggtttatgagtttgtatatatatataagcttcactaatttgcataaaacatctctgattttggtgttctgattcttgttatttgttgtttaggtaactctgtctgggctactaaactttgtagacgggttatggtcaagctgtgtagaagagaggatcatcatattcacaacgaaccataaggagaaactcgatccggcattgctgagaccaggaaggatggatgttcacatactcatggattattgcacgcctattgttttcaagaaacttgctgcattgtatcttgaaatcgaagaacacgagttgtttgaccctatcgagaagatgttcctgaggtgaaagcaactccagctgagatcatagagaagcttatggtaagcaaggatccggatgttacgcttaagggtcttgttgagtttcttgaatccaagaagatgaccaaggagagtgttgat

SEQ ID NO: 163594 - DNA, 1053 bp, Arabidopsis thaliana landsberg
atggataagacagcgacattgtgtctcttgttcttgttcacattcctcacgacctgtttgtataaagatctctgtaaccaaaatgacaaaaacaccctcctcaagatcaagaaatctctaagcaacccttatcacctcgcttcatgggaccctcaaaccgactgttgctcctggtactgccttgagtgcggcgacgcccccgttaaccaccgtgttaccgccttaaccatattctccggccagatctccggtcagatcccggctgaagtcggtgacttgccgtatcttgagacccttgtcttccgcaaactctctaacctcaccggtacaatccaacccaccatcgccaaactcaagaacctccgaatgctcaggctcagctggacgaatctgacaggtccaattcctgactttataagtcagctcaagaatctcgagttcttagaactttccttcaatgatctctctggttccattccaagttctctctctacgttacctaaaatcttggctcttgaacttagcaggaacaaacttacaggtaaagaacgatcttttcctttattacatcattcagtgtcttgtctaaacaacgatctttatgttgtaggttccataccagagtcatttgggtcgtttccaggaacagtccctgaccttcgcctatcacataaccagctctccggtccaatacccaaatcattaggcaacatcgactttaaccggatcgatttatcccgcaacaagctccaaggtgatgcttcgatgttgtttggttccaacaaaacaacctggtctattgacttatcaagaaacatgttccagttcgatatctcaaaggttgatatccctaaaacacttggtatcttggacttgaaccacaatgggatcactgggaatattccggtgcagtggactgaagctcctcttcagttcttcaatgttagctacaacaaactgtgtggacacatcccaactggagggaaacttcagacatttgattcttattcctattttcacaacaagtgtttgtgtggtgctcctcttgaaatt

SEQ ID NO: 163595 - DNA, 659 bp, Arabidopsis thaliana landsberg
atgtttaggatagttttgcatgccagttgcatatttgtgttattttcaggtgattcggaactgttgacgagctaattggaagaagcggacctgataatgccaaaccactcgacccccaggtcgagtagacgcttcacgacctcaacacaccactcgaccaccaggtcgagtagaggacttcaccacttcacctcatcactcgaccccctggccgagtacccccacaagagtcactcgatcaattcactcgaccgccaggtcgagtgtgttcacctccaccacctgaccatcactcgatcacaccactctacctggaagtcgagtatcaccatcaccaccactcaactacatactcaatgtcgagctttagagtcttctccattccgctctcaaccagacactcgagcacaaggaagaaaagaagattccagcttatcactcgacctctcactcgaccacctgggtcgagtacagtttttaatccgtcccaatactgcgtcgttttgtgtattagggtttcagaatattttgctataagtagcatgtactttacattttcgagaacaagtttttatctaagttttattccgcagacactgtgttcttgaccttttgtaatccggatttctctttatctattcagtattcagtattcagta

SEQ ID NO: 163596 - DNA, 734 bp, Arabidopsis thaliana landsberg
ccaaaccattactcctatttcatccctataatgaccaagtcttaccggtatctaaccaaaccggtccgattgggctaaaccagctcactccaacacaaatcctccaaattcagacagagttacatctccggcaaaaccaatctcgtcgtcgcgctggtagtcatcttctcaccgctaaaccaacctcaatgaagaaaatcgacgtagcaactaaaccggttaaactataccgaggcgtaagacagaggcaatggggtaaatgggtagctgagattcggctacctaaaaaccgaacccggttatggctcggtacgttcgaaacggctcaagaagctgcattagcttacgatcaagcagctcataagatcagaggagacaacgctcgtctcaatttcccagacattgttcgtcaaggacactataaacagatattgtctccgtctatcaacgcaaagatcgaatccatctgcaatagttctgatcttccactgcctcagatcgagaaacagaccaaatcagaggaggtgctctctggtttttccaaaccggagaaagaaccggaatttggggagatatacggatgcggatactcgggctcatctcctgagtcggatataacgttgttggatttctcaagcgactgtgtgaaagaagatgagagtttcttgatgggtttgcacaagtatccttctttggagattgattgggacgctatagagaaactcttctgaatc

SEQ ID NO: 163597 - DNA, 1898 bp, Arabidopsis thaliana landsberg
ttgatgctatccatgttgatctcttcactgctaagatcttgtcgaaattgccagtgaagtccatagctcagtgtcgttgcgtatcaaagctctggtcatcacaaattcgtcgtccatattacaacatgttgttcccgatcatgtctccagccccaccgcggatccttttcaccatcgaaaatgcacaagggttgttcttctacacttcacctcagcctcgaaaccctgatgagaacacgtctcttgtagccacccttcatcataggacaagtggaaacaatttacgtataacaagtcctcctgttggcggactgttatgtcttgaacatgatcgaaagaattattcaagagtgctggtgatttctaatcccatcacaggagagtttttagctttgcccaaactgagaataaacgagattaagaaagagttgttatatctaaatgaaacatatatttttgggtatgatccaatagacaaacagtcgaaggtattgcgtatcacctcgtcgtcgtgtcggttacccaaattcggtcagtatcatgttctcacattcgagtctggaaacaaaaatctcttatggagaaagactgaatgttgcacacttcattttcctatgggagatattagggcgatgtgcataagtggtatcttgtattatgcagcggatgtctcaactaactttacgatcgcttgctttcatgttaggtctgaggattttacttttattgacattaatcaagacataaaaaagatgggacaaaccctcaattttatcgacgtcaagggtaaattaggtgctttttgttacaaaaaattctctaaaacttttgaattgtgggttttagaggatgcagagagacatcaatggtcaaagcatatctaccaattgcctaatagatatttgaacaaagttgttgctgctggagtggttggtagtagcgaaattgtgttttacagaaagtatacacgagaacaagatcagttcttcatagcttactacaatctcgagagcaacattatcacaagagtaatacttgaagttccactattgtttagtgggacgtgttgtgttaatgcatttacaaactatgtaggagatgtgagacttatgtaagcgtttacttgttccaaaagtaaacttatctcaatatttatctttgtattttatgtttcgtgcgtgtcttttaaagttaaacattttcttattttggtttcggatggttaacatttttttggaatttttgatttatacaacgctcagattgttatgatggtgattctttggttttgttattgatatatatgaaactttaaaacattattcgtaatcggcagtgaccaaataacaatgatcataatgctaaacaatttaaaacagcaaaaagatattgctatggacaaattcgaatcaaattgtcgatgcataattcggcagtttttcacgattcggcaaatataacacttttgatgtacaaattacaaaatacacacattgactatttgtacgggtcctaagaatggcaaatagatcagcacatctgtatgttgacaacacataaagattagaccttttttctctctctatctctcttgtggaaatttactttacatgttttaacttaaatgtaaagaagatgagttacaaaagatgcatgaatgagacatgagttgatgaatgatgcttccttcttcaatcctaagtttcttactctctctgttccaaagatgaacagcgaatgtatttttgcgtaaatgcgtaagcctcttccgcaaccaagcatcgctctcattcgtgggcgctctgtagaatcctttgattctagtccagtccaccggataaaatgtagatggtggaagaacagagaatcccaaatctgaagaggaggatatcttgatt

SEQ ID NO: 163598 - DNA, 573 bp, Arabidopsis thaliana landsberg
atgacggtagaagaagatcctaaagcaactccgtcattaccagactacaagcctttaccttcatcatcaagtcacgagctaaaagacgccgttctgatctcatcacatccttcttctccctcacgacgccgtttcatcatctctatatttctcatatcttttgcctcgatcctcatctacatcttctggccgtccgatccacgcatcaagatcatacgggtcaaaatttcccacgtgcacgttcaccgccgtccggtgccgtctatagacatgacgttgctcgttacgcttaaggtatcaaatgctgacgtgtactcttttgacttcacggatcttgacgtcacgattgactataaagggaagacgttaagtcacgtgagttctgatggcgggcacgtgacggcttttggttcttcttaccttgacgcggaggctgagcttgacggcgtcacggtgtttcctgacgtcattcatttgattcacgatttagctaaaggctccgttgaatttgacaccgttacggagactaacggaaaacttggcgttttgtttttccgtttccctttaaaggta

SEQ ID NO: 163599 - DNA, 2079 bp, Arabidopsis thaliana landsberg
atgggcgactctagggtttcgagcgcaggggagcggtatgctaccatggtggatattggtgtgaagtctcgtcctccaggagcaccaccagatgatccgggagtatgggtgcagaaagttaaggggactagtgtgggaggagtcccgatcccagaagaagtcatctcagaggagtttgttgcagagagactacgggtggagtttcctaatggtgaggatggtgagccggtcattacgattggtcaagaagtggtggatgcgatgaatggtctgtggaaaaggtgtatggtagtgaaagtgttgggtcgtcatatttcgctgccggtgttgaatcgaaagttaagagaattgtggaagccttgcggtgcaatgtacgtcatggatcttccacgacaatttttcatgattcgttttgagatggaggaggagtatctggcagcgcttactgggggcatgtggaaggcgtttgggaactatctcatcgcacaagcttggtcgcctgattttgatcccttgcgggatgagattgttacgacgccggtgtgggtgcggatttcaaactttccatggaatctgtatcataaggacatcctactagggattgctaatagcttggggaaacctattaaggtggacttaaacacactcagttttgaaaggggacgttttgccaggatttgtgtagaaataaatttgtagaaacctcttaaaggaacagtggtggttaacgaggagagattctatgtctcatacgaggggttagcgaacatctgctcacagtgtggtatgtatgggcaccttgttcataagtgtcctaggggggtctcgcatgaaataggggaggagagcatgagtgtggaagtgaccaaaaatgttcagaatccggttgttcctacacatgatgcggatggattcaccccggtaagacaaaggaagatggtggctcaggttaaccggaatgtgaatgcacaaggtggggctagagttaatgtgaatcgcaatccaagggatcatgtgaggaaaaaaggaaatgagttggttgtgacgtcgaactcatttggtaagttgggagaggatgtggaaacagaggggagaaggaaagaaattattggtgttacggataataaggagaatgaatatcccatgaattcagtggtccaagataggagtggggagcaagttaaggttaccaaatttgtcgctacaacggagggaaaagggaaaggagtagttagagaagggctacgggataggcgggcctggagtcataaagcccatgagagtaatggggttaggcccaaatacactaatcactctaaaccaactagaggggttgtgtttggctcaacaagacgtgattttgagctttcggccaacggtaaacgtgtgaggatagaagagataagtctgggtcgaccaggagggtcattcttcaatggagttgacggagaacctggacatgagaaacccgatttggtcggcatggaagtggcggaggagattaggccgagtttggaggataatgtagtggttgtggcgggagggactcagggggccgcgccagcgttatcgacggagctcactcttctgtgacgggttgccccagttattctttttctttatcgattattaatgatgaattgcattatgtggaattgccggggggcgaataaacctaacttcagaagatcgattcgatatattttgaagaaatacaagacagatttgttggcgctctttgagacgcacgcagaaggggcgagagcagatcggatttgtcatggtttggggtttgaaaatagtttcagaatcgacgcagttggccagagtagtggcatttgggtactgtggaggtcagaaattgggaaagttgagattaaggagtcttcagagcagttcgtctatgcgcgtatagagaatgagttcgagatacttaatttaatagttgtgtacgctgctcctacggttagccgaaggagtggtttgtgggagaagcttcgtgaagtaatcaggggaatagatggaccagtggtgataggtggagatttcaacacaatagtccgagttgatgaaagaacg

SEQ ID NO: 163600 - DNA, 645 bp, Arabidopsis thaliana landsberg
atgaacactccaatcaaactcttctttctcttcatattcgttgccgcaaccgcaacggctaaaccagtcaaacgaacgaactaccttttcacaccgcacgccaaagcagtcgcgggaatctgcaccgttatcccaacggacacaagtctatgttgcaaaacccttaaacacgttcctaccaatgaccccatcgaactaatccgagcattagtggctgccgctgaaacatccgtcaaacaaagtgtgactttcctctctggaatcaaaccaaaacacatgtcagacgcaaccgcaaccgcagtggtcaacagctgcgagaaaaacttgaattacgcgttggaagatttcgccgatttttggaaagctacggggaaagatgtaacgacgttggctcataattattttacgtgtaaaaaagagttaatgtcaatcatggggtatcattcgacttgtttggacgatattgaagacaagattttgttgaaggaagtggggattgggattggagttgggaagaatctaacaagtgattcttttgatgtgtttaataacttgaatactattttcaagacttttggtattaaggtgaagcttaacgaggaagacactttgccccgaccgccacccttgtctgattattattac

SEQ ID NO: 163601 - DNA, 6792 bp, Arabidopsis thaliana landsberg
  unsure (1)..(6792): unsure at all n locations
atgcaacaagctatgacagatatgacgcaaaagttttcaagcgtggaaaaaaccgtcgaaacattgcaaacagaccatgtatcactcagtcaaaatgttagtaccattcaatctcgtgtccgttctttaaatgcaggaaattctagagttcggcgaaccatcttcggacccccaaattcacttccgcgaaatgcaacaagcgaccaaacgaccccggatggtacaaacgcggagaatcaactagaagatggagaaacgcatccgttagatgataaccagttcggtgaccagcatgagcaagaaaacttcgatcagctcgaaaccatgagagaagtaagtcgggaactcaaagaaatgaggtcgaaattccatcaagctacaagttcggagccagacatcaaccaagttatcgaggaggctaggcgaacaccgttcacccgcgaattgcgagtttgagaatcagagattctcaaaaactcaacttagaaccatataatggtttggaagacccgaaaggctatctcgcagcttttctaatagccgctgggcgagttgatctaaacgaagccgatgaagacgcagggtattgcaagcttttctctaaaaatctatgtcccctacccctgatgtggttcactcagttggaaccaggatcgattagaaatttcaacgaactatcggcagtatttttaaataaatactcaattctgatggataagagcatttcgataccgacctctggaatctatctcaagggccgaatgagacacttcgggcttttatcaccaaatttaaaaacgtgctttcaaagctcccaaggatctcacaacagtcggctctatcggctttgcgaaaaggactatggcatgattcgaggtttaaggaagatctaatacttcataagcctgatactattcaggatgcattgtttcgagcgaacaattggatggaagtcgaagatgaaaaagaaagtttcgcaaaaagaaataagcaagcaaaactagcggtcacttttccaccaaagaagttcgaacctcgggaaaatcagggaccaaggaagtttggttcacaaccattcaataacaacgtcggaaagcagtttcaggggaaaggaaggtcaaatacctgggtccgagatgaaacctcgtactgcgatatacatagagtcacaagacatctgaccaaagactgcagtatccttaaaaggcatatcgcagaattatgggccagtggagacatttcaaaattcaacatggagaactttgtcaagcaatatcatgaatcaagggataactcagaggctcaaaactctaaaagaccaagaccggctggcgaagaggaaccaagaactttaaatggtaaaataaacgtaatacttggaggatctaaactctgccgtgattccattagcgcaatcaagaaatatagacgcaatgttcatctgaaatcaagcttaagtgaagaagtagactttcaaggcacttcgatattattcgaggaaaaggagacacagcatctcgaaagacctcatgatgatgcacttgtaattacgttggattcgaagtatcgaggatcctcattgataccggtagttcggtcgatctaatttttcttagcactttggaaaggatggggataagcagggccgacgtggtaggaccgccatcccccttagtggcttttacaagcgaatcgctaatgtctctcggaacaatcaagctaccagttttggctggaaagatctcgaagactgtggattttgtcgtttttgataaaccagcagcctataacatcattcttggaactccgtggatctaccaaatgaaagcggtcccctctacttatcaccaatgcctcaaattcccaactccgagcggagtggaaacaattcagggannnnnnnnnnnnnnnnnnnnnnnnnnnnnagctagccaccgattaaaaattcaatagcaattaacgaagcccgcaaagaaaggagtagtcccgagattccctagcgggcagaaagtagatgatgtcgtggtcgaagtaattctagagcagataaaccagatcaaaaagtccgaatcggagctactttatcgggcgaagtaaaggaagccttgattgagctgttaaaaaggaacaagaaatcatttgcctggtcggcagcagatatgcttggcatagatccaaatataatttgtcacgagttaaatgaagacccgagtttcaaaccggtgaaacaaaaaagaagaaaactcggagtggagagagctaaagcagtaaacgacgaagtggataaacttctgaaaattggatctataagggaggtacaatatccggaatggttagcaaacacctttgtagtcaaaaagaagaatggaaaggatagagtgtgcatcgactttacagaactcaacaaagcttgtccaaaagagagtttcccactttcacacatagatcgtcttgtggaatcaaccgccggaaatgagttgttgtcctttatggatgtcttctcgggatataaccaaatcatgatgaatccggaagatcaagagaaaacgtcatttatcacgaataggggcatctattgttacaaagttatgccattggggttgaaaaacgcaggagcaacttatcaacggctggtcaacaagatgttcaacgaatatctcggaaaaacaatggaagtctacatcgatgatatgctagtcatatcattacaaaaggaagaccatgttaagcatttagaagaatgtttcgcgacccttaaccaatatcaaatgaaggtaaacccggcgaagagtacgttcggagttccatccgcggaatcccttggttatattgtcacaaagcgaggaatcgaggcaaacccaaacaaaattaacgcctttctctaatatgccgtctccaacaaacttcaaggaggtgcagggattgactcgaccggattgcggcgttgaatcgtttcatttcaagatcgacggataaatcattacctttttatcaaattttaaagggaaacaaagggtttctttgggacgagaagtgtgaggagggattcggacagctcaaagcatatctaaccacgccacccgtattgtccaaacccgaagcaaatgagaagctctatttgtacgtttcggtgtcaaatcatgcagttagcagagtcttgatccaggaggaccgcggagaacaaaaaccgatttactacataagcaagtccatgacagatccagagaccaggtatacaaagattgaaaaactcgcaatcgcagtggtaacttcagcttggaaactgcgtccgtatttctagtctcatccaatcgaggtgttatcaaatcaaccgctctgaacaattctccatagcccgaaccaatccggaaggttgacgaagtgggcggtagagttaagtgagtatgatatagagtacgagagacgagtcgccatgaaggctcaagttttggctgactttttaacagaattgccggtacttggagggcaggagcagccagaaaatcagacttggaggttacatgttgatggatcctcatcaaaaaatggattagagtctcccacctcggaaatccttgagcagtcattccggttactattcactgcatctaacaatgaagcagagtatgagcgttaattgttggactcagattggcacaaggagttggagccgatgaagtgatcgcctactataattcgcaactggttgttaatcagttcaatggagactatgaagccaaagattcaagaatggaggcatatcttgaggtggtcaaagatttggttaaaattttaagaagttcgaactcattcgtatacctcgaggagaaaacataactgcatatgcactcgcagctctggcctcaacaccagaccccaaagtcaaaagaatcattccggtagaatgcatttcggagagaagcattaggaggaaaaagagacactcgtcattacaagatcttgagctgcagcccgagatcgcggcgaacctgggattgaactaccacctgtcaagagacgaaaatcaaaaggggcagccgtacctaagctagccgtgcaaaaagataatagggtcgaagaaattgtagagccaatagaagatataggtccagaaaacactgttaaagctgaggccgaaccatagattgacgaagacttcctcgaaccaaatgagcatcttgaaccagaagctcgaatatttcatgaaatcgaccaaattccggctaaagattggggggactgaatggagggagccaataaaacattacattgttacaggagagctcccaaagaatagatggcaggcgaggaaaatgagaatcgttagcgcgtaattttgtctatcgaaagattctttgtatagacgaggtgtaagcgatccctatttactttgcatttttgggcccaaagtcgagatcgttatgagcgaagtgcacgaaggtttgtgtggcagtcattcttcaggtaggctatggctttcaagattaagaggatgggatactattggcctactctgatcacgtactgcgttaagtatgcccagcgatgcaaacgttgccaactccacgcacctcccatccattaaccttcggagttattttctttgatctctgtcttatacccgtgcatgaggtggacgatggacatgaatgtaccattgcacagagcaacccgagcagtacagtatctcttggtcctaactgattactttttgaagtggattgaagccgaaacagatgtaaacatcacggattcggcgtaaaaaccttcattttgaagaatatcataggtaggcacgacgtcccatacgagatagttacggacaacggaccacaattcatctcacacgagttcgaagctttctgctcggattgaggggtcaaagttagttattccactccgcgatattcacaagggaatgatcaggctgaagccgcgagcgaggcaattctacttaatcctaacaaacgtctaagtcatttgaaaggaggatggtatgatgaacttcaatcggttttattggcatatcgcacaactcctaggcgcttgaccggagaaaccccgttctcattggtgtacggaatggaggcagttgttccagccgagctcaatgtgccaggacttcgtcgaacagaagctcctttaaacaaagaagaccgcgatgctagacgattcgctagataccatcaacaagaggcgagatcacgccttgatccgaattcaaaattttcaacaagcagcagcccgatattacaaatcaaaaatcaaaagcagacctttctttatgggtgattatgttttgaagcgtgtgttcgataacaagaaggaagaaggagcaggcaagcttggcaataattgggaaggtccctacattgttaccgaggtggtccggaatggtgtttatagattaaaagatttagaagagagacccgtccaacgtccttggaacatggtgaacttgaagaaattttatgtttaaaaaggtaacgcattttttttacatgaattacggtgtggcttgatcccgaaatgggtacgtaggcagcttgcaaacgagttcagctattaataaaatttattttattcatttgaagaagagttcgactatacgaacaaacggaggaaaagagttcgacggtgcgaacatacaaaacaggaagcaaggttacatttattaaaggcgaaaacaataaaaatagtcgaagtcttaaacacacttcgaactaggaaatctttctcgtcttgtaaaatactttgactcctcggttggcaagatcaaggatgggcatcatacaatccgggatgcgagcaaattcggtgattccaagctcgatccagtccccgggatgcgagttggggtgtgtagctcccttgatatcacggtgactctccgcagcatctggttgattttctttcgaagtttcttcttttttgatgaacgcttttggtgctgagccgcaaaagctttgatgaaggccattgcaatttcttgatctctgcttgaaagatccttgattaatgcacatggagctctgatctgagatctgaaattgcgaagtggggagcgtcctctgtccgacacattcggcatctcctcagtcgatcatcccaaccctggaaaagtctggcatggactccgagcatcgatggttaaaagccataactacacaaaaggaaaaacgaagggtaggtgaagaataaagaaaacacagagaatcaatttatagaaggattcgtaactttcaaagatgcgattccattcaaggccggagtgattcgcggaagcatttacgtcgctctcatcgccctacattcaaagcatatctccaaaacaaatatttgtggaatcaagcaaaatagggaagcttccttaaataaaaatgggtcgaagcccagaggaaagtccatacgaaaataaaaaaaaagagtttcaagtttcggggaacatttagggaagaggctcgggaacaggctccttcatcgccggttcggagttcaaggtagatgccttgttcttgacattcacctcgggttcattcttcacacgcttccaagggtgctgtcctcttcctcgtcatcatccttttcactgtcagacatgatcacttggaccggagcgtttacgggtccggggacttgacctcgagcacggaggtacatccgaagtatgtgcgggatcttcgccacacagtctaagttcctccattcccattggaagggatcgctctccatggccctcaccttcctttcgatacgggcaattcgggcctcgagcgttaatatgagtaggaa

SEQ ID NO: 163602 - DNA, 1089 bp, Arabidopsis thaliana landsberg
gaagcgttcgaagaggccacaaaggagcaatctttgatccttaaagggaagcggacgaagcgacaacgtccacaatctcctattcctttctctatctcccctcctatagtttctaccccggaacgcaacatggaagaagaatacactgatcttgattccaaggacaatgctttaggaaatgatgagggcaaccacaaaaaggatggtgtgatcacatcttcatcttcatcagcctcttggtcctcccaaaacaatccaacattgaaggcagcagaagacgaggaagatcaagacatagccaattgtttgatactccttgcccaaggacactctcttccccacaacaatcaccacttaacaaacagcaacaacaacaacaacaacacgtatagatttaccagcaggaggtttctagaaacttcttcttctaacagtggtggaaaagccggttactacgtttatcagtgcaagacatgtgaccggaccttcccttcttttcaggctttaggtggccatagagctagccacaagaaacctaaagccgcctctttttactccaaccttgacctcaagaagaacacgtatgcaaacgacgccgtttcacttgtacacacaaccacaactgttttcaagaacaataacagtagatcacttgtcgtgtacggtaaggcaagtaacaataaggttcatgaatgtggaatctgtggagccgagtttacgtccggacaagccttaggtggccacatgagacggcatagaggagctgtggttgttccggcggtgatagcccccaccgtgacggtggccacggctgcggccaacacggagctatcactgtcttcgatgtcgttcgatcaaatatcggacggtcatcaggatcatctggcgatgccagcgaaaaagaaagctaggacggtcgtgtcactggatttggatctgaatctaccagcaccggaagatgagaatcgggtcaacggattcagctttgcttcaaagcaaaatcacgaacaagaacatcaacagaagaagcaaagagaagaaccaaagtctcttgtcttgtctgctcctactttggtggattgccactac

SEQ ID NO: 163603 - DNA, 1384 bp, Arabidopsis thaliana landsberg
  unsure (1)..(1384): unsure at all n locations
atcgaacaagtcgtatctatataatcgagaaagaggaaaagatcttttaaaccccaaaataatcaatcaagcaaataagcaatcaatcggaggaagcaatgaataatctcccagaagattgcatcgccaagatcctttccttgacaactcctctcgacgtttgccgtttatcggcggtctccagtatcttcagatccgccgccggctccgacgatgtctggaatcatttcttaccggctgatttccccgccggctttgcggcacctgctggtcttcccaccaggaagcaactcttcttctccctcgtcgataaccctcttcttatcaacggcactcttttggtaattaaccaaccttcttcttttaatcctttttacattcatcatcacatctgtttatcggttccgttttctagttttgtttttatacagccaaacgttgttactctttaagtctagaaattacactagtagtgtccattgttgtccgatcctgttcctggattaacgaaaatgtgcaaaagctctgttgtgtgtgtcaaattgttattcataatcttaattagattctgccaaattcaaattctgttccggcaaatctaccacctctgtaacttgtagtcaaagacctgaaacctttgtaatcactcttattttagggttttatgtgggtttggactttatcactttagagatgtcttatctttctcttctttttattgctgtgatcatatattctgactgaattgtatannnnnnnnnnnnnnnnngagagaaagagtggcaacaagtgctacatgatggcagcgagggccttgaatatagtttggggacatgagcaaagatactggcactggatctctctccctaacaccaggtctctttctttttctgtgtttcaaactagacttcctcttctgcattgctctattataagatatgaaatgtttttgtgtgcacaaacaaacaggttcggagaagtggctgagctcatcatggtctggtggcttgagatcactggcaagatcaacattacccttctctctgatgacaccctctacgcagcttacttcgtctttaagtggaaccatagtccttacggttttcgccagcctgtagaaacctcccttgtcttggctgacaccgagagcactgacaatgttgttcagccttccatgattagtctcatgcaagattcaggcggcgaagaaggtcagtcccctgtgctgagaagagacggttggtacgaggttgaattgggacagttctttaaaaggagaggagatttgggtgaaatagagatgagcctcaaggagacaaagggtccttatgagaaaaagggccttattgtttatggcatcgagattaggccagtgccctaattg

SEQ ID NO: 163604 - DNA, 670 bp, Arabidopsis thaliana landsberg
atgtttaggataggtttgcatgcatgttgcatatttgtgttgatttgaggtgatttggagctgttgacgagctaattggaagaagcggacctgatcatgtcaaaccactcgaccccgaggtcgagtagaagcttcaagacctcaagagaccactcgaccccctggtcgagtagaggacttctcgatttcatcatatcactcgaccctgaggtcgagtgtcatcatctccatcacctgaccaccactcgatcacctcacttgaccccaaggtcgagtgtcttcatctccatcaccagatcaccaccgcgatcacacctctctacctggaagtcgagtatcaccatcaccaccactcgactacatactcgatggcaagcttcagagtctttttcattccgcactcaaccagacactcgagcgcaaggaagaaaagaagactccagctattcgctcgacctctaactcgaccacctgggtcgagtatagttcttaatccgtcccaatactgcgttgttttgagtattagggtttcagaatattttgttataagtagcatgtactttacattttcgagaacaagtttttatctagttttattccgcagacactgtgttctagaccttttgtaatctggatttctctttatctattcagtattcagtattcagta

SEQ ID NO: 163605 - DNA, 896 bp, Arabidopsis thaliana landsberg
atggtagagaagcacctttttgggccacaattgcagaagagggatagaagttgataaggctaaggctgatgtgatgatgcagtacagccgccaaaaactgtcaaggacataaggagtttccttgggcatgcaggattttacagaagattcatcaaaaatttctccaagttggccagaccgctcaccagactgctgtgcaaggaaactgagtttgcatttgatgaagaatgtttgacaaccttaagatgatcaaggaagctttggtcactaccccaatagtccaagctccaaactgggacttcccacttgagatcatgcgcgatgcttcaaattatgcaataggagcagttttgggccaccggattgacaaaaagctacatgtgatctactacgcgagcagaacgatggatgatgcacaagtaaggtatgccactacagagaaagaactgctagctatggtatttgcattcgagaaatttagaagctacctagtaggttctaaggtgacagtctacactgatcatgctactttgaggcatatatatgcgaagaaggataccaaacctaggctgttgagatggatcttattgctccaaaagtttgacatgaagatagttaataagaagggaattgaaaacggtgtagctgaccatctctctaggatgagaattgaagataaggtccctattgacgactccatgccagaagaacagctaatggctattcaacaactgaacgagagtgctcaaattttgaaatcactcgatcaagtatgtgccataaaagataagctttcgtggtatgctgatcacgtcaactacttggttagtggtgaagagcctccgaatatgttgagctatgagaagaagaagttcttcaaggacattaaccatttc

SEQ ID NO: 163606 - DNA, 3489 bp, Arabidopsis thaliana landsberg
gacaaaagatatttcataaatctaacattgaggaatgccaacattagcaaacggccaagcccatgtactcctaccaaacggcacacatcttgaaataagtgatgccttgtattcacccagctcaaagaggagcttgttaagtttcaaagacatacatcttaatggtttccacgttgaaacaaagggtgaagggaatagagaattcctacatgtaacagagatcgcccaaggacaaaagagagtcctaaaaactatacccgcattgtccactggtctttaccatactaagatcaatatgatcgaagctaatttggcaatgaacaaagagttcatagaggagttcactttgtggcatgaccggcttggccatccgggtcataacatgatgcgaaagctaatgataagtttaaaggggcacaccctaaaagaaaagagagtaatcccaaagaagctcacgtgtgctccatgtgcacaagggaaacttataataaggccatcaccggcaaaggtcaataaagagaccataaactttctggaaaggatacaaggggacatatgtggaccaatacacccaccatgtgggacgttccgatacttcatggtcctcattgacgcatcgacaagatggtcacatgtttgtctgttgtcctctaggaaccaagcatttgctaggttactggcccagatcatacgtctgagagcccattttccagattttccgcttaagactatacgtctagataatgccggtgaattcacgtcccaagcgtttaatggctactgtatgtccatgggggtaagtgtggaacatcccatgggggtaagtgtggaacatcccgtggcacatgtacatacacagaacggattagcggaatccttcattaaacgaatccaattgatagctcgaccattactgatgaggtcgaggctcccagtagccgcttggggacatgctgtattacatgcatcggaacttattcgtatcaggccatctagtgaacacaaatattcaccatcccaattgttaacgggtcatgagccagacatatcccatctaaggacattcgggtgtgccgtatatgtaccaattgctccaccacagagaacaaatatgggacttcagaggaggatgggaatatatgttgaatttgattctcccaccattataaagtatctagagccaataacgggtgatctatttaaggctagatacgcggattgtcacttcagtgaatccgagtttcctgcgttaggtggtgagacgaacaagctgggtaaaaaaataaaagagatagcatggaatcaaacatccttgaattggcaagatcctcggactctgatgtgcgattcagaggtccataaaattatacatttgcaaaagctagctaatgagttgccagatttctttgctgacccaaagagagttgtgaaatcgtaaataccagcttgtaatgcaccagtacgtattgatatccagaagggaatcaatgtaattgctaccgagtctaacccacagaaaaaacatggtagaccagtaggttccaaagataaaaatcctcgaaagactaagaaaggtgcaatgggaaccgaggtaaaggaaaccatagacctggtcgcggcaagtcctaaggaaccaccaaatgagattcgggacgccgaagctcatggtcctgaaagaattgataatgatgagatctcaataaactacatcatgtctggaataaaatggaaccgaaaaaaagtcgacgtcgacgagaaatttgcatatgaggtagcatatgagataaatgaggatcatgaacccacgtctataatagagtgcactcaaaggtcagattggctaaagtggaaagaagccattgacgtggagttaggttcattaaagagaagagatgtgtttggtccaatattgaggacaccatctaatataaagccagtaggacacaagtgggtctttgtgaggaagagaaatgagaaaaacgaaatcgtgaggcataaggcacggcttgtggcacaaggattctcacaaagaccgggagtagattatgaagagacatactcccctgtggtggatgcaacgacttttagatatctaataagtctggcaataagagagaaccttgacttgcggttaatggatgttgtaaccgcatatctatatggtccactggataatgagatatatatgagattaccagagggtattgagctcaaaggaaaagataagaatgggtctcgagaccaatactgcataaggctgaacaaatcgctttatggactgaaacaaagtgggcgcatgtggtacaataggttaagtgagtacttagtcaaagaggactatagaaatgaccccatcagtccatgcatcttcatcaagaagtttgctagcaaaggatttgtgataatagcagtatatgtggatgatttgaacatcctgggaacctctggggaaatcgccctaacagtcgaatatctaaagaaagaattcgaaatgaaagacctaggcaagacaaagttctgtttgggattgcagcttgagtacgtagataaaggaatccttgtgcatcaaaaggcatatatagaaacagtactcaagagatttaatatggacaaggcccacccattgaccagcccaatgcaggtgaggagcctaggattggatagtgatccattcggtccaaagaaggatgatgaagaaattctcggtcctgaaatgccatatctcagtgccataggagcgttgatgtacctgtctagccacactagaccggacatatgttttgccgtgaatcttctctctagattcagttcttgtccgaccaagaggcactgggaaggaatcaagcatttgcttcgatacctacaagggacaattgaatttggtttatattatattaaccataacaaagaaggtttagttggttttgctgatgcaggttatctttcagatccgcacaatggaaagtcacaaacgggttatgtgtttacgcatggtggaaccgcgatatcctggagatcaatgaagcagaccatcgcggccacttcctctaaccatgcggagatattggcaatgcacgaggccagccgcgagtgtgtgtggttgaggtcaatgactcaacacataggagccgattgtggaacggtcgaagacaaggaaccgaccatcatgtacgaggacaacgcggcatgcatagctcagctcaaggaagaatacatcaagggagatcggacgaagcacattctgcccaagttcttcttcacgcatgacctacagaaggatggtgaagttaaggtggtgcaagtacgttcaagcgacaattcagccgatctatttaccaaggcattaccagcatcgacattgaggaagctctcgcatcagattgggatgcggaggcttaaggacttatagggatgaccaattcaggggggagtaatgcgtgctgtactctttttccaaactatggttttgtcccaaaagggttttcctag

SEQ ID NO: 163607 - DNA, 2403 bp, Arabidopsis thaliana landsberg
tgcagtgctatcatacagaagaagatcattcctaagaagcctagtgatcctggttcattcactctaccatgctctttaggtccattggctttcaacagatgcctatgcgatttaggagcatcagtcagtctcatgccgctatctgtcgcccaaagattggggttcactcaatacaagtcctgcaatatatccctcatcctagctgtcagatcagtaaggattcctcatggtttgctcgaaagcctctcaatcaggatcggtgctgtagagataccaactgactttgtagtcctggagatggatgaagagcccaaggacccgttgattctagggagacctttcttagccactgcaggagctatgattgatgtcaagaaagggaagattgatctaaaccttggcaaagactttaggatgacctttgatgtcaaagacgcgatgaagaagcctgccatagaagggcaactcttttggatcgaagaaatggataagttagctgatgagttactggaagagctggcagaggaaaatcatcttaacagtgctttaaccaaaagtggtgaagatgggtttctgcatttggaaacattgggataccagaagctgttagactcccataaagcgatggaagaatcagaaccctttgaggaattgaatggatcagcaacggaggtaatggtaatgagcgaagaagggtcaactcaagttcaacctgcactctcgaggacgtactcaagcaaccactcgaccttgtctaccgacgaacctagggagccgatcattccaacttcagatgactagtcagaacttaaggcaccaaaggttgatctcaaaccacttccaaaaggtctaaggtacgcattccttggtccaaactctacttaccctgtgatcattaatgctgagttaaatagtgatgaagtgaacctgctattatctgaacttagaaagtataggagagcaattggttattcactatccgacattaagggaaattgccctagctgatgcaaccataggatccaccttgaaaacgaatcctattccagcattgaaccacagaggaggccaactcccaatctgaaagaagttgtgaaataagaaatcttgaaactgcttgatgctggggacatctaccctatctctgatagcacttgggttcctccagtgcattgcgtccctaaaaaggactgttgtcaaaaatgaaaaagatgaactgatccctactagaactataactggtcatagaatgtgcattgattataggaagttgaatgctgcatctaggaaagatcattttcctttaccattcattgaccaaatgcttgaacgtttggctaatcatccatattattgctttcttgatggatacagtggtttctttcaaataccaattcaccctaatgatcaagaaaaaaccactttcacgtgtccttatggaacttttgcctataagagaatgccatttggtttatgcaatgctcctgcaacatttcagaggtgtatgacctctatattttcagacttaattgaggagatggtggaggttttcatggacgatttttcggtctatggcccctctttctcctcatgtttgttgaatcttggcagggtattgaccaggtgcgaagagacgaatcttgttcgcaattgggaaaagtgttatttcatggtgaaggaaggcataatgttgggtcacaagatatcagagaagagtatagaggttgacaaaggaaaaattgaagtgatgatgcagttgcaaccgccaaaaacggtgaaggacatcagaagtttccttggtcatgctggtttctacagaagatttattaaagacttctccaagatagccagaccgataaccagattattgtgcaaggagaccgaatttgaattcgatgaggactgcctcaaatcctttcacaccatcaatggtgctttggtatctgctcctattgttcgagcgcctaattgggactatccatttgagatcatgtgtgatgcatcagattacgcagtaggagctattttaggctagaaaatagacaagaagcttcatgtcatatattacgccagccgaacgttggatgaagctcaaggaagatatgcaacaactgagaaggagcttctagctgttgttttcgcatttgagaagttcagaagctatttggttggatcaaaggtcactatctatacagaccatgccgccttgaggcatctgtatgccaagaagaatactaaaccaagactgttcagatggatacttctattgcaagaaattgacatggagatagtagataagaaaggtattgaaaatggtgcagcttaccatctgtcaaggataaaaattgaagaacccattccgatagacgattcaatgggagctacagtgggaaagagtttcac

SEQ ID NO: 163608 - DNA, 1530 bp, Arabidopsis thaliana landsberg
atggacagaatcagtgggttacctgatgaagtactggttaagatactgtcgtttgttccgactaaagttgcggtatcaacgagcattttgtcgaaacgatgggagtttctttggatgtggttgactatacttaagtttggtagtaaacattattcagagtctgaatgcaagaggttacagtgttttcttgataggaatttgccattacatagagctcccgttatagaaagcttccgtcttgtgttaagtgattcacgttttaaacctgaggatgccagaatgtgggttgtagtagcagtttctcgctacatacgtgagctagagatttgtagttcttattttcccgagaagcaaaacatattgccaagtagcttgtatacctgcaaatctctggtgatcttgaaactcgatggcgggattctcttggatgttcctcgaatggtttgtcttccctctttgaaaactttggaacttaaaggtgtgagctacttcaaacaagaatctcttcagcgtcttctatctaattgccctgttcttgaagatctattcgtgttgttacttcgttgtgacgacataggaatgtttattgttattgtcccatctttgcaacgtttgtcactctatttaagtcctcgttgtaatttagaagggtttgtcatagtcttagatacttctttagaatatttcaagagataagttggaaagttaaagacaaataaaataaagtaaaaatggtctctcatattatttttattctctctcaagataaagggtattatagtatttgatatgtattttgttttttagtctattagacatatcttctatctcacaaaaagcaaaaaaaatgtctatatctctaatttctaaaaaaaatacctactttacaaattatttttgaaaaagtgtctactttgccaataaacccatatttcaaacttgtggatcgtaattatgatcgtcacccatatatgattgagaatatgcctaagctgacgtcagcatatgttgaggttatatccgctgatcttaagagtcttgtcggatcaatcacttctgtcaagtacctaacaatattctcagaggtaatctgtctaaatctatcaactgcaagactttgatctcgcgcgctttttgttaatactttctttattcgtctgcatgctatgtttggtgacgctacatgtatgggatgacattccgtcgaatctccttgctcggttgctcaaagactctcctaagttacaagaactagtgtacgtctctgacaaagatgtaagttctttcgatcaactattatatcttatctattgcacattattttatattgttcaatctgattttctccttgatctcagaattataacgattttgagtttccctggaatcaacctagtactgttcctaaatgcttttgtccagtctacaaaagttcacctggacaaaatacttaggaagaccacaagacagagatattgcggtttacatcttgaaaaacgtttgtcgcttaatgactgcaacaatcatatc

SEQ ID NO: 163609 - DNA, 655 bp, Arabidopsis thaliana landsberg
atgtttaggatagttttgcatgcatgttgcatatttgtgttgatttcaggtgatggggagctattggtgagctaattggtgagctaattggaagaagcggacttgatcacttcaaaacactcgaccccctggtcgactagatggttccacgacaacaaaccacttgaccccctcgtcgagtagaagacttcaccacttcacgttaccactagaccacctggtcgagtaccaccatgagagtcactcgatcacatcactcgaccacatggtcgagtacctacatcaccttcactcgatcactctaccaagaggtcgagtatctccatcacaccactcgactgcatactcgatgacaagcttcagagcctttttcattccgcactcaaccagacactcgagcacaaggaagaaaagaagactccagctattcactcgacctccactcgaccacctgggtcgagtacagttcttaatccgttccaatacttcgttgttttgagtattagggtttcgggatatttggctataagtagcatgtacttctcattttcgaaaaaaaagaagtttttacctagttttatttctgcagaccttgtgttctagactttttgtaatccggatttctctttatctatttagtattcagctttggttc

SEQ ID NO: 163610 - DNA, 631 bp, Arabidopsis thaliana landsberg
acaccatatcataacttaagtaacccaaaaccaaactcttccaaaacaaaccctaaacgcaaaaatcattactcaaaaaaaaacaaagtctctctcttctaattagagagccaagaagatgcagagtacttgtgtctacagagaatgcatgcgcaaccacgccgcgaagctcggctcttacgccatcgatggctgccgtgaatactctcaaccatccaccggcgatctctgcgtcgcctgtggttgccaccgcagctaccaccgtcgtatagacgtcatatcttctcctcaaatcaatcacacgcgcttcccgttcacgagcttaaggcgcgtgaagcagctggcgaggctgaaatggaaaacggctgaggaaagaaatgaggaggaggaggatgacacggaggagacttcgacggaagagaagatgacggtgcagaggcggaggaagtcaaagttcacggcggagcagagagaggcgatgaaagattacgcggcgaagttgggatggacgttgaaggataagagagcgcttagagaagagataagagtcttctgtgaagggattggtgttactcgttatcattttaaaacttgggttaacaataataaaaagttttatcactaactaatt

SEQ ID NO: 163611 - DNA, 1094 bp, Arabidopsis thaliana landsberg
actatcaacctaaatatgcattcttaacgagttcaattgttcatcttagtaaataggccgattcttattacacacctattaaataggccgattcttattacacacccagactcatcaaataataaatccaactacagatacctatggattcaagatctagttaattactctaaatctagcattaagcacaattaaagatgaagaattctatagataacctagcaaatggggtaatctactaaaccatatgaatccctaatgagaaaccctattcctaacaggcatattactcagacatattggatgaagcaaacaacatatttgagtgtgaaagcttaaacacagtaaatagagaaggggaaagaagggatctcttcactgtatataaatctgaatgaaactctgaaaacaaatcgatgaatagcttatgtctctcacaatagggttttgcaaaagcttgataaaagacttgatataagaaacctaggtctaaaaacaatatatatagaccctaaaaacgtccagggcctaataatgcaaataaggaaatcttctggggcaaacttgatcttctataaacttcaaagcgtctaggatttttgttgggccgaaactggtgtcgatcgaccacctcactcgaccccctggtcgagtagaggacatcaccacttcaccttaccactcgacctcggggtcaagtgtcttcacctccattaccagacaaccgctcgatctcaccactctaccttgaagtcgagtatcaccatcactaccactcgactacacactcgactgcgagcttcagagtcttcttcattccgcactcaaccatacactggagcacaaggaagaaaagaagactccagctattcactcgacctcccactttatcacttgagtcgagtacagttcttaattcgtcccaatactgcgtcgttttaagtattagggtttcggaatgttttgctataagtagcatgtacttcacattttcgcaaagaagttttttatctagttttatttccgcagaccttgtgttctagacttttgaaatccgtatttccctttatctattcagcattcagtattcagct

SEQ ID NO: 163612 - DNA, 2122 bp, Arabidopsis thaliana landsberg
atgggtccattcccatcttcatacggtaacaagtatacactggtcgccgtagactacgtatcaaagtgtgtcgaagctattgctagtcctaccaacaatgcaatagttgtgttaaagcttcaagaccataatcttcccgagatttggagttcccagagtagtaatcagtgatggtgggaagcatttcatcaacaaggtttttgagaacctcctgaagaagcatggagtaaagcacaaggtcgccaccctttatcatccacagacgagcgggcaggttgagatctctaatagggagatataaacaattctggaaaagactgttgggattacaaggaaagactggtctccaaagcttgatgacgcactatgggcttacaagaagctttcaagacacccattggtacaactcctttcaaccttctctatggaaaatcatgtcacctacctgttgagctcgagtacaaagcaatgtaaggggtaaaacttctgaactttgacataaaaactgatgaggggaagcgattgatccaactcagtgatcttgacgagatccgtttagaagcttatgagagctctaaaatctacaaggagagaactaatcttttccatgacaaaaatatcatcaccaaggattttcagggttggtgatcaggtgctgctattcaactctcgtttgaaactctttccaggaaagcttaaatccagatgatctggccccttctatatcactgaggtccgtccttatggagcagtcactctagctggtaagagtggagacttcacagtaaatggtcaaggctcaagaaatacttagcagatcaaatccttccaaaggtgacgtcggttcatctccaggaacttcttgatgattaaaggagtaaaggagtcaaggtaatgactttaaacaagctcacttgggaggaagtcccatgactatctctgtaaataaatttttcttttcttgttattttttatttgtcttagttgcgtttgtggttcttaggagcaaaggaacaatgtggagatagagtaaaaattcaaaacttttactctacagaagacctggagatcgagtgtttagcctgttggagtacaaaattttgaaaatcttctgttgcatctggagaccttgcactcgagtacattggtcgagtatgtgtgatgtttaaaacctaaaatcttttaaatcatcattttactcgaccaacagaagctacagagacttgcagggatttcctgcagtttacagtaggtcttctgcaaattttctcagtcaacagagtgtaggccacgcgctgaggataagctggagagagaatctaaaactcaacctcaaccactctttttgaaacttcactcgacttaaccgtatccactcgacctacctcttttcatctcaccaccgacactccaatttctctacaccacgaatcgccgtccaaagagctactcgatccagaatacatcactcgacctccgggaatcactcaacctcaccgccgctgtcaccatttcattccctccgtcactcgaccagaccacttcaatcgattcctttgctatactcgaccaattcatccacatcaacggccgtctctttcaaaagaagttactcgacctcgtttcccagtctcgtagccgcactcgaccgacgccgcctctgccgattgcaacgattcactcgaccaccaaaaagcactcgacccctgcaacagcaacttgacttcttgttcttgaattcaacagagcctttcaactttagagaggttactcgacctctaggcttcacggctgaactcgacctccactattcactcgacctccgggagcagtaccactcaaatttagagaagtcactcgatccaatttgtctaagggaaactcaggaacagctcagtctactcgagtacagaattgtactcgatcaatttggtctatttcattgccttttgataacaattttggtttcattgctatctttgagacaaacctattgacatttgagctttgagttctaaatttctacaagggaatcatgagtaattacagtggcagttcttctgttgacccggactacaacatggatgagacagagtcgtcatcttcaaggccagagagagaa

SEQ ID NO: 163613 - DNA, 669 bp, Arabidopsis thaliana landsberg
atgtttacgataggtttgcatgcatgttgcatatttgtgttgatttcaggtgatttggagctgttgacgagctaactggaagaagcggacctgatcatgacaaaccactcgacccaaaggtcgggtaggagcttcaagatctcaagagatcactcgacccccaggtcgagtagatggcatcaccacttcacctcaccactcgaccacgaggtcgagcgtcttcatctccatcacctgaccatcactcgatcacatcactcgaccctgaggtcgagtgtcttcagcaccattacctgatcatcactcaaccatatcactctacctggaagtcgagtatcaccttcaccaccactcgactacaccctcgatagcaagcttcagagtcttcttcattccgcactcaaccagacactcgagcacgaggaagaaaagaagactccagctattcactcgacatcccactcgaccacctgggtcgagtacagttcttaatccgtcccaatacttcgtcgttttaagtattagggtttcagaatatttggctataagtagcatgtacttcacattttcgcaaacaagtttttatctagttttatttcacagaccttgtgttctaaaccttttgtaatccggatttctctttatctattcagtattcagtattcagtt

SEQ ID NO: 163614 - DNA, 656 bp, Arabidopsis thaliana landsberg
atgtttaggatagatttgcatgcatgttgaatatttgtgttgatttaggtgatttggagctattgacgagctaactggcagaagcggacctgatcatgtcaaaccactcgaccccgtggtcgagtaggagcttcaagatctcaagaggccactcgacccccaggtcgagcaaaggacatcaccacttcacttcaccactcgaccacgaggtcgagtgccctcatctccatcacttaaccatcactcgatcacatcactcgaccctgaggtcgagtgtcttcaccaccattacctgatcatcactcgaccatatcactctacctggaagtcgagtatcaccttcaccaccactcgactacaccctcgatggcaagcttcagagtcttcttcattccgcactcaaccagacactcgagcacaaggaagaaaagaagactccagctattcactcgacctcccactcgaccacctgggtcgagtacagttcttaatccgtcccaataaagtattagggtttcagaatatttggctataagtagcatgtacttcatattttcgcaaacaagtttttatctagttttattccgcagaccttgtgttctagaccttttgtaatccggatttctctttatctattcagtattcagtattcagtt

SEQ ID NO: 163615 - DNA, 1340 bp, Arabidopsis thaliana landsberg
tatgaggcaccggatcatgtcgagagctcatggagaagactcttgtcggaggttgtggtggtgagaacgaagaggtcattttgggaaaggagttggacttcttgggacgtgagcaagttagtaatattcgtcgggactcatttgttgagcctcttggctccattttacttcagttgggaggctttttgggttttcccttggctcgttttcatcaatggaatctgcattaccttgtcttatcataggaacctttctcaccgaagttttgatctgccgaaatggctcgaatatctatttgcttacggtggcgttctggcttttcaggtttacatatatatatatatatattctcactgtttgatatgaacattagattaagaatatatatattatgtatctttaatcgcaacttctaaattgtgtgtgcgcgcagggagacccaatagagtgggtgagcaaccatcggtaccatcataagcattgtgagacacaacgtgacccacacagccctacacaagggttttggtttagtcacatggcatggatatttgatacaagttctatccttgagaatgtaataaaaattatcaatttgtaaaaccaaattaatttcttgatggccatgttaagatgatcaagttttttcgatgctaagaataccctttttcctatccggggaagagacctaaccctgactaaaccgttgggtgcatgctcgcagtgtggtggagaggagaatgtagatgaccttgtgaggcagcccttctataggttccttcagcgaacggtcctattgcatatgatggcttattccttcctcttctatttttgtggaggcatgcctttactcgtctggggaattgtaaggatacataccattccttgtcttaatctcaatatactattatccatgtaaaataatatgagagaaacggcaatggcagggtatcacaattgcggttcgacttcacctgacttttctggtgaactcagtttgtcatatatggggaacacgagcatggaacacatctgacttctccaaaaacaattggtaatgtgcatacacacacatacacttatacatatatctaatctaactaaatagtgatattagcaattactatattggtgatgaatatatcaggtgggtagcaattttaacacttggcgagggatggcataacaatcatcatgcgttcgagttctcggccaggcatggactcgaatggtggcagctcgacattacttggtgtctcattagatttcttgaagctattggtttggccactaacgttaagttacctactgaaactcaaatgaagggaaaggctttggtttga

SEQ ID NO: 163616 - DNA, 1673 bp, Arabidopsis thaliana landsberg
acgcctgaactcatgtttccgttttatcatcatcctttatcagcctacgattattcatcaagctatattcttcaagagaaggcatattgctgctttatgtgtgtttattccctctttgacaaagaacccatgcttttgcctgatatcgactatcactgtacggagtgtggcttgaatatgcacaagaaatgcatcaagcgccttttcctcaactggccatttctatgcaatcacgttctcaatatcttccaaaatactttcacatcatctgacaatatagatgacttctcttgtcatttttgtcaaagtaggattaagtcgtcgtttgctcgtttcacgttatgcaacataaacgtggatgaaaagtgtatggtggaactgcaaccaccactcaaaatttccgaaccaaagcaccacaagtatagcctcaccatcttgttatggctagtcaccttcatatgtagtccttgtggtgtggaaggcgatcacaatccttatgtatgtcttgaatgcagtctgatggttcatagagattgtattgaggatctaccgcgagtcataagcataaatcgtcatgaccatctcatttctcatacttttcatcttggtgaaagagaaggaggttgggagtgtggagtttgtcaaacgatgattaattgggtctacggagcatataaatgctctcgttgtcctagttatgtcgttcattcaagatgtgctacaaaaaaagaagtatgggatgggttagaactcgaagatgtgccagaagaagatgaagaactcgaagatccattcaaggtaattaatgaaaaaggagatattgttcattttagtcatgaagaacatgttctcagattggatgtgaattatgttcatgataatgatactatgcgctgtggaggttgtattcttcccatcaatgatgatccatgctacaagtgcgtggaatgtgatttctgccttcacaaaggatgtgctagtcttcctcgaaagaaagcccattttttgcacaaccataaacttagcctacgggctcataaggatgacgtttatgtagataaatgcggagcttgtaaaacttattctaatggtttcaagtacgagtgtcacgacaaaagcagctgtagaggtaatataaagtatgatatccgttgtagctccatatcagagccgtttcaccatgatgatctgcatccacatcctttatattggaccttggaagaaaccaaacagtgtaaggcttgtggcacagagatacttaagcctttaagttgtttggtgtgtgagtatgctctatgtataaggtgtgctactttaccaaaaaaggtaaaacataggtgtgatgatcacttcttgtcactatgccatgatgctggaaactcgagcggtgacttgtggtgtgatatttgtgagaccaagaccgatccaagtgtatgttactacacttgtgataagtgtggggtcagtctccatattaattgtgtactaggagatttatattatacgaaggtaggactcgtctatcctggtcttgaagtacttcccaacaatggtgctactcgacctttctgcaacagctgtaaagttcgttgcaagttcagcttccttatgaagcaaactctaagagaaccttgtcgtacttttgttcaatacgttgtattcctagagcaagg

SEQ ID NO: 163617 - DNA, 978 bp, Arabidopsis thaliana landsberg
tttgccatcgtccggttttaaatcaccatcaaattagtaattagtcaagtgatcatgacaaatgccgagagatacaggagacatttgtgtgattctgaggtttgtcaggtttgcaaagggggactggagactatcttgcatgttcttagagactgcccttcgatgtcgggaatatggagcaggattgttcctaggaggaaacaacaagcgttctttgcgaagtctttatttgagtggctctttgagaatctctgtgagcaggttaacgtggaggaggggccttggtccacgatgtttgcactagcagtttggtgggggtggaagtggaggtgcgggaacgtttttggtgagaatagaaggtgtcgggacagggtacgcattgtgagggatttggcgaaggaggtttcagcagctaatcaacagttggtcactcagggaggtcgacgctcgcgcgtagagattctggtagggtgggagaaaccgttgattggctggttgacagttaatacggatggggcttcgcgtgggaatccgggtttagctgctgcaggaggagttttacgagatcatgagggaaggtggtgcggaggtttttctttgaatatagggagatgttcggcaccaatggcggaattatggggagtttattacgggctccattttgcatgggagaggaaagccccgcaagtagtgttggaggtggattctgcgatagttgtggagttcttgaggacagggataagtgatcatcacccgctgtccttcctggtacgattgtgccatggctttttatcgaaggactggatcgtccgaattgttcacgtgtatagggaggctaatcgtcttgcggatggattagcaaactatgctttttctttagcttttggtttgcacttttttcactctgttccgaatgtggttgagttaatttggcgagaggatgaccttgggatagtttgtccaaggcagatcccagaa

SEQ ID NO: 163618 - DNA, 2898 bp, Arabidopsis thaliana landsberg
atggttaaaggctactccagttttgaatttgaggattggtcaaaaggagcctggttcagaagaagaagactactctgctgatcagaaagaagtttattttgaagaaaaatcaaatgaatattcatcataccatatgtcaagagaggatgcaatatatgattcagaaactgaaaattcgaccactgaagatgaggacttctctattcctctcttcaaccatttttctgactaagctctgtaagattcaagcgtgacttaaaacaagctcacttggtaggaagccccatgtctatccatgtatataactttctattttccttgttatttttgacgtttttgtttaagtgtttcaagtttatttcattgaccatgatgaagtcaatggtcgaggaaattcaaaccaagtcaagaaagatctctaccgttgatcgagtagaatgagaaggagtgttttgaaccgttgatttgaatgaccaaatgagataagcatcaccaccgtttgattgagtgacttcttgaagtttattttggtctgtttgatcgagtaaacaagaacgaggagctctccaccgttggatcaaattttgtgcaactcaagaagatgctcgatcctttactcgagctcgaattatttggagaccaagaagtgatgtcgactgtcccacttgttccccttcacttcattattcaacggacaaaccatttacccatgcccctcaccaattcaaactcgcttttgcaatccctccaaagagaatcccaaggccatcctcctccacccattgaaatctccaaaccacttttgaaactctctctttcatcatatcatttttgcaaactctctcacaaagctccaaaagtttcattccaaactctccctatcactcttcacgcattctcacttcatcatacttcaccaaagttactcgatcaattccaagttcatcctcaaattttcaatcggttttcaagctcaatctccatcaccaaaaaaactgattcccttttcctttgatacctcttagagaagtagttcttgttcgccttgttgaagctcaccaccaatctccatggattcaagaaggaagagttcatctcgggcaagaaaatcctctgttgataatgaggaagttgaggcatttgacatgagtggcatgactgaacgccaaattcgccaagctcgccgtgctcaaagatcaagcttgattcaaggtggaagctcaagccgctcaaccatgcaaagagaagaagtagctcgaggaaagagggtcgttgaagctgaagaagaacaccatgaagaggcaccctttgaagaagcggttcctgaggaagaggatgagatcatcggggatgatacaccaacccctgttgggagaagaaaccgtccaaggaggaagagagagccaaccccgagcgaatactatcaatacttgaaggagttgaagtttgagggaactagataccctcataaggaaacgatgcaagagcttggtatttgtggtgatgtggaatacttgatggaattggccaatcttgcaacattcattaactaacaatgtgggggatacaaagaggagagctgccaactccttgcaaacctcaaggttcatttttgtgttgatgattcggagaaagaggagagaggaggtcttggttacataactttcaaagttagggatgtcgagtatactcttgatattcgccatcttgattccatttttgggtttccaagtggagaaggaatccgccaagactatgatcaagaagagctgaaatctctttggaatacaatagccggtccgaagcccttctcgccaaccaagagcaagagttcttcaatccataatcccgtgattagacaccaccaatgcatcgccaacaccctctttccaaagaaggccaccagatttgttggtgaagaggagctttgcatgatagaccaatctttggtctttactttgagagagacaaaagatgggaggaatatggcgggtgatagagcagacacttcgttgagtgttgttctcttggatcacctattgagctataaggagtatgttgcaaccattcatcgctcgggaattcacgggaagtctctttgttggtggactcttgacaccaatcctaggagctgccggaatagagctcggaactcttgatgttaatctagaaaaataccttaacctcgactatctcatggggagggattttcttgagaaaacaactctggcggatcgctatctcttcaagttcaaccactcggagcttggaccttctcttctacccctactatgtgagaaccggacttcggtgaagacaaggcgcaacatcaatttcatgccatctccctctgccttgaacatcgacattggaggagctcaggaagatgaaccagaatatagtccggccaactatgagcaacatgagtactttactcaagctgattatgaggagcaaatcgagtttgaacaacatgttgatcaaccggagcatgggggtagcgaacaagagtaagctcattatgaagaaggtgttaaccaaggagaagatgagtttgctgaagttcacaagaagctcggtgtacttgaagagcttgggaaccttcacagcaagacaatgaagggtttagagaagaagatgagaacaatgaagaagtcgctcaagagtatggctgctcaactcaaggacttccagagcaagccaaggccaacgtctcccactcccgaagtaagaagaagcggttcaacgagctcagctgcatggagagctgaaaggatcgatcaactctgagcttcatcttttgagcctcgggaagtgatctccgagttgagagagccaaggagtaggcagagacgagcttccacacgctcgaccggacaaaacgagcaaaaccctccc

SEQ ID NO: 163619 - DNA, 3926 bp, Arabidopsis thaliana landsberg
actcagagaaaggagaaacacagtcaaccttctacctcagcaaccactcgaaatggctcacgaacagaatcaacaaaatggccctgccaacattggtgctggagatgcaccacgtgatcagcgtcagcggaaaggaattgcacctcctgctatccagaacaacaactttgagattaggagtggtctcatatcgatgattcaggggaacaaatttcatggcctgcctgtggaggacccgctcgaccaccttgatgaattcgataggctgtacaacctaacaaaaatcaatggtgtctgtgaagacggattcaagctccgtttggttccattctccttgggcgacaaagcccacatctgggagaagaatctgccccttgactcaatcaccacctaggatgattgtaagaaggcttttctatcaaagttcttcttcaacgccagaactgcaagactcagaaatgagatttctggtttttcacagaagactggtgaaagcttctgtgaagcatgggatcgtttcaagggttacaccaaccaatgccctcatcatggcttcactaaagcgtctctgctcagcactctttacagagaagttctaccacgcatctgaatgcttctggataccgccagcaatgggaatttccagaacaaagatgttgaagaaggctggatttgcagcaaccaccaactggatttgctggatttgcacctcagcaaaaccaaggtccggctgctcctgacgctgacatgaaacaaatgctacaacagctgcttcacggagaaacctctggctccatggagatggcaaagaagatatctgagttacataataagctggactgtagctacaatgatttgaatgtcaaggtggaaacactgaataccaaagtcagatacttagaaggacattctgcatcttcctctactccaaaacagataagccaacttccaggcaaagcaattcagaatccataagaatatgctcacggtatcactctgcgaagtggaaaagcacttccaactagagaggaaccaaagacagtcactaaggacagtgaaatcaagatgggcaggatttcagtctcgataaaaattgagctgacaaaccactcgagcgaccactcgagcaaccactcgagcagccactcgaccaacaactggagctgccactcgaccacgttactccaccaactacttgacctatcttcccagcagcatcaccaactgctccaaaaccagttgctgtcaagaagaaagaaaaggtctatgtccctcctccctaccaaccacagcttccatttcctggccgtcacaagaaagcgttggcagataaatgtagagctatgtttgccaagaatattaaggaggttgagttgcggatacctcttgttgacgctctagcgctaatcccagactctcacaagtttctgaaagacttgatcgtggagagaattcaaaaagtgcaagagatggtggtattgagtcatgaatgcagtgctatcatacagaagaagatcattcctaagaagcctagtgatcctggttcattcactctaccatgctctttaggtccattggctttcaacagatgcctatgtgatttaggagcattggtcagtctcatgccgctctctgtcgccaaaagattgaggttcactcaatacaaatcctgcaatatatccctcatcctttgtgacagatcagtaaggatccctcatggtttgctcgaaaaccttccaatcaggatcggagctgtagagataccaactgactttgtagtcctggagatggatgaagagcccaaggacccgttgattctagggtgacctttcttagcaactgcaggagctatgattgatgtcaagaaagtgaagattgatctaaaccttggcaaagactttaggatgacctttgatgtcaaagacgcgatgaagaagcataccatagatgggcaactcttttggatcgaagaaatggatcagttagctgatgagttactggaagagcttgtagaagaatatcatcttaacagtgctttaaccaaaagtggtgaaggtgggtttctacatttagaaacattgtgataccagaagctgttagactcccacaaagcaatggaagaatcagaaccctttgaggatttgaatggaccagcaacggaggtaatggtaatgagcgaagaagggtcaacacgagttcaacctgcacactcgagcaaatactcgatcttgtctgccaacgaatttggggagccgatcatcccaacttcagatgactggtctgaactgaaggcgccaaaggttgatctaaaaccacttcctaaaggtctaaggtacgcattccttggtccaaactctacttaccatgtgatcattaatcctgagttaaatgatgatgaagtgaacctgctattatttgagtttagaaagtataggagagcaattggttattcattatccgacattaagggaatttcacctagtttatgcaacgataggatccaccttgaaaacgaatcctattctagcattgaaccacagaggaggttaaatcccaatttgaaagaagtagtgaaaaaagaaattttgaaacttcttgatgctggtgtcatctaccctatctctgatagtacttgggtttctccagtgcattgcgtccctaaaaagggtggaatgactgttatcaaaaatgaaaaggatgaactgatccctactagaactataactggtcatagaatgtgcattgattataggaagctaaatgctgcatctaggaaagatcattttcctttaccattcattgaccaaatgcttgaacgtttggctaatcatccatattattgctttcttgatggatacagtggtttctttcaaataccaattcaccctaatgatcaagaaaaaaccactttcacgtgtccttatggaacttttgcctataagagaatgccatttggtttatgcaatgctcctgcaacatttcagaggtgtatgacctctatattttcagacttaatcgaggagatggtggaggttttcatggacgatttttcggtctatggcccctcattctcctcatgtttgttgaatcttggcagggtattgaccaggtgcgaagagacaaatcttgttctcaattgggaaaagtgtcatttcatggtgaaggaaggcatagtgttgggtcacaagatatcagagaagggtatagaggttgacaaaggaaaaattgaagtgatgatgcagttgcagcaaccaaaaacggtgaaggacatcagaagtttccttggtcatgctgggttctacagaagatttattaaagacttctccaagatagccagaccgttaaccagactattgtgcaaggaaaccgaatttgaattcgatgaggactgcctcaaatcctttcacaccatcaaagatgctttggtatatgctcctgttgttcgagcgcctaattgggactatccatttgagatcatgtgtgatgcatcaaactacgcagtaggagctgttttaggccagaaaatagacaagaagcttcatgtcatatattacgccagccgaacgttggatgaagctcagggaagatatgcaacaactgagaaggagcttctagctgttgtattcgcatttgagaagttcagaagctatttggttggatcaaaggtcactgtgtatacagaccatgcagctttgaggcatctgtatgccaagaaggatactaaaccaagactgttgagatggatactcttattgcaagagtttgacatggagatagtagataagaaaggcattgaaaatggtgcagctgaccatctgtcaaggatgagaattgaagaacccattccgatagatgattcaatgcaagaagagcagctcatggttgtagaattcttcggaaggagctacagtgggaaagagttccac

SEQ ID NO: 163620 - DNA, 1098 bp, Arabidopsis thaliana landsberg
aatccaaaattttcctccctaagcgtcttcttctctgtgggtcctctatgcgacggaagagtgaatcgatactctaccagctctgcccccaatcatccctcggacgtagctgtgtcttggaacccgccaaaagaagattcgcaatactccaccaccgttttctcctaaactccagagcagtccttcaccaacacatcaattggctctcgatttgtaatagcaccgacaacacctttagtcccttctcaccggatttcgttgatggcaggaaaatctcttggaccatcagtggtgctttttccggtaagaacatcgacgacacacgacgagctcctttgctggcaggtggttccccttgtgcttcaccgtcgaccatcatctcagagttacacgacgacattgatctttcttcccttctcccaaccgcagcaaccctagggtttggtgggatgggacttaatccttttgaccgcccaaatgcaacaatcttcgctcttggtgggctgggcctcactccgctcggctgtccactaactctaaacctaatttaacccatatctaggtttgatctttttagaactttgcctgatctctctctaaaacactgcttcacgataacggatggttgtagactcaattcaatcgttggaactttatttttagaggagccttgcaattacaactctcgaaacatgttgcatagagtagattggttgtcccagatgcaagtttagttttgaagtttaatggaatagttttgatctcgaaacgtaggccatgtgacgctgctcacgcctctactcttttatgtgaacatataacgagtctgaaccttcccactattacgcttactcatctagtcccatgtcttttgttgggcgatgcatctcaaccctcttggatttgttggataaaaccgcttcggcttgctcgatcaacctctttctcaagccttcttaaaccgaataatcttggtcttttgattagaagattatatgcactttggacttgtcatcttccaatgccgaacgcatcaagcttactcttctaaggagataccttccctggaaccttactcctctaaggagatatcttctc

SEQ ID NO: 163621 - DNA, 730 bp, Arabidopsis thaliana landsberg
atgtttaggataggtttgcatgcattctgcatatttgtgttgatttcaggtgatttggagctgttaacgagctaactggaagaagcagacctgatcatgacaaaccactcgacctagaggtcgagtaggagcttcaagatctcaagagaccactcgacccccaggccgagtagaagacaccaccactcaatcacatcactcgacccccaggtcgagtgacttcatctccatcttctgaccaccactcgatcacatcactcgacccccaggtcgagtgacttcatctccatcttctgaccaccactcgatcacgtcactcgaccacgcggtcgagtgtcttcatcccattgccagaccactactcgacctcatcactctacccggaagtcgagtatcaccatcacaccactcgactgcatactcgatgacaagcttcagagccttcttcattccgcactcaaccagacactcgagcacagggaagaaaagaagactccaactattcattcgacctctcactcgaccacatgggtcgagtacagttcttaatccgtcccaatacttcgtcgttttaagtattagggtttcagaatatttggctataagtagcatgtacttcacattttcgcagacaagaagtttttatctagttttatttccgcagaccttgtgttctagaccttttataatccggatttctctttatatattcagtactcagtattcagtt

SEQ ID NO: 163622 - DNA, 1647 bp, Arabidopsis thaliana landsberg
atgaaaacggaagagatgaatgaatcatcagagtctcctcctcctccttctcgtacgttttcttcgttaccatacgacatcgttctcaattgtttggctcgtgtctcgagataccattacccaactctatctctcgtctccaaggagttccaatctctcatcgcctcccgtgagctctacgctacacgatgccgcatcggaaaaaccgagaggttcctctatatctgcttaaacctgactaagagcaaccctaagtatcgctggttcacacttcccccacttcccaacgaacaaaaactactacccgtccctttgtttacttatcatctcaattcctcaaccgtctcctcaactggttcagagatttacatcatcggaggcctcgtttggggaaatagaagcaagaaagtgtccatgtttgattgtcgatctcatcaaacgcgtatactcccaaaaatgcgttttcctcgagcttctgctgccgctcatgtcattgacggtaagatctatgttattggaggcggcgagattcggggagaggtttatgacccaatgacccaaacttgggagccaacattgctcacaacaccactagatcacaccactcaaaaagtttatgacaagcatggcgtgaatatttgcgttgtagagatagacaacttgctgtgccaaacatttgtattcaacgggaagctatattggcgtcatccaaggggagatgattttggctgggctagggttaagggagtggaacaggaactcttccgtaatcatctttcttatgtggacaaatccggcggaggaagaagagtgacagtgtggtggaagtctgtggtggtgtttggctgtcaaggtcttggctattctacggaatttgatacagagatttggtgtgcagagatttcgtttgagagacgcggtttaaaagagctttggggatttgtagaatggtctagaaaagtgttcacatgtaagggatgtgattctcctacggattttgttatggattctgtccttgtgacatattgatcaatgggatgtatttttgttttttttagattttttctgtaaggagtctttttagtataattcgagaatttaagagacaataaacagcttgtgtgtctcttaataagcaaataatttaagaacataaacatcaacacacttgtgaaagaatttggtaattagtcctcgaatttagaccttcaattatgtgaaaattttactaacgttccttcgtttcaatacacaagattagactattatgactttgtttggtttgtgagcacaactcatatataggggttgtatgcttggttggtatagaaatattggattctgatttttgtacatcaataacacttcctaggggttgcttctttacatgaaaccggccgatagcaaaacaaagcctatggccggtttcgattgagagcagggctggccctgagcacagccaattgaaacaattgctatggcccattaattctcaggaccggccctgattgagagacgtggtctgacagagctttggggatgtgttgaatggtctaagaatgtgtttacctttgacgggtgtgaccctcgttccgatttcttcttgaattctgcgattagcacacattaattgatatgtccaagtat

SEQ ID NO: 163623 - DNA, 1413 bp, Arabidopsis thaliana landsberg
atgcagccagagatttcagatcaaatattttatgccttcctcaccggaggattatgtgcctcgtctacttccaccaccgtgacgtcgtcgtctgacccttttgccacggtttatgaagacaaagctcttgcttctctgaggaaccataaagaggctgagcgaaagagaagagcaagaatcaattcccatctcaacaagctccgcaagttactctcttgtaactccaaggtacacaaatcttttactttactatctcactactctactctaaacttataatgaaacttagatagagacttgaaccggaaaattataaaaagcatagaagataaaaatggaagattaagcatgatgaaactattaattctttgggttatttaagatatgaaattaacttctaaagttacatattcttcagtactcgtctaaacatgcatataatttaattaggaaaagatttatgaaatgaggattaaagttttgatgttatctcaccagacttttgtgtttttaattaaatctttatatccaaatgacaatttttttgtcttaatcagattaatcttgcttatgtgatatacgttactacagtctagtgtctagctaagattttatttattggtgagaaaggtggaatattggaagtatatcacttatagaaaatgaaccattttaaaactaacatcagtcaaatgtaatgttttcgaattataaaaaagctgcaagtactgggaatatctagaaaattgaggagatataaaaagcttacaagtccctttttttctctgaagctgataatcactttgtcgggaaagttatcgagcttttttttttctcatttgaaaacaattgaaacgtcaagacaaattttctcgaatcaagacaaattctaatgatctgaccttttctctttccttgtttcctttatttgttttaattttctttacacagacagacaaatccacactactagcaaaagtggttcaacgagtcaaagaactaaaacaacaaaccctagaaatcaccgacgaaacaataccgtcggagactgacgaaatcagtgtactcaacattgaggactgttccagaggcgacgatcgacgcataatctttaaggtatcgttttgctgcgaggaccggccagagctcttgaaagatctcatgaagacactcaaatctcttcagatggaaactctctttgccgacatgacaacagtcggtggtcgaacaagaaacgttctcgttgtggccgctgacaaagagcatcacggcgtccagtcggtgaattttctacagaacgcactcaagtctttactcgaacggtcaagcaagtcggtgatggtgggacatggtggtggtggtggggaagaaaggttaaaacgacgtcgtgcgctggatcacatcataatggtc

SEQ ID NO: 163624 - DNA, 1008 bp, Arabidopsis thaliana landsberg
aatctcgtaggtttccatggatgcgagacatggggtcttccaaagtctctatctttttacatcccatcgtctctttgtattatcgagggttcctcccatggattggttttgatttcagaaaatgatgatgattgttgctttgtgggtaatccagttttacaacagtggatcaaaatccctccacctccagttcactcttcagtgtttggtttggtgtctcgcctcgacgatgatggctttgttttgggcttcaaagtcgttaagttagctgaagtaatagtgacgaataactatgtctcgtgttctttgagtgtgtttgtgtattcctctgagactgggatttggacttgtaagactattcactgcccttatcaaatcaccaactttggttctttcactttggatggtaccatttactttgaccatcttagtgaacctggagtgctcgtagcttatgatttctattctgaaatctccgatcagtttcgggttatacctctcccggatcatccgaatcacggcttcaatagcgacttcaaaggtgctttgactacgtcccaaggatttgtcatgtatatcagaacattagctcaatcttcgtctaatgttttcaaggcttggaggttgaacaatgattcaacttggcaacttttgtggaaaatcggcctcccgtcacttatcggtgattatgtacctatggcaatgcatccatttgatagtgacattgtccatctttggagtcaagatcatcgtcatgtggtatcatgtaacttgcggactcagaagaatagaatcctcggagctgaagataatgatgaagatcataaagattgttacttgaaccagcctgtttgtgaggactctatggatgagatatgcggctgtaaagcttctgtcaggttactacaacttgttctcccacggtggatggaatcagtgccttgtcctccccaagttgagatgatgaatacagcttcggtaatctcttacgttacttcaatgcacgag

SEQ ID NO: 163625 - DNA, 1766 bp, Arabidopsis thaliana landsberg
aatggaacatcaagatgcctaacaagctatattgccacacaatagcctctcatacctttagaaacagtatcaaaactcaaatgtcaaacagcaaagttcaattctcatgcagttccactaaaggtatcaaaggacaatacactgaaacaaaatattctgatacaaaaaattagagagcaatacctaaatcaccttaggaagacgaaacagggggctgctcagcaatggaggttgaggaattgagagccgcagcaacagcttgtggagaataaatgcgtgctttctttatgatttctgaaacaatccaatgcttatgcttgctcaaaggccttgaaggatccaatttcacctaatatttcaaacaaccaaatcaagtttcatttccaaagcagcctaataacaaacaggcaagtctacttccaatggttgagttcaaatattcctagagcttccctaaattttcgagctcttgatcaaatgtatatcaaattcaaaaaatgaaggggaaaatactcgatcgccgatgttacaggagtccttttcatcgtgagccatgaacttggaagtacgcttgacatatcgattgtagatattattgtggaagagtctgtcgacggctaccaccaccgacttctgcattttgttcgacaccactgtccctatcactgccttcatttttcctaacgagctctctctggattttgagaatctaaagagcaaagaggaaaagattcttctggtctaggggttttataatgatgggctttgttatctcagcccaatttatattaaggtccatgaagtatagtagttaacagaaccggcctcatactaaaccgcttcaaaagctaatttctggtttatttaacagatataaataaaatcgaaccgggatgagaagtaagaagtgaagaatcatcgatatggctgttattgcttcacttcatcatcttcaacctctctcgtctttctcgtctcctccttctccttcaagctctaagcctctctatctaaaattccaaacctcacaccgtgaaaatctaagacacctttcttctctcggaattgttcctcagaatccccgacttgctcctccggcgaatgatctttccgttatcctctccgccgtgaatctcctcaaatcgaaaggaatctccgacgaagatttcccacgcctcgttttcctctgtccacagctcttctcgcccactttcgacatctctaaactcgatcccgtcttcgattttctcaccggcgagcttggagcttccgcagaagaatccaggggcttaatcgtaaattgcccgaacatcctcttctccgacgttgagtattgcttgagaccgacgcttgtttaccttaaggagctaggggtacggaatctgaaccgagcgagcaagacgaacgcgcacgtgctgaacacgagagttgagaagctaagagcaaagatgagattcttgaagagtataggtttggaacacgaggaagcagctagagtctgtgggagaatcccggcgatattcggatacagtgttgaagataacttgaggcccaagtttgagtttctggtttacgacatggaaagagaacttgaagagctcaacaagttcccgcagtattttgcgtttagcttggggaagaggataaggccaagacattggcatttaaagaagaagaaagttagggtttcgcttagtagaatgttaatgtggggtgatcaaaaattctactccaaatggaagccataagccataatcttttaagtt

SEQ ID NO: 163626 - DNA, 1253 bp, Arabidopsis thaliana landsberg
atgtgtttagtggggcttcacaaatcaaattatggtggtattgatttttttacggctgcagagagtgcagtggaaggccatgctgctatgtgtgtggtaacagcaggacaatacgatgatgaaaccgaggggcttgacacgttgatctatagcggacagggcggaacggacgtgtacggtcacgctcgtgatcaagagatgaagggcgggaatcttgcactagaagcaagtgtaagcaaagggaatgacgttagagtcgtgagaggagtgatacatcctcatgagaacaatcagaagatatatatctacgatgggatgtatctggtttcaaagttctggacagtgataggaaaatccggctttaaggagttcagattcaaattggtgaggaaaccaaaccaacctcctgcttatgcaatctggaaaacagttgaaaatctgaggaaccatgacttgattgattcaaggcaaggttttatacttgaagatctttcttttggagctgagcttttacgagttccgctcgttaatgaagttgatgaagatgacaaaacgattcccgaagattttgactacatcccctctcagtgtcactctggtatgatgacgcaagaatttcattttgatcgtcaatcacttggatgccaaaattgtcgacatcagccatgcatgcatcaaaactgcacctgcatgcggagaaacggtgacctgctaccgtaccataacaatattttggtttgtcgtaaaccattgatttacgagtgcggtggatcttgtccttgccctgacgattgtccaacccggttggttcaaaccggtttgaaactccatttggaagtgttcaagacatcaaactgtggttggggtttacgttcttgggatccaatccgagctggaacttttatctgcgagtttgccggtgtgagcaagacaaaagaagaagtagaagaagatgacgaatacttgttcgacacatctcagatttatcatagcttcagatggaactatgaactggagcttttgtgtgaagatgcttgcgaacaagtctctgaagatgctaatcttccaacgcaagtcttgataagcgccaaggagaaaggaaatgttggtcggtgaagcacattcctccaatgacagagttaacatatgactatggagtttcttgtgtggagaagactggagaagacgaagtaatttataaaggcaagaacatttgtctctgtggttcagtcaaatgtcgtggctcttttggc

SEQ ID NO: 163627 - DNA, 1132 bp, Arabidopsis thaliana landsberg
atgtccgatctttctttggatttggtagaggaaatactctctagggttccagccacatctctcaaacgattacgatctacttgcaaactatggaacgctttatttaaaaacccgggatttaccaagaagcaatttcttaaagcaccaaaggagtcactggttctcatgttgaaggagtatagcgtttttccaatgatcgccaatctcagcgttggtgctgcgtctatagagtttaaaggtgcacttaacctaaagaattatcctccttattcagaagaagtcgatatacatgaagcttgtcactgtgatggtttattgctatgtacaactatggactatagaatagtggtttggaacccgtgtttgggggaaacaaggtggatccgatggcccaaaaacatttactctaggtttgctctaggatacgagaaaaacaaatatggccgtatctacaaaatcttgaggtgttgggatcgtcacaattcaccaactggccgagttgatgagtttgaaatctatgagtttagctctgattcatggagggttcttgatctcgtcgctcttgattgccacattgcatcacatattggcgtttctttcaagggaaatacttattggcttgcgtctgataaaaaagacaaatatggactcttgctttgcttcgattttacaacagaaagatttacgcgtctgtgtcttccaccatctcaggatgtgtctaagatggctctatcagttgttggaggaaaacaactctcactgttaagtcaaagtgatagtacatcaaagataatggagatgtgggtgaccaatattattgaagatgtactgatgtggagcaaatcttttaccgtggatatacccattcgcggtgattattgtccgtatttgacgagttatctagtcgacgaagaaaagaaagtggctgtgtgttataatgaaaattttgagaaaagcaacaagaaggtatacattattggagaggacaatggatactacacagaaatccctttagtagaatctagttaccaagtgtggggatatccaattattttcaattatgttccaagtttggttcaaatcgaggaaggtggatgcattataaaagaatgaaactactcaatgcaagcaa

SEQ ID NO: 163628 - DNA, 1452 bp, Arabidopsis thaliana landsberg
aacatgaaatttgagcttgttttcatcccctatcccggaatcggtcatctccgatcaacggtagaaatggcaaagctactagtggaccgtgaaactcgtctctctatctccgttatcatccttcctttcatttccgaaggcgaagtcggtgcttccgattacatcgcagccctatccgcctcatccaacatccgcctccgctgcgaagttatctccgccgtagatcaaccagccatcgagatgacgacaattgaaatccatatgaagaaccaagaaccaaaggtgagaagcaccgttgcaaaactccttgaagactattcgtctaaaccggactcgccgaagatcgctggctttgttctagacatgttttgcacttcgatggtagatgtagcgaacgagtttggtttcccgagttatatgttttacacctccagtgccgggattctctcagttacatatcatgttcaaatgttgtgcgatgagaacaagtacgatgttagtgaaaatgattatgcagactcggaagctgtgttgaactttccgagtttgagtcgtccttatccggtgaagtgtcttcctcacgctctggcagctaatatgtggctcccggtgtttgtaaaccaagcgagaaagtttagggagatgaaaggtattttggtaaatactgttgctgagcttgaaccttatgtgttgaagtttctttctagtagtgatactcctcctgtttatcctgttggaccattgttgcatcttgagaaccaacgtgatgattctaaggacgagaaacggttggagattatacggtggttggatcagcaaccaccaagttcggttgtgtttctctgctttgggagcatgggaggcttcggtgaggaacaagtaagagagatcgcaatcgcgttagagcgaagtgggcaccggtttctctggtctcttcgtcgcgcatctccgaatatattcaaagaacttccaggagagtttactaatctagaggaagttctcccggaaggattctttgatcgaacgaaagatataggtaaagtgattggatgggctccacaagtagccgttcttgcgaatccggctataggaggtttcgtaactcattgcgggtggaattctacgctagagagtctttggtttggtgttccaacagctgcatggccgttatacgcagagcagaagttcaatgctttcttaatggtggaggagcttggattggcggtggagataagtaagtattgccgaggtgaacatttggcgggattaccgacggctactgtgacagcggaggagatagagaaagcaatcatgtgtctaatggaacaagatagtgacgtgaggaaaagagtgaaggatatgagcgagaaatgccatgtggctttaatggatggtggatcgtcgcgtactgcgttgcaaaagtttattgaagaggttgcgaagaatatagtt

SEQ ID NO: 163629 - DNA, 778 bp, Arabidopsis thaliana landsberg
atggctccgagaatcagaacaatcggaagttatgccactcagggaaagttctctgtcaatttctttggagaagagttaaccgtcaccgtaacttcggatccttccgtcatcggccaatggatacacgacgttctctccaacaaccgcttctcctctcaccctctcgttgtcggagtcggcgtgcaatggacaccgcctggttaaaactccgattctccaccggttagttattactccgattcttcatctggtggttactacgatcctccggcggatacactgcagctatgcgttggcaatcgatgtatcatcatccagctttctcactgtgaccgcgtccctagagtcctccgtaggtttctcggggatcgaaatcacaccttcgtgggtttttggaatagtcaagatgcgggaaagctaaagagatctagacatcggttggagattgcagagcttttggatttgaggaatcacgttgtagattcgagaggaaggggcttgaagggtcgttcgtttgaggtggttgttggagaatgtttgggttatagaggagtaaggctagagaaggcgataggcatgagcgattggagcgtttacgaccttagctacgatcaaattcttcaggcgtcaatagatgtttatgtttgttccaagcttggttttcgaaatcgtctatgggaattttgagtaaacgtttcaatggaatctaatgttgcaaatcttgagttttttttttcaaacacaaatcttgaatctttattttgttacagttgagtga

SEQ ID NO: 163630 - DNA, 812 bp, Arabidopsis thaliana landsberg
atgataactcttcttttattggctcagacatcaaagtcttaaaagcatactcaaggaaagtatagtgtccgcccaagttacgtcactttttgtggcaaattttagcaagatgtgtaccagtaacagataatctacgaaaacgcggtataaactgtgagatatgatgtagcagaagtggtgctctagaagaaaccattaacctcacgcttttcttatgccatcatgcacgtcagatttgggcactttcacagatacctacggtcccatgaaaatttccttatgcatctatttatgcaaatttagatcattttttcggcacataccttcggaattcgaatcatcttcatttccatggataatttggtatatttggaaagcaaggaatgaaaaaatctttggaaatgtggataaaaatcctgtacaaatctgacatttggtggaaaaagagtcagactcgtggaagtccgctgaacttgagcttcacaatgaaactcatggttctttcaatggaaaatcataatcgagtgcgacattttccattagacaacaattattctggatatcgttgttttgtgaatggatcttggaaagatagcgataagttttccggcttaggatggtactgtacatcatcaaattgagagacgccaaccatgggagctgccaatctcagaagaagtctatctccattacatgcagaggtggaagctctcctctgggcgatgaagtgtatgattggtgccgacaactaagatgtaatttttcttagaagctgttcagatctgggggagagggtatcttccccaaccgaa

SEQ ID NO: 163631 - DNA, 1152 bp, Arabidopsis thaliana landsberg
atgggttgtgtttcttcgaaactaggcaagaagaaactcataagagagattagagtcaacaatggcggcgatcacattgtctctcttacttcaactacttatggtcatctcgatctcgatgaacgagcagagacctctcctaagtcactggaagttactaaaggcgaagtctttgaatctgaaatcataccgagaagatctattaagagagatgatccggagattatcaatacttgggagcttatggaagatcttgaagattcaatgcacgtttctaatccacagaagattagtcccaaatctcgtggtattttcggtaaatcatggaagactccggtgaaatcggttgttgaatctccgaagagaggaagtagtaagagatttggagggaaagagaataattcgagaggtgtgagtccgaatcagattctgaagccgaagaacattcttgaaacaccgaagagaggtgtaatgcgtttgagttttcctcttaaatctgaagaatcttcggtgacggttacgcagaggaggaagagttatagtccaatgtttgatccagatcttgtggcttcttacgaaagagagttgtctcaagagaaagaacagatcaagatggtgatttctccggtggtgcacgagagcagaaaaacagagaaaacagagagaattcttgagaagttcccagagaaatgtccaccgggaggagagcactctgtggtgatctacataacaactcttagagggataaggaagacgtttgaggattgtaatgtggtaagatcgatattagattcacacgaagttcgattctcagagcgagatgtgtcgatgcactcggtttttaaggaagagatcaggggcattatgggaacgaaacatgtgaagatacctgcggtattcgttaaagggaggatggtaggaagtgttgaggaagtgatgaagttagaagaggagggcaaattgggaattttacttgaaggtattccggcggcgaggcttggaggcagttgctgccgtggatgtggaggaatgagatttatgatgtgtgttgtttgcaatggaagctgcaaggttagggaggaagagaagaagagtatggttaagtgtttggagtgtaatgagaatggtttggttctatgtccaatttgttct

SEQ ID NO: 163632 - DNA, 715 bp, Arabidopsis thaliana landsberg
atgtttaggatagttttgcatgcatgttgcatatttgtgttgttttcaggggatttggagttgtccacgagctaactggaagaagcggacctgatcatgacaaaccactcgacccaaaggtcgagtaggagcttcaagatctcaagagaccactcgacccccaggtcgagtagaagacaccgccactctaccacaacacttgacccccaggtcgagtgtcttcatctccatctcatgaccaccactcgatcacatcactcgacccccaggtcgagtgacttcatccctttgccagacaactactcgacctcatcactctaccaggaagttgagtatcaccatcacaccacttgactgcatactctaccaggaagtcgagtatcaccatcacaccactcgactgcatactcgatgacaagctgcagagccttcttcattccgcactcaactagacactcgagcacaaggaagaaaagaagactccagctactcgctcgacctcccagtctaccacatgggtcgagtacagttcttaatccgtctcaatacttcgtcgttttgagtattagggtttcagaatatttggctataagtagcatgtagttcatattttcggacaagaagttttttatctagttttattccgcagaccttttgttctatactttttgtaatccggatttctctttatctattcagtcttcagtattcagct

SEQ ID NO: 163633 - DNA, 1092 bp, Arabidopsis thaliana landsberg
atgaatggagaagagacgacaccttttaaaagaagacagatgacaattctgatgcttcctaatgatttgctgttcaactgcttagcccgcatctcaagattgtattatccaactctctcgttagtctccacgagattccgctctctccttgcttcaacggaactttatcaaacccgaacccacctgggccgcaccgagagatgtctttatgtgtgtttccgactatttaccgaatctgaccaactacgttggttcacgctctgtcagggaccatttaactccaaaaagtttttggttccgatttcatctcctaattttccatctgcatcttggtcggatgctgcaatagtcggctcctaacatctatgctattggagggttagtaaataagaattattcgtctagcgtcatggtcatggattgtattctcacacatggcgtgaggcaccaagtatgcatgtggcccgtttgtcccactctgtttgtgtccatgatgggaaaatatatgtaacaggaggttgcaaaaatcttgattcaacgaattggatggaggtttttgatacgcagacccaaacttgggagtttttgcagatccctagcgaggagatatttggaggctcaaagtacagaagcgtagagtatgaaggaactgtctatgtaaagtctgaggcaaaggatgtgacttacaagctgcataaaggtagatggcgaacagcagacatagcgataaataaagggtggtggtgtccttcattatcccattattgtgtgatagagaacgtgttctaccgttatactgatagaagaatcgaatggtatgactccgaaaaaagattatggacaactttgaaaggtgtggaaaaattgcgtagtttttctcgtgtaaacttggtgaattatggtgggaaaatggcagttgtgtcggtagagtatgtgttcggtaagaaggaggcaaaaatttggtgtgcggaaattgcgattgaaaaacgtcaaacgggagagatttggggaatgctagagtggcttgacattgtgtttagaaccaatgacaagtcatatagtttagagcgtgctcttgctactaccatttga

SEQ ID NO: 163634 - DNA, 969 bp, Arabidopsis thaliana landsberg
aggctgaatcttattggacatcgtaacttctgggatttgaatccctacaatgctgggagctggatttggaagcggctgtgtaagctgcgtagtctggcgagacctttcttagtttgtgaagtgggatcagggattacggctagtttctggcacgacaattggactggtttgggccctcttttagaccttacgggacctttgggtcctcaggtgataggtctcccgaaaaaggcggtggttcgagacgcaatctcgggtgctgggtggagggttatgagttctagaagtcgtaatcccatcatctccttgatcaaaaacgccctgcctagttgcaatgatagcatttcctcagaggttgatgatgtgtacctttggaagatggatcacagacctccatctctctccttctcctctgctttgacttggcaagcgcttcacccttcgggtcatcctgttgtgtggcataagtcggtttgatttaagaaccatattccaaagcacgctttcattgcttgggttactgcttggaatcggctccatactagagatcgcatgaggaggtggggcctctctattcctccggattgtgttctttgctctggaaatgctgagtcgagagagcacttgttctttagttgcggtgtcagtagtgcggtttggggtcacttcatgtttagaaatagtctctcgcctcctcttctcttcatggactgcttcacttgggtctcttctccttctcgtgatccaaacatttctctcatcatcaagcttgtgtttcaagcttctatctacctcttgtggaaagagcgcaaccgtagactgcatgatctcaccgcccgctcttctactgccatccttaaggaaatcaaggtaatccttagagctaagcttgatcctctttctagaagttctgaatttgaagctcccgccaagtctctcctttcaacttggttccggttcttcaactaa

SEQ ID NO: 163635 - DNA, 1195 bp, Arabidopsis thaliana landsberg
gcgaagcagaagaaaggagattttaactttgagacatatctcagtcaacatgaatggtttacctttacaactcctagacgagattctcttcagaatggaacctaaatctctggcaatgatacaatgcacgaatagatttttccgatcttatatatccgacccaaaatttgaaaaatactcttcttgggccaaaccaagtttgtttcatctttccagctatggcgccacttacatcttttgccaacctttggtctcttcaagagattctatgtcaccagaaaatgaagtgaatctgtctagagagccatgttacatttttggctcctgctcgggccttcccctactatatattggtggcctctttgtcgtaaatcccctcacaaagaggtttcgacttttggatcactctggctcaaagcttctgcctataatagttggtggtgatcgtaacgttgctggtagggaaagagggatgtgcgtcggattcacggtaaatggaaatcgaacaactaagagattcaagatagtctgcatacatgagatgggaacggtgtattcattcgcgctcaacgatggatattcatggagattatcggaaacaaccgtcaccgctagctcaaaaagtaatctcacggtgcaaatgaaacatgtatactttaacaacactcttcattggttgagaaacgatgggagcatcataacgttcaatcccgagacagagcaagcacgcttgattccttccatatttcatcaagaaccagatatgaaattgttgtttgcagcagacaataacattaatcgcttgatcttaatatcggggacgaaagaagaaatttcagtttacacactactcgacaattctgaatggaccgtcaccagccagatcaagaacgtatctatgaaggaaagtgaacttgtatgctggaacattgttgtgtacgacggcaagcatctagtggtgagggagatgaaagattcattaaacggtgtggttcatgtgtacgacatggaagttaaaagttgggaagttatagggtcaaccaaatcttggtccagtcgcgtccgagacttctataaatttacaccatccttgttctttgtcgaggaggatgagcagcagaaggtgacagtagcttctaatgacaaacgcattccctatctaactgcgattatgggactcattgatacaaccaag

SEQ ID NO: 163636 - DNA, 1044 bp, Arabidopsis thaliana landsberg
gtggagatactctctagagtttcggctgtatctttggcacgattacgaactacatccaaacgatggaacgctcttgttaaggacgagagacttgctaagaagcactctgcttatgctccaaggcagtctctggttatcacgttgattgattctagggtttatttaatgaacgtgagtatcctctatggaattgaaaaggttgatctatctgcaaagctaacaggtcaattcagcctaaaagatcctctttcaaattctttagaggatattgatatacgtaacgtctttcactgcgacggcttattactatgcagcaccaaagacaatagattagttgtttggaatccatgttcaggtgaaacaaggtggatccaacctagaagttcctacaaggtatcagacatctatgctttaggttatgataacacatcctcatgtcacaaaatcttgaggatggatcgatctgaggaccgtatcccaattcaaactgagtaccaagtctatgactttacctctaaatcgtggctagttgatggtgtggctggaggcttgttcataccaagtattgggactcggagacgtggcttgtctgtgaagggaaatacttactggcttgctcttactgaagacggaccgccatttgatatgttcttattaagttttgatttttcgactgacgggtttcgacgtcagtctcttccgacggatgctcctcgtacttactacgatgtgtctttatcagtgactagagaagagcaacaactttgtatgtttaatattcatggctctgagttatggatagcaactaagatggagagtaccggagccatttcatggagcaagtcccatcgttttcactttagaattgatgagatgactgtcttggctgaccaagagaagcccgttttcgtgtatcgcttcaaacccaagtccaacatgttacacattgtgggagagcatatatacatcatacaagtggatcagcatagtgcagattgttaatgtccatatctccttacttatgttccaagtttggttcaaatc

SEQ ID NO: 163637 - DNA, 1518 bp, Arabidopsis thaliana landsberg
atgcttcactctcgtcctcgtcctagtcttgttgatttcagtaaattgtttggtgccgttgcccgaacaaagcagtacaatctagtgttagatctctgcaagcaaatggaattaaagggaatcgcgcataacctctacactctgagtattatgattaattgcttttgtcgatgtcgtaaactctgtttggctttttctgctatggggaagatcattaaacttgggtatgagcctaacactatcacattttcaactttaatcaacggattatgtctcgagggtagagtttccgaagctctggaattagttgatcgaatggttgaaatgggacataaacccgatctcataactattaacactctggtcaatggactttgtctcaacggtaaagaggctgaagcaatgcttttgatagataaaatggtggaatatggctgtcaacccaatgcagttacctacggaccggttttaaatgtaatgtgtaagtccggccaaactgcccttgccatggagttgctcagaaagatggaagaaagaaatatcaagctcgatgcagtcaaatacagtatcatcattgatggtctttgcaaacacgggagcctcgacaatgcattcaaccttttcaatgaaatggaaatgaaagggatcacaacaaatattattacctacaacattctcattggcggcttttgtaatgctggtagatgggatgatggtgccaagttattgagggatatgatcaagaggaaaatcaaccccaacgttgtcacattcagtgttttgattgatagttttgtgaaagagggaaagcttcgagaggccgaagaactgcacaaggagatgatacaacgaggcatagctcctgatactatcacatacacttctttgatagatgggttttgcaaggagaaccacctagataaggccaaccagatggtggatctgatggttagcaaaggatgcgatcctaatatcaggacgtttaatatcctcataaatggatattgtaaggctaatcgaattgacgatggtttggaactcttccgcaaaatgtctttgagaggagtggttgcagatacagttacttataacactcttatccaaggattttgtgaattgggaaaacttaatgttgccaaagaactcttccaagagatggtttctcgtaaagttcctcctaatattgtgacctacaaaattttgctggatgggttgtgtgacaatggggaatcagaaaaagcgttggaaatatttgaaaaaatagagaagagtaagatggagcttgatattggtatctataacatcatcattcacgggatgtgcaatgctagtaaggtggatgatgcttgggatttattctgtagcctccctctcaaaggagtgaagcccggtgtcaaaacatacaatataatgattgggggactgtgtaagaaaggcccattgtctgaagcggaactgttgtttagaaaaatggaagaggatgggcatgcgccagatggttggacatacaacatactc

SEQ ID NO: 163638 - DNA, 1371 bp, Arabidopsis thaliana landsberg
gtcatgtatgctctgatactccatggaagaaggttggtacagttgcagaaatggtgtaactttagtctttcagtgcaaaaggcatcacctatatccaatttcttctcctctgcttctgctgcgtgtttgagtcctagagttggtcgaaaaggaaacaactttacagtctcttaccttgttgattcattgtgcttaaccacaaaactcgctgaatccatttcacggaaggttagcttcgaggacaagaacaatcctgattctgttctgaatcttttgacaagtcatgggttcacaggttctcagatctccaccatcattagggattacccacagttgcttatagcagatgctgagaaatcacttggtcccaagcttcagtttttgcagtctagaggagcttcaagctctgaaatcactgagattgtttcttcagttccggaaatattgggaaagaaagggcacaaaactatcagcgtatactatgatttcatcaaagacactttgcttgagaagagttccaagttcgaaaagttgtcccattctttgccacagggtagtaagcaagagaataaaatcaggaatatattggttttgagagatttgggcgtgcctcaaaagttgttattctcattgctcttctctaatcaccatgtctgctgtggaaaagaaaagtttgaagaatcactcaacaaggttgttgggatgggttttgatccgaccactccaaagtttgtggaagccttatgcattgtttacggattgagcgacaaaagactagaagaaaacttcaatgtctacaaaagatttggcttaactgtaaacgatgtatgggaacttttcaagaagtgccctgcctttcttggatactctgagaataggataattcagacatttgaagccttaaagaggtgtggtctgtgcgaagatgaggtattgtcagtgttcaagaagaatccactatgcttacgtgcttcagagcagcagatattgaactccatgaaaacatttataggcttaggattcagcagagatgagtttgtcatgatggtcaagtgccttcctcagtgcattggatattctgcagagatggtgaagaagaagactgggtttgtggtgaagaagatgaattggccacttaaggtcattactttgttccctcaggtacttggatatagcatggagaagaggactgtcccaaggtgtaatgtaatcaaagctctcatgtccaaaggattgcttggaagcgaactccctccaatggcgtctgttttggcatgtaccgatcagaccttcttaaaaaggtatgtggttgagcatgatgaaaagctggtgcttgaatcaatgtctatcttcaaccaagaccgtgtctca

SEQ ID NO: 163639 - DNA, 1005 bp, Arabidopsis thaliana landsberg
atggtctattcctctaagaagctgttcttgttcttcctctcgtgcattatgctgactttcaactataacactagtggcttcgtagccgcagcaaatagcataggcttgaactacggcctcctcggagataacttcccaactccatccaatgttctcaacctttacaagtccataggcattacaaaaatccgaatcttcgacccaaaaacagaggttcttaacgccttacgcggccaccgtaatattgaagtcactgttggcgtgagggaccaggacttgggtgctctttcagctaacgaagaagctgttaagggctggtttgcaaccaacatcgagccttacttagccgatgtcaacattgcgttcattactgttggtaatgaagtcatccccggaccaatcggtcctcaagtgcttccggtcatgcagtctcttaccatcctcgtcaagtcgatgaaccttcccatctcgataagcaccgtggtggctatgtcgaatcttgagcaatcatacccaccttctgctggagagttcacgtctcaagcgcgagaacaacttgtccccgtgctgaaactattgtctcaaacaagtacgcctattctcgtcaatatttacccttactttccttacgcatccgacccaacgaacatccctctagactatgctaccttcaacactaaggccaccgtcgtccaagatggaccattgggctattcaaacatgtttgatgcaatctttgacgcattcgtgtgggcaatggagaaggaaggcgtgaaagatttacccatggtggtgtccgagaccggatggccatctgccggaaatgggaacttaaccacaccggatatcgcgggtacttacaacagaaatttcgtgaaacatatagtaagcgggaaggaaacgcctaagcgacccaacaatggaatggatgggtttttatttgcaacgttcaacgaaaatcaaaagccggccgggactgatatgaagcccatctataagctattt

SEQ ID NO: 163640 - DNA, 1221 bp, Arabidopsis thaliana landsberg
atgcacacttcgtctaagacggtccttcgtccatccttaataaggcctttgaagtttcttattggttttcttttatccctttgcagggatgagaatgagttaatcactagcattatcgagcaagtgaagagagtgatatggaatgaggagcaaaaagatgtccagcggaaatatgcgtttatggacgctcattactttagatcggaggagtgggaaagtgtggtcaatgatgctgacgctcttctccaggatgaaaaggctgttgcaattccagaagaggctgagattgtccgaggtgaagcaaaaatgtatagcaaatcaggaagggatgatgatctgaatccaagaaaatataagaaattccatgataaagcaaactccgatgcagttctgatgataagaaattcacagaatagctttgagagcaaatatggaaaagattggcaaagctctaccatcgcgacctaccaaaaacacgttgcaccaccaccgcaacatcaagtgttcattaattttcaaggggaagatgtcggtttcagctttgcaagccatttggtttctgccttgttaagggaaggggccaacttatttatagacaaaaatgagaggaggggtgaagattttggcaaacttttcaagatgatcgaggattccaaaattgcgctcgtgctgttttcaagcaggtactcagaatcaagatggtgcttagacgagttggtgaaaatccaaaaacttagggatgaaggcaaactcaaagtcattccaatcttctacaaggtggagccatcgcaggtgcaacagctgaatggagattttggtgacaagctttggaatttgtggaggcttcatcgggaccacgatatcattcaatggaaggaagcattggagtctgttgctagccatgagaccatgacgcgcttctggttgaaggaggaagggtaatgctactttttaatcggtgatcttgacctaagtgtcgttaaagtttctaaattcctcttacttgcatgattttaattctctcatttgtctggcagtcctgatagtgtatttgtcacttctatcgtcgaggaggtcaaaacggtccttaccaaaattttactccagcaaggagaaaatcctgaaactattcgacttcccaccagaggagcagaaaaacctgaaacttttcccaacaaggacccgctcgttggtgtcgaaaaacacatggagaaattgtaa

SEQ ID NO: 163641 - DNA, 489 bp, Arabidopsis thaliana landsberg
  unsure (1)..(489): unsure at all n locations
atggcccatttcatgaagctactcgtgacaattgcattaacaaccgtggtcacaatcgccatcgtcaccaccaaaaccaccaccaagaccgcaacatttgctctcgaagaccctttcaaggaccttacaccaccaggaacgatcaagatcagaccaagtcggttcttggcagaaaaagtcgacaagggtaaagaaccaaaagcccgtaacccaaacgcagctgaccattgcaacaaggacaatgaaatctgtagcagcagcgattacagcacaggagcaaacgctacaatggcttgttgcaacaacaagtgtatggatttatcaaccgacgacaaaaactgcggtttatgtaagaacaaatgcaagttcgggcaaacgtgttgtcgtggtcagtgcgtttacgtggcctacgataaacgccattgcggtgagtgtaaccatcgttgcgatctcggcgagttctgcgtctacggtctctgtaactannnn

SEQ ID NO: 163642 - DNA, 325 bp, Arabidopsis thaliana landsberg
atgagcaacgcgaccgaatggctggcgctgagtgaagccacggacgcgctgcccgaaggggccgtgacggcgctgactacactgacccgcacgcatggttcggcgtttcgccacgccggcacgcgcatgctggtccacgccgacgggcgcgccgtgtgcgagctttccggcggttgcccccagcgcgacatcgtcacgcgcgcccgcgcggtcatcaatgatggcaaacccatgcgcgtggcctacaactgccgaatcaggcctggacgtgctgatggagatgggctgcggtggtgagctggaagtgttgatcgagcccatcgaa

SEQ ID NO: 163643 - DNA, 464 bp, Arabidopsis thaliana landsberg
ctcaacgttactccgcttcatgacagggtaattgttagacctgccgttgtctaagaaaagactgtttgcgggatcatcatccccgataccgcaaaagagaaaccccagcgcggcgtgatcgttgctgccggtgccggtaaaaaagacgaaccagtaaccgtaaaagtgggcgacaccgttctgtatggcaaatatgccggaacagagatccatatcgaaggtgaagacctgctgatcatgcgcgaaagcgatatactggcaattgtataatccccctcaggattcaatcaacattttacatttcaaaatctcaaaattgctactatggcaaagcagatatatttcgatatcgaagcaggatataaaatgaaaaaaggcgttgacacactggccaacgctgaaaaagtaaccctgggccccaaaggccgtaacgtggtgatcgaaatgaattcggtgcaccccag

SEQ ID NO: 163644 - DNA, 307 bp, Arabidopsis thaliana landsberg
atggctctctctggttcgcaaaagaaggttttcctacttgttatagccattgcatgtctctcctcttctcttgcagaggcgtggagctggagttctagtgacggcaacggctggggatggggatctgatggctctagcacctctacctcaggcccaggttcaacccctggtgattcaaactctggcggttcaaaccctggaggtccgaattctggtggttttagctctccttggggatcttggggatggggttggggatcccacggctctggcagcccggccccatccaatgcttaatttcttttag

SEQ ID NO: 163645 - DNA, 231 bp, Arabidopsis thaliana landsberg
  unsure (1)..(231): unsure at all n locations
nnnnnnnnnnnnnnnnnnnnnngcaagtattgccgtttcaccgccgagggcgtcaaggagatcgattacaaggatctcaacaccctgcgccagtacatcaccgaaaccggcaagatcgtgcccatccgcatcaccggcaccaaggcgcgctaccagcgccagctgtccacggccgtcaagcgcgcgcgtttcctggcgctgctgccgtacaccgacaaccacaacccctga

SEQ ID NO: 163646 - DNA, 448 bp, Arabidopsis thaliana landsberg
tcttgaggtaactcagccgtaacaatatattttgccgccaaactcaaatgtaacctagaaacctttcccgccaaactgtaagacacggaaccttttgtattcctttacttgttttttttttactatatgttacttcatctcatcatttacaggtctcatcctctcttccgaacgacatggtgtcactcacattgacggacagtttatcaaagatgtcgaagccgtacttaccactcctgattgggcgaatctcctagttctaaaccctagcttgggtacatggattgacaaaaccactgttacgttgtattgggacaatatgcgggcgctgaaacgaggatgggcgtgtggtttagataagccgtggtggatgacgacaactgtttggaatgatttggtggacatgtttactgaatttggtccagatgatgtcggtttcacgtcttga

SEQ ID NO: 163647 - DNA, 652 bp, Arabidopsis thaliana landsberg
aaaaaccaatcgtctgcttctgtttgtgttttccctcaggttgctgttagcccagaaattcacatccaggcatcagtacttgctaaaaattgttagatatgttgttgaagatggcgttgatgctttaaaaaatatggtgaaggatggtccgatatttaaggcgactgtgtattccaaggaaaccctaagttgttgccgacttgacacatctcgttatttcatgtggtggtccatgaagcactccatctattaccatttctttacaaaatgtcttgaaaccaacaatcctcatgctttgaatgcggtattgtacaaaccaatagcatatgagaattttactgccgaatgctatagagctagcttatgggcggctgtgtattccaaagaaaccctaagttgttaccgacttgacacatctcgttatttcatgtggctgtccatgacgcactccatctattaccatttctttacaaaatgtcttgaagccaacaattctcatgctttgaatgcggtattgtacaaaccaatagcatatgagaattttgctgccgaatgctatagagctagcttatgggcggctgtgtattccaaggaaaccctaagttgttgccgacttgacacatctcgttatttcaaagaagaatcttcttga

SEQ ID NO: 163648 - DNA, 691 bp, Arabidopsis thaliana landsberg
ttggtggtggttgataagcgcttgcttctaccggagctttagaatgggctattacgctttctttacaaccacaagacactctttttctgttatactttgcaaaaccgtttagaaaaagttcttctctttctctcctctttgtcaattttcttgtttaaggtttgtttggtttggctaatgaggtttttcggattgagttttaggtaaaaggaagaaccgaaaacgcgaggtgaaaaccgatgaattggtccatactttaaagaaactgtgccaaacgaaacgacccggggtgagtcacacttggtattcgattgtttatacatataatgaaagctacactattactgttctgatcaaattctggcgacgtgtggatttcttttatgaatgtcagatagaagtggagataaggaggttggaggggaaagacaaagacaaagggcagaagatagttgaagaatcaaagaaacaacaagtgagccttttagtggttggacaagagaagaaacctccggtctggaggctattgaagagatgggcgtggaagagacgccgtggacacgaaggtgttctcaaatactgcctcgaaaacgcctcttgcatgacaatcgcggttaaacccaagaaccgcaagctcggcggttacttaatcaccaccaaacgccacaaaaacttctggcttctcgcttga

SEQ ID NO: 163649 - DNA, 1233 bp, Arabidopsis thaliana landsberg
tccaagcgtttccatgcttagtcactagaactaactctggagtgaatttatcacatctaccaatcatacttcggggatctcttagaaagacggctattgtcttcttgcatttatttcataaggaataaagtccctgatcagggcaaacaacgaaagaaaagacaaaatcctcaatctcagtcttaaatgagaacacaaaatgcatgcatgcaatgttttctctactctgtacgactgtacagaactaagagataaaggccctaacttttacttccctacaggttataaaccatggaataccatcatcagtggttaacgatgccttagatgcagcaacacagttcttcgacttacctgtggaagagaagatgcttctggtgtctgcaaacgttcatgagccagtcaggtatggcacaagccttaaccattcaacagacagagttcactactggagagatttcatcaagcattactctcatccactctcaaagtggatcgatatgtggccatcaaatcctccatgctacaagtaagtaaaacatttttaggccagcttcactgtctcaatatatacaaaacctagctctcttttttaaaaagttgtaacaaagctttgagtgaaaactgatattattttctgattcacacctacctttcagggataaagtgggcaagtatgcagaggcaacacatttgctacacaagcagttaatagaagctatctcagaaagcctgggactggagaaaaattacttacaagaagagatagaagaaggctcacaagtcatggcagtgaattgttatccagcatgcccggaacctgaaatggccttgggaatgccaccacactcagacttcagctcactgaccatcttacttcagagtagcaagggactccagataatggactgcaacaaaaactgggtttgtgtgccgtatatagaaggagctttgatagttcagctgggagatcaggtagaggtgatgagcaacggcatatacaagagcgtcattcatcgtgtaacagtgaacaaagaagtcaaaaggctatcttttgcaagtcttcacagtctacctctgcacaagaaaataagtccagcaccaaaactcgtcaacccaaacaatgcaccagcctatggagagtttagtttcaacgattttctgaactacatctcaagcaacgattttatacaagaaagattcattgacacaataaagaaaagcagttcctaa

SEQ ID NO: 163650 - DNA, 719 bp, Arabidopsis thaliana landsberg
agtcattcatcgaccaaactgtgttaactcttaagtctaatttataattaaggtctcttgagctataatacaaagatgacaacggtgagtaattatcttgattccccttatcattttccatgaaaactagctcatttatatataagttaattgaatttgtgtatgtgtacacaggtagtggaaatggaagtgccaatggactgtcccggttgcgagaacaaagttaggaaagctcttgaaaagatgaagggtaattaatcagtgaagatgggtttcaaatcctaaactaattaacatttactgagtaattagttttcgtgtcacccaagaaacctgataattacgtcttgtattgaacaggagtccacgatgttcagatagacataaaacagcagagagtaacggtgactggttcggccgagcagaagaaagttctgaaagttgcaaggaatgttacaaagagagatatatgcttatggtcgtacccttaccaccctgaatctaatggatataacgacaggtacttcaagaagaagtttcgcaaaagaatcaacatgtcggtgaacggtgagaaagtgagttcctataactaccacaagcatggctaccacggacacgagcatggatactatcaagaacggccttattcaggtcttatcaatccgagcgctagctccatgttcagtgaagaaaaccctcatttctgcagcatcatgtga

SEQ ID NO: 163651 - DNA, 1086 bp, Arabidopsis thaliana landsberg
gggtctgactacagaactcagcttcagcttggaaacaattccgtttatgcagctaactatattcaggtaaagtgactatgctttaccattttaaactgttctactaaaattctgtggttaagtctatagttaggtagcttttccgtttatccctggacaagcttttgtttattttgtcagcattagttaatcttttgttagttgctaaatagatattcgtttcttttcactgaatcatatctttttcttccagcatgtgacaccacacctgtctttgggtggtgaggctttctggcttggtcagcaactgatgtcgggtgttggttatgcagctcgatatgagactgacaaaacggtaaatgtttcttcttagttagaataaggcaactcaatcagaaaatcgattcttcttttctatgttggtttacaatattccaacaatcttcaagctaacttgagtatgatccttttcatttttttgaatttctttaaatgttttattatccaacaggttgcctctgggcaaattgcttccactggtgtggctgtcatgaactatgttcataaggtttcagagaaggtaaacaatccagccttatcttaattcatctttaatcctatagagtaatataagctaattcttattttttcaataatcagttgtcatttgcaacggatttcatctacaattatttgtcacgagatgttacagctagtgtcgggtatgacctcattactagacaggtacatacctcattccttttggtcccattcgagttttgaaacagcaacaaagcgctgttctaattatgggtttggttgtggtttggtgtagtctcgattaagaggaaaggttgattctaacggtgttgtcgctgcttaccttgaagaacaattgcctattggactcagatttcttctatctgcagaggtaaagaaaatgatttaatccgctactatacattttttagtgcatttgttaatgactagtttttgataatgactgatttttgatattaaatgaaccaggtggatcatgtgaagaaggattacaagtttggtttcggtgttaacgccttttaattc

SEQ ID NO: 163652 - DNA, 250 bp, Arabidopsis thaliana landsberg
acacaacacaaacttgagatggacaaaagagatggagtgtttggatcgcagccaatgggtgtgccaccagctcagcagatgtctcgttttgatcaacctgtccctcctccagtcggataccctcagtcctatccaccgcctgctcaaggctaccctcctgcatcttacccgcctcccggttatcctcagcattaagaaatttaaccagtatcttcattttatgtgtcaaagtgttgttgttacttggttt

SEQ ID NO: 163653 - DNA, 3091 bp, Arabidopsis thaliana landsberg
atggcttggacggtggtaagcacgagagctatggcccaaatcttgggatgagatcttgatgacttaggccatgtttgtttcatcatttatcatttccattcagatgatccacttacatgatttatttgaatgatacatttgaatgatgtttgtttaattatttataatttaatctaaatgatgcatttaaatggatctttatttgtttgatattttgtagttcatccacattctcatttatataaaaatgactaaaatacccatgcttttattttgacaaatgacaaatattcaacatcattacccattatcaataccaaacatattggcgggaaaatacggtttaacagttttggcgggataatatgattttgcggctttggcgggaaaaacatgattttgcggttttggcggaaaaaccatgattttgcggttttggcgggaaaatatgattttgtggttttggcgggaaaacattattttgctgttttggcggaaaaaccatgattttgcggttttggtggaaaaaacattattttgcggttttggcgggaaacatgattttacgtttttggcgaaaaaatgattttgtggttttggcgggaaaatatgattttgcggttttttttgtttcaatatgtaattttaaaaatattaattaagaaatctatagaaaataacatgatttaatttatgattataaataagggtatatctgtcttttgttatttttgaataaaccatcttcatccaaatgcttcaatcaaattcatccaaatgagtttcataaatttgtctaaatttagaaattcattcagatgtatcatccagatgatccatccaaatacttgttaaattataaaaaacaaacatcatttttcatctgcatttggatgaattatttggatggaaaaacaaacaaggtctgagtctgatttcacagtttccaaaagagatataagaaggttcgtttcaacttaatcggaaggacacatgtaaagagctatgcaattcaacggtaaagttcatgttgagattgtacgtacgacagtttgaatcatttatcaaataaacttttttgcttgaatctgagagttaatatattgtcttaagtgagctgtggtactatcttttatttttatagtttgccgagaaaatgttgtctttttataacttgggggctctgaaggattagctcggattaaaagagctaaacgatgtctttttttccgtttgttggattactaaatgttgctgtgagtggtcatactacttttgtttaaagttttttgcatttttcttgttttcttgctttcattaattcaattgaagaattttgtcaaaaatctctgttaatgcctcctatttacttctgttcatgccattcacattaagtgtacttggaggtcaaatcctcctaatctgacgtcttttttttctttgcaacacttgttttttctctctctgtgaaatagctgttttctggtatctcctaatttggatagaacagatggatgtttggttactactttttttttttaatccatcaaatgtttatgaaaaataactgcacatatattttcaaagtgaaggatgcgagattacgtttgctatatatttacatccatactcattttttgcttcacctttccgtttttactttttttttctttacccatttttttcccctcttattttgctttgtgttgcttttcccagtttgaaaagattttttgtagtttcaccgtgtaacacaggctcactattttctatgatatctccttttaaattctgaagaaatgctgaatttaaaagttagacgattttcactcatacttttacagtgttttaagttgttgctcttgttgtttttctatctctgctcttgaactaagacttagcacccagttgcaaagtcttggagttgagctcagcaaatgtggaaacttccctagttcggctttgctctttgattcggcatgtgcacatcaatatgtcactgaggcaggctgaaaaaggataatagttgcgccccttgtcgcctccagtcccgaattcgtgtacatgttttcgtctaaaattaattgatggaaaccttccaatatcccaggttgcagattctgtcctttgaatttgaaacatctgtaaaggaatgtctgaaactgaaacctggtttcatttctgaaaatttcccccacgtatttgccttttacatctgaatttgacatgtagtttgtctcaatatttttttacacctggtttggagccttctgcaaaaagcttctagctcactcttccagaagtgttgcattgtctttcttcaaatatcgttgttttagtgggaaatctgtttcaatctttcattgaatatttatctcgcttttataatctttcatcatttcgtttcctttgctgaaggataaagttgcatatgcccgtaatagaatagtaacttcgtttttttttcccttttaatcagaaggagcttgtaacagaggctcttgaagaacagataccgactgaaatcacaaatacaaacttggttgctggatataatgattgtacaggcacaaggtcccgagcgaatatgccaaacccgacgaagagttgctcaacgccagtgactcttgctcataattccgtctcaactgacttcagcataagaaatcagcttcataccggcgcactttgggctgcacaggcgcaagagtccggtaaaaaaggtgaagaaatagcttacagatactttgttgcaaaatatggcaagaaggcactggttaaatgggttaatgagcatagtgaaaccggattaccttacgaccttatcatcgaaaacagaggaggtaacaaagagtacgtagaggtgaaagcaactgtatccacagggaaagactatttcaatttgtcagtgaaggaatgggagtttgccaatgagaaaggagagagttacgttatagctcatgttttattaggcaacagtaatgccatcctcacacaacaaaggaatcttgtcaaattacgccaagacggtcatctccggttattgattctcatgcctagccagcgaaacgaggtcaacgttgcattctaa

SEQ ID NO: 163654 - DNA, 1703 bp, Arabidopsis thaliana landsberg
atgaagaattggtgggaggaaggattgatttaccaaagcgatccagatgaccccgatttcgaacctccagagggtgacattgaagccgacgatggaagtgatagtggtgatagcggagtcgaggaggacgaagccaccggagttgagggagacgacgttgggatagatggagacagagaatctgatggagaggagaatagagaagacgatggtgacatagcgtctgatggagacgtcaatctagaagacgatggagacagagatgaaagtcaaaagaagaggacgagagaagagaaaagaaaggaggaagaggctgaagaaggtcaaaagaagaagagaaaacagaagaaggatgagccggaagaagatttggccgagaggtttgagttcgagatagaggaagcagtagctatgtggtatgatgagttaaagattagaaggaacgaaataccagaaagtaataatgaagaagaagatcctgtgatcactagagataagaagattaggttagcttcggatgataggttagctataggcagaacattcttcactggttttgaattcaaagaggttgtcttgcattatgcaatgaagcataggataaatgctaaacaaaataggtgggaaaaggataaaattagctttagatgtgctcaaaggaaggagtgtgaatggtatgtctatgcctcatactctcacgagaggcaattgtgggttttgaagaccaaatgtctggatcattcttgtacttctaatggaaaatgcaagctgttgaagaggaaagtgattggtagattgtttatggataagctaaggttgcagcctaatttcatgcctcttgacattcagaggcatatcaaggagcaatggaagctagttagtactattggacaagtgcaagatggaagacttctagctcttaagtggctgaaagaagaatatgcccaacagtttgcacaccttcgaggctatgtggcagaaatcttgagtacaaacaaaggatcaactgcaattgttgataccattagggatgcaaacgagaatgatgtcttcaaccggatttatgtttgtcttggagcaatgaagaatgcgttttacttctgtaggcctctcattgggatagatggaacgtttttgaagcatgcggttaagggatgtctgttcactgctatagctcatgatgcgaacaaccaaatctatccagtggcgtgggcaactgttcagtctgagaatgcagacaattggctctggtttttgaatcagctgaagcatgacttggaactaaaggatggcagtggctatgtggtcatatcagatcgttgcaaggttagtattatcttatgtctgattgtttaattatgtatagatgatagtgctttatagatgctaatgtgtttgtatttgacaggggattattagtgctgtcaagaagaagaatcaagagattaaggtttgtttctgttttaggctgctgtttggttagccattttggtgctcatgtttgaatgttgtttctgttttaggaggctggaacatctcagcctacaatggagctccaagaaacaacacatggagctgatacaatcacactcactcagagaagcagtcaatgggatcaatcggaccagttggactagatcaagttctcaatcctcttttgtctattttggaacaatcttaacaatcttcatcctcgtttgtct

SEQ ID NO: 163655 - DNA, 252 bp, Arabidopsis thaliana landsberg
attatgttatctttaattctgactaaaacaatgatatctggcagagaggagaacgcgacatgcgttatggcaaatcttcaaatatgcaagtcggcggtaacaaccggaaacccacattcgaaggaatgttgtgcataactgaaagaacaacaatcgtgtttttgtgaatacttgaaagatccattagatgttccatatattacatatgccaaaataatcttagcagcatgtggtttatcttttcctaagtgt

SEQ ID NO: 163656 - DNA, 663 bp, Arabidopsis thaliana landsberg
atggatataattcgggtgaaaaaagtcgagaaatcgagattgatgatgaagaagaagataccaaatttgacggaaaataggttgcttgtaagcatcaaagtggtagggagtagtggacctattcgttttgttgtcaaggaagatgaaacagtcacaaatgttatagatattaccctgagatgctatgctcgccaaggaagacttcctattttctcttctcatttcacctcttctttcctactttactctccatactctccaaatcaacgtgagacacaatcgtgtggttttttctttgagtctgtcatttgcatttagaacaaatgatgattacaattttttgttataaaaagagataaacgtttgcaaaaatatttcatctaaaaaaaaggtgcctaggtctacttaatcataattctacttctacattaacgtcattgctttatctaaatttcagcactgaatccatgcactaggatcgggtcaacaaggtccatgaacttcattatgtgtaagaatccagaagctgagaaccctgaagtttctctggacacaacccggaagattagtggaaagtggagggcgtggatgaacaactctttggccttaatgcttccattactcaaacaaatttcccatggacaatccgcaacaatcgactaa

SEQ ID NO: 163657 - DNA, 942 bp, Arabidopsis thaliana landsberg
atggatagcatcggcctcgattccaagagggagatccgttggaaggtgcctgtccgtgacattgtcgtttgggatctgaactggtacgccagatctcgttgaatcgaatgaattcagatccatgatcgttggtcacaatagatgtgttagtttcggtgttggaaggatctattttcgtccccacagatggcgccaaatgtgggtttcgaaatccacactagagatttgtaaatagaattatgagaaaggatggatagatcttaacaagaactttgagatttatattgctaagaacgaatggacttttgtattgattataatagaggttttacaatgtgaaaggagattacaagtgtaaaagtataagtgtgaatgttaagctgaatgaatgtgtcttccaagtctttcttgcttcttcatataggtctacgcacgtggtagctctgtccgagatccgcggagattctcctagatattcggcaggtcagttccgagatatcaggtccgctccgcaaatatctccctattagtttctaggttgttattcgcttatctcccttcatcaggtgaccgggcttgtcaggcccaaataccaatttacgtacatgggctcatcagttgtgcaggtcctcttacttggtgggcttggtgggcttattggggtggcctgatatttttgcaggtggatttttggagggaaatccagttccaacatcttgttttcctggaaataatcttttgaacattattggatttgcacaagtttttgcctcgggcatttttcatggctcggtggtcgttcgagaggtcgctttgggcaaccggtgtattctggctcgggacatgctggatgactcttcattgaaattggttgactatctcccgaggcgatacaagcggttcccaaagcgttttctcgatcggctcggactgcgtttctag

SEQ ID NO: 163658 - DNA, 952 bp, Arabidopsis thaliana landsberg
atggcaacgatcgcggccatagcgagtgagtgagaaggcttaaatgaatacatttcaaacatggtcttaatgggatgaggatatgaagttaatggggtcaaaaacgaatatatagataatatggggtctaatatggtaataaacaaagtaacactaatatgaatgggcctaaatagggcccattttagatttctttaaaagatcccagagagagagggatctaattcctgataaaccctagaagaagaagaagaagaagaagaagaagaagcaaaacctgtggagatcgagatgggaaatgagagcaagagcaatttgggaggaggaggaattagggcaaagatggagcactatgtctacagtggggagaaaagcacgtttggctgggatcgggattatctccatcatcttcggaatccctggtatctaatgaatcaaggttcgttttctctgggcgatttagattaaaataaataaatagatgtttctctgtagattccgaaatggaagaggatgatgatatcaatagctgaaagatttagaatctaaagtttctaactttatatttcttggcaaatgcaatcaagtggtcgatcaaatagagtttgattatatgataatgatgagtcacaatgtttattctgtttggatcataatagacttgcatgatcacattttttaccaagtttgtttgctttttcccctgatgatcacacatcgattcaattgcataatctcaatggttaaatatcttatttgctatatgtgacattggtaatattctccttgttttgttcattatataggctaattgtttctcttattggcttctgttgtttggtaaacctggtttgtttcaggatcaaagcatcgttctcaccaagattacttggaaaaagctgataaagctcgaaaagctcgtctctcatcatcttcatcctcggataagtag

SEQ ID NO: 163659 - DNA, 521 bp, Arabidopsis thaliana landsberg
ctaatcactcgacagcgacactctatccttcactcgacctcgaggttgagtgcagccatcaccatttctcaccatcactcgaccccctggagggcacctccatcaccacctatcgccattcactcgaccccctggtcgagcaacaacgtcaccacctctcgtcatttactcgatcaccaccactcgaccctgtggtcgagtcccaccatcatcattcattcgatcaatcactctgccaccaagttgagttccaccatcatccaccactcgacattatactcgactgccagcttcagagtcttctcaattctgcactcaaccagacattcgagcataaggaagagaagaagactccaactcatcactcgacccattactcgaccacctaggttgagaaccgttcttaatccatcccaatactatgtcgttttgagtattagggtttcagaacatttcgctataagtagcatgtactttatatttttgagactaggttttattcggtagacagttgctgttct

SEQ ID NO: 163660 - DNA, 492 bp, Arabidopsis thaliana landsberg
gacatgagtgaaccatcatctgtttcaggtgtcaaaaaggtagggcagcgtatcataagctatagtcttatacgtttgacatccaacataaacaaaaaaccaattgtttccaacctttttttttttttaatgcaggttgctattatccctgaaattcacatactggcacgagtacttgctaaaattgttagctatgttgctgaagaaggcgtggatgctttgaaaccctttgtgaaagctggaccaccatttaaatcggttgtgtattcaaaggaaactctaagttgtgtccgccttgacaaatctcgttattacatgtggtggtccatgacgcactccatctattatcatttcttcacaaaatgtcttgaagccaaaaatccacatgctttgaatgctctattgtacaaaccaatagcttatgagaattttgcagccgaatgctatagagctaccgtatgggcggagctttacggagagtatgaagcatag

SEQ ID NO: 163661 - DNA, 201 bp, Arabidopsis thaliana landsberg
atgctgaatatcggcggtgtcgatgatgacatagaaaggctccacaaatttgataataatggaaataattataaggtgggtcgacgtaaacaacatgcacgtgtattccccatggacctgtttcgtctttcgagcatggcattgtccttactatggccgccataaatttccaatctattctcatcattacccaccaaatta

SEQ ID NO: 163662 - DNA, 596 bp, Arabidopsis thaliana landsberg
atccggagctccttcttgcttttcgtctccgaatttcccagctaaaaattaaagaaatgagtagcaattccgagaactcgattgcgagtacgcaatccgtcagccgttggggacgtgggttaccatcgaagtgtcattgcggattagacgtggtcatctatacgtcgtcgtcagcaaagaaccctggaagaccatacttccgttgtcctacgcgtttagatgtaagtatataattgatttgagggttttatcggtttcgttgttaattgcggatgtgattgaatatgcaggaccatttgtttaaatgggtcgaagatggtacatacgaagtggttgtagacagttggccgaaattgtccgtcatggacaatgagttaagcgcggccaagtccgaggttgctgtcgagctagaagcgttacaggcgatggtgaaagaagtgaaggaagaagtgatgaggagcgaaagggaaaaccagatatggaaattgatgatcaaactttgctgcttttgtcttgcctttactatcattgtcattgtttttgctatcttaatgttcccaaaaatcaacgaacaaaggctttttcttggttactag

SEQ ID NO: 163663 - DNA, 493 bp, Arabidopsis thaliana landsberg
atgattaatcattcgggatccaagtattacgaagatttagctgaaggaaatgaaaaccaaatcagcaactacaacatacaaatccaaaacggttaagcctagaagcaaattgttccacgatgtaacaaagaagacgaaaaggcgaatttttcataacactcgaaagccctatactatcagacgagcatatctcaaagggtaaaacttaccaacaaaacttcaaatccaaatgggcaactcaaatcaaaccctagaaagtttcaaccaagtagactctctcgacttgcacgaatcccaacgatcagaaatttgaagaaacccagtagacaaagagatcattaaactctacagcagcattttacttaccaatgattaatcatctcagtcgtagaataattttgtaaatatatctttttaattatattgaaatttcttttcaattctattaaattgttgtagaatattcgtagaatttgaaagaaagattttaaaa

SEQ ID NO: 163664 - DNA, 1398 bp, Arabidopsis thaliana landsberg
ttttccaaaaaggcaactattagagaatattatctgctgaagaagtcccacaaaaaaaaaaaagatatagaagccatgacttcgttactatattacacatgaaagttgcatcaattccctctccctcttcttcatcttcctctttctctccattatggaattaggaacagagataaaatcagacacaagacaagaagaacagagacatgttttcgaagattaccctgaacctcttttatacaccgtaagtatcacttttacatagtaatcaatttcttcttcatatataactatcatcttcttttctcaatacatatatttcttcgtcttctttttattgtagacatgggttttgcgagtttctatccattgtgaaggatgcaagagaaaaatcaagaaaatattgagcaaaatcgatggtaatatataaactaaatctaacgttttattctttttcgatattgattaactaattatgagtatttatatgattttattttaggtgtatatacaacaaatatcgacgtgaagcaacaaaaagtaacggtgatcggaaacgtagagccggagattttaatcaagaagatcatgaaagccggtagacacgccgagctatggccaacgtcaatggagaacaacattaacaacgattgtaactatcagaagaaaccaaagaaagataacgaagaaactagtggagatgaagacgacgacgaaaacaacaacaacaacaacaacggcggaggtgacgtcggtggtggaggtggtggtggaggaggaaactttgatcaggttaaacaagttgttacgtttgtaaacggtcaacttcaaccacaaggagatggagctccgaagaagaagaagaaaaagaaaaagaagaagaaaagcttagggaacacgacggtggtaatggaaggaggcggcggcggcggtggcggtggtggtcctccgcaaaacgatggaccgccagagacagtgatatactcagctccacaagatcatcacattatacacggaccacctcctcatctacatcatcatcagcagcagaatcatccgtatccaacggttcacagtcctccacgtcatcatccacaacaaatgtacgggccgggtccgggactgcctcctccttcgttttatcatactcagcctcaaacggcgccgtcttataccgtgagttataacacggtgcatgggccaagtaataacggtgggaatgagacggcgtcgtattacacggctcctccttctcatccgacgtcatattattcttatgagtacgtggacactggctacgaatctccaccgcccgaattttattcgtatagatctcaaccgtcggaatcgtttgagtcactaagcgaaggcaatccaaactcttgttgcgttatgtga

SEQ ID NO: 163665 - DNA, 1049 bp, Arabidopsis thaliana landsberg
atttatatctcccatgtaacgtcatttctgtcagcgccgacattgtctcacgtaactttttatattaaatcatgttaaaaatgtagtgctgtcatcatttttattttcatattggtatattaaaccatgtgaaaatataacgccgttttttttttagcgtcgtcattgtgtcacacagaagtttaaataatatagtgggaataaattgttgataaagaaatcatagcattaaattagatatttaaaattaatgattattaatttaaatatatttaaatgaccaatctaagtctcatgctatttaaaatgtaattgatagtagtatatagaggtcttaaaatggataactcaactcaactcaactcaactcataattaaatgagtttagggttaaatgagttatgggttgacccataactcatttaatttgatgggttgagttgttaaatgggttaacccatttaagtaataatttaattaattattatcataaaataataataaataattatcattattaattcattatcactatcatcaaacttagaatatttacggattccacttttcacgggtttacgttttttggcgggaaaatcacgggtttacttttctgcggaaaaatcacgggtttgcgtttttggcgggaaaattacgggtttacgtttttggcggaaaaatcacgggtttacatttttggagggaaaattacaggtttacgtttttggtgggaaaatcatgggtttacgtttttggcgggaaaatcacgggtttacatttttggcgggaaaattacgggtttacgttttcggcgggaaaatcatgggtttacgtttttggcgaaaaaattacaggtttacgtttttggcgggaaaattatgggtttacgtttttggcgggaaaatcacgggtttacgtttttggcgggaaaatcacgcgtttatattttttggtggaaaatcacgggtttatgttttttggtggaaaatttacgagtttactttttctcaatttcatcgcttgtatgtttaagaaatttggaaaaatat

SEQ ID NO: 163666 - DNA, 410 bp, Arabidopsis thaliana landsberg
gagctaacaaagattgagatttgagagaatgaaagagcaagttgaagatgatgaattcatgatggagaagaaacgttaggctggttatggactgattatggatttggtaaaggaagaagaagaactctctatttgagtttcgtaagaggcagcgcagatccaaaaaattgagactaaattagggttaatgacccataatctttatatatggctgcagattctcggtttaggtaaaaccgatcgcttccggttaccgaaccgacccgaaccgaaatccgattacccaaattaattttgccgatcggttacgtggattctgttcggtttacgccgataaccgaaaatttcggtttgatcggttcggttttctcggttatctccgaactcccaggcctaatgtaaacatataa

SEQ ID NO: 163667 - DNA, 484 bp, Arabidopsis thaliana landsberg
aacaagagtgaaccctcatctgtttcaggtgtcaaaaaagtagtgcagcgtatcataagctatagttttctacgtctgacattcaacgtaaacaaaaaccaattgtttgcttcagttttttttttactcaggttgctgttatccctgaaattcacatctcggcacccgtacttgctaaaattgttagctacgttgctgaagaaggcgtggatgctttgaaacccttggtgaaagctggaccattatataagcggctgtgtattcgaaggaaactctaagttgtgtccgccttgacaaatctcgttattacgtgtggtggtccacgacgcactccatctattatcatttcttcacaaaacgtcttgaagccaaaaatccacatgctttgaatgatgtattgtacaaaccaatagcatatgagaattttgctgccgaatgctatagagctaccttatgggcggagctttacggagagtatggagga

SEQ ID NO: 163668 - DNA, 2070 bp, Arabidopsis thaliana landsberg
acaatccggtagaaagcttaaacccaatcatactcgattacaatgtcggagatgctgaacaagaagatgaattccgatgtaatttatcgtcttcagtcgaagatgatgaagagtactaaatgtgtgctttatatgtatatttatttgaaaaatgctgtttaagaatatatcatataatgtttaattatttgaataaatattacataaaccttataattttcatgaatatttataagtattattaatttgttgggctgtcaacatcccaagcccaagcccaaacccaataaacttaacgacgaaaatacgactaacagacgacagacgtttaattatattgggctttcaaatttcgagcccaaacccaaaagaattaacgactaacgtgcgacaaacgttttattagttgggctattaaattccaaagcccaaacctaataatgttaacgacgatagtacgactaacatgcgacacactattaatttgtcgggcttttaaattctgaagcccaagcccaataaaaatgaacgagtatccaacgactattcggcgacacttgtctttattgttgggctttcatatttcgcggcccaaacccaataatgctaacgacgaaaatacgactaaattgcgactacctgtataaagaaaaccctaattcgatcgattcacttctcatttcatccaaacaaaacctcttcgatcttcttcttcaacttcttcttcgatccattttgaattgacttctccttcttctatctgttattcgatctgttcttcgtctcatctctacataaacccaatcgagttcttcttcttcttcttagatctcattcgattcgaatcatcttcgatctcttcgctttcttctactctttgatctcttcgctttcttcagttcttcgatctcttcgtctctcttcatcgatgcctaacgccggtcgtggaggttcacgaaagcgggagataacccccaacgttactcagagagccggagggtcaacaccgcttggaagacccgcttcgttgcctcagcagtacgacttcactccggtgtcggcgcctcaatttcctcagacgcagccgccagagcctcaacgtcagccccccactaccgcaactatctggcgctgcatcaactattccagagctccaccactccgtgtgtagatccgccgccgccgcgatctgaagaggtgcagtttaatccaccgccagaagctcctctaaaccaagatcaaccggagtctccaattgccaactctcaggcacacaaccatccatcttctcaaggcaacaactttcaagagggagctcctcaattgttgtcggagctacaagaagactcggggagggctctcaatgacatacttatggttctcggagggaaatgtggaccactatattgtctcctattcccaagccgaagactgaatggtatgtgctcttcctcaaccctattagattttttagattgtctattagcttgtgttaggttgcagcaatgattagcttgtgttaggttgtgtcttgattagcttgtgttaggttgtgtcttgattagcttgtgttagattgtggtggattgctcttgtgtccgcttcgttaatttgttgtgaacatagattgtgtcttgattttcttgtattagattgtttcattggattggcttcttgctctcttgtgttcgcttgctatcttgtgtgtttgacctattttgtgtgaacatagatcttgtcttgattagcttgtgtaagattatggttgcttgctatcttgtgtgaacatagtggtcatgtctagaaccgcttgtgttctgttgtggtggcttgctatcttgtgttctattgtggtggcttgctctcttgtgttcgcttgctatcttgtgttctgttgtggtggcttgctctcttgtgaacgcttgctatcttctgtgaagtggtcatgtctagcaatacttgtgttctgttgtggtggcttgctgatgagtgttttatttcatttcagtcttttacctaaaagaccacacgactactacaagtgcacagtatatcggagtagtattttag

SEQ ID NO: 163669 - DNA, 492 bp, Arabidopsis thaliana landsberg
aaaagtcacaagaatgaataaccatctggtgtcaaaaaggttgttcagcataaactaaactacttagttttctacgttttacattcatcgtaaacaaaacataatcgtctgcatatgtttttttttttatctcaggttgctgctatcccaaaaatttacatcccggcaccaatacttgcttaaattattagctacgttgccgaagatgtcgtggatgctttgaaacccttggttatggttggtccaacatttaaggatgcaatgtattccaaggaaacactgagttgtgtccgcatagacaaatctcgttatttcatgtggtggtccatgccgcattccatttattattatttcttcacaaaatgtcttgaagccaacaatccacatgctttgaaagctctaatgtacaaatcaatagcatatgagaattttgctgccgaatgctatagatctaccttatgggcggagctgtatggagagcatgaaggatag

SEQ ID NO: 163670 - DNA, 886 bp, Arabidopsis thaliana landsberg
atgactcctgtgcctaatagagaaccaagtagctttttccgatttgctgccttctctatgatcgaaaacaagactattaattcttcaactgttcatggtaacttttttatttagatttttcaataatataaagtctatttttttgaaaatattaatctttcatattgtcgttttttttgtttgtagatgcttatggtattgtcgtgagagttgggaatataacaagaccggactttgtccctcaagcttcagaaaatactatactttctcaatttctcgaatttgagattaaaaattcttggttagtattttccattatataatttgtcatctatttggttatatatttgaatgcacaaacatagtaaatattgttatctttatagttggtttaattcatagaacttagatgttttggtggaataatttgatattgttattaggggtaaatctctgatatgtgttgcaagcggatatacttgtgagttgtttgtgcaattatggaggagacttggtctagaacttggttatcactggaactttggtatgaatcctacaatctgtgtgctacgattttggaatgttgatgatcatgaaggtatatttaagactcattttatgttatctataatttatatagctacttcatataataaaaatgttaatattttaggtcgtcaatgtctaatcaaagttacccagagattaacatggatcgcgtcaggtaagaacatttatatttatattatcccttaactgtttattgtattttctaaaattttggtcttcgttttttttaatttttctattttcctactgtttcagaactcaattccttcaacgaatgcaaacacctgagctagatgaagttgtggacgaggactga

SEQ ID NO: 163671 - DNA, 1550 bp, Arabidopsis thaliana landsberg
atgggttggaaagctgctgagaaactcatcagacactggaagatacttcgaggagacaatgtgagtacaccactcatgttcttcttgtggtgttcattagtttggtttcatttttgatctgttgtttctggggtatgattttatgtgcaggtaatgataattcgtgggaaagataagggtgagactggaaccataaagcgtgtcattcgatcccaaaatcgtgtcatcgttgaagggaagaatctggtgagatagtcttgttctggatatcttttgtttgctctgtctcatgcatttagagaatgaatgtacaatttcattttttgatttttttgttcttgatttggtttgtagagtatgaactagtactgaatcaatatcatatcactagctcaacaccaaccatagagttatcaattttcatttgattctcatttttttaatccaagcatcaagtagacggttactaaatcacaaagcgactctagttccatggatttcgctacacaattcttttgaattgtttatcttgaaactgttatcgttttggatgttctaccttgctgctcggatagtctttgtctactcactgaagcttgtatatgttttccgctgatgctttttttttcctgtgttctcagatcaagaaacatataaagggaggccctgatcacgaaggtggaattttcactgtagaggctcctcttcacgcctcaaatgtccaagttgttgatcctgtcactgggtatgatttcactctgcactactgtctccaattactcttttgctcaagcgagagatcacttattaatctattatcttttctaccacaggaggccttgtaaggttggtgtaaaatacctagaagatggaacaaaagtaagagtagccagaggcactggcacatctggttccataattccccgaccagagattctaaagataagggcaacgccgcgacccacaactggtacatagaagctcaatatctctttaaacgttggattttggaaatatatagtggaaatctgttagctatctgagaaaaaaacataatcatagatcggctataagataaacatagaatcaacataattcgtttgctatcaacataatcaacaaacttgatagtagcggttttcttatagaaggattcatacttttctctttgcagctggccctaaggacacaccaatggagtttgtctgggagcagacatatgatgctaaaactggaaagggcatgcctgatctttgagttgaaacctctctacagtttcaccatggaaaacgttgcctgctctcaaaaaggattctactttttcccatacattagagtttgctttaggtctagagcatgtgaggctttgttggagaacctttgatcatgactagaaacggattccatttcctttattctttcatagatcatgagaactgtcaaggagccaaataaaatccgtatggaaaacagctcaatatttacatgtggagtgatggtatatacactagccagaagtctaaacataaaacgagaactatctgctctaa

SEQ ID NO: 163672 - DNA, 388 bp, Arabidopsis thaliana landsberg
aaacaaaacaaagaaaaccaaatgggtatcaagatcttgttgatccttggcctcttgaccctggctgtagtcgccgagtcagccaatgccacatggacccttaccaaatcttgtgtcaatggccaaggttgcattggagaggatggtgagcttgactacttgatggattctgagaccaaccggcgccaactagccgcgaggcgcagctacatcagttacggtgctctcaggaagaacaatgtgccgtgcagccgacgtggccggtcttactacgattgcaagaagaggaaaagggctaacccttacagacgtggctgcagcgtcatcacgcattgctacaggcaaacttcttaatttcgggaagcatttatacaaacaatatgattga

SEQ ID NO: 163673 - DNA, 571 bp, Arabidopsis thaliana landsberg
atggatagagagtgtgagagagacccctactacgatgatttgaaagcggcgaagagagccattgagcaaatggaaatggttgcgatgatggaagggattcctaagttttgtccatgtggtggtagcattgtcgatactcgaaaagttgaaaagagatactaccaatgcgagaagtttaaggtatgttgatgtagagcacgagtttttcaagtttttgtagatctagatccagatctatttggtatttcaaagtatttcccgttttggtaatactgcttagaacaagtaatactgcacaagtttttctagtttttgtagatctagatctatatttgataatatttggtactttgtaggatgatagaactgattgtatgcacatccgtaaactttgggataaggctatggaagaagaagtgagtagcttaagggagagtgttgattacaatcggaagaaagttctcagtcatagtatctcatagaagaaatgcaaaaagaattgaaagcccaccgtgcagagattgtgaacgtgagcaaagtggtattccgtaatcctatggctccaaagaag

SEQ ID NO: 163674 - DNA, 954 bp, Arabidopsis thaliana landsberg
ggtgaaatcacagttgttcaagaagcacagagcagatgtgccatgaagactcccgtctgcgtatttcggaagaggaggagattgctgctgaagagagcttggctgcctattgcaagcctgttgaactctacaatatcattcaacgccgtgctattaggaatgtatgtcttccttcctaccttttttagacagaatatgtttagttatgacttatgagctcagctgatatatcacatgtattggtttacttttgagttttgacaatgaaaatttacatgaaaatgtagtttgagttgacttcatttggtataagcaagtatgtgttgtcttgctatgcagtccatcctaatcatttctctctctctgtctcccctgtagcccttgtttcttcagcgatgtttgcattataagattgaggcaaaacataaaaggaggtaagctttttttttttccttcctttctctgttcagaatctccattagttttgggtaactattacactataccttagtaattcattccggacttgaatgctttctaagttttcggatagttatcaatatatattactgctttgcagaatacaaatgactgtattcctctcgggcgctatagatgctggggtacaaactcaaaaattattccctctgtatattttgttggcaagactcgtttctcctaagcctgtcgctgaggtatgcatttgaacctcagacagatttgcattgatctttattatttgtaacttacctattctttgctaacatttttcttgaaattctcaaattatagtattctgcagtatataggttcagtcgagcatgtatcctaactggtggattgggggttgatggagttagtcaagcccaagccaactttcttctccctgatatgaatagactcgcattggaggcaaaatcaggatcactcgctatcttgtttatcagctttggt

SEQ ID NO: 163675 - DNA, 217 bp, Arabidopsis thaliana landsberg
tatgttaagcttcatctctccgaagaggaacgagttatctttgcttcaatcttgttgctagtaaaaaaaggtttaccaaaatggagaagggccgctttgggaactttctcgataatgctaaaagtaagtttgtgaactctcatcttccttgtttttttacattcatttactaatttggccatttgggacgacaggtttggtggacgctgctgtgaag

SEQ ID NO: 163676 - DNA, 486 bp, Arabidopsis thaliana landsberg
gacatgagtgaaccctcatctgtttcaggtgtcaaaaaggtagtgcagcgtatcataagctatagttttatacttttgacattcaacataaacaaaaaaacaattgtctccttcctttttttttctactcaggttgctgttatccctgaaattcacataccggcaccagtacttgctaaaattgttagctacgttgctgaagaaggcgtgtatgttttgaaacccttggtgaaagttggaccattatttaaagcggttgtgtattcgaaggaaactctaagttgtgtccgccttgacaaatctcgttattacatgtggtggtccatgacgcactccatctattatcatttcttcacaaaatgtcttgaagccaaaaatccacatgctttgaatgctgtattgtacaaaccaatagcatatgagaattttgctgccgaatgctatagagctaccttataggcggagctttacggagagtatgaagaa

SEQ ID NO: 163677 - DNA, 1915 bp, Arabidopsis thaliana landsberg
atgatcaccgggcttgctttgtcacgtgttgctttcggtttaaccgccttcctcctcctcgccgtcgttagcagccaggagaagtgcagcaacacctgcattgcacagaactgcaacagtaagattgtttttttcttatcatcttagttcttatgccttcctttgattttggagaaaaaaacttgtgcatgcattatatgttttgatccaatctttgttttcaggtcttggtattcgctatgggaagtattgtgggataggttactttggatgtcctggagagccaccttgtgatgatcttgatgcttgttgtatgactcatgtcaattgtgttgatttaaaaggtaaaccaatcaacaacataatctatgcatgaaaaccattcttgagttaatatttggtttttattaggtatgacttacgttaactgccacaagcagttcaaacgttgcgtaaacaagctaagcaaatcgattaaacactctaacggagaaaagattggattctccacacaatgcccttattcgatagtgataccaaccgtgttcaatggaatggattacggcattttcttcagtgggataggtaattattgagctctgattttgtgacattcaatataagctagtactagtgatgaaaccacatgactctttttctgttacattgtgacatttcttatgataagatatatgtgaataatctctgcgcagggaatatatttaatcccccggtgctgggaagcgtgcccgtcgtggaggtggatctcgctcggagtaaagtggacacaaaggatggccttggaacaaaactagaccttcaaacaaaagaaggctccaaagtctctgcttctttaaatatatgagcccttctagtactatttcttgatcatcttctaaagtgactactctctgtaacttcgttgttatagaaaattcataaaacaaaaaaagactttgaattctgtcccagatcaaaatcaactggcaatcaatgactcagtctatgtattttatctattattttggatgttaatcacatctttaataacttcactaaagtcaaaacgtgacattgtcactaattccatcttataaaatccaggttgtcttcctgtccttagtgggaagtatatatagttactgagccaatgatgaaagaaaagtctacaaacacctggctaataccataaagagtagactttgcactttttggtttttaattaagcttatcttactcgcacgtagtctgtttttttcctgaagatggtaagctgaagaacttctgaaaaaagagagaagaaaatgagggctaatctcgttttcggcatattttgtgcccttgttaccaccattttagttcacggccaagaccaatcaggttccctcttctcctctctgttttgatttgaaattgaggcgaggttcagactgaagaaagcttgagttttattatgaaaagtttttgtcttttaaacatgtcttggatttttagtcaaacccttatacaatgtcttgtgttacaagtaatcatacaattctcccttttctctgttttctaatttgaaattgaccgatgttcttgaaggttcttgaaagttgtgatctacgtttttgtcaatatagagaaacgaagttaggcagatttttaaacctatccatgaatttggcttaaaacgttctcagacgtcataaacaattttacttgtgttggaagtaactcccctttcttctcctctgatccaggttacatcagcatcgattgtggcatacctccttacgatacccctgaagacactatgactaacattaattacgtctccgatgaagctttcataaccaccggcgtaaacttcaaagtctctgaagaatacggctatccaaaaaacccggttttgctgtcaactcttgctgaa

SEQ ID NO: 163678 - DNA, 380 bp, Arabidopsis thaliana landsberg
gattctggtggtgatctggttgatgcagagttgtatcgtaggcttattggcaggttgatgtatctgactattactcgtccagatctcacttttgctgtcaacaggttaagccagttctcatcagcatctcgtacagcccagatgcaggcagtttacaaggttttacactatgtgaaagggacagttgggcagggtcttttttattctgctacatctgatcttcagctcaaggcttttgctgattctgactgggcttcttgtcccgacacacggcgctctgtaactggcttctgttcattggttcctctctggtttcttggcgctctaagaaagagcatactgtctccaggtcttctgagtattaagtaatccatctctaa

SEQ ID NO: 163679 - DNA, 735 bp, Arabidopsis thaliana landsberg
atgggagctttggggaagctgatcaacatctctctgtttttcttcttcgcactgatggctatcaatgtaccgcttctcaacggtcaaatactatttcgtggaatctacccgaagctcctcaccgatctgaaagactggtccagctgtgagttcaacgattacctcttcatagagaagcctcttttcttcgttggactcgtctggcatgagatcatattcctagtgcctctctccattgtcaacatctacgccattcttaccagcaagtcgtggtttggtaccacttctttgttgtatggagcttctttcctcacttccatggtacattttcttctttctcttcattttcgtttggctcagtctatgtatatttgtttttgatgttgttgatctgtaaatgttacaactttcttgatttggaaacgaaaattcttttggagttctatattttagtatatgtgattgctctgcttctctgagaaggctagattgtaccgctttgtttgtaagtttctttcacgttttgtttttgtgtgttttgtgaatctctaggctgctatacttggagacatgataggttcagagaaggtgactaacaaattgctattggcgtatttgcctttcgtgggtcttgcaattctggcaatgcttcgtggtcttctttctcaatccaacaaaagtggtggagctgttggcaagagacctgctattttggccaggagaaagcgtgcttga

SEQ ID NO: 163680 - DNA, 1541 bp, Arabidopsis thaliana landsberg
atgatagcgaaagctacatatttattcgattgtgttgacaacacaaatcctatgttaaccctagaagaaggcgaaaacaacaatcctttttcttccttagatgacaaaacattaatgatgatggctccttcgttaatcttttcgggcgatgtaggtccatcttcttcttcttgtactccagcaggttatcatctatctgctcagctggagaactttcgaggaggtggaggagagatgggaggattagtgagtaataatagcaataatagtgatcataataagaattgcaacaaaggaaaagggaagagaacttcggcaatgcagaggatagcttttcatacgaggagcgatgatgatgttcttgatgatggttatcgttggcgaaaatatgggcagaaatctgtcaagcacaatgctcatcccaggtacttttacctatatagttgtattaattagagtatttataattttattcgtgaatctatgacatcatattaaaattgatttccaaatattggatcgaccaaaaactttcgtggctacaaaacattaggttagcttaacaaccagtacgatctagtcttgtgtttaacattaaactgatatatgtagaaaatgtatcttttagttgcaaaaataccatagtttttaggtttagctagtaatagttatataacgaaatcaatcccttactaaagcctataacgaaatctgtcgtacgtacttttcgaaaatttatgatgtgatgataattttcgaaaacaaagcatgagaatagatgtgatttttaaaaaaggattatcctatagttttcttttctgataatttgattatcctataatatagttaattattgtgcaattatataatcttacaaacatgtataaacctgatatagggattctctttatgtgctaccacatccgagtatgaaattgtttggaaagggatgatttactcaaatatgtataatgtatccatcaatattctggtcaagaaaatgatcttaattagttctagatcagtataaaatatatagtttcttatgggcttatggctcatatatatatgaaaacttcatccagatgaaaagtaatttaatttgcttccttgttttttattcctttttgctagggaatcaaaagcagagataaatccaattctacttcattttatatgatatttacgttcttagcaaaaaatagaaaaaaaaaatagtttcatgagacttcatagaaattaaaatcagtcttgcatagacacccaaaacttctacttatttttcatatgaattataaaaaaaaatttgaagaattaatagatgaaactattaatcttgtgtcacaaaatgcaggagctattacagatgtacgtaccacacatgcaacgtgaagaaacaagtgcagagattggcaaaagatccaaacgtcgtcgtaacgacctacgaaggcgttcataaccatccttgtgagaagctcatggagactcttaatcctcttctcaggcaactccagttcctctccagtttctctaatctttga

SEQ ID NO: 163681 - DNA, 531 bp, Arabidopsis thaliana landsberg
ccctccaccgcaggaacttcatcaccggacaccaaagccgcagccgcacgtgcgactaacagaggaaggaggaataagcaatccgcggagttcttactcgcgcacaacgcagcgcgtgtagcttcaggcgcgtcgaatctaagatgggatcaagggttggcccgtttcgcatctaaatgggccaaacaacgtaaatcggattgtataatgacccattcaggtgggccttacggagagaatattttctggtaccaaaggagtgagaattggtcgccgaagagagttgttgataaatggatgaatgaaagtttgaactacgatcgggtggctaatacgtgcaagtctggtgccatgtgcggtcattatacgcagatcgtttggcgtacaaccacagccgttggatgcgctcgttctaaatgcgataacaaccgtggattcctagtgatttgcgagtattcaccttcggggaattacgaaggcgaaagtccttttgatatacctaaaataacattgaaattagacaagatttaa

SEQ ID NO: 163682 - DNA, 1037 bp, Arabidopsis thaliana landsberg
atgccgatccttattccggcgagtttcgggcgattaacgattacgtcgcgtgcacaagttagagtgagagtttctgcttctgctaaccaacgcactattcgtcgcgattcagtggattgggttaaggaaacttcaagctttttcgaagaagataaaaggccgatcataatgttcgacggtaatcacgtttagttgattctttaatttcagtgtatcgacttcaattagtaaaatttcatttatattgttttatttgtacgatttttttcaaaattttcacttatgctatagttttatcatacgcgtataactatataagttttgggtcagtagaatgtatcaacgtagtgaagttgatgtttatctgaatcttagtactcttgttcttgtgtgataggtgtttgtaatctctgtaatggaggtgtgaaatttgttagagaccatgatcgaaacaggttagtgttcatttgaactacaagtttcatttttttcactggagagtcgataaagaactgaaatggaaggaaaaaaaaactatgataatcttttcaggagcataaggtttgaagcattacagagcgaagcgggcaagaaactgttaatgcgatcaggaagagctcctgacgatatatcgagtgtcgtacttgtcgaaaacgataggtacattgacagtaacatttatgttttgatatgtaactgtaaaaagctttgcagggcatcaattgagtgatatgtgttttatttcaggtcttacataaaatcagaagcagtcttgaagatcatgaaatacatcgacttaccatttccacagcttgcgttcttcttgcagtttgctcctctgtaagttctcgcttaaggtttaaacagcagaaggaaacaccgcgatgtgattgatcttaataaacatttttcgtttgacatgttgcaggtttgtgagagactttttctatgaaaatgttgcaaacaatcgatatgcaatgtttggtcgatctgattcatgtgagctctaagaatacatatgtgatcctactttgcca

SEQ ID NO: 163683 - DNA, 274 bp, Arabidopsis thaliana landsberg
atgaacaaaactgatctgggcaaccagagtcgcctacgaatgcaacatctccaagactgatgcggcgcatgcagtcgatgcggttaccgaagccgtcaagaaagcgctgaagaagggtgacaccgtttccctggtcggctttggcaccttctccgtgcgcaagcgtgcggcacgcatgggtcgcaacccgcgcaccaatgagcagatcaagatcaaggcttcgaaggttccggcattcaagccgggcaaggcgttgaaggacgcgctgaactga

SEQ ID NO: 163684 - DNA, 1583 bp, Arabidopsis thaliana landsberg
  unsure (1)..(1583): unsure at all n locations
gcgacagcttctttaccgcctcagcagtggcaaccagctagtgggatcctcatgactaacgatgttgctgaaaccaatcccgaggaagctgtaccttgttttgctttatccaagaatgattcatatgtaatgtcagcctccggaggaaagatatccttatttaacatgatgacgtttaaggtaatggggacacatagatgctgatcttttgatgttctgtgtatgcaatttgactgactgttcttggctaataatttgcagacaatggcgactttcatgcccccaccaccggctgctacttttcttgcttttcatcctcaagacaacaatatcatcgctattgggatggatgatagcacgattcagatttataatgtccgtgttgatgaggtaatgcatcaaaactcaagagaagaatgtagaaaagaagatgaagtgttttgtttgttaatatgatggccatcatgttccttgtttgctcctgcaggtgaagagtaagcttaaaggtcattcaaagagaataactggtcttgccttctccaacgtattaaacgtgttggtttcgtctggagcagatgcacaggttcccgccttagaccatttttttttttttttttgagaatcgatgaagaaaagatcaatagtctttgaaatgtttttgtttcagctttgtgtttggaacacagatggatgggaaaagcagagaagcaaggttttgccacttccacagggaagaccaaacagtgcaccttcagatacgcgtgttcagttccatcaagatcaagctcacttcctcgttgtgcacgagacgcaacttgctatatacgaaactaccaagctcgaatgcatgaaacaggtattttatatttatagtccgctctctctaagatctgcaatttattgcatttgaaagatgattaatgattgcaatgtttcagtgggctgttcgagaatcattagctccaatcactcatgccacattctcatgcgatagccaattggtctacgcgagttttatggatgcaacagtttgtgtatttagctctgcaaatctacggctgcgttgccgggtcaacccttctgcgtatctaccagctagtctcaggtaaacagaggaatctttaaatttcggaaagaacgtttctaaacatcaatcggttagttgtttatatatcataaagctcctcttgttgacttgtgcagcaattcaaacgtacatccactagtgattgctgcacatccgcaagaaccaaacatgtttgcagttggtctctcagacgggggagtgcacatattcgannnnnnnnnnnnnnnnnnnnnntggggagtcgctccaccggctgagaacgggtcggctagcggtgcaccaactgcaccttccgttggagcctctgcatctgatcagcctcagagatgatctgatccgagagccacctacctctctgattccctttcttctttttaaaagtcttttctttcttatttttttggtagaaaaatttatgacccagagattcttaacatttagatgtaacatattttcacagtaattcagtagtgaagtttggataaaaacagtgact

SEQ ID NO: 163685 - DNA, 678 bp, Arabidopsis thaliana landsberg
atgtcgcttatggataatctgttaggtatcctccgcgttcgtgtccaacgcggtgtcaacctcgccgtacgtgatgtttccagcagcgatccttacgtcgtcctcaagctaggtcgtcaggttctctctctctcactttctctctcgttttcctcaaacttcaacgattaattttttcaaaaactcataattcatatttcttttgcagaaactcaaaaccaaagtggtgaagcaaaacgtaaacccacaatggcaagaagatttgtcattcacagtaaccgaccctaatctcccgcttactctggtaaattccaaatcaaaccactactttctaaaccgtggaccggtctacaaattaacacatcgaatttgcttaaatcaaaacagattgtgtacgatcacgacttcttcagcaaagacgacaaaatgggagacgcagagatcgatttgaaaccgtacatcgaagccttacgaatggaactctccggtttaccagacggaaccatcatatcgaccatcggtccaagccgtggcaactgcttagccgaggaaagctacatccgttggatcaacgatcgaatcgttcagcacatttgtctccgactccgtaacgtcgagcgtggtgaagttgagattgaactccaatggattgatcttcccggttctaaaggcttgtaa

SEQ ID NO: 163686 - DNA, 584 bp, Arabidopsis thaliana landsberg
atgaacatctcctggtacatcgtcctcagcgccctcctattcacgatcggcgcggtcggcatcctcgtccgccgcagcccgatggtgatcctgctctgcctcgagctgatgctgaacgccgccaacctggcgctggtcgccttcagccgtgaggtcggcaacgcccagggccaggtcttcgccctggtggtgatggtgatcgccgcctgcgaggtcgtcgtcggcctcggcctgatcgtcgcgatcttccgccgcaagctgccgctcgacgtcgacgacctgcgggagctgcgcggatgagcgccacgacctgggcctggctggtcctcctcttccccctggtcggctcgatcacggtcgcgctcggcttccgcaagacctcctggcgcttcgccgggatcgtcggcacggcggcgatcttcctcgccttcgtctgcggcgtcgccaccctgatcaccctgctcggcgaagaccccgaggcgcgccaccacgccagctcgctctgggaatacgccagcgtcgcctcgctgcagatcaagctcgggatctacgtcgacccgctctcggtcttcatggtgctggtg

SEQ ID NO: 163687 - DNA, 587 bp, Arabidopsis thaliana landsberg
atgtcagtcaaccattaccacaacactctctcgttgcatcatcaccaccaaaacgacgtagctatagcacaacgagagtctttgttcgagaaatcactcacaccaagcgacgtcggaaagctaaaccgcttagtcataccaaaacaacacgccgagaaatacttccctctcaataataataataataataataatggcggcagcggagatgacgtggcgacgacggagaaagggatgcttcttagcttcgaggatgagtcaggcaagtgttggaaattcagatactcttattggaacagtagccaaagctacgtgttgaccaaaggatggagcaggtacgtcaaagacaaacacctcgacgcaggcgacgttgttttctttcaacgtcaccgttttgatctccatagactcttcattggctggcggagacgcggtgaagcttcttcctctcccgctgtctccgttgtgtctcaagaagctctagttaatacgacggcgtattggagcggcttgactacaccttatcgtcaagtacacgcgtcaactacttaccctaatattcaccaagagtattcacactatggtaa

SEQ ID NO: 163688 - DNA, 466 bp, Arabidopsis thaliana landsberg
gagattacacaacaatcattatcatcgtcaacgatctccgtctccttgcaacaagaatctcaatctccgattgaagttttattctcccggaaacatcccgaaaccatccgtcgtaaccgtttcttctaatcatcagaccaagagaaagtgtttgtgctctcctacgacgcaccctggttctttccggtgctcttttcaccgccgattagaacatgagaaatctaaaaccctagcttcttcgacggcgaagcgtaacaatcgtggtgataatacgattagggttaatgttggattgaatctgaggaaattggcgttgatgaattcgttagcgaagatcggtagtgttgaggcggagaggtttaggagatctttagcagcgaatttggataaaccgtcgtctcttcatagccatcgccgtcctgagttccggccacgacttagccgctttcatgaagatcaagattaa

SEQ ID NO: 163689 - DNA, 566 bp, Arabidopsis thaliana landsberg
ctctatatgcagcaacatgtcaagctttctactgattttgctcattcttaattcgacccatttcagtctaatggctaatggtaagtaaatgagtcaatgtcacatttccttcttttcaaacattagtttttccataatcataatgcttcttttacttcttatgatatttttcaggtagaccagagcctgactctgtcgaattcaccaaggtacacgttttcaacatcctctgtttttttgttcttcctctactaaaacaagagtcaaattgatcttaaaaactcgtctttgatttgaaacagagtggagatcaagatgtgaagatgatgatgagaggtctaataggatcaagaccaccaagatgtgagagagtaagatgtcgttcttgtggtcattgtgaagcaattcaagttcctacaaatcctcaaacaaagcttcactctcctttaactacttcttcttcctctgagactattcatcttgactacaccagaggagatgatagtactaattacaaacccatgagctggaaatgcaaatgtggttactctatctacaacccttga

SEQ ID NO: 163690 - DNA, 858 bp, Arabidopsis thaliana landsberg
  unsure (1)..(858): unsure at all n locations
atgactggctctggctctccttgtggagcttgtaagtttttaagaaggagatgtgtaaaaggatgtgtgtttgccccatacttttgccatgaacaaggagnnnnnnnnnnnnnnnnnnnnnnnnnnnnnnnnnnngccagcaatgcttctaaattgctctctcatcttcccatggaggatcgacgtgaagccgctactacaatctattatgaagctcaagctcgccgtcaagaccccatctatggctgcgtttctcatatcttttccctccaacaacaagtaaatatataaaacttcctctatttaaccctagtcttgattttggatatgacaaaatgtgaatatcatatgatatatgcataatttgtaaatacggatcactaatnttcntgtggtgttattcgtaggttgtgaatttacaaacacagctagagattctaaagcaacaagcaacacaaagcatgatggctattgattctccctccatagaaaaccctaattactatcaagacactaagcctcaatatcttcaagaatctcatgatctccatcatcatcatctaaccacttcgaattgtcaaacggagcaaaactctgatcttaagaacatcatgacgtcgtgctaccaccaaatggaaatcgaaacgacgccgttcacaggagctggcggagataccatggcggggagttactactacaactcctctagtggctgcagcgaagaacttaaatcggtctccaccaacggcgaattttccaaatactctgaactggactcagcacttgacgaacacttttaatcaaaatcatcatggcggcaataatctgatatccgagagtttagggggcatcgcgtat

SEQ ID NO: 163691 - DNA, 1297 bp, Arabidopsis thaliana landsberg
atgatttggtccacatgcacaggtacacacgcccgcagttaatattcaaaataattcaacgagttcgaaattattccttaactaaaccctccaataatcaaattttctgtttcgacgtggaataaaataacgttacggctgagttatgcaataagatttcgtgttttggccgagttatgagataccatatgttattatgatatatcaaaccagccaccaaattgttggttatattagtagcgtgaagatgtgcaatttgaaaacagaaaataacttttattttcagcaagtgtcgtttgacaaaacatggtctgtcaaaacctctaggaaatatgttgttggatatagtatgatgttggacaaagtaggctgttggataaagtttataggatatgatctactttcacggttccactatttggaatgtggttatgatatgttaattacttgattttcacaactgttggctcaagaaaagcactttcagggtttggccgagttataacaaagtgatggctgagttattcctatattgtggctgagttatgttagaattctgagaaaaatattctccgctattgaccagatacgacgtcggtttgttacagagtctccattattgaccagatacgtcgtcgtagtgacacacttataaatccccaaaacgaaaccctaatttataaaattccaatttctgatttcagatccggagctccttcttgcttttcgtctccgaatttcccagctaaaaattaaagaaatgagtagcaattccgagaactcgattgcgagtacgcaatccgtcagccgttggggacgtgggttaccatcgaagtgtcattgcggattagacgtggtcatttatacatcgacttacgcaaagaaccttggaagaccatacttccgttgtcctacgcgtaaagatgtaagtatataattgatttgagggttttatcggtttcgttgttaattgcggatgtgattgaatatgcaggaccatttgtttaaatgggtcgaagatggtacatacgaagtggttgtagacagttggccgaaattgtccgtcatggacaatgagttaagcgcggccaagtccgaggttgctgtcgagctagaagcgttacaggcgatggtgaaagaagtgaaggaagaagtgatgaggagcgaaagggaaaaccagatatggaaattgatgatcaaactttgctgcttttgacttgcctttactatcattgtcattgtttctggtatcttaatgttcccaaaaatcaacgaacagaggctttttcttggttac

SEQ ID NO: 163692 - DNA, 743 bp, Arabidopsis thaliana landsberg
actgttgtaacaagaaaaaaaaatgagtagcaagaataactccggagctgctgcagtttctggagtcaacaccaacggtaagctaccaatggaggacaatgaagaagaagagatatggaaagttgcagtgacgaggtttcaagcccgagaagaagagatcgagaggaagaagatgactgttaaggaaaaagttcaacagcggctcggttttgcagaggaagctacaagatgcttaactcaaacattggaagtaagtttataaaaagccttttgtgtaacatggtagacaacaaagctaataatgttcttactaaaacaggagctagagattatgggagatcctatgagaaaagaagttggtatggtgaggaagaaaatcgacatggcgaatcgagatatcaaatctttggcacaaagctgtcagaaaaaggtattacacattttcattttcaggaaaagctggcagctttgttttaacacaagaggataatttgacaggagaaggaatacaaagacacattggaagctttcaatgaaaagaacaaagagaaagctcaccttgtttccatgttaatggaggtatttagtctaaaccacttaaaagctttgtaaaatttctactgaagatccaatgtgtgatttgtgacgatgattttcttttggcagctactggctgaaagtgaaagattaaggataaagaaactggaggaaatcaacaagactgttggaaccttgcaatgagg

SEQ ID NO: 163693 - DNA, 549 bp, Arabidopsis thaliana landsberg
atgagagccacagcatcactagttacatttaatcagaagattatgcggcgttgtaagaacctcctgatcagaatcaccaggagctgtcccagacaccattaccggcatttgaaacttcggaaagcttcttcttcatcatcatcatcatcatctgggaagcaagggaccaaagtgttggcttcattcttcctcttcttccaaaagaagaaacagaacaaggagaagatgaagcggcttaacgaactcaggagtttctcgggtgccgtcggtgaaaggaaggcgtcaaatcctgaatcaagaaagaaggtattcccatcgtcttggctttgccaaggtaaggctcattcacaagaagtctcacaaggtcatgatccacctagagacagcacaagcgcattccttccatgactcatatgtcaaaacaacgcgagatcacatgtatagctttcaatttgattatgtggttgttgtaggatatctcattgtcgtgatttctaacactaagaccctactctgactctctcaggatgtatgatgaatgcagagtaa

SEQ ID NO: 163694 - DNA, 237 bp, Arabidopsis thaliana landsberg
gagacggtggtttctcgcattaaatttcaccataggcatgcttagcttccttgactgagtgaatcctttgcaggtatcacactcctcttcaatgagcccccagaggctagaaaacccagcgaacgatggagactgtatgtttttaaggatggtgaaccactgaatggtgagtctttgacgtcttccacatctctatccatctgtctaagtagtgggtcatgtgtcttctatgtattt

SEQ ID NO: 163695 - DNA, 570 bp, Arabidopsis thaliana landsberg
ctactttcttattactttatttaccttttattttactatttatcttctattttaatcttgacattcaatttattttgtgaacaaaagagctttgtcgaattcgacccttaaaagctaacgatctctttatttgagggagtaagcttaaggtcaatttgatccatatcatcttcgtataaaatgacgtactaaataatggttggtagtagtgaaagactatccaagaagaatacttgaagaaatcatcacacaacaagcagcaatgcaggaagataacaatgatcttcaaaattccgccatagtcattccattgaatgtaagttcactaattttacatagaggacatcttgaagacattcccaaaaatccaccatgtgaagattctgaagatcatgataccgatcttgagatgacagattcaaaaagtttcaaagaagaataagaccattacagagaagattattctcttgggaatttatgttttactagattgataacccgtgctacgctcgggtgttggtaccggatcccgcaccgatagtccaggaccaaccaaagattgccacgtaa

SEQ ID NO: 163696 - DNA, 455 bp, Arabidopsis thaliana landsberg
gtgatttggagctgttaacgagctaattggaagaagcggacctgatcatgtcaaaccactcaaccccctggtcaagtagatgcttcacgacctcaatagaccacttgaccccctggtcgagtaccaccatgagagtcactcgatcacatcactcgaccacctggtcgagtatcatcacctccaccacctgaccatcactcgatcacaccacttgaccacaaggtcgagtatcttcatcaccgtcactcgatcactctaccaccaagtcgagtaccaccatctccatcattcgacttcatactcggttgccagcttcagagtcttctccattccgcactcaaccagacactagagcacaaggaagaaaagaagactccagcttatcactcgatcattcactcgaccatctgggtcgagtaccgtttttaatccgtcccaatattgcgtcgttttga

SEQ ID NO: 163697 - DNA, 510 bp, Arabidopsis thaliana landsberg
tcgggagctgacatgcgccgcataacgcgctggtacggcgcgaatccgcttcacctgctcgtgctgctcgcctgcttcgcgctggccggatacgccgcctcccagctcctggtgtcgaagccggtggccatcctgatctggttcgcggccgcggtcgtggggcacgacatcgtgctcatgccgctgtactcgatcgccgactggtcggtcctggcggcggcccggcatcgcgcgccgaaggtgcccgcggtgccgtggatcaactacctgcgagtgccggccgggctgtccgccctgctgttcatcgtgtggttcccgctcatccttcggctgcacaccgactaccagaactcgacgggcttgtcccccgaccccttcgtgtggcactggctcgccgtgacggggacgctgttcctcctgtcggccgccgcgtacgcggtgcgcctgcggtcggcgcaccgggccggcccgcctgagccgaaaaggcgtgaaactggcgccagcacgcct

SEQ ID NO: 163698 - DNA, 836 bp, Arabidopsis thaliana landsberg
ggcaggtatataaatttcgtgttgtattgtatttgtttcttagtttgtctatacatcgtattttttaaatttcatgaacggtttttatatagatctgcaccgagatggtcatgccaatagggtatgacaaacaagacacgatgtttcaaacggcgccatttaacataacaagttacgttgacggatgtaaagcttgttttggtgttgctccgaagccacactggatcacaacctattttggcactcaggtagatttgaacgagttttatagtcacattatgaataaccaagcctatcacacaatccatttcatatcgcttttaaattacctcttacgggaaaaaactcaatagtttgatgaatatatacttattgcaggatgtcaagttaatcctgcgaagatatgggagcaaccttatcttttccaacggactatcagacccttacagcgttggcggtaaataaaccgtttgaatattgtatcattatatacaagattttaatgaatctgtttttcatgtattttcagagttttagaagatatttcagatagcatagtgtccatcaaaacaaatggtaatttatcaaaatttcagttttaattaacgaatctactgaacaagtcatttaagaatataatgatctctcatgtaaattcgataatttttctaatggaattttaaatataatcaggttcacgctgtgaagacgttggctttaaaagcaatgacgatccggagtttctcgtgaaacaaagagagaaagaaatcaaaataattgaatcttggatctcaacataccaaaaagatctacgaggtcttaacgtatcagtctaa

SEQ ID NO: 163699 - DNA, 1031 bp, Arabidopsis thaliana landsberg
atgctatatttggatcactataagttaaatgcggactgtgaagccacgttgatgtcatggttatcaaatgcgaaaaaccttgttttttaccataaacgttttgtgtttataagagcaaaaaggtgaattatgcagtcaattaaaatgtcaaaaagtttgatgagagaaaatttgtgtatataagagcaaaaaagtactatagcattagtcaacatcaaagcagaaataaataaatgaaataaacacaagccgaccattaattaacgcacacacagactattcagaagtcaagaaacatatcattttcgggtgaatggttttcactacaacttataaaaaccgaactaaagtggactttctatgtaatatatagacaaaatgggtcccttgagctacgtaattttgtgtcgtcttctacagcaagacatacaatggcttactcttttgtctaagcttatctacttactggccttcttcattattcacttcacggaaattacgtaatatgtcatatttagtcataaagtcaccacataacaaatttcatggctcttactacctctttatataagtatacaagtttctcatcaatctaactccttaaaccatctttcactttcttccttctaaaaaaattctctcgcgggatttctatggatccccatttagtcatcactgccgcctccagcgcattccggtggccgtcgagtcgccgaaagatctatctccgtcgtcgtaaaccacaagttgtgcgtctcggcgggaaaaacagtacgccacgtggtagtttctcgctcaagaaggtggtgacgaggatgagactcaagtggctgagactgtactacgtgaggctcgtgaagaagatcaaagcgtattatcgtactatagtgaaagagttcgaggaagccggagccgccaccatccagcagcgcatgacggtggaaacggctgcttttgccgctcctggcttaggcttatctttctgtcccatgtccggctacgtcgaccaacctcgtttttttcttgtataa

SEQ ID NO: 163700 - DNA, 276 bp, Arabidopsis thaliana landsberg
gatgacgccattcatggacgtctgcgcctcggcatcatgtcctatctggccgatgcggaaggcgcggattgcaatgagctgaaggcggtgctagaggcgacgcagggcaatctcagcgtccacctgcgcaagctggaggaggcgggctatgtcgagatcgtcaagagcttcaaggaccgcaaacccctgacccgcgcccagatcacgcccgcgggccgcaaggccttcgccgcctatctggaggcgctgtcgaaactggtggagcggcggtaaagc

SEQ ID NO: 163701 - DNA, 450 bp, Arabidopsis thaliana landsberg
atgcgctgtttgttcggcgagttgcgcgatgcgggcgtcgaactgcggctggcgacgccgttccagcatgccgaacgcgagcgcgatggctggaacgtgcgcgatgccggcttcgcgcgtttcctggtcggcgccgacggcgcgaaatcgcgcgtggccgagcgcgccggactcggccgtgtccgcgatttcctctacggcgtcgaacatgaattcgacggcctgcggctcgcgcgaggcgatgtactgcactgcttcctgtcgaagcgcttcgcgcctggctacatcggctgggcgctgcaggcgccgaccggcgtgcaggtcgggctggcatcgcgttaccgcggcatgcatgcgccgacgccggatgccgacgccttgcttcgccacatcgctccggtccttcgcattgacgcaggacgaaaaccggatgcaatccgcgccgggctc

SEQ ID NO: 163702 - DNA, 2079 bp, Arabidopsis thaliana landsberg
atgcccaaaatcgtctgcgaaaaaggcaaatgtatccaccctcaaccaatggcccctactagacatttctggcgacccccaagtgcccttgaacctattaggggaaatcaatttgccgtcctgcctcctcgtcaacctttggttcaatttcacctacaggtaatgtttaactactaatctttgctatctgaacaatcacccaaatttaggtttaacttttggaattattttatatcagcctcctccattctctaatttccacatgcctgaacacgtagctgctaaaatagtaagcttagtttcagaggacggtgttgatatgttaaaggcttggattcaatcaggaccagatggcaaagccgctgttttttccagggaaactctttcttctgttcgactagataagtcccctgtattcattcacatggctcatgaatcttctagttatcacatgttttacacaaaatgcctagccttcaaaaatccctatgcactatatctttagagtttagtgttggcgtttcatatgtgtgagctccaggaagcaattgctattttggatggtattaaagacgtgttcccacatgctggtctactttacatcatgctccatagttgcgctggatcaatcccgtgggaattttatagtatgtacaagcgaaggtactacaaatttagtgaagtcgacttattcgcagataagctaatgttccatatcaacgaggttggtccacgtcgccaagggacatacaaaaattcctgggagtttgaggattacggtgagtgttggtcggaccatcagaacctcaatgagtatgagggacagtggtgtaacacatgtatttacttttacctctcccaagaagtagcccttatttcataagtaaatttcagttcagttcttctttttgttcttcacatttgcggcaaacttaagaatctatgtttttttttatgagaatttatatatgaagttattatatgtgaagttacctatcggttttttcatatgtgacgatattaaattaaattaagtagtacttgtccactatttttcacaattataaagagaacaagtcttcgaccgttacctcgtctccaacattttatggaactgattttataactgcacccattctccccactaagctttatccctctcgaatataaatattttatagaaactttcatttcctttctccctttataacccgttctgctcaatacaaacattagagattctccccaccccgccgatccagatcttcctcctcagtaatacatccatccaccttccgctgccatcgttgttgtaccaaatcgtggacacactgcaaaacaggttttagttcgcaactaaacaaacaaatatgtttcctttacttattcctaaaattaatcattcctctaacttatcatcgacccttttagcagaaaatgaagaattccaggttatatattccggaaccaatacttgctctaatcgttagctacgtttcggaacaaggaatagacgctttgaaaaattggattaaagctggtcatgttgggaaattagcagctttctctgacgaaacgctaacctgagtgcgtctagacaaaagcccacacttcatctacatgtcttcctataactctctttatttctctttttacttgaaatgtctagaaaaagggaacccgtatggattgtatctccatagcttgaatctcggattccgctgcctcgacctgtgtggagccatttccatttttaatacttgtaaagatagatttcctttagccaaactactctacattgctctaaaccgctatgcaggtaacgaagtcattgatgatttcaatagtttcaatcgcgagaacaagtgtttctttgatgtatccttgatggcaaacaaacttatctgccacatttctgcttcggaacctaaatgtttcggatcttactccgagacctttctttacgaggaatatcctgactgctggctaatacatgagcttaacaatgaatttaacggagaaagatgttcacaatgcctctacttctacctcttccgagacatccttctgctttcctag

SEQ ID NO: 163703 - DNA, 1142 bp, Arabidopsis thaliana landsberg
  unsure (1)..(1142): unsure at all n locations
nnnnnnnnnnnnnnnnnnnnnggagaaaaatctcttaagaagaagaagaagaagaaaagtcgaaagataagacaattgaaattggagaagatagtgtttgagattatatatgttagcagaatattacagtagtttcatgaaaagaaagttgcagaagactctagaaccattgacgacgcttaagactttccatttatttttagtttcttttaaaaacaatttagtatttattatttaaaaaccttatcctctttcataaaggacaaaaaggaaatagataattacgctgtgagaaattttgcataaaggtacgaacatttataattttatttacaaagttccagtttttttggagtgttgataaaacccccagagattattcctgcacagaaggtgtttgattaaattccgctgagggtaatgttctgactttcgatgctttacgaatgatacttggcatggctgctttgacttctctttctactgttcagtttagagtctctgacattctcggaactcgtttgaaaccttatccccagtttccaattcgaataacaagtgagtggtataattcgtcttactctgttcttcttccatgtttattatcctctgtttcgcttacttggttcatgatttttcgacccttttatcagctatgtctgtagtaaagccgtttgtgattgaagcgagagggaacactcgagtggagagtctgaaaactaggaacaggaggagcaggaagaaggtagctttctagaagtgctttcatataataatgcacaaaagtttgaattttttttgccgaacttgttaataagtattttctttcattttgaaacagtttactggaacacaaacaaaaccaagactttcagtgttctgttcagataaacaactctatgctatgttggttgatgactttaacaaaaagtgtttgttctacgctagtacattgcagaagtccattcgcggagatcctccatgtactgtcattgtaagtttagccaccagaaaatcttgaatctgttgtgtctcttgaaaaatcttcaaactttgataagagtgtagcgccgcgtaagcagcatttaatcagagtttgctttgttggttacgcggtttacagtattggtggcattgtcttt

SEQ ID NO: 163704 - DNA, 2163 bp, Arabidopsis thaliana landsberg
  unsure (1)..(2163): unsure at all n locations
tggcaatgattattccaggtttcgatctcagcaacaaaatcatcgtcgttctcctagtgaaggaaacggttcagccactcagggtaatcttcaaaccccaatcaattccaacaatcaagcagatggtgcttctccttcgcctgtcaatcaatctcctcgcggttctgccaattagtctcctcgcggttctgccaatcacactactcctctagctgctcggctcaatgacnnnnnnnnnnnnnnnnnnnnnnnnngccctggtcgtgcaaggttgcctagattagaccctaatcgacctcctggtactctctggtaagccactaggctctgttctcttaccaagtattacattatctgtttcagttttgtctgtctgatggagtctttatttgtaggtttgacgatgacacctctgttgcagccactgtccggagcatttttgaaaaagatttcaaagagcctcatgcaaattggtcacagacatcagttgcagtggtcgatagatggtttgaaacctttgctgtaagtgaaatgatagtttcagttttgtttggtacagcttttggtcttgtctatttctaatgtgtcttttccctgttttgtagcaagtatataactgggaccctgcaataaacaagagagttaggattgagtttgaagctaagttgaaggataggatgtctgatcaagtttctcggtggaagggaaagtggagagaaaagggagatgcggcgatgcctcgttggtttgatccattagtgtgggttgttcttgttagtttttggcgagatcctaagtcataactgaagagtatcgatagtaggaatgcaagatatcatgatccggatggcctcgggattcataaacaccggtttggcgagacatcttaccaagcccgtgccaaaaaacatgtaagttattttacacccttacttagtcaacttttttacacaaacaactaacctgatttgtttattgtttagtgtgagatgactagagagacttgtccagattttcttgtgctcttagatgagacacatagaaaatctgatgggactttcattgatagaaagtctgaggaggtttacaaagaagtttcttcgaggattcaagaggaggagtctcagctgtgttcaggggacactacggagagcacagcttctggggggttatctattaaggccaagaacaagatttatgctcaggtaaaatttttgttttgtcattgtgttttgggttacttgcattatgttttggatggcttnnnnnnnnnnnnnnnnnnnnnnnnnnngtctttcacttcaatattgttttggctggcttggattatgtcattgtctgttcatgatcttgtctttgtcattgacagatggcttgagtagatagttcttgtcattgttttttttagtgtaagtctgttgtggcttgcattatgatatattgaatatgaaacggttatgattatgtcattgtgtttgtgattttgtcttccttagtattttctattgtggcttgcaataaatcatagtgaatatgaaactgttatgtcattgtctgttcatgtccttgtctttgtcattgtcgcatggcttgggtagctagttcatgccattgtctttttcagtgtttgttgtggcttgcattatgatatactgaatatgaaacgattatgattatgtcattttgttcgtgattttgttttccttagtatttggcaattgtggcttgcattatatcatagtgaatgtgaacctgttatgatttgttgtgtttttggttttgagtttgttacaggttgctccaaaaaagaaaggcagggtttatggggatggttcattgcagatagaagcctcctcagctcatgctggtccagtgctgcctggggaagacccgattgttctctctcgaaagnnnnnnnnnnnnnnnnnnnnnnnnnnnnnnnnnnnnnngaagatcactagctttgacgtctacttcgattatcttgccgataaggatccagagttcgctgccctctttcgagccagaacctctacaaggactgagccgaccagctccaatccgataccggaggagcccaataccgcagctgctccatctgctgggatcagagatgaggcagtcggagccacaggatcatcctctccatctcaagctttctaa

SEQ ID NO: 163705 - DNA, 243 bp, Arabidopsis thaliana landsberg
catgttgtcacgtactctttgtaagggatatactgatcgttttttgtactttaaaactaattgtaaaatgtttaaactattggacaggtgtcagcatctaaggtactacaagagacttgcaactacatcaggaacttacacagagaggttgatgacctcagtgaccgtttgtcggaactcttggcttcgacggacgacaacagcgccgaagcagccatcattaggagcttgcttaattattaa

SEQ ID NO: 163706 - DNA, 1009 bp, Arabidopsis thaliana landsberg
atggaggtaaagtctagaagggaaacttatttttggcatgtctccttgtgccctctggggaatctatatgcactcttaggctcacgaggaagtattgacatgggagtagttgttggttattttgttgctgatgtccttgtgttgcggtatgtttttcaactcacaattcatagcttattgtgagagcgcaatgaacggcgtcatggaaaggcaccaactcctgcccccatacatgctcataaaattcattgatatgtccgaaatagactaagcgcaaatgacgggttcctctgactatgatggtacggtggcctacgtttctggtttcaaactcgcactcaataatctctccttagtgtaacactttcaatttttcgaaactgtgaaacattcatatttcatgtctcattcatagtaacactatcttcttttatcaataaattttacattctacaaaaaaaaagtaataaaaaaaatcttctcatattttcatatattttaaagtcaagttttcagatgcataactatacacaactttggatcgttatttacgaagtatttttacattactacagcaatatatttgcgtcagaccttccaaatttatggaaattacatgacgtaaagtatttgtttcttaagaagccgatttaaattgatatatatatatatatatatatatatatatatatatatatatatatatatatatattttagatgatgattacaacaaattaagtcacttttttctttctctaatgttattttcttcttgtgtcaacagaacctcagcttcactagagttgacaacttgaacgagaacctcataaatattattgtttgtaaaagtgaaagtattattcttttggagatccacagctaggaaaactgaccatatttgttttgaaatacaagtgggattacattacattcttcatttttttttgtcacagccatctcctatacggcttttatcatttgtagttcggaagaagaaacgagaatga

SEQ ID NO: 163707 - DNA, 445 bp, Arabidopsis thaliana landsberg
atgaataatatgtctttaagtgatatcttcgagaggtttgacacgagcaaagatggtaagatctcttgggaagagtttcgtgacgcgattcatgctctctctccatctatcccttcagaaaaactcgtcgagatgttcatccagcttgacacgaatggtgatggtcaggtcgatacggccaaattcgcttcgtgcatggaccaaacagctcagtctagtggtggtgacgtggaaaaagagttgaaggatgcttttaaactatacgatattaattgtgatgggaagatatcggccaatgagttacatgtggtgatgactcggcttggagagaagtgtacggtcgagagctgcgtagggatggttcaagctatcgatgtagatggtgatggttatattagattcgtaggagtttaagactatgatgatgcgttctaggaaatagtgt

SEQ ID NO: 163708 - DNA, 234 bp, Arabidopsis thaliana landsberg
atggggggaggcaatgggcaaaaggcacagatggctcgcgagaagaacatcgagaagcagaaggccgcctcaaagggaagccagctggattcaaacaagaaagcaatgtcgatccagtgcaaggtgtgcatgcaaacatttatgtgcaccacatcggaagtgaagtgtagggagcatgctgaagccaaacaccctaaatctgatgtttatgcttgttttcctcatctcaaaaag

SEQ ID NO: 163709 - DNA, 466 bp, Arabidopsis thaliana landsberg
atgggcaagaacaacaagcgcaagtcgagccaactcctccatcggaggagtttggtgactcggagtactcagaggaggagttctcctctgagtctgaggagtctccggctcccatccccctgcgtgagtcgtctgacgactcagacgactcccaggggcttgcggcggaggtctggacgtacaaccgggccgtcgagcgttctgggctcgagggctcggatgagtcggagtactcctcggatgagtaggactcggacggtggcggcgaggacgaggacgatgacgatgacgatgacgacgacgacgacggtggcgacggtgacggcgacggcagcggcaggagcggcggcggcggcacgacggacgatggcggcgcacagcagggacagcaacggggcgcacagcaggtgcagcaccaaggcgcacggcgcggcacaacaggccactgctagatcatatgtcttta

SEQ ID NO: 163710 - DNA, 1061 bp, Arabidopsis thaliana landsberg
atgatcgtccctgttcgttgttttactcgtggaaaggtttgttttttcttctctctttttgcacgatttcgatttgttatatatatatgtgtgtgacaaatctctagggtttgtagtattgagatttatgaagcttttgtttatgattttttgtaggtgattgggaacaaatgggacacataccttgaacttcaccaggctgattacgctgaagggtaagcgatatatagtttatgattagaaaaagaatcataatttgtgagaaatttttttggtgaacatgagagtgattgaatcttggaattttgaacgttttctgacattttcttagttgaaaagagagtcatgtaaaagatgaaacaatagtggaacatgacaatagaatgatttgatggttttgtgtagtcaaagagattgcatgatcttgtcttgtatgatcatcttgaaagtttatacatgttttagccttgttactaaaagcatgaagttagatcattgggatttttcgattttcttgttttaatcgctagtgtaatctttagcccgtttggttctaggtgttaagctacatgatttggaattgcgcaatttcgtttttgttttagttgcaatttgatcatcttgaagttcatagatgttatcttaagtgttagtaaagagcatgatggtaggtgatcactgatatattccattctcttgtttctatctaatcttttagctactttggttttaggcattatgctaaaattgcattttgttgaactgaaaatctgaattttggttttggaatacgcagggatgctcttgacgcgcttggattagtccgttactgctgcaggcgtatgcttatgactcatgtcgatctaatcgaaaagcttctaaactacaacagtaatatctccatacccggttcttttgccttgtgttgcctctgctctattctttttgttaacttgcttattcgaatacttctcttttgcagctatggagaaatccgaccccaattaaaaaaagatgctataatgaataacaaatcatcaagagctgaagtgaaggagtga

SEQ ID NO: 163711 - DNA, 2795 bp, Arabidopsis thaliana landsberg
atgcctttggttcgaaacaaaggcgttgtatctaggattgggacgacaatgcgagtctctaattcggcaactgaagttgaagatctagcgagaggtgaagttggaggtccaccagcggtagatggaagtgtagtagctccaccgtctgtagaagatggaggtttagctcagcctaatgttcttggaggtcgagtctctagacagcgtagaaaacgaagaagagtcgttgaagagtatgaggaagagactgaattggaagttgctcaagatatcgaagatgattgtgctgtatatggtgatgatgactgcaatggtgttgacaatgcaataggtgatggagataacgatgctgtggaggaagatgctaacgatggagaagaacaaaacgatgctgatggagaagatgcgaacgaagctgatggagaagatgctaatgttgctgatggagaagatgctaacgatgcttttgaagaagatgcaaaccttaacattgaagaagattttccagaggcttttagagttgatgaagacggttctgaccacgacagcggtgatgatatatgggatgaagacaggattcctgatccgttgtcatctgacgacgaagatgaagttagaggagaagaagagacagctcgtagagatgaaaacgagccagagggtttgctagcattagagaaaacctacaactctccggatgacttcaagcgtgcattgttgatgtactctttgaagacaaggtatgacataaagctttataggtcagcatctatgatcgttgcagctaagtgtagttatattgatgaagatggtgttaaatgtccgtggagaatttattgttcttatgagaagaaaaaacataagatgcaaataacagtttatgtcaatgagcattcatgtgtgaggttagggtattctaagatgttgaagcggtcttcgattgctgccttgtttgaggaaaggctgagattgaacccgaagctgacaaaatacgagatggtggctgagataaagagagagtacaagttggaagtaactccaaaccagtgtgctaaagcgaagaccaaggttatgaaagcaagaagtgctagtcatgaaacccactttgcaagaatatgggattatcaagcagagatacttaaaacaaataaaggttcaacgatggagattgagacaattcctgggccaattcccggtggcttacaaagattttatcgtctctatgtatgttttgaagcatcgaaatcatcttggaggcagtcatgtaggccgattattggattggatgcagcatttatgaaatgggatatcaaagggcaaatgttagctgcagttggtagagatggtgataacaggatatttccaattgcttgggctgtcgtagaggtggaggatattgataattggatgtggtttgtacgattactgaaaaaagatttaagccttgaagacggagctgacattacaatcatttcagataagcatcatgtaagtttcttgttctcaatttgtcattttgatgttaggtaagttaattgtgaaatttctaataaggtttacttgtggtaatagggtttgctaaatgttgttcgtgatgagctgccaaaagttgaacacatattgtgtgctagacacattttagaaaactggaagaagacacataaggatattgaacttgagcgtatgttctggaaaatagcaaggagttacactacggcatcatttgcgactaacttagaagtattgaagaggtacaaccaagctgcttatgacacattacaatgcactgcaccaacaacatggtctcgggctttcttcaaacttggatcatgttgcaatgataatctgaataatctctcagagtctttcaataggaatgttagagaatcaagaaggaagccattacttgattttctaacagaagtgaggaggaaatgtatggagaggaatgccaagagaacaattataactaacaggtggaagaagaggttcacaccaagagcagccagagaaattgaactaaataggcaaaaagcaaaggacttgaaaaggtacatgaccacaggttacttgcatgagattgaatgtggagatgatattttttgtgtcgacatggaaaagaaaacttgtggttgtggctattggcaattgaatggcataccttgtatgcatgcaatgtgtgtcatcaacaccacaaagttaaatcttaatgattatgtctctgattattacttgacttcaagatggcgttcattgtacgagaaaggaattaaaccagtccaagggatgaatatgtggccacagttgggaaggttacctgttctgccacccccacctagattcaacagaggaagaccacatgatcatgctaggagaaagtctccacatgagtctgcatctaataagtacaagttatctcgccatggtcgtattataacatgttcaaactgcaaaaaagaaggacataataagactaggtgtcataatccaactgcccctcctcaagcaacacgaccaagaggtcgtccaagaaaagaacatggtatttatgtaagtagtttttttggtgagctaatgatttgattaattgtttggtggtgtaatggtttgcttaattggtctaatggtttgtttgattttagggagattcatttcatgttggagcttctcaagagggatattctcaagctggatcatcacaaggaggctcttctcaagtaagagcatcacaagggggatcatcacaatgaaaatttgggttctctttttagtccatgcacattctgtttaagcct

SEQ ID NO: 163712 - DNA, 411 bp, Arabidopsis thaliana landsberg
atggctccgaaagcggcagagaagaaaccggctgggaagaagccagcagaaaaagcttcggcagagaaattaccaaaggcggagaagaagatcaccaaggaaggtggaagcgaaaagaagaagatgaaatcgaagaagaacatcgagacgtacaagatctacatctttaaggttctgaaacaagttcatcctgatatcggaatctccgggaaagcgatggggatcatgaacagtttcatcaacgacatctttgagaaactagctcaggaatcatcgcgattggctaggtacaacaagaagccgacgatcacttctcgggaaattcagacggcggtgagacttgtgttgcctggagagctctcgaaacacgctgtttctgaaggcactaaggcggttactaaattcactagc

SEQ ID NO: 163713 - DNA, 488 bp, Arabidopsis thaliana landsberg
atgaagccagtgataggcacagtggtatcgaacaagatgcaaaaatctgtagtggtcgccgtcgatagactcttccacaacaaaatctacaatcgctacgtcaaacgaacttccaaattcatggctcacgacgacaaagacgcctgcaacatcggcgatcgagtaaattctctcgcatttccttcttccctttcactctaatttcgtttgattccgtcttttaaatctgagccacttgaattaggctttgtgattgaacctctgaggctaagaaatttgaaaatctggttgatgtgtaggtgaagttagatccatcaaggcctttgagcaagaataagcattggattgttgcagaaatcatcaaaaaagctcgaatttattctcctcaagctgctgctgctgctgtttctgcttgtgcttctgcttcctcagcctccaaaactaaatcttctgctcagtctcagattcctccatcatctacttcttaa

SEQ ID NO: 163714 - DNA, 459 bp, Arabidopsis thaliana landsberg
ctatggatcgattgtgtgagagtgacccatgctatggtgagatgaagagcgcaaagaggataatgcaacaactagaagaagtggcaatgatggagggaattccgccaatttgtccttgtggtggacgcatccttgacataatctctgagaaagatggtgacaaaggaaaaagattctatgaatgcaccaattataaggtaaattgaagatatcatcaatcttgttttagaataattcattaagcttgttagaattcatattttgtagaatgatgggttacacattcgaaaactttgggataaagctatggtagaagaggtgaataggttaagagagcaagttgataaccatcaccaaaagattcaaagcttggagtactataaccaacaaatgcgttcggagttggatgaaatccagaaaaagatggggactttgtggaggatttgttgtggagagtga

SEQ ID NO: 163715 - DNA, 1040 bp, Arabidopsis thaliana landsberg
atgaagaaccaatttatgtcttcttcaagctcctccacctccccacaaaaacctgatcaaaaactcaaaagtgctgttgtgaccgtggaggagaaggagacaatgaacaatccggaacaaaggtcttctcaagcggtcgtgtgtgaaaacacgatccctcccagggatagagataacgtgctaatatttcctcccagggataaccatatccatccccgtcttttcttcaaggagttccaaagccggtatgccctagccgggcagcaaatcgtccacagaagagaccaagacttggaggtcaagcagccgatgataatcgattcgatgctctcgggtggtacttctctttcgcctttccaaagctttccattgctttttcataacaagatctacacctgtcgtctgtgcaagaccgatttcaaaagccgtagagcgctaggcggtcacatgaagttccacaaaaaggaaagagatacctcagtaatagatcctcataacaagaccagccacacctgtcgtttctgcaagaaagatttcgaaagccgtcaagccctaggcggtcacatgaattgccacaaaaaggaacgagaattggagaagcagcgaaagatgatcgaggaatggatgctttctggtggtactcatcttatacctttccaaacctggcaaaggctaactcttggcccttgtaagtctgaccaaggcagtagctcacatgctttatcaactgatggtattaatcttgatctaactcttggtccatccaagtccacaggaggcagcaacaatagcactaataacaacactaactcatcgttccatgggaatctaatgactcccgtgggtccttgtgtctctagagacagttttgtgctggaaaccaggttgattcaagaaatatatctattcctcctaatcaaaccaccgatctttgttatgacttttttgctttacaagagggatctaaggggaaaaacaaagtcatggtgcctgaagatgataaggtcgttgaccaaggaaaaagatcaagaggagagtag

SEQ ID NO: 163716 - DNA, 1103 bp, Arabidopsis thaliana landsberg
atggacaaggatcgagttctcaagctgctggttctgaaatttctttttctcaaactgcaaacgttgaatcgggtgaggatagagaagaaattgcacatgtgcaatatgatattcgagtgcttcacccctctcgaagaaatggagctaaatggtattgttctttcttttatgtttcattcattatttaatgtaacaaaagtaactgtaaatataatttaaattcatatgcatcaggttcaaaaacaacaccgaagtatcaacgcgtgttagaaaaatcattgaagggtgtttccagggaccttggtatagctggagaaaagtgccgcaattttatagagatgcatggtttacaacgtttaagttgtgtgttagtcatatataaactatttttcagaaataattctttatttaatacatgtctgatatagatatattttagacaaggtttgagtgggatgcctcgattgagcatctagttaaagccaactttgatgccctttctgctgctcgcatcaaaggaatggttagtcttgcaaagtccaaatgaaaacaacctgactggattctggctgaatatttgagagtaatggtagcttattggaagactccaaaagcaaaagaaaaaagtgaaaaagctcgttcttcacgactatttagtcgtgatggtttagaccaacattgtcacagagcgggttcacgttcgtatgctaaagttcaagatgtcttggtaatatattttatttttcattttggtaacaattatgttttatttaaaaacctttcataagacttatttactttcttttttgttttgtttttaggaagcgaataacgaagactcttccttcattgctgtgatgagagctacacaccaaaaatctgatggaacatatgttgttgaaagagcaagactaattgttgaacaatatgatgaatgtcttcttgaacgcttgacacaagcgaattcctccaatggagaggttttgacaatggattgccttaccatagaagagaaaaatgaaatctatgtcaagataactttcacttgctttcacttaaatctactttgctttcttggatctttgaagaagtttgtgttttaa

SEQ ID NO: 163717 - DNA, 1019 bp, Arabidopsis thaliana landsberg
atgggtacaaaagctaggagaccaaaccctgaggtaaagtaattactgattgtatgaacaatttttgtgtgagcaaaaaaaacctgtaaaatatatatatatgcccatgataagatgatatcacatttttgtaatgaaaacggtgtgatttaactaaattttatgtccttatcttggtgcataaaaggcgttttcaaagatacatataataatttcccgtacaatcgaatagaagcattggattattggaataatacatgttttatcgtacggtaacttaagtgcttactcggttctgtttgataaggtatacgaaacaacattttcaagcttatgccttcttaatgatctaattaagtatgcttaactgtttttatttgcttaatggatatgttgaagtcaaagaacaacaggtaatcagttcttgcttgtctcttcatactattcatatctgaatgtgatgttatataaaatattcttattgtaggaatcgtgaaccctaaaagtgtgacattgatttggtactaaatatcattgtgaatctgctaactggaaagcgaattcctccaagccatgtaagccattctgtttcaaaccatgtaagccattcatcttgactttgtgactttaatccttagagaatctgtctttttcaattccttgcaacacaagtcacatttctgctgagtaaattagttgtgatatagtaatccttaatttcttgccacacaagacacatattactgagttgttatcctcctatttttaggctcctgtgaggagaaacggaaagtttgttactgagctgatgaatccaaatctccagggaaagttctcaacagaagaagctttcctagttttcaaactcgcctctgaatgtttgcagtgcgaacatagaaaaagtctcatcacaaaagagcttgttgcaacacttaaagccttgcaaactaaaccacacgtaaggagctaggcttactataaccatatgcattcttgatgatatttctcgcactcgtgtt

SEQ ID NO: 163718 - DNA, 1185 bp, Arabidopsis thaliana landsberg
cttgttttgtaggaaacatttagagctttaattgaggatgatgacatggatttggtactagaggatgagaacaacatgtatgctcttttacaagacatgtatagaggaactggagtgaacactagcagacaatgagtgaggacaaatagaggtgaaggttggcgtcgtgtccagcgtttatgtttgaatctaaggtacaaattcaagacatgaacgaatcaacatttaggagcttatgtaagacactttcagaacattataagttagaggaatcttgtcatgtttatcttgaggagagtgttgcaatgttaatagagatggttgcacaagatttaattgtacgggtcttagctgaacgatatcaacattcacttaacgtagtgaaaaggaagttatatgagattttgattgctcttttgaaacttgcaacaaacatagtgaaacctacaaggggtgatgtcacatatattagtctttttatacttgaggttaagcgctatatgccttattttagggattgcattggtgcccttgatggtactcatgcacccgtgcatcctccatcaaggtttttagagcgatttatatgtagaaaatccgaaccaactatgaatattctcgctatgtataattttagtctaaagttcacataagcctatgttggagttcctagaaaagcacatgacacgaaggtgctatcataatgtgctacccacatcactgtttttcctcatcctccggttgaaaagtataatttagtggatcctatttatccaactagaagtggatatttaggtcctcagcataggattagataccatttagattagttcaatagaggagaaccacctacaatcactaaaaaatgtttaaccataaacatgctagtttgagatcagtaatcgagagaacttttggtttgtggaagactaagtggagaattctagataggaaacatcccaagtttgagttgaagaagtgggttaagattgaaacctcaacaatggcgttacataattttatacgagattcagaacaagaagatagtgattttcaacattgaaaaatggtgaaatcatatgagcagcatggtgatgaaaatgttggacatgttccatatgtacttgctggtgacaaaattatggaggctatgcaggattctatcactatagagagtcagagatg

SEQ ID NO: 163719 - DNA, 906 bp, Arabidopsis thaliana landsberg
aaaatgtcaagagaaatagagccactaatagtgggaagagtgataggagatgtactcgaaatgttcaatccaagtgtgataatgagagtcactttcaattccacacaatcgtatccaatggtcacgagctcgcgccttctcttctcctctctaagcctcgcgttgagatcggtggccaagatctttgttccttcttcaccttagtacgtaattagctttcttctaaacttaaaatacatatgttaagtaccttatttagttctctcttgtagcattaatcttgtggttttctttttaactcgaaagatcatgatggaccccgatgccccgagtcctagtaatccttatatgcgtgaatatctgcattggtaagtcgattgaagatatcacattacttctcatatattacaacaacaatgtataatatgtattctttatgttctcatcaaattcaggatggtgacagatattcccgggacaaccgatgcttcttttggtaagaatacatcacatcataacacatttacatagactttttcacccaccacatctttggttgtaaacacattcccaagcaaacacatttttggaagaggaagagaaatagggatgtatgtatgtatgtatgtatgtatgttgatgaagataagatcatgaatggatttattgattgcagggagagagatagtgagatatgagacgcctaaaccggtggcgggaatacacagatacgtctttgcgctattcaaacagagagggaggcaagctgtgaaggcagcgccggaaactagagagtgtttcaacacaaacgctttctcttcttactttggtctttctcaacctgttgctgctgtttacttcaacgcccaacgtgaaactgctcctcgacgacgtccttcttattaa

SEQ ID NO: 163720 - DNA, 434 bp, Arabidopsis thaliana landsberg
atcgtctgagaatcattggagggcatttgaatgttgcagctgaagcaaaagctcccaagagaagtaggccaccgatcacgactcatgtcttagacgtctcacgtggtgctccagctgcaggtgttgaagtgcacttagaagtgtggagtggtactaccggtccttcctttgttcatggaggtggtggggtctggtccagtgtgggcacatcagctactgatagagatgggcgcagtgggccactgatggatttggttgacgctttgaatccagggacatataggattagcttcgacactgcaaagtattccccaggctgcttctttccctatgtttccattgtatttcaggttacagaatcacagaaatgggagcatttccatgtcccactgttgcttgcacctttttctttctccacataccgtgggagctag

SEQ ID NO: 163721 - DNA, 392 bp, Arabidopsis thaliana landsberg
gacgaagagaacagttgtcgcctggacattggctatgggcggcgcgtttctttaaagcgcgcagtctggcttccgatgccgtggatagcggcaaggtgcgtattgatggtgaccgggccaaaaatgccagggaaatgaagcccggcatgctggtcagtatcaagaacaaggatatgcagattgaagtggaggtactggccctgagcaatgtgcggcgtggtgcgccggaagcggcgctgctctatcgtgaaaccgaggacagcatacgcatacggcagcagctcagggaaagcggcgcagaccagtacgccgagcgcgaccgcggcatgggcaggccgaccaaacgccagatgcgtgatatccagcgttttaccggacgcgattgagagatc

SEQ ID NO: 163722 - DNA, 928 bp, Arabidopsis thaliana landsberg
gtttgtcgaaaaacgctcctaaacgtgagtattctctagagcattcggattcagggaaagtttttagtgccttcacatcaatttcgatcatagctgctattttcggaaatggaatcttacccgaaatacaggtgagaaatgtttgcaatttattcaatacaaacattgtatgttatgtgtttgagatttatgagatgattatatgtatgcaggcaactcttgctccaccagccacagggaagatgttgaaaggactattgttgtgttatagtgtgatcttcttcacgttttactctgctgcaatttcgggatattgggtttttggtaacaattcgagctctaatatcctcaagaacttaatgcctgatgaaggaccgactctggctcctatcgtggtaattggcttagctgtcatctttgtccttcttcagcttttcgccattggccttgtaagtttataactagtgtgatcgttattcgatgttacttggctgtgagacgagtgactaaatgtttcttttttttggtaactggttaggtgtattctcaagttgcgtatgaaataatggagaagaaatcagcggatacaacaaaagggatattctcaaaacgcaaccttgtgccgcgtttgatactaagaacactatatatggcgttttgcgggttcatggcagcgatgctaccgttctttggggatataaacgcggtggtaggagcgtttgggtttatcccactcgatttcgtgctgccaatgcttctatacaacatgacctataagccaaccagacggagcttcacgtattggataaacatgacgataatggttgtgttcacttgtgcaggactcatgggagctttctcctccattaggaaacttgttcttgatgctaataagttcaagttgtttagcagtgaagttgttgattag

SEQ ID NO: 163723 - DNA, 985 bp, Arabidopsis thaliana landsberg
atgggtaacagggtaatctgcatgaagaagaaagatgttgttatcagaagtggaggagattgatccagaagcaagagaatgaatcgttcacagaggaagttaattaatgttgaagagaatttgcatcgaagagctttgtctatggctattcatcaagctcaggtgtctcagagatttgatggatccatgtctactagcgacatacatacataatctgaagaagaaagaggacgaaaagtgaagtcgaaatgaacgagaccgatggttaagaatcgaatctaatcccaacaacacattcacaagcaaaacgaaaaagaagtctttctttaaatgggcttttttattcggccctttataagtgaggcccaatcgtacaaagaaaaaagtattatagaataaatattaatcgaccggttaatctaattaatcaaatggttaggcctaactatgtttgaaatttcatttacccgatttaatcaattcaatcaaaatcaaaatgttcttccttctcagtactgttcaaattaaaacttaaaatgtctgcatttcccgcacattaataattcaatttcaaaccctaaaaattcgaaaattcccccaatggcatcggaaaagccagaagatccgatgaacaacaccgccggaataggaacagacgaggaatctatagcgcaacggcggaagcggctaagacgagtgagcttcgccgaccgggaaattacttccgttcacattttcaaccgggacgaagattacgagacgccgcccaatacctccgccgcgaaaccccaaaacggtggtgatacatcagagcctgatgaggataataaagtaattaggtttttcggtgaattatctgaccgcgaagatactgacggagatggtgatggtgaatacgaacctatcttggataaatcattcttgaggccgaaatattctccatcttcaggaggtagcacttgttgttccgctacaagtgataacg

SEQ ID NO: 163724 - DNA, 744 bp, Arabidopsis thaliana landsberg
atttacagtctttacataattaacaaatctggtggtttgatattctacaaggtgcgatctctccatcttcctcttgttctcgatctcgcagcttgtggactttccatgtctagagaatcacgagctaattgatgttaatttcgagggatagaccaaaagatgaaatttttgagatcactaggtttagtagaaggagtgttttcggtattaatctaggggttgtgaatagctactaaagaaattggatttgaattttgatctgttctgtgtgtgtttggatttgggaaaaattcaggattgtggaacaaagggaagaatggatacgaatgatagcttgagagtagctagtttatggcattcaatgcacgccatttctcagcagctttcacctgtcaatggctgttctggcatcgagcttctcgaagccgacactttcgatctccattgtttccagtctctcccaggtaatcatacatcgccatttgcaagaagataccgtcacattctcttgattactgacttggctctataactgatcatatctcaggaacaaagttctttgtggtttgtgaacctgggactcctaacatggagagcctccttagatacatttatgaactctacactgattacgtcttgaagaatcctttctatgagattgaaatgcctatccgttgcgagcttttcgacatcaaccttactcaagctgtacagtcagatcgtgttgctttgttaggacgatga

SEQ ID NO: 163725 - DNA, 778 bp, Arabidopsis thaliana landsberg
ctggataaataagaacaatatcgaattacatttgtaccttcgactcgacagaaggtaaaagtacaagcgtaacgcacgagcgagtacaagtcagcgtgaacagtacgggggtactgttcatctatttataggcacaggtcgcagcccgtgtgaaattacattcatgcccttcatattcactattgacttaagaacaatctattgaggactaaatagccttttcctccttaagtcggttcctttttctgctatcgagtcgaagctcccttgcgcacagcttcggcgctggttcaaccttcgttccgaccctgctctccgtattgtgtacaacttcatcccgagtccgaaggttcctgtacatatattatacttgccaaatattgttaatcatgtttttgaggacctttggaagacgaaggcccccaacagtagcccctcgagatattaatttgatagaatgacaaattcagattgcgacatggacgaaggctctaagccgaaagtccgaaaaaacaccttccctttgctagaatagcaacagtcaatgacagacggggccctccgacttggagcgcactgggcgtataaatagggacttacatcgactgtacttgatacactgcttgtgtcatttgccttattttctcaattttacaacttttgcttactagcgcttgatagctctcaagcctttgagcttcggtttggaggacacgttttcgtcatttccgaagagaagatgtctcaagccaaccggcaattgctgagacgaagctaa

SEQ ID NO: 163726 - DNA, 510 bp, Arabidopsis thaliana landsberg
tttggttttaatttaaaatcaaattgtatcattagtgttcttatataatatttgtattattggatcagtgtatcaagtttgtgtatagataagtatatataagtggtgtgacactaactcttgttttttgtttggttggaaacagaatgtgaagtgaactttgagtatatggactacaaggtcttgacaaagaggtgcaaaggtccagcgtttccagccaaagaatgttgctctgcttttaaagaatttgcatgtccttacgtgagtcagatcaacgacatgaatagtgattgtgcacagacaatgttcagctacatgaatatttatggaaactaccctactggccttttcgctaacgagtgcagagaaaggaaagatgggcttgtttgccctttaccacctctctattcacataacctaaacgcctcaactgctgattcgactcctcgttttatctcgctgttgatctctgctgcaaccgctgtttttgctttgttagtgttgacttga

SEQ ID NO: 163727 - DNA, 609 bp, Arabidopsis thaliana landsberg
tatttcgtattcactcaggtaatggatgcactcatcaagtttggtcatcatttgttgaggactgaagatgttgatggtgagaaacttcgtgtcgaagtccttgattcaaagttcgtgtctttattctgccgacaattcactcagttttctcgatgcacctcgaaactggagtttcaatttccagctccgctgattgatcttctttcttgaattggggaagatgaccatgtccagttattttcagaggctgattatctttacctgccatttaacttcgacaaaaagcattgggtagctttagctgaatgtgtggattttgaggtgggcggtcttcagagtgaagtgaaaaagcttgtctcggccccctctttttctgacttgctgcacctcgaaactggagtttcaatttccagctccgctgattgatcttctttcttgaattggggaagatgaccatgtccagttattttcagaggctgattatctttacctgccatttaacttcgacaaaaagcattgggtagctttagctgaatgtgtggattttgaggtgggcggtcttcagagttaagtgaaaaagcttgtctcggcccccctcttttctgactt

SEQ ID NO: 163728 - DNA, 606 bp, Arabidopsis thaliana landsberg
atggaacaggctgctttatttgcagcagcggcacccgccacactggttgccggtgttgacaaggcggggcggggcccgcttgcgggcccagtatttgccgccgccgtcatcctggctccgggggtcgtcataggcgggttggccgattccaaaaaactgtctgaacgccaacgcgaccggcttgtgccgcttatcaagtcgcgggcgctggcctggcatattgcccaggccagtgtcggcgagattgattcactgaacattttgcaggcgaccatgctggccatgcgtcgcgcctgccgtggccttgacccggcaccgctgcatgcgctgattgacggaaatcgcatacccggcaacctgccatgtacggccatggccgtgataaaaggcgacgcaaccgttgccgccatttccgcggcgtccattttggccaagaccgcacgtgatgcctactgcaggcttatgcaccagcagtatcccgactatgggtttgaccggcacaaagggtacggcacggcattgcatatcgaacgcctcaatgcctttgggccatgcccacagcatcggcgcagcttcgcgccagtaagccggttgcttgacaaaaac

SEQ ID NO: 163729 - DNA, 1169 bp, Arabidopsis thaliana landsberg
atgaatcttctaaaacaacaaaatcaagatattggtccagagtttcaaggtcgtcaggtgcaaaatctcgctaaagcgattgaagataaccagtctacatcaaacaagtaaattgaatatgactaaaccaaagagatttagagaaaaaactcatagaaatgccaatttgggtttaacccaataacgttgacaaatttgtcagaaattaggtctctcaaaacatcttggagctataaattatcaaactttaacaaatccatctctaagaatctaaattctaagaaatggaatgaaaaacaaataaaacataaccaaaatcgattatttcaaaaaacagaaaagaccagagcttggctaagaacagggaaattcctaatggttttgtagtaatcagcagtgaaataaaccattagatgttcgtattctgataagtgtgtattttacatgttttaagcatccatttgtcatcactttatcatcatatcaccactatgttataccatttctcatcatttgtcataattttgcatgtttaggatagttttgcatgcatgttgcatatttgtgttattttcaagtgatttggagctgttgacgagctaattggaagaagtggacctccatcctggactttctgaaggactcggtcacggcctccgtacaacatcactcgaccgcaacactctggatcaccactcaaccccctggtcgagtagatggcatcacctcttctcaccaccactcgaccccctggtcgagtagacgacctcatcacttcacatcaccactcgaccccctggtcgagtaccaccatcaccttcactcgatcacttactcgattacatggtcgagtcccatcataatcgcacactcgaccaatcactctaccaccaagttgagtaccaccatcatccaccactcgacatcatactcgactgccagcttcagagtcttctccattccgcactcaaccagacactcaagaacaaggaagagaagaagactccatcttatcactcgaccaatcactcgaccacctgggtcgagtgcctatcttaaatccgtcccaatactgtgtcgttttgagtattagggtttaagaatattttaagtagcatgtactttatatttttgagactaggttttattcggtagacagtttgtgttct

SEQ ID NO: 163730 - DNA, 1516 bp, Arabidopsis thaliana landsberg
atgctgacatgcatagcttgtacgaagcagctaaacaccaacaatggtggatctaagaaacaagaagaggatgaagaagaagaagacagagttattgaaacacccaggtctaagcagattaagtccctgacgtcacaggtagagataaacattcttcctctgtgtcactttcacgaaaaaaaaacacaaatgagaaaaggaccattttttgctcttgttggtttctgtttggaagctaagaacaaatcaatttaagtccgtgacttttttcactgtgtatttaattttgtgaataacatgtgattcttgtatgtgaatcttcagattaaagacatggcagtaaaagcatcaggtgcttacaaaagctgcaaaccgtgttctgggtcgtctaatcagaataagaaccgaagctacgctgattcggatgttgcttcgaattctgggaggtttcgttatgcgtacaagagagcagggagtggaagctcaacacctaagattttggggaaggaaatggagtcaaggttgaaaggttttttgagtggagaaggaacacctgaatccatgagtggtaggacagagtctacagtgttcatggaggaagaagatgagctcaaggaatgggttgctcaagtggagcctggtgtcctcatcacatttgtatcattgcctgagggagggaatgatatgaagcggattcggttcaggtaatttttaactgttttgtaggatttacactaagtaaaagtttggatattggacttaatcaagatggtacaatgtgtttccaatcgggaatattgaagatgatactcaaatgaactaatccatactgttttgaaattgtttgatttgattttggaagtagagatgtgtggttcttggagacaagcaatgtgagagtacagttgatatttaggatattattatgtgagatttctgtgttggaaactgttgctgctttcatttttcttgaatcgattgaagtggtcccaaaccatttcttataattatgagaacttgtacatcctttttgccaagaaaggtctttgagatgtgggttatatttcggtagttgaatccgatggagaacttaaatgaattccccaaggacaaagtgtggggaagtggttgtgaatttcgtaaagttctttttgtatgtggaacatataatgagagcaagatgatctaactaactttcttcatggcaagaggaacactttagctccctaggattgatatttctagattctagttttgacaatttactgcagatcccttgagttttgtgaacctaagactgttaacctggtagctctttggttctgtattgtatatgcttaagtcagctctttgatttcttcaaatttgtattacttgcagccgtgaaatgttcgataaatggcaagctcaaaagtggtgggcggagaatttcgacaaggtcatggaattatacaatgtacagcagttcaatcagcagagcgtcccacttccaactcctcctagatctgaagatggg

SEQ ID NO: 163731 - DNA, 1435 bp, Arabidopsis thaliana landsberg
gatatacaagtgacactaagggaagagatcaaaagcgcttgcgagtaccgtccctttgagaaatgcgattacaacgcgagaatagccaatgagatctgcttccagaagcttgaatatgttctcacgcagcttgaagatctgaaacaaactgctgaccggtatccttcttctgattgatattggtattcataaaaaggttacttgaagagctatactaaaccatcggttgtgatatagtttccagatgagttgtagacttgtaggttatcccattaaagtatgtccggtttttacgaatgagtggcttgttgcaaaagtaagatattatcctacttactatattagattttgcaaaaagattaggtgattttggttagaacattcacttgcaatgaatctgttccaagaatattagatacattacatccactgggagttatcaatttcagcttatggagaaatcgaaccaattttgggccagagagaaacggaccaattttattgcggtttaatgtatcgatcaatacttggaaccaaatgtgctaacgtcaattacgtatatgaatcccttcattcatatgtggtttaataaattaatagcatcaacagctgaaattcccggttagatgtgataaaaccaaagcggttaaaaagggttaatgagaaccaatattgccgggttggcggttacgccgttttgtgctcttctgttttagttacagctcaagagacgcgttgattggagaaggtgatagaaatctcttgggtagagggagaaaattagggtttagagttggagatgagaagaggaacgacgatctaaggagacaaaagagagtagctagatcaggacgaaattccatatttccttcgtttctgtttctctctgagaatgagtcatcaatcgccgccgatcgctgaagttgatgccaccgacgatatgcacgaggcattgttcgcgaagcgaggttgttgtttcctcatgccctgccttgcctcatctcagccatcaactcgcggcggatctgtgtggtggcaacggatcacgaccgtcgacaaactcgaacccgacgagcgatggtggatccgagggtggcggaggatgagggagtggtcggagctcgtcgctggacctagatggaagacgtatatccgccggttcggacgcagcaactgctgtggaggaggaggagggagagtcggaaacagcagcggaggatgcggaggtggtgcaatgcctaaccggtcatcggatcagggtaaattccggtacgatcagttgagctactcgttaaatttcgatgacggaaatcaaaccggacattttgacgacgagttcccgtaccgagattactcgatgagatctcgtgcgccttccttaccggtttccactaaatgctcaattgatttcgatagcgacattgataacaagtga

SEQ ID NO: 163732 - DNA, 476 bp, Arabidopsis thaliana landsberg
tggcaaagaaaaatttggctagaaaatacggatttaaggtttttgcaagaaaatattggatacagtttttggtgagaaaacatcggtttacggttttggcggaaaaatacgattttcaatttggcggaaaacacttttttgtaattttggcaggaaaacattttgtgatactttggggggaaaatggttggcggaaaaacgtcggtatacgattttggcgagaaaacgtgattttcagttttggttgaaaacactttttgtgattttgcagaaaaacatttttggtgattttggtaggaaacgtagttttacggtttggcggaaaaaacgtggttttacggttttggtggaaaaacgttggtttacggttttgacgggaaaacatgattttcaatttttgcggaaaacactttttatggttttgatgggaaaacgtggtattacggttttgacggggaaacgtggttttacggttt

SEQ ID NO: 163733 - DNA, 2140 bp, Arabidopsis thaliana landsberg
agttttaccaacacttaaaaaaaccaattattcacagtttgtcaaaaccctctccagtactccaaatttgtatggtttagcattcatttttcctatttccacaacattcatcatcaagttcttcactaatgctacttttttacatcatagtgaacatgttaccaagtgtggattccttatttccaactcattcctcgtcgatcttgccaaacctcataaatgggtttcaaccctggtatgtagtccactatatttatcctagtacaaattaaccttttatcaagatatactaatgtgtaactgttttattcccaagcagatggaggttttggtgtcattactttctcggaggcttacaactacacttgataatcatcgttctgcttttgttgatccatagttcacaagccatctacaagctaaattcagagccttcaatgctgccaagatgaaatcacgcgttcgttggtcagagaacatgcaacgcttcatcaaaggatccaaaattgaatggttcaaggacatagataccatttacgcacccatgatatggaatgattgccactgggttggactttcaattaatcttggcatatggagcgttgaaattcttgacccaaatacagacctctacgacgacgctaaggtaaaaagattcattgagccagttgtcaatcttttgccccacctcatccaaaggtactgtacgcctgagctttctcagaatcacggtcttcaaccgtttggctaaagtcaaattgatggtatatacaagaatttgcgaagtggtgactgtggcccggttgctatgaagttcctcgagacccaggcaagtgaaattactgacaaacacgtcgacgcgtttaggcgtcaatatgccatggacatatataaactatgtgtatgtccactctattcatcttatgtttttgactagttatggaatgtcaccctacaatcctgttgtaatataaacgttgattcccccttctttgaatgcttataactctggattctataaatatgttttttgctgttctttaccatattgataatcttacctctatattgctgtatactcaaaatactcaacaatagttcaaaatactcaaaatgttaactcaatgcgaagaaaaaataaataattttgagtattttgaactattgttgatttggtaaatcattcgagctaattatgtttacaaatacgttaaaaccagtcatagtgaattattcaatcagacaaacgaattaatacagttatgttgtggatggattaatatggatacattaacaattatctttctctttcaccatgaaagacaaatctaaaattccttctacgggaaatattgagatactgttgtataacgtgaatattcccacaatcaggtttaaaaatgggattattatggttcgagacaaatccggggacattatggttagagaacaattatagttagagcattatcccttttttttttagttttaattatcacgtttattatgataagataattatggttagctctcaagtgttgagcataattatatacagttactaaacactcacgatttgttgaagtttcttccattccccattccatccatttcaacttgaaaacaaagaaattatgctcaagttagcaaaatacgacaagaataaattaccatctggtgtcaaaaaggttgttcagcctaaactaaactacttatttttctatgttttacattcattgtaaacaaaaacttatcgtctgcatatgtttttttttttttatctcaggttgctgctatccctgaaattttcatcccggcaccaatacttgctaaaattgttagctacgtcgccaaagatggcgtggatgctttgaaacccttggttatggctggtccagcatttaaggctgcagtgtattccaaggaaacactgagttgtgtccgcatagacaaatctcgttatttcatgtggtggtccatgccgcattccatttattatcatttcttcacaaaatatcttgaagccaaaaatctacatgctttgaaagctgtaatgtacaaaccaatagcatatgagaatttagctgccgaatgctatagatctaccctatgggcggagctgtatggagagcatgaatga

SEQ ID NO: 163734 - DNA, 1841 bp, Arabidopsis thaliana landsberg
atctcactttcccactgaaataaccccatggcggagaatcagaactgtgcgaggatgacgagagcggcggcgaaacgaaaagcgtcgtccatggcgttagacgaaaacccagttagtaagaagagagttgttctcggagagcttccgaatatgtccaatgtcgttgctgtacccaatcaagaaagagagaccgttaaggctaaaacaagtgttaatacctcgaagaggcagatgaagaaggctttgatgattcctgaagctagcgtactaatcgaatcgagatctgttgatcctcagatgtgtgagccttttgctagtgatatttgtgcttatctccgtgaaatggaggtaaaaaaaaaatcatctttagtagatttcttgattccatcatttttgatcttagtgatcttatggtatcagtttatgttattttggaattggtacagtgtttggacttgatattaattaatgggtttggttaaagttgtggatttgataagtttctgagattttgtccaatcacagcttgctcttatggttatatgatatgtttggagaacttagagatgattgatactttgggactaatggttattgtttttggattggtaaaattttcaggggaagccgaaacatagaccactacctgattatattgaaaaggttcagagtgatttaactccacacatgagagcggttttggtggattggttagtggaggttgctgaggagtacaagcttgtttcggatacgctttatctcactatctcctatgttgatagattcttgtctgtgaagcctattaacaggcagaagcttcagcttgtgggagtttctgcaatgcttattgcgtcgtaagcatcttaatcctctttgtttattgttgtgttggtgtgaagagtcttagatggttggcttatggaatctttatttttgcttttaaaaaagtaggaaatatgaagagataggtcctcctaaagttgaagatttttgttacattacggataatacatttactaaacaagaagtggtgtcgatggaggcggatatacttcttgctctgcagtttgaattaggaagcccaaccatcaaaacattcctaaggttcgactctgaaacagtctggtgtttaaacttatgatttcatggttttacttgccctcgttttgattgttattctcttttttatgtcgtgtttgtgcagacggtttacacgggttgcacaagaagatttcaaagtaagctcaaaatcgatgtacctgtaaactgtggcatttgcatctcataatttctattgttaaatcttctttttttcatgcctttgcaggactcacaattgcagatagagttcctttgttgctatctatcagaattgagtatgttagattacacctgtgtgaagtatttgccatctcttttgtctgcttcagctgtatttcttgcccggttcatcatccgtccaaaacaacatccttgggtaagcaaattaagaaccatgacaggttcttatacagaaaaagttctttatattctaaatcctcttctggtgatgcaaacagaatcaaatgctagaagaatacacaaagtacaaagcagctgatctacaagtgtgcgtcggtatcatacatgacttgtatctaagcagaagaggaaacactctagaagctgttagaaataagtacaagcaacacaaggtaaattcaacaattcaatgatgtaactttaaacttgtgatatattgcaacaagaacattctaatatctgattctcttggtacagtacaagtgcgttgcgaccatgcctgtttcaccggagctacctcttgctttctttgaagatat

SEQ ID NO: 163735 - DNA, 1112 bp, Arabidopsis thaliana landsberg
gcctatccagaagtttaacgatgccgatggttacatgtctatgtctgtgtatctgggcgttcctgattgttgtgagtctttgccttctggatggaaaaggcatgcaaagttttccctaactatagttaatcaactttcagaaggactctcccaagtgcaaggttactagttcctctagctgcatgtaaataaagtttgatagtttaatattcaaattgtatgttgtgctatgcttgtctggactccagtttgggtggtttatgttttgtcctgtcaagttgtgaacctcacgttcaatgcactggtttattaaacttatgaggtgaaatcttttttgtggtttttctagaaacacaagcgtggtttgatgagaacgctcctggatggggttttccaccaatgctaaaccttaaagatgtttctgacaaatatggtggattcctggtgaacgacgaagtcatggttgctgttgcggtagatgttattgaagttgttggttcattagatgcaccagagatgtctgagagcatggatatcaaagggtttaaagttcttccttcacaggtaattaagaaatttaagaaagatgaaaacgtgattacttttacccactgcataagatatggtttgcaagtctttaaagttgatattcgatctttaatttaagtcgtacttcgcaggtgaaatctgtgaaccgtttgtttgagagtcacccagacattgcatcaaagttcagtataaagatccaatctttgaagacagcgtacatgaatgtcctactctgcttgtccgagactctgcaccaatggcctatggaaatctccaaggatgatctgtgtgatgcgaaaactactctggcctacatgaaaagtgtaggatttaagctggattggttgcagaaaaaacttgatgagttgtttgaaaagaagaaggaagaagctgataagattcggatgcaaaacattgaggaagagctcaaagatttgaggcagaagtgctcaagccttgaagctcttttgaagaaggagaagacaggcgttttccccgccaaagctcctttcttgttaaataataaagttgtcgatgatgaccttaagtggatcttacgagcg

SEQ ID NO: 163736 - DNA, 560 bp, Arabidopsis thaliana landsberg
atgccctatagttactctcaaccatccacgtccgaagctagttggaatagtggagaggcgaatgccgatgcaaattggggggttccagaaaaatgtttttgtggtaagcctgtaaaacttgaagtgtgcaaaactggttacaggcaaggcgacagagtctacaaatgcccaatgcttaaagtaagttattgtgttttcacttcattggaacaacaaagtacaagtgaattatatttatgaagtcttctctctttcgcaggatgaagagtacgagtcccgaaaccaccttattcagtggtgggatcaggcggtaactgaggagcttgagaaggtaaatcacaaacttgattccgcactaagacatggacaactagcatgcaatcatgctttggagtccatccgggaaactattcaactcatgcaaggtgaaattgaaacccttaaagaaaggttactcgccaaagaagtcgagattgataggcttagggcattactttctacatggtgattatgatatgttttatgttattgaggatggtgtatggcatttggattttatg

SEQ ID NO: 163737 - DNA, 570 bp, Arabidopsis thaliana landsberg
gagacaatgcaccatctttcagacttacatgttcactctactaactggagggtttatgttaagattttggcgctatacaaccataatccaacccttaatggtgatgagacgactatgctattggttgatgaaaaggttcccttagatcctacttctattattagttttctgttattataaagtctatatctttgttgttaaacagagtgacaatctattgattgttctgttttgtagagtagccgtatagatgccaaaattccagagggctcatatctttacaagtttcgagatgttctgagaattggtgtgtggtactacatgtctgattttcaagttgttttgtctcaaagtgaagtcaaatacgccctcagaccaattcacatcaaatgtctgttccatacccaaatgtggcctgttccatctagatcatcaagaaggttttttgactttgtggctcccgatgaagttaagtatgctacagatgatcaatttaattgcgtgacaggtaactgtttttatcttaggtataggtcagactgattttattttggagtttttgatatcaat

SEQ ID NO: 163738 - DNA, 1844 bp, Arabidopsis thaliana landsberg
atgggtaccattgactatatccgtgattttgatctcaaaagaaccaactgggtcctctatgtgaatatcttaagtctatggaaccatcaggctgtcaacaatggtgaaccgacaaccatgattctctgtgatgagaatgtgagttcataattcaactacttgtgaagttttcataattttgtttctgaaacctgttcataatctaaagtatttttgtttttgcttcacagggatgcagaatcgatgccagggtaccttctcgaaattatttgtataacttcagatctaccctacatgagggaacgtggtattacgtggcagacttccttctgaagagagcaacttcaacaacaaagtactcatcatctatttatgagatcgagtttatttgaccaacaaaaatgtggcctgtaagtcctagatcgactcagatttctctacaagtaatccattctgatgaggtcgaatatgaacctgacacttatgttaatggtaaactaagttattcatattaatgttcttatagttacagtgattgcataaggaaaatttacagactctgacttaactattttgattgtaagatgctgttggaatcatatcgagtgtttctactgttgcgaggtttccctacgtctgtcgtgaaggggaaactgactatgaagccaaatatgtgaagtttactatcagagacaatctgtaagttacattacctgtgtaacttttagacatgtaggtttgtaaggatcaaaactgtctgatgattggtttctttggattgttgtttgttatagtaataggatcaccacatgtgtagctaaagcgagggcttgtgagttatttttgatcaagttttatcgacggattggtttggtcacttctaattttgagccaattgttgttgtgatccggttctggagagttcatgatttcaaaggttagttaaaattcatctataagtaggcgctttcatatgattcattgttatacaattgaaatttaaagtagataacaatactgattttgaagtctcttataggatccaatgccttattcagtgaggatggatgttctaggctactcattgatcctgcatttccagactatgatcttcagacttacatgtatgtaaaatcgagtagtttatattaattgtgcaaagacgtatacctatactttatccaagtgaattgagttttattgttttcttactgtggttggaatgcctatgaagatgacgaagagcttgatgggaagattgattatgtaatttgatatgtctataatttgcatgttttacacatccttttataaccattttgagtctagtttcatccatctgtcatagcattcaccatcatttttgtacattttgcatcttttgttgagtctaggactagtcttgcatacattctgcattctggagttgtttcaggtattttggagctattggtgctcagaaagaaggaaaacagaacagaaagtcacacttccaccaacatactcgatcaccagtagcagagagggaagcagtcagctcagcagtccatccagacacttctactatatcacagaggagaccagacagtccattctgccaaatatacttgatcacagaggagaccaggcagtccattatgcaattctactctatcgcagaggcgaccaagcagtccactttgccagtccaccagttaaactcgatcgcagaggagaagaaccagtccatcctgacagctgacacacttactcgatcacagaggacaagaagcagcccaaaccattctgtcaaccaacctactcgaccaccaccccgatcctctgatcaatccgaactcaactag

SEQ ID NO: 163739 - DNA, 555 bp, Arabidopsis thaliana landsberg
ctaaaaattaaagaaatgagtagcaattccgagaactcgattgcgagtacgcaatccgtcagccgttggggacgtgggttaccatcgaagtgtcattgcggattagacgtggtcatctatacgtcgtcgtcagcaaagaaccctggaagaccatacttccgttgtcctacgcgtttagatgtaagtatataattgatttgagggttttattggtttcgttgttaattgcggatgtgattgaatatacaggaccatctgtttaaatgggtcgaagatggtacatacgaagtggttgtagacagttggccgaaattggccggcttcgacagtgagttaagcgcggccaagtccgaggtttctgtcgagctagaagcgttacaggcgatggtgaaagaactgaaggaagaagtgatgaggagcgaaagagaaaaccagaaatggaaattgatgatcaaactttgctgcttttgtcttgcctttattatcattgtcattgtttttggtatcttaatgttcccaaaaatcaacgaacagaggctttttctgggctactag

SEQ ID NO: 163740 - DNA, 1159 bp, Arabidopsis thaliana landsberg
agagagagagaagaagaagaagaagaagaagaaaagttacgcagagagactgaaagaagagtgagcgatcggagaaagatggcgatggaagtagcaacaccggctccggcaccaatcccatcggagaggaacatcgttctcgcgcctgcaacaacaacaacaaccgccactgttgagactcacaagaagaacaggatccaagtttccaacaccaagaagccattgttcttctacgttaatctcgccaaggtaatgatcggaaacctaaattcattaccggatcgacggtttttcagatcaaacgagtcttcctttttctcaattttgactgattctgtttactagagttcgagatccgcttgattttaagattgtagattcagttaacgaaacatcgttttagtatcttgagacgaacaatcagtattcgcctggattttgtttccgatctgtttttggatacttatagtattgattcaggatcgatctttatctatttgatactttgtgtccaccaagtgtttgattgtattacttagagagtaattggatcttttcgttgtttgatgcagaggtacattcagcaacacaacgaggtcgagctttctgcacttggaatgggtatatagactctttcttttacctttatcttttttatttgatcggtttctcatcttttgcgtgtatatgtatataatctgtaatgtgtgtatagcaatcacaactgtggtaacaatctctgagatcttgaagaacaatggacttgcaacagagaagagtgagtcagatctctcccttcttaccatcaatctttgagccgttcgttctattgaagaaactgtttcatctctggtatgtgttgaatgacagaggtgctaacatcgtctgtgggaatgaaagatgagacaaaaggtaagatggtccagaaggcaaaggcgagtttcttttttactacttccttatacccttttgaagttttatttatctccttttgggtttgttattgttgcagattgagatagtgttgggcaagtcagacaagtttgactctttggtgccacctgtgaccaacggcaagactccggaggaggaagccagtgcagagacggaagcttccgtggaagcacaagaagaagttgccgctgccaccgaggtctag

SEQ ID NO: 163741 - DNA, 805 bp, Arabidopsis thaliana landsberg
agtactgatcgatggcgagagttgcggttttggttgcagcggcggtgctggcttttctgctggcggcgacgaatgtgacggcgaagaggtggacggtgggtgataacaagttctggaatcctaatatcaactataccatttgggctcaggacaaacatttctacctcgacgattggctctgtacgctctctaactcttattgatacttgttatcacaggctttcggacttaatatacgttttacatcagttggcaaatgaatggtttcaaattttacaactttgaaaaaggaccactagtttcttcactagctctgttttcttattaaaaaaaaggatgcttctttcacagcatcctttgtaattggaaatagattaggttctggttctgtacttcagtaagatctcaaatcatgaatcttcttgacttatatagtgtttcattctcattgtgtctggtcagattttgtatatgagagaaaccaatacaacgttatagaagtgaacgagacgaactacataagctgcaatcccaataacccgatcgcaaattggagtcgtggagctggaagggacttggttcatctcaatgtgacaaggcattactatctgattagtggtaatggtggtggatgttacggaggtatgaagctcgctgttttagttgagaaaccgcctcctccaccagctgcagcacctaacaagaacagtgcaagaagaaccttctcggtctccggttttgcctatcagtttcttattccagtagctgttttcgcagcagttgggacacggtactgaggttgtgg

SEQ ID NO: 163742 - DNA, 1504 bp, Arabidopsis thaliana landsberg
gaaaccagactcggcgccgaatctatgaagcaccaacttccccgatttggattgatcggaatctagaattcggagatctaattgaagcggttagagaatttgggttgttatatgtaagtgaatttccttatatatataggcctagaagaatggaaaaataaagaatcaaaccttgtttttttttttctcattaagtgtgtggcttttatatataacacaagtgttacaaagtattacaacagtggaaacattcaaacatccacttacagaactcaataagctaatgagcattatcatgttggattatctaaagaagattgataatccctttttcatctactcagaagttaacattttcataatcttcaagtcctgcttcagatttaaaaccacaaccttgactgctttcattagaaagggtatatgttgctcaaaagaaacggaacaaagcatcaaagaactaactaaatgagtaaatccgccggagaccacatcatcatcaccatgtcaccgtaaaacccaggagaagatagttatgtccattcttctaatgttgatgataaccacatgataagttagatgagagtaaaaaacacaaaggtgtttagaggaagaattataatagactctcatcaaaataatgttacaacgtacattctcttatatagaaattatgataaacataaatgtaaataatatatttaaatttagatataatgttaaacttccaaaaattccaatattaacatttattttatagaataatatcttcttgccatatctcgatcttttcatctcaaccgtcgctcttggtctatctccggttctccatatcccaatacctcccagcaagctcatacctggtaacacgtatgagattggacatgtctccaaaataccggctttatacccgaccgtcgggtcatcatcgacgtttatacccagtcgtagggttcatcaacggcgtttatacccggccgtaaggtcaaagtcgtggtctccatcgtgttcgtagttaatggaaaaccacatggaaaatacatctttgtagttatgtatctccatcgtttaaatcataaggtcaaagtcgtggtctccatcctaaaacccatgatgatttcagttcgaatcaacatctattcaaatcaaatattcttcatttctacaagtaaatcccaatttttgctatcaccgatcaagcctttttcaagaataaacccagaaacgacttgaggagtatcttcacaagcgccaatgaaacgcgacgacaaagccgaaaagcaccgaaaagaaaatcgaaacaaaccggacggcaaacacaaacgtcaaaactggctaactctgcttatagaagccagatgctaccggactagggccaaccaccaccactatagaagctggagatgatggaaaaagagctggaccaaatcggacaagacatgataaacaccggaaaacatccggacatgtaaacaaaaaggaaaaaactatctctgacctctga

SEQ ID NO: 163743 - DNA, 1178 bp, Arabidopsis thaliana landsberg
  unsure (1)..(1178): unsure at all n locations
atgactatgcgatcatcttcaccttcgtcctcttcttcttattcactcgctttcacaagtttgagcaataggcttgagaccatcttcaagaaagcttcagagctttgcactctttgtgatatcgaagcctgcgttatctattacggaccagacggagaacttaagacatggcctaaggagaaagtgaaagtgagagacattgctcttaggtatagtcaattgaacgaagcattgagacgcaagaaaagcgttaatcttcatgggttcctcaacaagaagaagaagaagaagaagaagaagaagaagggtttgaagaatccgaacaataagaggaagacttgtcttaagaagaacgtgaatgttttaaagtatccactcgctgatcattaccctcccgaccaagtttctcaactgactcagtcctttaaactccatgtctctaaattccaagaaaggcttcgatttcttgagtcgcagaaacagacaaaaccggatcatcagagtttaacaccatcctctttgaaccctagacagttttcgctgtttatgtataaccatggagacaatactctgtctcagatcccagtctctgcatcaaatttcaatcagaattatttctcagcgttacttgaacaatctgagttgaagaatcagttaatgaagcaggatggttatgatcagaatcagaacatgaggatgggtgacatcaccaacaacaattttcaacttccttacttctcaaagaaagaagcggtacaagaatctgtgaactactttgggatgaatcagttgatgctgaaggagttatatggttgtgatcaaaacatgtgtannnnnnnnnnnnnnnnnnnnngctttcaacatccttgcgtctcaaaggcacaacattactcggcggtagaaggatctgtcaataaccaacgacaatctgagttaatgcagcaggagctttgtggttatgagcagaacatgtgctttaccaacaacaattttcaagtctcaaacaaagaagcggttcaagaatctgtgactaattttgggttgatgcagcatgaactttatgggtgtgatcaaaacatgtctatgggcaacatcattaacaacagctttcaacagcgtttcaaacacagaacaagaatctgtgaataacccctggttgaatcagcttgatgcagcat

SEQ ID NO: 163744 - DNA, 508 bp, Arabidopsis thaliana landsberg
atcggcagcattccgcaactcgagccgcacgatgtgctgaccaacatcaaccgtatggtcgactacattcgcaaacgcgcaaccggccgcataacttttctaatcgaatgcaccgcctctgcaccgatagtcgcaaatatttcgccgccgctattggactgggtaatagaaaacctgctcaaaaacgcgctctatgcgatggaaggaaaaggttccatcacggtttcaataaaagaaaatccgcaggatatctatatcgatgtgcaggatacgggcaagggaatttccaagcaaaatatcaggcaggtgttcaatcccggattcaccaccaaaaaaagaggatggggacttggattaagtctttctaaacggatcatagaacagtttcataaaggcgagctgttcgtgaggacttccgagccgggcaagaaaaccacatttagaattatattgaagaaaaaactcgcgggttgaccacattcaccggtgtgccgaccagaggcatctc

SEQ ID NO: 163745 - DNA, 321 bp, Arabidopsis thaliana landsberg
gtgaactggccgctcagccgagggcaggtcgttcgtgccgacgtcggccttgccgagcccaaactgttcgtggtcgtgtctaataaccgcagaaatcgacagctgggggacgtactcgccgcgcgcctgaccaccagccccaaaccgcctctgccgagcatcgttgagctgaccgcagaaaccctcactgggcgggtcgtctgcgacgacatcgtggcgctctaccaggacgagatccgcggcgtcgtcaccgcgctcagcccgattacgatggccgccgtcaaccgcggtctggccgccgctctcgacctggaccgttaa

SEQ ID NO: 163746 - DNA, 1469 bp, Arabidopsis thaliana landsberg
atgagcaattcatctggagctacgagtggagcatcaaatgttggacagagaagaagattcgtgggtgtgccaaagatgtgttggtgtggtgctactatctcggcgctcatgtctaagtccgcttcgaatccatatcgacgttactatcgttgtgcttatgctgcaacacataaggtaatgtgattgatatttgagttgtttcatacaaatttatagcctaattctctgttctttgtagcttgttgatgataaccacacattcaagtgggttgatgaagcattgttagatgagatagagagattgactcgaagaacggctgcacttgaagaaacaatgtcccagattacaacagagaatatggaacaccaaaagatggtttttgagaagatgcaaatgaagctagagagagagattgtggagagtgtagaagaagaactgttggaatcaaaatcaagcatgaagaaaatgtcgattgctgtcattgttggttgtatgatcatgctaggtttgagtaaggtgataggttaggtttgagtaaggtgataatttaaatctagtgtattgggttgttgttgtttgtttgttttcgctttctgttattgttgttgtagtgtactaaccgttgatcgagcttatgtttgtgtaatgaaaaacccaatttggattcttgtgcttgttgttgttgtttgttttgttgtgtttgagaatgagtaaaacaaagacaaatggccaaagaagacaaaatagattcgttgaatgagtcaattggtgtattctaagaaatcaccaaacattattgaggcaaagaacatccgaaacaaagaaatgaaacatccataaccaaaattacataaccgagttaagttttaatcagatggtaaacaaaaactagacccatctaatcctcttacacctaactaatctccttctaatcagccttgagacatcacaactccttgagacggttccacttggctgccttgagtgccatgagtgctagggcctagactgccttgagacatcagtccttcaaaggcctaatacacattttaaagcaaaacaagagtcaaactattttataggcttaatacacgttttaatgcaatgcaaaacataaccaaaaggctaacctgtactgaagactttttcttcttgtggaaccttgagttgtgaccagctgcattacaaataccacaatgcattacccttttcatttgttttggtgccatcttagtaggagtctcattctttcccttttttctcttcttgtcttttttagtctcttttcctttctttctcccaggctgtggtggtggtggtggtgcatgcacatcaggatgttctgtcgatggccaaaatgcaggacctctctgcggaaataggccgtctgtgtaatttttcttccacatgggtgtccgaaaccagtgacacacataatcttcaacctcttgcttcttgtttaacatga

SEQ ID NO: 163747 - DNA, 565 bp, Arabidopsis thaliana landsberg
gagtttatgcaccaactttctgatttacatgttcactctactaattgaagggtttatgttaagatacaagcggtatataaccatactccaacccttaacggtaatgaaaaaactatgctattggttgattaaaaggtgctcttatatcctaatgttattcttagttttctgttattataaagtctgtatatttgtgttaaccagagtgatgatctattagttgtttttttctttagtgcaactgtatggatgccaaacttccaaaaggctcatccctctacaagtttcgggatgtacttagagcattttgtggtactacatgtctgactttaaagtgattttgtctcatagtgaagtcaaatacgccctcaaatctattcatatcaaatgtatgttccaaacacaaatgtggtcggttcctcttaggtcaattagaaacttctttgactttgtggctctcgatgaagtgaaatatgctacagatgatcaatataattgtgtgacaggtaactatcctgaaccgggttttttatctaaggacaatattttaataattgaaaataat

SEQ ID NO: 163748 - DNA, 807 bp, Arabidopsis thaliana landsberg
cgacgacatctgaaattagggttcccattatccgccgccgccgacgacaacaacaacaaccaaggtattacatagggtttctacagggtttcttcctctctctcgttcttctctcttcttctaaagggtttctagccaccgtaattagtagatctagggtttcttacgggtttttagccgccataattagtaaatctagggtttatagcgttcatgattcatatctctttctttctctgttctgtagatgccctatagttactctcaaccatccacgtccgaagctagttggaatagtggagaggcgaatgccgatgcaaattggggggttccagaaaaatgtttttgtggtaagcctgtaaaacttaaagtgtgcaaaactggttacaggcaaggcgacaaagtctacaaatgcccaatgcttaaagtaagttattgtgttttcatttcattggaacaacaaagtacaagtgaattatatttatgaagtcttctctctttcgcaggctgaagagtacgagtcccgaaaccaccttattcagtggtgggatcaggcggtaactgaggagcttgagaaggtaaatcacaaacttgattccgcactaagacatggacaactagcatgcaatcatgctttggagtccatccgggaaactattcaactcatgcaaggtgaaattgaaacccttaaagaaaggttactcgccaaagaagtcgagattgataggcttagggcattactttctacatggtgattatgatatgttttatgttattgaggatggtgtatggcatttggattttatg

SEQ ID NO: 163749 - DNA, 402 bp, Arabidopsis thaliana landsberg
cttgtatttagctttctgttttttatatttgttttgtgttgtgtgtccaaagaagataaatgtcataaaaacactgtagcttttcaaaacaacctttttcaaagtcatagtattctaaaagtccattgcaaatccagaagcgacgatttgggcgaacattttgtgaaatttcaagatactgcctacaattttagttttcatgataatctccttttcacgacgatattcaaatgtaacttgtggaagggagctaggatggagtatcataggaatattacagcatatgaaggtgatcttctttatagatgtggtgcattgtactcatgggatataagagatgatgctatttacttgtcagaaaacgataacccggagaaactcatgtatagttggattaaaggt

SEQ ID NO: 163750 - DNA, 544 bp, Arabidopsis thaliana landsberg
atggctcagatggcgaaatccatgatagaagtggagatcaatgtatcagctgatatgattttcggaaaatcattttccaagctatcaagtctacttcacgtagcgtaccaaaactatctccagagaaaatacttagcgtggaggagcatattggtgatggctgtaaaggcaccaagaactggactttgtctgttggtaaaaacataacttcttgtgtctcaacttactataagctactctatgtatcaatctaacttcatgggtttgtgttacagatggaaaagtagagaaaatgaaggagagagttgaaatagacgaggcaaacaaatcaatgactgtgtttgtgttcgaaggagatgtgatggagaattatagtagtttcacatgcaatcttcagatcataccaaagcttcatggtagaagtatagcaagatggagctgggaatacgagaagcttaatgcagattctccagctccgaacaaatacatggattttgcagtctatctcactaaagacattgaatctaatcttctcaaaacataa

SEQ ID NO: 163751 - DNA, 676 bp, Arabidopsis thaliana landsberg
atgcagatcgggttcctacccgatgtaaagcatgtcgcccacatcggatcgaacggttcccgcgaccaatgtgccaagctgggtacgctttgtacatctgtacgtatttttccgactttatatacgtattagctaagtgtactcatcattagtaaaacaaaacatgtagatgggtgacttcaaacctcaagaaaacgagaatggtcaagtagtttctcgagcagatgccaacaacaatcaaataggagaaggagttggattacaagagttgttgcctcctaccgacaaaccaaagcacaagaagacaaggcgtaaatccgagacggtctcacaaaacggttctccgcctaggcgaaacagcagtgcctcagcatcagatatgcaaccaaaaaacacaagacgtcaccacaggagtaggcacgggtcgatagattcatcgaatgatccatcagttaggaggaggcgtgttgtctcggttaccacccacgatatggaaggttcttaccctctttcagatagttctactcatagtagaaagtctacatcacgtcataggaagccaaaaggatcaggaggaggagagctatcaatgaagaagacgaaagggaaaactgagaatcctattgttgaatcagtcgatacatgtaatgataataatatcagtgacaaagagtaa

SEQ ID NO: 163752 - DNA, 2751 bp, Arabidopsis thaliana landsberg; identical to SEQ ID NO: 921

SEQ ID NO: 163753 - DNA, 1556 bp, Arabidopsis thaliana landsberg
atgggcctttatagaaccaaatcagtgaaaactactataaaaaaaagtaagcggttggatttattacatgaactgggcaacggtcaggtccaagatccaaacacaaagcgacaaaacacaagtccaaagaagaaaaaatatatttattttaaaattaaatttgataaatgcaaagcgagagaaacaaagagagagaaacgcgagccctgaatcaaactccctcgattttcacaaaaaccaacccaaagaaaaaaaagaaaagaatctgacaattcaccaaacaactctctcaaagtcttaaattaaaattttttgtcaatcaattcacaaactcaaatatctttttatttttcaatataaattttccaaggaaaaaaagaaaagtagaaaaaaatcatgattatgaaagaaacgaatagtcagaggcaaaacactgttgttgttgttcgttcgattgttgttgctgttcttcttctcacgatttcatctttctttatttcttttaatattaaaattgttctcggtttatattaatgatcttgtcgatattgcgagactaaaatgtttaatgtttttgattttatttgtgaaattcccaatcacattcttagtagtagagagagaaaggttttttctttttggtcttttggtggacagatttttattcttctttacttcttcttcctctttttcgtcaaaccataaacaataatccaaaccctttgttcttcagatatgttcttctcttgacacacacctaatctttctccaccaaaatttccgaccaagtctcatacttttgatctgtttttcaattttctcaataagcccaagtatgtatttttttcttacccctgactcaaatcaatttcatcagtttttgtgatttctagggtttccaattttgtggatttggggattgttgcagaaaatggaaggtgggtctgaaaaaacaacacctgaaggttgtggtggtgagagtaagtctaaacggaaaatgaaaactgctgctcaacttgaagttcttgaaaacacttattcaggtttgtttctgtcttcctccattgtttttatatgaagtttctgttttgtgtttttataagtgaaagttttgtgttttaattttattttcagctgagccttatccttcggaagctataagagcggatctctcagtgaaactgaatctttccgatagacagttacagatgtggttttgtcaccggcggcttaaagaacggaaatctactacgccgagcaaacgtcagcgtaaggagttagtaactccaacggctatggaatcctcggattcacccgtcaatgccggtgatttagtggcgggaaatgagcttgattctagaagagctgctcgaggcagtggcggtagtggtgtgacggttgtgaggcggtttaatgaaccgtcttctgctgaggttagagctattggttatgttgaagctcaattgggagagcggttgagagataacggaccggttcttggaatggagtttgatcctttacctcctggtgcatttggcatgcctattggtatataa

SEQ ID NO: 163754 - DNA, 1375 bp, Arabidopsis thaliana landsberg
aaccgcctggctcagcttaaggtttcttctacggaaattgccgaggtttctcatgttgtctccaactcttctccgtagcaatggcgtaagagtttcaagcaatctgattcaagattccatagaaccgttggattccttctggagaataggatctcgaatccgccatgattctttgactaccagaagcttctcttctcaaggtcctgcttctgtcgattacaggtactttaatattctccattttgatctcctttattgtatctgaatcgttaatttcatgagaatatgaacaaagtggaagaaaaaaacagttcggttttgcaggaggaagagtttcacaaattagccaacttcacaattaatcaccttcttgagaaaattgaggtatttgaagctggaacctttttctctctagggttcttcgttttacttgagattgcaatagcttacactatgttctacttgcatgattcatgttcaggattatggtgataatgttcagattgatggtttcgacatagattatggggtaaggattaaactcttttaagcaatttaagatcttgttcatatttctggaaatctatgtgtacttattatagtcagtccttttggctgtttccaacagaatgaagttcttacccttaagcttggatctttaggcacttatgtactgaataagcaaactccaaatcgacaaatctggatgtcttcacctgtgaggtaaagattctttcttgccttttgaaagttgctaactttaggcgcctagattgaatttcgcatctggattatcatgttctgctctctcttctgatttttgtactcatgatatttggagaaatgaaactgtttatgactgtatagtgttgttgctcttgactttgtgcttccacatcttagattcacattaatgtaatcttcattcttccttttgtctcggtgcagtggcccttctagatttgactgggaccgtgatgctaatgcgtggatatatcggcgaactgaagcaaagttgcataaactcctggaagaggagttagagaatctatgtggtgaaccaatccaactctcataaagaaggctttaaaacaatatttgtgagcgaaagggtttcatctatgaacttgaaactgctataccctgttaaaggtatatctatgaaacatccagaggaataaacaaacaaggcagaagacaaagttgttttagtgtgaaaactgattagtgtttgtgaatctatttttaaacagtaatgtctcatagtgacattgttgcaagtctctttgtttaatcagagctgaagctgccttttacagttttacgcgttttagatgaaaacatttcttttgaacgacaaaagtcctacatttga

SEQ ID NO: 163755 - DNA, 737 bp, Arabidopsis thaliana landsberg
tttcgccaaaaaaaaaattgctgttcaaaggaaaataaaaagaaaaggatatacaaggaaattacaggacctcatgagtcaaaggtatagagattttctcacttttttgaatcgtttctgaaaaagtgccataactctaataaattcgatgatttcgtatcatctaatttgtcgtgcaatctttttgtcttttagattagatttttttttcattaatggcatcacgatatgcgactaaatgtttcttctcgaacttaacgcaatttgtgaaatagcttattagaggtactattcaataatcatggattttaaactcgttgcttcctctggtttcgtttacaagggctttgtatgaatgtatggttttactgtctttttccagatattgtgacaccatcaccatggactatgaagaaaactccattgaaggaacatcagattatgtggaacccataactcctatgatctctaaaggagacagtggaatcattgcaatttctccactctgtgaccactacaataatcacatgaggattgattctcttactacttgttccgatgaagaaatcattgagtctttgtatcaaaacatctttagtattgttctctgccttcaaacagaggaatctggttatggttctcacacacctgtctctacagcttgccctggagctcccatgaaactaaccaagttatcaagaaacatcgatccaggattccaacggaaactcttctga

SEQ ID NO: 163756 - DNA, 263 bp, Arabidopsis thaliana landsberg
atgaagaagtttgggagcaaagatcatgacaaaactaaaaaaattattttcaggtttgtatttcagaatgcgatccattaaaggaaagaaatgacagaaggcacgaagagcaattttcgacaacagagaagattgtcaagttaattgctaagaacattagaaatcgcttaagcactctaaagagacgagaagttgagaaatatgcgggtggaatccaaatgtggtttacatcaaaataacatcgcggataacagatctcttta

SEQ ID NO: 163757 - DNA, 647 bp, Arabidopsis thaliana landsberg
attccgaatataatgggttccaatgtttcatctgtgcatgatgttcattcatcaatggaaattaccagttatggatttgttgtggaaatcgaatcaagaagacaatggaaatctctctttgattccatgaaaggctcacacaaattggtatacattactcgaaaactacctaaaacgtattaaatttttttaaccaaacttataatgtttgttttaaatcttatactattttgtgttttctaattttgttcacaagtaaatgacatgttttttctcttaaactaactgaaaaaattattgtggttttgaagctagtaattgatttcacagctgtatggtgtggaccttgtaaagcaatggaacctagagttagggagattgcttcaaagtactcagaagctgtgtttgctagggttgatgtggataggctaatggtaattactctttttttttattacttgaagaagaatcatcttatggtttcaagactaagctataattggtatgtattccaggatgtggctgggacatatagagctattacacttccagcttttgtttttgtgaagagaggagaagagattgatagggttgttggagccaaacctgatgagctcgtgaagaagattgaacaacatagggtttaa

SEQ ID NO: 163758 - DNA, 614 bp, Arabidopsis thaliana landsberg
atgttgcatatttgcgttgatttcaggtgatttggagctgttgacgagctatttggaagaagcggacctgatcacgacaaaccactcgaccaagaggtcgagtaggagcttcaggatctcaagagaccactcgacccccaggtccagccagaggacatcaccacttcacttcaccactcgaccacgaggtcgagtgccctcatctccatcaccagaccatcactcgatcacttcactcgaccatgaggtcgagtgtcttcacctccatcatcagaccaccactcgacctcttcactcaacctggaagtcgagtatcttctaacaccactcgatcacatcactcgacccccaggtcgagtgccttcaccttcactgccagaccactactcgacctcatcactcaacctagaggtcgagtatcgccatcacaacacttgactgcatactcgatgactagctttagagccttcttcattccgcactcaaccagacactcgagcacaaggaagaaaagaagactccagctattcactcgacctctcactcgaccccctgggtcgagtacagttcttaacccgtccaaatacttcatcgttttgagtattagtgaatag

SEQ ID NO: 163759 - DNA, 693 bp, Arabidopsis thaliana landsberg
atggccgatacattcacgattgcggaaaccaaggcttcggacgcccagtacgaggcggcacttcgtctgacgcgcccggaaatggctcacatcgaaccgcgcacgacgtatgtcgatacggaaacgtatctggatgacgaaatgtttcatcgtgaccaggcggcgctgttcaacaagctgccggtgccggttgcggtggggcaggatctgccggggccgggcacctacaagagcgtcgaaatcgccggtaagtcggtgatcctgagccgccccaaggacggcaaggtcaaggcgtttctcaatgcctgcacgcatcgcggcacgcagctggtcgaaaagggcgagtgcggtaccgggcagaagatcagctgccgctatcacgcctggacgttcaacctgaacggcaagctgatcggtgtgccgcgcgaggaaatcttcgagcagttcgaccgcgagcagtatcatctcgtcgaactgccgtgcatcgaagccggtggactgatctgggtcagcctcgaccgcgatgccaaggtcgacgccgacagcatcggtcgcgagctgatccatgacttcgagtcgatccgcctgccgcagatgcggatcttcaatacacatgaatacgatctgaaggctaattggaagctggttgccgatgccttcctcgagggttaccacgtcacgaggctgcactcg

SEQ ID NO: 163760 - DNA, 264 bp, Arabidopsis thaliana landsberg
atgccggaacaaacgtacatgtacgcctatgtaacgctgccgcaccatgaccagagagaacgctacactcagaaatgttatcgggacggaagacggattgtgttggcaagctacgacttgatgggatcagagagattcagtttcaaagagaagcttcgaaagtcaatgaaaggaatgaacgagtcggccgaacgatgggtttcggaagtgcgtcaaggtacgaccaagagacgatttgcgattagagtcttaaggacaaaactt

SEQ ID NO: 163761 - DNA, 843 bp, Arabidopsis thaliana landsberg
agaaatgaggagaaatctcctatgttgttgattccaaaggtggaaactggtttaggcctcggtttaagttcgagttcgataagaagaaaagggattgttgcctcatgtggctttacttctaactctatgccacaaccaccaacaccagcagtaccacaacaaccagcatttcttaagcagcaagctttacggaagcaaagaaggtgttggaatccagagttgcatcgccgatttgtcgatgcattgcaacagctaggtggaccgggaggtataaaagatcttcttcttgtgttcttgagtttggttacctgatacagaatgtgttgtgatatctttgtatgttttgttgtgttaataacagtggcaactcctaaacaaattagagaacatatgcaagaagaaggcttaaccaatgatgaagtcaagagtcatttacaggtaactaaaaagaaacaaaaagttgagatctttgagtcttacagtgaatgttactaagaactcattttctctgttatatgtagaaatacaggttacacatcaggaagccaaattcgaatgcggagaaacaatcagcagttgttttagggtttaacttgtggaattcttcagcacaagatgaagaagagacatgtgaaggaggagaatcattgaagagaagcaatgcgcaatcagattctcctcaaggtcctttgcagttaccgtctacaacaacaacaactggtggagatagtagcatggaagatgttgaagatgctaagtctgagagctttcaactggagagattgagatcaccataaatctcaagaaaccaaactcttgatcacggttttgttattcttggat

SEQ ID NO: 163762 - DNA, 587 bp, Arabidopsis thaliana landsberg
  unsure (1)..(587): unsure at all n locations
cacccactccttcctttacaaagagccccccttcgtttccccaatcatcctttctcaggtccctcacaatcnnnnnnnnnnnnnnnnnnngaatctccagatcgccggtgagaagaaacgacggtttccatcgttacatgaaaccaggggctctggctcagatccgtaacgctagaatcaacaacgctagatccaatttccccctgactcgttctctctcggacccagtcgacccgccttcatcatcttccgagagtcctattgccgcgacgccgcagacgataactatggatcagatgccccatctcttgagcaagatctacggtccgtatcgaatcggtaggaagaaacttggccctgcgagatctgcgatggtgaaattgaacccttctccaaattctatactcgaatctattaatggtaacagcaacgtactgaacaataatgatgttttagttgctcattgaatgaagcttaaagtgaaatttcccttcttctgtagattactttgtaactgatactctttggggaaatatcttcactactcatcagacttttataaataccagaatctcattcatgtttct

SEQ ID NO: 163763 - DNA, 231 bp, Arabidopsis thaliana landsberg
ttgcatacattgtttgtgaatttacaggcggttgttgaagccaaaggattgaaccctggattgatagtgctgcttgttattggaggtctgcttgtgacatttctcatagccaattacgttatgtacatgtatgctcagaagaatctacctccaaggaagaagaagcctctttccaaaaagaagctcaagcgtgagaagctgaagcagggagtccctgtgcccggggaataa

SEQ ID NO: 163764 - DNA, 8677 bp, Arabidopsis thaliana landsberg
  unsure (1)..(8677): unsure at all n locations
gcctgagctatggtatttgtggatgagtttgttttatgttatggctgagttattgaatgcttacggctgatttatggttatacagatgtctgaagaccaagcaagggattaccctccaagactttacccagaggaggattctaatctggagagtaaaggcattaatcacaacataaagctgggagatttccctgcaattagagaatcaataggaaaagatatatgggaagaactgaaagagacaccgcttggattaattgctaagcttgttgatagtcattttgtatggtctggtaagactgtacattatctactatgtagacagctgagaatactgaagaaggagctttgatgtatcgtggctggtcaacccatccagtttggattgaacgaatttcaacatatcacgggtttaaatacagatcaactacctacataaaannnnnnnnnnnnnnnnnnnnnnnnaacgttcttcagggaattgcgtgtgccaaccggtgaaggtcctattctagatgaacttaggcaaggcttagtaatgtgtagagcatgacctcctgaaaagcgtagatggtttgggttattgactcttctatccattggactttatggcttgcatactaactctaggataccatttgagagtgccaaaagagttttcgatgacgaagccatgaagacttattcatggggttgggcagcatttgaagcccttgtcgtttctataaagttgctgaggcctattggcaagacgtacaccgttagtggtatggctttcgtgttgcaggcttgggcgtatgattcaattatcaccatcggcgagcattttgggaacgtagttaaagcggatgagattccgttgcttagatggggaggcaacagtactcgtgcaataatagaatcggccattgctgaagataagtgaatggtggtgaggtacggttttggctctgttatgatagttattgactgagttatgttctgtttttttatcaaatatttatgttacggttgagttatgctctcttatgattgagttaatgttctgtttttttgtcaagtatgttatgtgacggctgagttatgatcagtgaaggctgagttatgttctcttttttggcaaatatgttatatgacggctgagtatgttatgtaatggctgagttatgttatgtgatggctgagttatgttctgtaatggctgagttatgtgctgtgacgcctgagttatactatggctgagttaaacatactgatgagttttattatctcttgtgttgtagctgtgtgtgcgtaaaatggttccaaaggctgagttaagcgagctaattcatacttggccaaacgaattagaagacctagcacttgatcacttgatcgaagacatacacgaggctaagtttgttaaaggttattgggatgtgaagacgaatgagaagaagaagaaactcgttaaagataaagatgcggatgtgtctgaatctcccgcaaagaagcaaaaagtctctcacagtgagggtgttcattctggtggaggagatgcacaaaagaagaaagaagaataagaagaaggaagtagctgtcgaatcagatgagtacgaggacaagcaggatgttcggggagaacgtcgttcgtggatgtggtttccaacttaatctctcccttaaactcaaggtttgacaccgctgataaaagcatcaaagaaatgtcctcctgtctggaggtgattggagatcaagtagaagagaggattgatgcaaagtttgaaagaaggtttggatctattgagaatgaggtcaaacagatgaaagagcatctgaaggtcattggggtaagcctaattggccaaactggcatagcatactcaacattaaactctagagtggttattagagaaatgttttcaacccaagaggagcaaggccaccctaaaccccaaactcaacagacaccaaaagttccacggaaacctacaaataaccaatatgttaatagtcctcctctggtaagctaatggctgagttattactttttatttagttatggctgagttatcttcatattataaggctgagttataacttttatttagttacggctgagttatcttcatattatacggctgagttataaattttagttagttatggttgagttatttgaatattatacggctgagttataaattttagttagttatagctgagttatcttcatattatacggctgagttataaatgttagttagatatggctgagttatcttcatattatatggctgagtttagttagttatggctgagttatcttcatattatacggctgagttataatttttagttagttatgactgagttatatttatacataggtatgagttttcgttatttaacgcctgagttttcgttacgtttatgcagtcgaaacaagctgtaatggtagagaatgatgctgatattgctgaggttggggtaagtaggaatcttgaaggagaatttgctaaggcctccatcgtgtctgattatgatttcattgagacttctcctctcaaccgccgtttacgctctacgacggcagcggggaaaatatccaaagcgaagccaccaccaaagcagaaaaaggagaaaacattaaatgagctaatcgagaaaccgccagagagaagaagaagaaaggctgctgcaaaggagcctaaaaaggtgcctccaaaggtgccaaagattacaattaaaaacccaaaatcatctgaggaagctaaggaaaaatttgaggaagccaaggacatgattctatacttgatgtcactgatcaggttgtatctgagtataatcaaatggtttctgagtctgatgaagatgaggaggaaaccgagaggctgcagagagtaaaagatgcgaggataaaaactgttaagctagccccggatgggaggtcattgattaaacccgatctaatgagcactaacagttttccagtcattggagacaacgggctgagctgcatgaggaagggttgtctgccttcacgagcaatctatgatcctctggcaccggttgatccggccaaactgcagaatcttaaggcttatttgacaagtcccgaatggtatggccctttatacattactaagttgataaatacgacatgcttacactatttgtttatattaactttctttactatttgttagcaaacaacctttggaatatgggatggacaaggtgctgttctactctgttatcatggccgaaagaaaggactggccagacccgaaacatggatggctgggtgatgatgtaagttattgttatattctgtctgagtttggctaatgttatggctgagttatcgtgtcgttctgtctgagttaaagtagataatggctgacttacgatgtaagttattgttatattctgtctgagtttgtctaaggttatggctgagttatcgtgtcgttctgtctgagttaagttagctaatggcagatttatttaggtgtaaggctgagttttacttggttacggctaagttaatgttgtgttttgtcttggttttatttttgtccagcacattgctgcgtatgtgaaaatcctcaccatgaggctcctgcgagatcccaccccatactacagcgaacgcatcatgattctagacccgtggttcacgtcaatgtggactagggattacacacagtggacgatgaagccgagagggtttctttcataggttctacgtatgaaacttgggtcagcggtacgggtggagaagacccgacagacaagaagtcgataacagatgtggatctcaagtatactatcctccaaaccggaggtaatcattgggtgaccatacacgtggacttgcctaggggtcacgtgcactgcatatgattgcatcgtcggatgtcatacaaaggaaagcgatggaaaaatcctggaacactgtaggccgttctcgaggatgattccacagatcatgagcgaaattatccctcccgaagtccgtgtcccgcaatacgaccaattttcattccagcggagggaccttaaaaaggtaccgcagaatactatcaccggggactgcggcgtttacacgttaaagattcttgaatgtttattgcttggtgtttcttttgatggcattactgattcaaatatccaggggctacaggttaggatggcaacagagatctacgatgaactacctcacagaattcccattcggttttatgagacatgatttgctttttcgaacatgtctgtgtcttttgggatttttagcatgtgattgtactaaatattgacactttaggattgataaccagaattatgtctgtatgaatctattgttatgttaattataacaaaaactaatgtaatggctgacttatcatcgctcgattcgttttacggctgatatatgctaacgtgaaggctgacttatcattgctcaaatcgtgctacacggctgagttattgttgtttaattcgatgtttagctgagttattataacgcggtggctgacttgtcatcagacaaatcgtttgttggctgagtttgtataacgtggtggttgacttgtcaaacccaaacttccctcccatcaaataaaccagacgtgactttaggactatagatacaccggtttacgacacccgaatagtcaagtatccaaacgtcgttataggaccaaacgtcgttacgttagaggaccaaacgtcgttaggttagaggacccaacgtcgttagaggactatatatacactggtttcctcttgtcttttcacttgtcaattcttagcaactacaactcttcattcttctcttgtcctttctctgagaaagaaaaccattccgagatcatggatgcatccggttcaggttcaggttcaaacaagcggcagtgtgtggatgacggtcccaacaaggggccgtctgtggatgacagccccaccctaaagctgtatgaacaggagaagcgtttcaaatgcgtcatctcttacatcaggagcaacataagggagacggaggaagcacacttgctcgatatcaaactgcatgagaaggaagcggaacttaaggtcttaaggaaagtggagaaattgggggacggatttaacgtgaaatacgagatagagaaagtgctggcgcaggttggcaaggcctacagagcgcagcgtgaacgcccggtgagtagtattgattgggacaaactggggtatggatcgaccggccgtccaaattcggagtctgattaagaatgaagatggcgattgatgtgattgtatcttcattttttattttcaattatattatatgtatgttgttggattccagtactccttatcctatgttatcataaactctgtcttttcaatttttaaactttaatttttattttatactcgcgtgtgtgattcacaaaactctgtctttcagatttatcgtagattaacttgatgtttggctgagttaaacatgtgactcaatcattgttattctaacgttaaggcggacttatcgtagattaacttgatgtatggttgagtgaatctaacgttacggctgagttattatattttaattcaacgttggttgagatagtattgagttgtggatgagttagtctaacgtaacggccgagttattataaatttaatccgattgtacgttgtggctgagttataatcgcacaattcgctgacttaatgataattgacagtacaaagaagttcaaattgagaaaaacagattaagctaagatcacagatacttgttcaggctctcatacttcttctctaacgattcaaacttcttttccataagaaagatctttttcgtttgagactcgacgcgcttattggctgcttccagatccttcttcatctcagttgtctcctcttttatcatgtcaaactcgtcacacaatgcaacagtccaccatctcttgaaaccgcatccttgaccgggacccttataaaaaaccaggaggttgattcatagggatacaaaataaaataaataaaataaagaacattaactcaagaaaagatgcttacatctgatatttcgtgcggacaactgaaaaaaagttttccggttgtaacaggatcaagagaagtggcaacgacaaccttagcattgcaatcacactcgatcggaacgcccttatcgcgcctcctgttttcgccgtacctcgttcgcatccttatttccatacggtcgagctcctacattaacacaaacatgatgtactcgacgttagatgggcaacgatttgtactattcagatgtggagataaatacctcatcaacactagattcgccttggaaaagagacctctgagccatcatcttcactgcaattagtatgttactaaagcactggttctatatagtcctgtctgccacaaaatgtactaatcaaacgacggcgtatttgtattggctgaataaatttcgttgtggctgacttgtcatatcattgcggctgagttttcactgatttgtggctgagttatgtcgtcatacagtatgtcactacttagcgtgttgctttgggttggatttatcgagattatttattatatcattatcgagataacaaacaacaactttatggggaaccgccagtaatgatttggtccacatgcacaggtacacacgcccgcagttaatattcaaaataatgcaaacgagttcgaaattattccttaactaaaccctccaataatcaaataacgttacggctgagttattcattaagatttcgtgttttggccgagttatgagataccatatgttattatgatatatcaaaccagccaccaaattgttggttatattattagcttgaagatgtgcaatttgaaaacagaaaataacttttattttcagcaagtgtcgattgacaaaacatggtctgtcaaaacctctaggaagtatgttgttggatatagtatgatgttggacaaagtaggatgttggataaagtttataggatatgacctagtttcacggttccactatttggaatgtggttatgatatgttaattacttgattttcacaactgttggctcaagaaaagcaatttcagggtttggccgagttataacaaagtgatggctgagttatgcctttattgtggctgagttatgttagaagatttcgattgttcgaactatataagagaaaaccaaatgttattatgagatttgaatacaagcattattgttggttcgatcgatgtcatcaaatcagtcagaatattgctgtgttttgcttttgcggagtttatcgagaaacaattattatgttattctcgaaattaaaaaaaaaaagagttaatagggaaccgcgaataatgattggtttcatagatgcacgaacacgtcaatattccaaataattcaaccgagttcgaaattattccttaactaaaccctccaataatcaaattttctgtttcgacgtggaataaaataacattacgactgaattatgcaataagattcgtgttttggccgagttatgagataccatatgttattatgatatatcaaaccagccaccaaattgttggttatattagtagcgtgaagatgtgcaatttgaaaacagaaaataacttttagtttcagcaagtgtcaattgacaaaacatggtctatcaaaacctctaggaagtatgttgttggatatagtatgatgttggacaaagtaggctgttggataaagtttataggatatgatctactttcacggttccactatttgaaatgtggttatgatatgttaattacttgattttcacaactgttggctcaagaaaaacactttcagggtttggccgagttataacaaagtaatggctgagaaattgggttagggtggctgagttatgttagaaagttctcaaaaaatattctccgctacgtcagatacgacgtcggtttgttacagagtctccgttattgaccagatacgtcgtcgttgtgacaaaaaccaaatgaacatggacacacttataaatccccaaaacgaaaccctaagttataaaattccaatttctgatttcagatccggagctccttcttgcttttcgtctccgaatttcccagctaaaaattaaagaaatgagtagcaattccgagaactcgattgcgagtacgcaatccgtcagccgttggggacgtgggttaccatcgaagtgtcattgcggattagacgtggtcatctatacatcgtcgtcagcaaagaaccctggaagaccatacttccgttgtcctacacgtttagatgtaagtatataattgatttgagggttttattggtttcgttgttaatcgtggatgtgattgaatatacaggaccatttgtttaaatgggtcaaaaatggtacatacgaagtggttgtagacagttggccgaaattggccggcttcgacagtgagttaagcgcggccaagtccgaggtttctgtcgagctagaagcgttacagtcgatggtgaaagaactgaaggaagaagtgatgaggagcgaaagggaaaaccagaaatggaaattgatgatcaaactttgctgcttttgtcttgcctttattatcattgtcattgtttttgctatcttaatgttcccaaaaatcaacgaacaaaggctttttctgggctactag

SEQ ID NO: 163765 - DNA, 1899 bp, Arabidopsis thaliana landsberg
caacagccgtaaacctaccaattcatgagcatcctctttttccttcagctttatgcatgataggtgaatgtggcggctgccatgtaaatggttacatctacaacggctacttttgcaatgaacctttctgctttatttggttccataaagagtgtgctgaggccccagcggagatcagccatagttcccaccgtcaacatcctctcctgctcaccaatgactcgaatgatggccgtccttgtgatctgtgtggacagaagctattgcctccttgttataggtattccacatgtgagttcaaggtggatttgacttgtgcgatgaaaccatcaccgcctgctattgaacatccgctgtgtcatcaccattcacttgtcttcttgaagaaacgagaggagaaggttccttgtgacttatgcaaggagtctattgatggaccctcgtattcatgtcttgaatgcgatgtgtacttccacgtaaattgcatccagctctccaaagaggtaaatcatccttgtcactctgatcatcctctcatgctcgtcgaatctgaatcacttacagataatgataagaagacttgttttctatgtgggcaacaaccgcatggtattctttatcattgttctatctgcaacttcacactgtgcattggttgtatcaaatcaccaccacctcttgttgtcgagaatgtgaagacgcacaagcatcctcttactttctttccaagaggagtctactgcacttgtaacgtttgtggggtaaaaggacttatactctcttatatgtgtcttcagtgtggttttgcggtccattgtagttgtgtagacttacctcaagtcatgaacataaatcgtcatgatcatcgcatttctttcacacagcatcttggtcctgggtatttgaactgtggagtttgccgaagaagtgtatgccaattcaatggagcttattcttgcttagtttgccccaactatgcagttcattcacggtgtgcaacaagatatgacatatgggatggtgtggaactggaagggaaagctgagaatattgaggatattgcgccatttaaggtggttggggatgacttgattcgtcattttagtcacagcaaacattctttaagactccacaagaacaatatcatttatgatgatagtacacgatgtgaagcatgtggccatccagtcgaatttggtcgaatatacaattgtgaggaatgctgtttcattcttcatgaaaagtgtgctaatctccctatgaagaaaaggcttgtcttttctaccttaccattcctattactgggaccgggtaatgatgtttgcaaggttttagattgcaagttatgtggaatgttttttactggtttcgagtacaagtcccaagaaaggaggcaaagcgatatcgatgtacattgtggttcccttacggagccgttcgtccatgatggccatttacatcccttatattttgatcaaaagcaaaaggagcttccttgcaatgcttgtcaaaaaaccataagagattatatgctttgttgtgctgattgtgacttcaatttgtgtttatggtgcgctagtctgccaaaaaagataaggcatagcaacgatgagcacattctcacgctatgttgtggtgaagaagcaaatggaaaatattggtgtgatatctgtgaggcagagttggatccaagtaaatggttctatacatgctttggttgtggaggcacattgcatgtggaatgcgtactaggagatttctcacgtctcatgccaggatgcaccattgactaccgggtatataccgtggaggtggttttcaataatcacaacactcgaccaatgtgcaggcggtgtcactctcgatgcaaggtttctgtaatccttaagtttcgtgagg

SEQ ID NO: 163766 - DNA, 213 bp, Arabidopsis thaliana landsberg
acaaataattttccaggaaagaagtataggtggccagaactggttgggaaaaatggacaattggcgaaaatgacgatcgaaagagaaaatcctaatgtgttagcgattgtccttcgatatggagaaaagcggattgaaaacttttgctgcaacagggtctttgtttatttaggttccaacggccaagttgcagatgctcctatgatcggttga

SEQ ID NO: 163767 - DNA, 631 bp, Arabidopsis thaliana landsberg
atgaagtacactcgaaaacaaaagacggtacgagaaaaagcgttccgtttcgctacaaaagattggtgttttctgttttcaagtttcaacaataattaaaacgttaacctatatttaaactttcagaaaacgctaatctgttctcaaattctaattctttaaacgtaatcaaattcttttaagaaaacaaaaactaaaagagaagacaaacaagttttcttgttgtttgaagaaagatcatctcatgttctgtttgcatcttttacacaatctttgaatggcatcggtaagatctttctcatttctttctcatttgtttcacaaatttgatacaaaaaatagcattttcatgtgtgttttcgttggattataatagaaatcaaacatttttgtgattggaaactttcagaataatcaacaacgacaacaacaagatcgaccattaccaaaatttggagaatgggacgtgaacgatccagcatcagccgaaggatttacggttatattcgctaaagctcgagacgacaaaaagacaaacgcaagtggtcgtgccgcctcacaacgccgtgacaataacaaatgtcaagatgaacctacggtaacatttctaatcccaattgctcaagatttt

SEQ ID NO: 163768 - DNA, 390 bp, Arabidopsis thaliana landsberg
  unsure (1)..(390): unsure at all n locations
atgaacagccttgagccgatttctgttgagacaagcaagccattcatcggatacctatggggtgcgcttgctgtgctcacctgcccctgtcatctgctaattctcaccgccgtactggccggaacgaccgctggcgctttcatcggggagcactggatcatcgcannnnnnnnnnnnnnnnnnnnnnnnntcctgtctgtgacgcgactgcttcgagccttcagaggaagatcatgtccgctccccagtcagccgaaagctggttgtttgagcttcaccactggcctggaggggtaccgcctcgaataccaacaacccgatcctcatcaactgctgcgtctgattcaaggagattccgactaccgttatcttcgcgccaaaaggcgacag

SEQ ID NO: 163769 - DNA, 1652 bp, Arabidopsis thaliana landsberg
atatcacacagaaaacacaaacgacgacgaagaaagaagaagatgtctgcaacggcaattctctctgtaaataaccctaaagacttagtcaccggatttggtaatcggacatttcattcccggagcaactttgctaaacccagttcgagattatttccttcttcttcttcttcgatgaagcctttgacccttgcttctagattctctcctttgatttcaacaaatagatcctttaaatcttcagtcttcaggagatttgatactctcatggagtggcaagaatgcaagtaagcgatttatcttcccctctgctcttgactctctctgacttcatgtaatttggctagatttacaaaaaatactcgcatttttaagaactatgaatctttccttggagagttttcgaaattgcagaatcctgagaggtaaaagatctgattttgatatacttatggtgatcaatgattgctctggagtttcaagttcaatactttttatcaacgttagctttagatagtcaaatttgatgtttttaattgttcatgtcatttcttgacaatgctgttcaaattcaagctatgaattttatttggctttgtttagtcaagaaggttcttttagtgtttgaatctttatttttgtggagaatttcagagtaaagatgaaggtagaagtgcctgtatcagttgcttatggactctactcggaacgagaatcaattcctaaatggatgacatttatttcatccgttaaggtaatgatgtttgttcatatgatcactctttctgttggcaaatgatgttcagcattggattttgtttttttatattacggtttagttctgcaggtattgaaggacaaacccgatttatctcgatggaccttgaaatataaagcatttggtcagaatcttgagtacgcttggcttgctaagaacttgcaggcaagtatcatgaacaattgaactggttataagtagctccattcattcttatgtatggatctttaagaatcttttgttatgacttcaatagttttggtatatatgccttgatatcaagaacatgttaaacagctttaatactctctttttggatctcgtaattgttttctagattttgtttcctgcagcctctcccaaaccaaaaaatacactggatttctcttgaagggcttcctaacaagtaatagaactgaaacgaatcactgagttctgagtctcaaaattcatctcttgaatcttgatgttaacgtcttgctatttttacaggggcactgtccgttttttcccgctaggaccttcatcatgtgacgtagaagtaagtttctattgttcatatcatcggttttcgagttcccgatgatttttctgagttctttgctttgtttgcagctaacctttgcatatgaagttccactgctacttataccatttgcagcggtaagcaagcattctttattcaacatgtgaaaactgtatcaatacttgatgatttagagagtgattcaacacaactaaatgtctcaaatcctatcttctggtaacatttcatatttgctttcctcaggcgcttcaaccgctaatgcaaggattgatcaagaacagtttggagcaatttgcagagatagcaaaaagcacaaagaccacttag

SEQ ID NO: 163770 - DNA, 2363 bp, Arabidopsis thaliana landsberg
atggcctctagttctatgagcttgagctcttcttggacgtctaagcaaaacaagatgttcgagagggctttagccgtttacgataaagacactcccgaccgttggcaaaacgtcgctaaagcagttggaagtaaatctgcagaggaagttaaacgtcactacgacatcctcgttgaagatctcatgaacatcgaacaagacttagtacctttgcctaaatacaaaaccgtcgatgttggaagtaaatctagaggaatcaatgattttgatttgaggtgaaatctttttgtccttaccaaatcttttagagtttgtggtcgtttttgtgatttctatagtgatttagtagaacatatgtttagttcaaataatttcaaaatctgattatataaatgagttcttttggtagtagtatattaaaactagtgatgaacgttggactatataacaataataatataggtataataataagaaacatgcaaccacacgcaccatcccttctatttccggcattctcattaaaaggaaaggagtcacatgaaatctaatcctgtttgcgcaccatcacatgcacattgtcctcaacttttgaatcttatatgaatgatataatgttatatatgtatatatctagctaattctatattattcgaatatgagtagatataacggtatatatctatgcaaaagtgattctgacttttcactggtcggtaatcaacaaaagtggtatcttttagtgttaagttatattaattaatctattgtttttgacaggttattgaagaatatgagaatccagtgaagctgctacatgatgtgaagattgctatatgtctaaggattcaaagggatatgttttcttctttcttatactgatgagtgtatcattccctttccattgtgcttcttatttgttctgtttaatcttatttcattacaaatcatctagctatcttggttttgtttatttataattctaatatatttttgtcaaattctcatttttgttttgtctatggactgggatttatcattagacagtatagttagttcacatctatttcacctagtaaaactgatttccatttcgtaatctcaatttccaaaacttgctgaaaatgagagtatttttaccattaaaaacgtatacattgtaccatgattgaagtcccaaatgcaaagacttgaatattcccctgcaaaatcctccaaccaatcatcagctggttagcatctcgatctagagctttgataaatattttaacaatcacttttgtttataaaataaactaaagcttaaacatcacatgtaattgcatacatttataacgtttttaatttcttatagacaaagcattcacaagtttaaaagaaacgaatatcaccaattcactatatggaccccaaaaaaaaatgaaatcgtaaaccataaaactgttgcttaatttggaactggcatgaaactaaagccatctcacgtcgtactattttcggcgtaaccgccaccaacgttggatcgttccaccagtagataaaaccaaattttaaatctccttcacatataaataaggaactttaaattaaaccaaacgaaacacgaaaatcacgtacgtaaacaaatagacttttgtctcttacaagcttaaatcattcttgtttttataaaccaataaaagaagaagaagcaaaaaagtttgccggagataggatggcgaaaatatcggtggccgtgctgttgtcggtaatgctacttgtctcgataaactcggtggatatcttggccgaggaacaaccaacggttgggcagagggtagactccgccatgacgagtgtcaccgatgcattcaatgaacacggcggcccacaagccgttgacaccgtatcatccaccttcaaatccgtttacggatggttcggtgataaagccaagtatgtctacgattcttttgaatatttttaatctttttggtacaaaatcacttttactagctatcccgtaactttaatttttatttcctacggtacatagttacatataccacaggacaaaaattgaatttagattcgatatatagtaacatgataattcatggtacaaaacaccatagaaacccatggcgttataaacctattttgatgatactatgatttctatatcaatatactggtagcgtacaatccatttaatagtaactcacctaggttaaacattaagatctgaaaattttaaattattctcttaagtttttatgactttatcaactgtaagcaccgtttttgttttaataaattccataatccctccttaatatatgatttgtttatctttcttcagggaatggggaatccacttctaa

SEQ ID NO: 163771 - DNA, 1028 bp, Arabidopsis thaliana landsberg
gcgggaaaccctacttttctgtgttcatattttcagatatcgggaagaatcatcagctgagaaagaagtatacgatccaactcggtgagaatgagctcgtgcttaaggtatatgttcatgtctcactgtttaatctgagttttgtggctacttcaactgaaaagagaagtttatttcgattgttgattggctttaatctttttatgtgtctgtcttgtatctacaggagttagatttgctggaagaagatgctaacgtctacaaattgattggtccggtgttagtgaagcaggatttggctgaagctaatgcaaatgttcgtaaacgaattgagtacatctctgctgaattgtgagtttcttttcttttaatgtgattgaagcaaatgcagttcgttgagaaacctattttgggattgttattgtaaataaagaacctttctttctttctaggctaatagtgagtgattgctgttcataagtagctaaaatgttttcacttctagctatgtaacaactatgagagatgttgataaagtgtttgagctatagtgttgtgacctcaagaatattgttgtatcctttgcaggaaacggcttgatgcaattcttcaagatatggaagaaaaacaaaacaacaagagagaaacggtaagacatctgcctctcatgcatttatatacttaattgagtgcattgaattagtgatactaggactgctacaccaataatagtccaaacattgatgctcagtatactaagctctaaaaagatactttggtagctattgttgtcagtttaagcctgcccggaaagtaaatacttgaactttgttatctcctctgtctcgttgagtggcctactggccttggcgcaatatgaggatttgctgtttctgcactttcttggcttttaaatggtgataatgatcctatggtttcaatttatggaatcaaaatatttgcagataatgaagttacaacaaaggctacaaactatccaggcaggaaaagcaaaggcttgattgagc

SEQ ID NO: 163772 - DNA, 416 bp, Arabidopsis thaliana landsberg
atgcattagatttttctaatgctcctgccgaatcaccaagttcggacactgacggctttttacctctaactaaaaaacatgttgtaattcgcaataaggtaaaaaataaagaaattttgaatgtacattgcagatccagtgaagatgattttggaatggtccatattccttggaatagcacatgggatttcagctttcatgtcaacttttggaaaattacgaaatttcgttgtcactttacttggcataatggcggatctcattacttttatatttttaaagtatacagagatgataatccagatggacgttttcccgtttgtaaagaatgtatatgggaagtaggaacagatgatggaaaccctatttgtcgtattcctcgtgataaaaaaagcaatccatactgtttcaaatgg

SEQ ID NO: 163773 - DNA, 506 bp, Arabidopsis thaliana landsberg
atgctcaagttagcaaaatacgacaagaatcaattaccatctggtgtcaaaaaggttgttcagcctaaactaaactacttatttttctatgttttacattcattgtaaacaaaaacttatcgtctgcatatgtttttttttttttatctcaggttgctgctatccctgaaattttcatcccggcaccaatacttgctaaaattgttagctacgttgccgaaaatggcgtggatgctttgaaacccttggttatggctgatccagcatttaaggctgcagagtattccaaggaaacactgacttgtgttctcatagacaaatctcgatatttcatgtggtggtccatgccgcattccatttattattatttcttcacaaactgtcttggagacaacaatccacatgctttgaaagctgtattgtacaaaccaatagcatatgagaattttgttgccgaatgctatagatctaccttatgggcaaagctatacggagagcattaagga

SEQ ID NO: 163774 - DNA, 387 bp, Arabidopsis thaliana landsberg
atggcaaacaagatggtcgcatctctttataagaatacgttcatgatgattgctcttgttctcatccttttaatttcaggtataatcttttaaatagcaaaataagttttttttttcatatataaaacttttatagatggttttcaacaaaaaaaaaattatcaaacaactaatgataattgtaataatttcataggttcagaagcaagatcgaatggaatatatgatccgatgtgtcctggagtatgtggaaatttggttaaaccagattgcaatggactttgccatgagttagggtttcctgcaggaggatattgtaaaccaggaaacacatgttgttgcaaaaagaaacactctggacctgttgatgttccaccacctgcttga

SEQ ID NO: 163775 - DNA, 544 bp, Arabidopsis thaliana landsberg
aatttggaaaatttgaatagacagatgcagcatcagtgttgcatgaaacaatgggttacataaaattcttacaagaccaagttcaagttctttcaaccccttacttcaaacataaccctcttgtaagtcatccatcatccttttgtattatcttatttcatttttttgttacacttttttcttggtatcctctttttttgttacactctatgtctttatcaataaaaccggaagatatttatttttccatgattcgaaacgactgttttaagacttaaaagattactattttgacggtgttgtgactgatgaatagttgatgtgtcgtcaggacgacgaagacaccggagaagtaaacccgacgatgaaagtgaaagagttgagaagcaatggtttatgtcttgttccactagcttggaccgtacacgtggcgaatactaacggtgctgatttatggtcctctgccatcttgtcaccactcaccagtcacaccaacagtgaaccagtagagattgtggaagtcaaatctcataaagataagtag

SEQ ID NO: 163776 - DNA, 612 bp, Arabidopsis thaliana landsberg
atgacgaagaaaaaaatgggttttatgtcatcaaattttgctttttttgtgataccaatgcttcttgtgcttttggctatttcctctcaagttgaagttgtagaatctacaggccgaaaactttgtaagtgtcgttacaacttacaaacacataagcatatacagtattaaaagtttgcaagtaaaacttctaaaaaatataaatttgaattcatttctcttttcttttagaatttaatgtaaaattatatgcaacaaaaacaacttttttacaatgaatacatctgtctttgaattacatttttgaaagaatcttgaagtgagatacacttgatgactacctcacggaatgaggctgagggtgagctagccatacatcagtctattgtagtagtttctgtctcccgtgtcgcacgtatttaactcagtcgatgaattcgtttatcaattgcagcgtgggcgtttaacggagcacctatcgtatttactccaccctcaagttcatgtggaggttctccggcagcagtaatggcttccgagtggatgccacgccgaccatgcagacgtactcgtcctcccggaactaatatccctgtttctcaatctccttaa

SEQ ID NO: 163777 - DNA, 477 bp, Arabidopsis thaliana landsberg
aaaacatctcaagaacagcatgtatgcggttcgacagtagtacaaactatcaatgctccgttacctctagtatggtcgatcctacgtcgatttgataacccaaaaacatttaaacatttcgtaaaaacttgcaaactacgctccggcgatggaggagaaggctctgtccgtgaagtcacggtggtttccgatcttccggcgagttttagcctagaaagattagatgaacttgacgatgagtctcatgtgatggtgatcagcattattggtggtgatcatcgtttggtccattaccagtcgaaaactacggtgtttgtgaaggcggaagaggagaagacagtggttgtggagagttatgtggtgggtggggcggaaggaaatactgaggaagaaactacgttgtttgctgatactatcgttgggtgtaatcttaggtcattggctaagttatcggagaagatggtggagctcacttaa

SEQ ID NO: 163778 - DNA, 1659 bp, Arabidopsis thaliana landsberg
  unsure (1)..(1659): unsure at all n locations
gttatgacgatggacgatggtaactccgtctacgtcggcggcctnnnnnnnnnnnnnnnnnnnnnnnnngtccgtcgcgtcttctccatttacggctccgtcctcaccgttaaggttaattttctcttttcaatatcctgatttaagtttcttaattaggatgattcaaattcgtttcgtgattttgaagttccaatcttattgtatgatcttatagatgataagctttagtagatatctatgtagaaagactgaccaagtgatttagataacatccaattgctagttgatatatcttacatgtgagctggtcagagtgtatattgacatatatgtgtactatttgagaattcagattgtcaatgaccggagtgtaagagggaaatgctatggctttgttacattttcgaaccgtcgatcggctgatgatgctatcgaagatatggatggaaaagtatggttctactgctaaagttttgttcttttgtttatattatcatgtacgtggtgtgtttatattgttgacggtattgagctcgtaatcagagtattggtgggcgtgcagtgcgtgtgaatgatgtgacaacaagaggtggaagaatgaatccaggtccggggcggttacaaccacacggtggttgggatagaagtcctgataggagaagtgatggtaattatgagagggatcggtatagtgataggtctcgagaacgggataggtctcaggataggagaaaagatcatcgctacatagagaaggaaagagcttatgagcattcacatgattttgagaggaggaatgatcatgatatggtagatagaaatggttataaggaaagagttttcgatggtgatgaaggagattggcgtggggataggtcttatgtggataatggtaggggaataaatgggaccagtgctcgcgaaggaaggagccaagaaacaaagagagaagataggtaaacttttgttgaaaacaatgcagttgtagacttcacattggatttcaaacttttagtgttcctcctgtttctttgaattgtgacattcgttgttcttgtaaaattggtctgctagtttgaatgagtcaaagactgggatgctagtcttagtcacgccgctaaaccaaatcatccacacctgttgtggttaagtttgataaattatcatcgattttagtgtaatggatttgaggaagtttcttgctcttgttggctttgtgcatgttaccgttttgaggaatgttttggcttgctttggttttgttaacatgtctaaatctttgtgtgttcttgttggattgacagtaccattcttgatggtggacgtggcagagatcacttctctaattcaagtggagatcatcaggtaaagatgattttcttagccatgcagtgtttgcataaattcattttataacttgcaacttctattacaggtgaaagaagatctggaagcgctgattaagatgcgtgaggcgcttcgagatgaggtatgaggtagtttatctgtgcatataggctgttggtagatttattttacataatcacgagtgatccaatgaatttatgggctactttcatttttaaggtgatggtgatggaagagagactggaagtaaaagaagtagtgtgctcagagctacagaagaaatctaag

SEQ ID NO: 163779 - DNA, 555 bp, Arabidopsis thaliana landsberg
gaggtgactacgatgcccaagtcttctcttttaggagagcttgaggtagaagttgagatcaaagctcccgcggcgatattctaccacatctatgcaggaagaccacaccatgttgctaaagccactcctggcaacgtgcaatcatgtgatctccatgatggggaatggggcaccgtatgcagcatcgtctattggaactacgttcatggtaatttatatgacttcgaaaatattttttgaatattgaagatttgattggtgaatgttttggttgtagaggggcaagcaaaggttgcaaaagagaggattgaattagtagagccagagaagaaactgatcaagtttagggtcattgaaggagatgttatggccgagtacaagagtttcttgatcacgattcaggtgaccccgaaggaaggagggattggaagtgttgtgaaatggcacattgagtatgagaagattgatgagaacgtggctcaccctgagaatcttctccctttcttcgccgagatgactaaagagattgacgaacacctcttatccgaggaatga

SEQ ID NO: 163780 - DNA, 1041 bp, Arabidopsis thaliana landsberg
cggtgattgaagctaaattctagaagatctgtcaactgcgtatgaaaaacatagtttataaggcagcgaggttacagcaacaacctccttggattgagaccacactgtgggcagtgtgactattgggacacaaaagaagccaacgcaaagaattcaaccacatcattagcacggatgtcttggtcctcacaagcatgtatcggagccaatgtcgttcttacaaatcgaggtagagatggtaagttcttttagctatgaacatttgttttctttacttatacaatgttaagaagttcacttgttttgttttcaacatttcaaaaagttgaattgggaagaccgcctactattggtgaagtttttctcaggactcataccaaaaaggatgacatttttgtcgataggaaggcgcagaaggttcatgaggtatataagaagaataagggagctaagttggctgtttttgagaatgatgaagggtctaatggtacttcgcatcgatcacatctatctctagaggaagatgatgagatcttcttttaggtaatgtggttaattctctgtacttttgatattatcgctttgaaactgacaaagactaatcctcttttcttttgattatgcagtcaactatcataaacgatagaggggaatactatagagttggaagcttagggagcatcaatgggaagcgaaagtacccaggaaggaagcagttctcctttcacaaccctgcactcacagcttgaggaagccaatcgcaaaatagaggaacaagctactctacaagcatatcctgaggcagaggctttccaggttgcagctgagcaagcagaggctttccgggttgcagctgagcaagcatagatcaagcgggttgaaaatgggcaacaagtagtgataaagcacttgaggatggtgaagaagtacttcaccaaaactgacccaaattttctcgccttcctcgagtcttctactgttttagaagatccaactgaggatttcccttagcttccctacttctcttccctgactttgaaa

SEQ ID NO: 163781 - DNA, 1187 bp, Arabidopsis thaliana landsberg
  unsure (1)..(1187): unsure at all n locations
cggctcctagcctctcttttccaccagggagtgctggacgnnnnnnnnnnnnnnnnnnnnnnnnttcaagatgagacttcaccaaactttgtgtatgatgtcattaatatctactttgatgaatccgagaagttactccgcaaccttagattattgttgtgagtttctttctttgttaatgtgttccatagttgtatgttgtttggttccaaaatgtatacgtatatatatgatatgaatgatgacgaatgcaaataaataaatgaacaggatggatagagaattctcggactacaagaaaataggattacacctgaatcagctggtgggaagcagttcaagcattggtgctcgtagggttcgtaacgtctgcgttgcctttcgttctgcttccgagcttagcaaccgcccagggtacaaattaaacgagctatatatatatacttctttgtattaatatataggtcaatatttaagtcaatataatgcttcataaatgtgacgatgcttcaggtgcttgagaggactggaggtagtagagcatgagtatcattacctcaagaacatgatgcatgaactcttccaggtacttacttgttttgttaatatattactcacattcacacaaacagaaggcaaaaacgtgagctaaatatacacatatatattgatagtaatatatgttaacaattatgtgggatttaatattttgagtggttgcagctggagcagcagagaatattagctgcaggagtcagatatccaatgtaaaattagaattttgtcataaaaatcagagaaaacctaattagtgtgtgatgatagtgtgttataagctaccgaagcgaaaccctttagcttcttctaatgatgttttgttgttaatctctccataaattcgaaatacattgccttttgtattttcaagtttcttctaatgatgttttgttgttaatctctccataaattcgagatacattaccttttgtattttcaagtgagatttacccatgtcaaaagtatctttacatgaacataaaacatttagtacccaaaaaaacagaaaaaagaaactgggctataaaatgaccgacagaaacggaagaaagtgggcccaatgtacggcccgttcatctcaaataaatgatttagttttgtttttgtttttttcattttagcaaagataa

SEQ ID NO: 163782 - DNA, 372 bp, Arabidopsis thaliana landsberg
  unsure (1)..(372): unsure at all n locations
atggcggtaagaacaaacaacgttttcttcaagtctctctcctttcatcatcaccacgatgatcagtttcagaaaaagtctctatagctttcttgatgtttgatgaatctctgtttctttggnnnnnnnnnnnnnnnnnnnnnnnnnnnnnnnnnnnngggaatgggatgtgaacaatccggcatcagccgaaggattcacagtcattttcagcaaagctagtgacgagaagaagaccaagaaagcatccggcgctggccctaatagtctggtttcaccttatagaaaccaaaactccgatcaaaacaataacccatagtcccaaaaccctaaagctaaggttgctttctttttctcattacattcaacttc

SEQ ID NO: 163783 - DNA, 619 bp, Arabidopsis thaliana landsberg
atacgaatcatgagtaaaagtattgtgtttttttctaccgttcttgtttttctcttctctttttcatttgcaactcccggaatttttgtgtgttttactaccaaaattataaaacaaatacaaacaacaaacttatcttatacattttcatatcaacctacagcgaaatgttataaaatcattttcttttatttcatgtttgatagcatcagcatgttacagaggtactcaagaaggagtgatgatcgctgcagcgagtgatacattatgggacaatggtcgagtttgtggcaaaatgttcaccgtgaaatgcagcggacctcgtaacgccgtgcctcacccttgcacggggaaatccgtgaaggtcaagatcgttgaccattgtcccagtggctgtgcttctacgctcgactttctcgagaagcttttgctcagatcgctaatcctgtcgctgggattattaacattgattattttccgtaattatttctcccaatctttatcacttaatattctttgttactttagaaaagcaggattttaattatgagtttgtttatttggatttcagggcctaaacgtcaatgaagctatcaaggaaaataatgctcaagtctag

SEQ ID NO: 163784 - DNA, 2437 bp, Arabidopsis thaliana landsberg
agtgcttctgttatccatctattcaatgcaagattcaaagaacatgttggagatgcatctgctgcttcagttgctctgtctcgatgtggtgaggaacttggttttggttttgttgaaaatgtaactaagaaggctaacatggaaaagcgcctggtaagaatgatacactactcggtaccatctggttttgatgtctcagtggtcaagatatctaattatgcagtgttccatgtagggtaattttgaagctgctgttaccacgtatagagaagctctgaataaaacgctcattggaaaagaaaatttggaaaccaccgcactgctgtatgttcaattttctcgcctcaagtacgtggtaagtaatgtgtcttgactcaaaaaggttttcatttcagttctgttaataacatgtcaagatttagagctatgggaactgttttttgggtcactaccttaccttcaatgtatcacaattttggaattctttcattatcttatggttttcttccttttcgtagattacaaatagtgctgatgatgcagctcagattctgttagaaggcaatgagaatgttcctcactgcaaattacttcttgaggtgtgttaattggctggcattttgaatctctttaaacttctaatcataatttctcacatggaaatcatatttctccactgaatttctgttaacgtctgttaccttttttttaaccttcaatcactgttaatctttgcgctaacaggaacttatgagactcttgatgatgcatggagggtctcgacaagtggatttgttagatcctatcatagataaggaattatctcatcaggcagattcctccgatggtctaagcgcagaggacaaagaagaaatatcaaatttatacatggaggtgaggtttttcttacagataggagattctgtggtcttttttgcttgtctatttcatttcccccccatagtaattgctcttggatttgagcagtttattgatctctctggaaccatccatgatgtgaggaaggctttgggtcgacacataaaattattcccacattctgctagagccaagttacgtgggtcccgtccttcaggaaatttatttagagagttgattcagagaagagagaagactcgagagcgcttgaatcaggacctattaacaaacaaaggcattagcagtatagtcgattcaccaccaaaagaaaagaaagagtcatctctagactcttatggtacccaatctaaagatgctgtccgggctgactatgtaaacactgagcctaatcagggctgtctgacttctggacatctagttgaaggaaacgataatgttattgagaaggagactttgtgtgagtcacagagcgatctgtccatgggattaaaagccaatgaaggtggtaaacgctctcatgaagttagcctaccgatccaagcctcaccagaacatggttttgtcactaaacaagctcacttctcgttcaattcagtagatactgtgaagtcagatgctatagtgatccaacctagtggctcacagagtccccaaagttaccaaagtcaagagtctctcaggcaaactggtcggaacaggtaccacagaagagatttaaaccagatgcacagagattcaaaacctcgttctcaagagagacctcctcagatgccatattctccagtcggaactggtcgtgaaattcttggtcagcacatggctgttactcatcaagacaatcgagtagcgctacaaagctcaacctctcagaatccgcaaaaccaatttcagaactctgcacttcagatgcatcctgtggttcaaacatccaatgcttatcctcaatctcagatacatggtcagcacatgattgtatcccctccagagtcacagaatccgcagaaccaatgtcaaaactctacatctcaggttcaaacatcctttgcttatcctcaaactcagattcctcagaatccagtgcaaagtaactaccaacaagaaggtcagatgcagagtcatgaagcttataaccagatgtggcaacagtattattatagctattattactatcagcaacagcaacagcttatgtctgaacagcctcaaccaaatcagaaccctcagccacaactagatcagaatcttgtgcaacttctctccaaacagtaccagtctcaagccaaaactcagtatctacaaccacaacaggtggaacaggtcaatacacagcaacagagtcaagaaccacaaaatcagcagcaaattcagttccagcaacaacaacaacaacaagagtggttccaacagcaacagcaatggcaacaacagcagtatcttctctatattcagcaacagcagttgcaaggagaagcaaaaggcgatgaacaaagactctctatgccggagggttccacaacaaacagtgatattcaaaaag

SEQ ID NO: 163785 - DNA, 816 bp, Arabidopsis thaliana landsberg
atgacaataacacacatgaagtttcttcaactgttgttatctttagtgctctttgtattctcaatgtcaaatgcaatgccaatctcagacgtacataatttttgcaaggaaacgtttgaagtagaattctgcatgaaatacattgggtcggaccaacgtctcctagccgcacgcgacttcagtgacatgcttttaattccggtaacgttatttaatgtgacaattttgattagtgatatgtcagattagttgatcacatatattaccaaaaaaggcaagatatttgttcagtgttggtaaaattagggataatagtatagattagttgaaaattttcaccacaccagttcttgtaagattacatggcctccaaaatactaaatagaagttatagaaatctgtggtttatacatattctacaaaagaagtattatttttggtttgtgattgagaccttctatcagatatctgagactcgaattcaagtgaccaatgcattcacacaaatcagcgatatccgccataggtttaatgacacgcttgtaaataatcggctcgttatatgcgagaagaaatacgagagcgcgggcactagttttcacaaggcttgtctagtcgtgcatataaagtcatattcatagtcggaccatatggcaataacccgaaacacgcatagctggctttgatgctgtgtgcgagtgcaaagatgaatgggcaaagcatggtctgaatcaagagtctcctctcgctttctattaccataacgttctgaaattatgcccaattactcgtcttattatcagctagctttaggct

SEQ ID NO: 163786 - DNA, 408 bp, Arabidopsis thaliana landsberg
  unsure (1)..(408): unsure at all n locations
atggctagaacaaagcaaacagctagaaaatccaccggaggaaaagctcctagaaagcaactggcgacgaaagcagcaaggaaatcagctccagccaccggaggagtgaagaagccacacagattccgtccaggaacagtagcgttacgtgaaatcagaaagtatcaaaaaagcacagagcttttgatccgtaagcttcctttccagagattggttcgtgagatagctcaagatttcaagacggatcttaggtttcagagtagtgcagtcgcagctcttcaagaagcagctgaagcttatttggttggattgtttgaagatactaatctttgtgctattcatgctaagagggttacnnnnnnnnnnnnnnnnnnnnnnnnnnnnnggaggattagaggtgagagggct

SEQ ID NO: 163787 - DNA, 2846 bp, Arabidopsis thaliana landsberg
ttctgttcgccgtcctcacacttgtgttgtcactcaaaatctctcaagcaaacataaaggcaacatcttacaggtaaataatctatagtttgtttactattaaaagattgttgttagtctccgttaataaccttgttcgtcaattttcaaaaaaaaaatatggagttcaacaaacgttttaaatcccttttatatcttgactctaatgatgtgtctctgatcgtaaactggttttagatatatatatatatatatatatatatgtacgtctttaataaaactgatttttagttatatatgtttgttcgttaattgtacatccagtatattgacttgatgacttcattgatgtgagattaattttatgtgtgatggttttatgagttgtttatatgttatgtctaagaaaacgtagaatgggtttataattgttgtgaaaaccaagagagaattttcctctttttttttttttgtaagaaacgtacttattcatgtaccgaaattgttgactagtagagaaaaaaattgtattgaagatttctattgatattgcagagggtggacaagtgactgtgtgtgtccgagagtttccccattgaagcgcttggccactggccagccttttgaagttgttaacacggctgtgtatatgcaatatgtgtatttttgtttatgaaggatgtatagatgtatagggtgtgaatgtctcatgcataaatccataatagatgtatgtatagggtgtgaatgtctcatgcataaatccataatagatgtatgataggaagtgaatgtgcggcatgaatgtgtctcatatgcataatagatgaatgatagggtgaacacgggcacagagagtgaacgtagagaggaaaacacaaaaataacaataaacaatcgctagtcaaaaaacactcaaaattgctattgattaaaaaataccaaacaatcgctagtctaaacactcaaaagcgaataaaaccaacaaaaataacaaactagcgctagtaaaaaaaactcaaaattacgattgagtaaaaaataccaaacaagtcaaaactagtcaacacaacttgaccaaaaaacaccaaacgaacgttagaaaacactcaaactacaaacaaaatgttcaaaataatagcagacacccaaaatacagtttatcaaatgggtaaaaatattttcggttaattcgcgggttcttcaattaatacccaaagtgaactgatctgaacccgaaaatgtatatatagacccgaatctgaaccgaatatccacatgcccagggctaacatgagatgttacaattgaaaactgtcgaattatatggtttttttttattcagcgaattcgtggcagaaactttcttctatgatctacggtttaaatgatgacgcggaaagatctctgctatctccacgtgttgaatgtcacatgagatatagtcacaattgaaaactgtcgaattatatggtctttttttattcggcggattcgtggcggaaactttcattcttctatgtgatatctacggtttaaatgatgacgcggaaaagatctcgttcttgtactatctccacgtgttgaatgtcacatgagatatagccacaattgaaaactgtcgaattatatggtctttttttattcggcggaatcgtggcggaaactttcattcttctatgtgatatctacggtttaaatgatgacgcggaaaaatctcgttctcgtcctatctccacgtgttgaatgtcacacgccggagaatgtctactgttttgattcttgcctaagaaaacaaactgttgtgattctgtttcaataagcgtttgggtatttttaagaagggctttgatatttggtgatcatgttgcctaactttaagggcccaaaccaagaaaacgaaaacgacgtcgtatggagttttgcgtgaactcaaagcggagatcctatcggagagaatcggagaagaagaaaaagaagaagaagggttttgttaccgcaaaacttcattgaagatgcaatttactcttgagttcgggtacactattactcgtttgtgtcatttgcccactctcatagtggtttatattttgatttcatttgattgactctcaaatgtcaatgcctgtttattggtcgggaaaaaactgaaaacttagtgctttagattatggtttctctatttgcttgggatattataatgcacagtttgtagcataagcctatctttgttttgcttattcagtgctaataaagtaatgatttttggattgggaaaatcataaatgactttagactttttacattccggtcatcatcagatcaattggtagtgaatgagagtttcgtattggtattaacatgaaaatatgtgcttgttgatctcctgcagtggaggtttagaattgctctgtgactccgtaaagattcataaagttaacatcaacttactcaatgattctgatatcgtaagcttctctcttttgatgatttttaaataccattgagtttattatagtcatgtaaaacttctcactggtgtttcattcagtatagtttaccatgaagcatttgctttcatgggttcgtacaaatctgatcaaagagagacctgagatgttcatgaaaggagatactgtgtaaagcttctctcttttctttccttgatttccagcaagaactctgtttttagtgtttaataacaatggtggtttggaattcataaacgcaggaggcctggagttctcgtgctggttaatgactgcgattgggaacttagtggtcagctcgatacaacattagaagataaagatgttatagttttcatttcgactctgcacggtgga

SEQ ID NO: 163788 - DNA, 384 bp, Arabidopsis thaliana landsberg
aatcaccttctgctgcaggacaatggcgtgccgatctacgtccagttgcgcgaccagatcgcggcggcggtggggcgcgggctgctcaagcccggcgcgcggctgcccaccatgcgcgaggtggcggtggcgctgaggatcgacctcaacacggtgcagcgcgcctatgcggagctggagcgcgatggccttctcaccatgatgcgcggacgcggcacctatgtcgccgatgcgccgccgccgccgcgcaatctccgcgccgaaacccagcgcttcgccgcccaggtcgcggcccaggcccaggccgccggcatcgcgctggacgatctcgccgcggaaatgacgcgcctgaaggcgcgcacatgaggcatctcatcccctttt

SEQ ID NO: 163789 - DNA, 836 bp, Arabidopsis thaliana landsberg
atgttgcaagatcaggcgaatcaagctgagttcccgcgtgaatttgtaggaatttcgcttctggaggagccagataagtactatttcgtcatcaggtcgcaaaggatcgtcgtggaagcagattcttcaattcaaatgatcatggagagccttcagtcttacaaatgcaaactctcgttttactttgaagggcttgagtatcaacttggggattttcgtttgagagttggtaaagttgttcctactcatgctgagaccattagaggcgtagtcatggaggtaacaaattttatatcttttgagtacattgagatatattaataatcaatgttaatgattatctaacactctagttaattcataatttggagtttgtaatgtaactcagtaactaaaggttattagctatgattggtaacccacgtaatgacggtttctaatgtgattaggcagaaaatttgtcaattaagaaaatttgcataatctacggttttccaatcaacaagttttcattatacgaatttttagtgctagcaacttatgccattatgctattatgcactactttcatttgaaacctataattatgtgtgtgtactatttaggtggagtatcttcctatatcatcaatgggaatggcaaaaaaattgatggaggagttcttggagatatggcaagaagctatgtcgaaaaggtcgttgccgggtaagtttgtgaacaaagaactcaactttgaaaagtttggacttggagacaactacactccgcaacataccgctgttggatatgctttcttcatggctaatttgatggcagcaattcaagctgggagaggc

SEQ ID NO: 163790 - DNA, 628 bp, Arabidopsis thaliana landsberg
atggtgctgatagttgggggtgatccgcaatgtcctgccattcagaagcgtctctctttgctaatcgaagattatcgtcccatggaatgcaccttttctgaaaagttagaatatttcgactctttcataagcgccaaaagatccatagcgggagttgttgaagatagtttgttaagttgttgctgtactatgatggatcgaaccatcggtatatgccaagtaaggctgcatgggtaattcgagatgagtcgggccaatttgtaggtgcaggtcaagcgacagggaaccacacttctaatgctctagaaagcgagtttcaagctcttcttatcgcaatgcaaagctgttggagccacggtcatagaaaaatctggtttgaatgaaataccagggaggggatggaaatcctcaaataggaaaaaatcacgttttgatacctttaattggatacgagatgttcaagcttggaagcaacggtttcaggcaatgcagattcacatggatcaaccgaaaacagaacaaatcagcggatattcttgccaagagtcacttaccccagaatgaacaatttaaattttatgattacattccgattgtaatttcttcagccttacagctggaaaactct

SEQ ID NO: 163791 - DNA, 971 bp, Arabidopsis thaliana landsberg
atggattttaagaaggaagaaacacttcgtagagggccatggctcgaagaagaagacgaacggctagtgaaggtcattagtcttttgggagaacgtcgttgggattctttggcaatagtttccggtacactttgaaaccttattttgtgtcactttccaaatatagaaatttacatgtctgaaatatatgtttgtttgttgtcttcatacttaaaggtttgaagaggagtggtaagagttgcaggctaaggtggatgaactatctgaatccgactctgaagcgtggaccgatgagtcaagaagaagagagaatcatctttcagctccatgctctatggggtaacaagtgagagacaaaaaaaatacctttcaatcttttacttacatgattgtttttggcggtctgaattaaatattgtgtatcaataggtggtcaaagattgcaagaagattacctggtaggactgataacgagattaagaactattgcagaactcattatagaaagaatcaggaaaatcaaaactatggtaaatatactttaattgttgcatatgtatgctagttttagataagcattcagtgaaataatgatgtgttattctgcagataaggtcattgagtggagaggaaatacaggagaagaattgttgcacaagtataaggaaacagagatcactgggacaaagatgacgtctcaagaatatggttttgttgaagttgtgagcatggaaagtggtaaagaagccaacggtagtgttggtggaagagaaagcttcggtgttatgaaatcaccgtatgaaaatcggatttcggattggatatcagagatttctactgaccagagtgaagcaaatctttcagaagatcacagcagcaatagctgcagtgagaacaatattaacattggtacttggtggtttcaagagactagggactttgaggagttttcatgttctctatggtcataa

SEQ ID NO: 163792 - DNA, 1099 bp, Arabidopsis thaliana landsberg
cgggaaatttctcagcaggtgactatcataatcgcagctttcgtcgatactattgtccgattttacgattcctttctctctctcatggtgcgatttctccagcagtaaaaatcaatggcgagaaccaagcatcgcgttaccaggtcacaacctcggaatcaaactggtatcttaaatctgctttctctttcaatttttacttctgattttacccagaattttaggttttttatttcgattttgttaaccctagatttcgaatctgaaatttgtagatgccgccggtgcttcatcttctcaggcggcaggtccaactacggtacggcatctttttccgtcttagggtttccaatgtttcttccttttatcgttatgatcaaatttgtttatctatcgaaattgaagaccccgacaaggagaggcggtgaaggtggagataatactcaacaaagtgagttttttatatttgaagtcttttttttccctcttttcatctcttttgtttgtgaagttattcttttgtaacatctgcagcaaatcctacaacttcaccagctactggtacaagggtaagatttttgtgaccattgcttatgaactgcttcaactttgatttcgttattaagctgacaaaattctcgttttggtttgtcaagagaggggctaagagatccagacaggctatgccacgaggtttgttttaaaaaaaaaaccaatctcttgtgatatccctgagaatacaggacacttagtgtgtttaaaactaatcttcggtgttgtccttgtaggctcacagaagaagtcttatcgatacaggccaggaaccgttgctctaaaagagattcgccatttccagaagcagacaaaccttcttattccggctgccagtttcataagagaagttagttactctttttcttaccagccataataagtttcacagcttaacaatattcatatatactaacagaggcacaagccttttggtgtttaatgtggctagttttaggatttgcacaccccacacatatctgagcatcaatgcagtgtacatagtgagtgatatagcaatttaactaaaattcagagtaatcgtgag

SEQ ID NO: 163793 - DNA, 504 bp, Arabidopsis thaliana landsberg
atgtcctgagtttatagattgctactgtatttgtttgtttggaactttagaatcctcttttaaggcttgaagttaaagaatgttaaccccattatatgaacttggtatctatgaataggtctctccagactcacaacaaatgaaaagcttcaggatgcatttgcttcttttggacagctcgtcgatggtaatgttactcttggattccttaatccaatatatatagagcatcagatcaataggttttgttttcatgttgcagcgagagtgatcacagacagagattccgggagatcaaagggttttggttttgtgacatatgcaacaattgaagatgcagagaaagccaaggcagagatgaatgcaaagttcttggacggttgggtaatttttgttgatcctgcaagacctagagaaccaagacggcctctgcaacaggaaccgcttcggccttcctccgaatctggtttcacaaccaacaaaaccatcggatggtgtaaatga

SEQ ID NO: 163794 - DNA, 453 bp, Arabidopsis thaliana landsberg
atgagctcgagtagtgtcatcatggactttttgaagtactcgccacaacctctacagctgatcacttgaccacgacactctatccaccactcgacccttaggtcgagtagaagactcaccacttctcacaaccactcgaccccgaggtcgagtagcagccatcaccatttctcaccatcactcgatccagttgtcgagcatcaccatcatcaatcactcgatcgcacactcgacctcgtggtcgagtcccctcatcatcactcactcgacctcatcactccacctggatgtcgagtatcaccatcaccaccactcgactacatactcgatggcaagcttcagagttttcttcattctgcactcaacaagacactcgagcataaggaagagatgaagactttggctcgtcactcgacctcccactcgaccacctgggtcgagtacagttcttaa

SEQ ID NO: 163795 - DNA, 525 bp, Arabidopsis thaliana landsberg
aggcgtggagtagagagaggactacctataaaatgtagatgtggtgccggatctgtagttaaaacttcagaaacgatgaagaatccggggagactatttcattgttgtccttatggttcaaaagtggtaattttgcttttggtttaagacacaaatagaagaaaatgattagcattaacagaatgtttgtttttattttaggataatggacatttgttcaaatggaccgatatagctatggttgaagagattaaagaagttgagtgtgatgttgagaagatacaagctgagattgggagcttaaagaaagatttacatgttgtggaagctgaaatggagagtctagcatgtgaaacacgcacatgtgaggccgtagcatgtagatatgaaaatgagattgaaaccatcaaagcacttgcaaaaggatgtgaaaaagagattggagagcttaaagctatgatcgtctgcaaagagaaaaagattcaatctcttcgttgtttcaaaaaagtgattgtgttagtttag

SEQ ID NO: 163796 - DNA, 457 bp, Arabidopsis thaliana landsberg
atggatcgattgtgtgagagtgacccatggtatggtgagatgaagagcgcaaagaggataatgcaacaactagaagaagtggcaatgatggagggaattccgccaatttgtccttgtggtggacgcatccttgacataatctctgagaaagatggtgacaaaggaaaaagatactatgaatgcaccaattataaggtaaattgaagatatcatcaatcttgttttagaataattcattaagcttgttagaattcatattttgtagaatgatgggttacacattcgaaaactttgggataaagctatggtagaagaggtgaataggttaagagagcaagttgataaccatcaccaaaagattcaaagcttggagtactataaccaacaaatgcgttcggagttggatgaaatccagaaaaagatggggactttgtggaggatttgttgtggagagtga

SEQ ID NO: 163797 - DNA, 901 bp, Arabidopsis thaliana landsberg
tggacgaagagatcaattttactgtgcctagtccagaggacattgatgcagatgctgaaggatcgtggctacttaatcgacggttctgaaattacaatgaccctagaagagtttattgagaaatatggcgacaatatgaaaaggagtctcttgttactctcaaagctaagaaaaatgatgacaatgataaggtaatgtataattaagtatgatgtctctcaatgtatttatacctataagaagatatggtttgcattgtataaaactgctaaaacgcgtaatttcgtgtgtttgatctcgtcttgagttgttttgtagctatatattttcttccccaatgcttccaaagttggaattgcggagatgaagaaatacatagaccagttaaaatcggcaaacgttttcagagcaattttagtggtgcaagatataaaggcattttctcgccaggctctggtttttttaggtgcggtctatcccaatatttcatattgaagttttccaggtaacaaaaaaaacaaacactttttgatttttgttctcttgatcatcacaaaagcctaaaccatgattgagtactgttggttcaggagaaggaattgatagtgaacgttaaggaacatgtttttgttcctgagcatcaagctcttactactgaagagaagcaaaagtttctagagagaaagagaaccaggtttgtagtttttttgcacatagaaataaagtattgttattagttttgggtgattaaagatttggaacctgttggtgttgttagcttccaaggattcacgtgactgatccaattgcgagatactttggactaaaacgtggcgaagtcgtcaagatctctcgactgagtgaaacatctggtcgttatattacttatcgctatgttata

SEQ ID NO: 163798 - DNA, 750 bp, Arabidopsis thaliana landsberg
ttgtgcattcctagtttattgtggattcggcccctaagaacaagttcagtaaaggtttttagtagatttcttagatgggttctaggcgtgggcattcgggtatccgttcgggttcggttctttttttcgggtatcgggtctattcgggtaggagattgggaaccattcgggtattttaaaatttctgttcggtttcagttcgggtcgattcggttattttagtaaaaatgtaaaaagtaaccaaaaatacctaaaatattttcgggttcgggtcgggttcgggtgttgtactcatatctacccaaatctatcagaaatacccgattacccgtaaatattttggttattttcttatccaaatataaccaaaatatttaaattatttaaaagaaaactataacattggttatttttatcccaaatatatccaaatgtatatgaattactaaaaaatatattatattcggatttataattttaattttgggtgtttgaggtattacaaatatatatataaataatatttttaagtttatatttgtattcgggtacccacgggtattagattcggttcgggttcggttctggttttttcgggtagtgaagtctaggacccattcggataattctaaaaattaggttcgggttcggttcgattatttttcgggtttttcggttcgggtattcgattccgggtattatgtccaggcctaactattttctcacttgacataccattaccatcttcaa

SEQ ID NO: 163799 - DNA, 707 bp, Arabidopsis thaliana landsberg
atggcgtcaaactcaagaagttcaatctcaccatggacgtttagtcaaaacaagatgttcgagagggccttggcagtttacgacaaggacacacccgaccgatggcacaatgtggcaaaagctgtcggagggaaaactgtagaagaagtgaagcgccactatgacattctcgtcgaggatctcatcaacatcgagactggtcgtgtccctttgcccaattacaagaccttcgaatctaactcaagaagcatcaatgactttgacacaaggtatataactaaatatctatatatgatgctctcgatatattttgataatcattctagtgattttgagaaattctctcaaaaagttcttgtaagttatatttctttggtttaaacgtgctctttatgactagtttgcccaaaatagcatatattaagtatgaactttggatttttgggattctgatattttattgtttctttgtgtcttcttttctttttacatgttaaattttttttttagaaagtttctacaaatatagtttacttacatactatttttttgcttaaatataaatgcaaattgttctatttgttttaatcaaattctatatttaaaagcatgaaacacacctattaatacagtaaagggaaaaattcacatgaaatctaatcctttcatgtacttcatcacatgcacattgtctttaacagttttga

SEQ ID NO: 163800 - DNA, 418 bp, Arabidopsis thaliana landsberg
gaaacggcggatatccttttctccaacatccaacttcatggagcatgaaagcatgagcgacatcaaacgattcaacagcgacaaacgcctgtcccgcgccgtcacccacggcaacgtggcctacctcgccggcatcaccgccgatgaccgcagcaagggcatgcgcgaacagaccgcggaaatcctcgccaagatcgatgccatgctgaaagccgcaggcaccgacaaatcgcggttgctgtcagccgtaatctggatcagcgacatgcgcgcgaaaccgcagatggacgaagcctgggcggcatgggccgatcagcagaacctgccggcacgcgcctgcgtcgaggcccggctcggcacgccggacacgctggtggaaatcatggtgcaggcggcgaagtatgacgaggcaaaataa

SEQ ID NO: 163801 - DNA, 496 bp, Arabidopsis thaliana landsberg
tatattgtcttattaagttattattttttggacaggaaaccaccattcaagaatttcacatgccccctccattgcttgctaaaattggtagctacctggctgaagatgacatggatgcattgaaaaattttattaaagcaggtccggtatttaaggaggctgtgtattcagaggaaaccctacagtgtgtccgacttgacagatctcggtatttcatgtggtggtcaatgccacactcgatctattatcatttcttcaataaatgtcttcaagcaaacaatccccatgctttgactgatgtattgacaaaggaatagcatatgagaatttcgttgaagaatgctacaaggcacctttatgggtggagccttatgaagaggacggaggatgggtacaaatcgatggagcttactgggctcagccccaagtgcgagcaatgaatgcaaggtgctgccgatgcaaaagtgcagcacacaaaacttgtccaaatatatga

SEQ ID NO: 163802 - DNA, 442 bp, Arabidopsis thaliana landsberg
atggataacaccaaccgtcttcgtcaccttcgcagtcgtaagcaatccaagttcactctaggggataccgcaggtttctctttaatttagtttataaattataatcatccatttaacttagctacgtcctccaattttcattgatattcatatttgattgaaatataactaactaaaatgcagaggtaaatagtgtgaaatgggagtttatcaatatgacggaacaagaagaagatctcatctttcgaatgcacagacttgttggtgataggtaacatcttcttcttctgtgtatagatatgtcgatccatattaaaattgatatcttctttttttctctatatacaatcttacatgaagtaactcatgtcttttttggatcttaactatctttagattcttctcatgtacttttttcaaccctttaacagcattatactat

SEQ ID NO: 163803 - DNA, 544 bp, Arabidopsis thaliana landsberg
caatcgaaaacgctttcgcactttctcttgctttgacaatttctgtttttattcaatgggttctagtcaagatctcttcttcctcatcatcgttctcttctcctccattctcttccttcagctttcctcgctaccggatccgtcgttttacgattatctccgggaaagcaatctgccggccggaatagttccaaaaggagttaccaatttctcgatcgacatcaaaacggggcgtttcaccgtcgctctacctgttccttgcgatgctaaattcgagaatcagttccacttcgactacaatatctccggcgttctctccgatggacggatcgggaatttatctggtgtgacgcagaaggagctgtttctttggtttgctgtgaaaggaatacatgttgatccgcagagctttgggttaattcactttgatgtcggtgtcgctgataagcagctttctctctcgcttttcgagtcgcctcgagattgcaccgccgcggaatctcaacctcgtgcggttgatctctctagaccccgtgatttggag

SEQ ID NO: 163804 - DNA, 705 bp, Arabidopsis thaliana landsberg
ttggcttcttttcttattcagattatagagattgaagatgatgatgatactgtaatgtattcatcgatcttcaccaattgtgtttctttgtatttacgacctttttttctaatcagaatgaagtgaaccaagtagacgaagaaaatcagtatatagtggaggaagcggacgaagaaaatcaggtggaagcagagaacgaagaagctcagatatcagagaacgaagaatttgtgattcaggaacaaccgaagaaactgatcatgagtgatgtttgggagcagtatctgacaactgcggaaattcggaaagaagacatgaacaggctcgtgatgaactttcttgtggttgaaggatatctagaagctgtggagaaatttcaaaaggaatctggaactaagcgtatcctctttcaacttgtggaagaactttctcagattctttctagtgcttggtgtgttatctggtctctgttatttccttaacaagaaacagcagaagtaggtgttgcgagcatcagtgacagattggctgttaaaagggatatcgaaagcggagatcttgaggatgctgttgagaagttgaatgctataaatcctgaggtacaatgcctcacattttcatgcaaactgatcattggcgtggacatatgtgatgttgcttttctattcctaacaggtcacagtttctaaccatatgagagattga

SEQ ID NO: 163805 - DNA, 276 bp, Arabidopsis thaliana landsberg
gtgaacaagaacgatctcgttgcccacgtcgccgaagctggcggcctgtcgaagaccgacgctgccaaggctgtcgacgctgttctcgagggcatcaccgatgcgctcaagaagggcgatgaagtccgcctggtcggatttggtactttcagcgtgagcgagcgcgccgcctccgaaggccgcaatccgcgcaccggcgagaagaccaccatctccgcttcgcgtcagcccaagttaaagccgggcaagggcctgaaggacatcgtcaacggttga

SEQ ID NO: 163806 - DNA, 863 bp, Arabidopsis thaliana landsberg
cccattacgaatgcttgattaaacccgtagtgttttcaagtacggattctacgctctcccagccgtcggatgataagcgaccaatgattatgagccgttcgataaatcaccacaagaatctaatgtgagtgcgatcaagaactggtttcagtcatttttaacagaagtctctctttctcaaaagtcaacccgttgttttgcaatcttgtgaatccctctgtaagtccttcgtcgttctcacagactggagattttgtttcggaaaatctgataaaagaaagatgtctaaccctcaagaagatgacaagaagcccatcgaccaagaacaagaagcttatgttattctcaaggtcaagagccaggtttgttttcactgtgtccatctatgcaatttctttagataaaaacttgataacatcctttcgcaaactgtgatatctaaagtaagaatgatttattgttttttcaaaaaaagaatggttaaatctttttcttgattggtgatactaaggatggagatgaagtcttatttaagatcaaaaaaagcgctttgcttaaaaagctcatgtacgcttactgcgaccgccgaggtttgaaattagacgcattcgctttcatttttaatggacttcgtataggtggcctggagactccagatgaggcaaatcactctctttatcatttcccttttacaacttatatgtttgtcaaaagtgtatcatttactaaaccaagattctccaattttacagcttgatatggaagatggagatgtgatcgatgcgtgccgggcgatgagtggtggtctacgagcaaatcagcgtcagtggtcttatatgcttttcgatcataatcggctttag

SEQ ID NO: 163807 - DNA, 835 bp, Arabidopsis thaliana landsberg
ggaaatgcagagaagcctattgttataagcggtccttctggagttggaaaaggaacacttatatcgatgctcatgaaggagtttccttcaatgtttgggttctctgtgagccacacgactcgagctccaaggtgtatggagaagaatggtgttcactaccatttcactgataagactgttatggagaaagaaatcaaagatgggaagtttctcgagtttgcgtctgttcacggcaatctatacggaaccagcattgaatccgttgaggttgtaacagattcaggaaaggtaataaaaagataatatttgtaacatcaatctctttcatgccgttgatccatcaaatgatcatatattttggtgtgtatagagatgcattttggatattgatgttcaaggagcgaggtcagtgaaggcgagttcactggatgcgatattcatattcgtttgtcctccttcaatgaaggaacttgaagatcggcttcgtgcccggtaaaaaccagacattagagttgtttttttacttcagatttttcattgcaagttctcaattttaagtgctgaaaaaacagaggaacagagacagaggagcaaatccaaaagcggcttagaaacgctgacgcagagatcaaagcagggaaatcctctggcatttttgaacacaaactgtataatgacaaccttgaggaatgctacaagacccttaaggtgacttaacctaccttttatttatgaataaattcctgttaaacctcatccatttcaagcaacaatggctgtctgtttcagaatctcttggggattaacgaccttgctcctgtgaatggtgtagaag

SEQ ID NO: 163808 - DNA, 891 bp, Arabidopsis thaliana landsberg
atggctttgaagacagttctcgtagcttttatgcttctccttgccatctattcgcaaacgacgtttggtaagtttattcaaatcgctgtatatatcaaagttatccacatacaagctagatatagttctattataaaacattttgaacttacatcgtaagtttttaacaaatcccaattagctttctcgattgtatgttcagcttaactaagacattttcaaaggtatgttattcttttgttattccatgtacaaatactaagtagcattggaattaatttggtaggggacgatgtgaagtgcgagaatctggatgaaaacacgtgtgccttcgcggtctcgtccactggaaaacgttgcgttttggagaagagcatgaagaggaccgggatcgaggtgtacacatgtcgatcatcggagatagaagctaacaaggtcacaaacattattgaatcggacgagtgcattaaagcgtgtgtctagaccggaaagctttaggtatatcttcggacgcattgtggaatctcagttcacacataaactctgctcggttaaatgcttaaaccaatgtcctaacgtagtcgatctctacttcaaccttgctgctggtgaaggtacgatattggtagaccagtacggttatattacttttctgtctctaatagattatggtataatttatttgtttggtttgctataggagtgtatttaccaaagctatgtgaatcacaagaagggaagtcaagaagagcaatgtcggaaattaggagctcgggaattgcaatggacactcttggaccggttggaccagtcatgttgggcgagatagcacctgagccggctacttcaatggacaacatgccttacgtgccggcaccttcaccgtattaa

SEQ ID NO: 163809 - DNA, 1158 bp, Arabidopsis thaliana landsberg
  unsure (1)..(1158): unsure at all n locations
atggcgaagatggttgttttatcagcgatgatgattttgatattggcatcgacgatctcagcaaaagagcagctcagcactaaagaatgtgaggatctagggtttagcggtcttgcactctgctccgattgccactcactctctgaatacgttaaggaccaaggttcgtgcctttctatgcgtgctttatttgatctcaattactgcagttttgctttttttcccccaaaagattctatattttagtttttgtgtattttatgagctagatcattctctctaaagttggttttgaggagtggaattactaaattggttatcttatattgattgatcttgtttgcagagttggtatctgattgcttgaaatgttgtgctgatgattctgaggattccatgagcaaggtacgatcactaggcatgtaatttgtagtgcttttgaattttaatgggaatagattagatgaatacagaaacatctcctataacatggatatgaatgaagagaagtttacatttttttgccattgcaggttacctattctggcgctatattagaggtgtgtatgannnnnnnnnnnnnnnnnnnnnnnnnnnnnnnnnnnnntgaagaacagaaagaaaagttccctagcgtcaaagttcagtacatcttcaactcaccacccaagctgatcatgctcgacgaagacggtgaacataacgaatcaattaggtcagttgctttataaccccctttgctcaactccttgctagaatctttagtattagagtttgggtgggggaacgagttgacctgatttaagacgttcaaggtgacctgatatatccatgttagcttggtagataaaaatataactatccatggatctgcagcagtttctattctcactctctcgttgctctgttacattctgctgtatcatttacttagacctctagtttaaattggtttttgaaaggattttctcgttgtgagcatgaataattgatgtctttaacacctcatcctctatcagcaacacaacttcattcctccaaggttgtagctgacctctttgtttcttgatttgcttgttttgcagaatcgacaactggaaacgcgaacatctactgcagtatatgcgagagaaggtcaagcctactgcagcaagttag

SEQ ID NO: 163810 - DNA, 1714 bp, Arabidopsis thaliana landsberg
  unsure (1)..(1714): unsure at all n locations
atggggattgttaatggaaatctcatagttttctctatcgtcacgaggacttggttcttcttgaagaaatttttcatttacttctcgtattttctttatcttttgggatagttatcttttgagccaataggcatcacatgctttaattgaaccttaggttcattaattttgctcccatctaattccagctctctagagttagccgtgaaaacggttgacgatcagtcaactcgggaggcgaatcctatcgcccctgccatcattccaccacctttctccttggaagacctcaaagccattctcacaaccgtgaccaaggacctgtccaactctgtcacagagacaaaccgtcggctcgacgagttagcaaaagggatctcccaacgtccgaactctgaagtaacaccgccaagaatgattcaaccgcgcggtcttatcttcgacctcacagatgcacaatccaatagggtcaactccaggttcccagggtcgcttcatcccgccaaccaagacggcagaccgcctatgtctcacccaatggcatctggtcatatctccaggtccccaactttagatcatgctggacagataaacgatatctacctaaagctcagagagatcggatcccaagtccataagggtgtcagttcggccccggaaatcgagcgaatgatcgaagaaacccaaaagactcctttcactaattgggttacacacacacggattcctcaagtgaagctctgaattccaatttacgggggcgaaagcgatcccaagcaatacatgacctccttcatgatcacagtcgccaaagctcacttctcggacgagaagagagatgttggttgttgccagctcttcaccgaagctctcgttggaaacgctttaacttggttctccagatttgaggcgaactcgattgacaacttcatccaattttcaactgctttcttaaagcaataccgagtgttcattccaccaggagcttctagctccgacctttggagtatgactcaagaaaacggcgaaccattgaacgcctatctaggttgattcaaggaaatactctccaaagtcaccatcacggatgaagctgcgatgaccgctttcaggaagggactgttccaagggtcccaactgaggaaatatttggcgattagagaaccgctagatcttgatgacgctctacatacagcatcacgatacgccttccttgaagaggaagacgccaagctggcagggaagtcccaaccacccaaagccaaggaaaaagcgcgggaggtctacaaggagccgcctcaacactatgacccaaaagcgaataaacgaggaacggtttttgccgcaatagtctcggacgatcaacctcaacagcccgggaaaccaaagaactcgaagaattcatactttcgtttccatcagttcggaggacattccacggaagagtgcaaacatcttctgaacatcctcctcgaaaagtacaagtctggagaagtagaggcggtctactatcctaagaatgggaagaataaatgcaaggacgatttcaaacaggctcaaggcgaaccggtgaatgaggggcaatacttgttaaagcatcaaccgaaccaagaagaagatcacacggaagaggctaggattccggagaacaaactccccgcccccccaaaaagatggaggggacagcaaccccaacgagctccaaaccatnctc

SEQ ID NO: 163811 - DNA, 572 bp, Arabidopsis thaliana landsberg
atgccctatagttactctcaaccatccacatccgaagctagttggaatagtggagaggcgaatgccgatgcaaattggggggttccagaaaaatgtttttgtggtaagcctgtaaaacttgaagtgtgcaaaactggttacaggcaaggcgacagagtctacaaatgcccaatgcttaaagtaagttactgtgttttcatttcattggaacaacaaagtacaagtgaattatatttatgaagtcttctctctttcgcaggctgaagagtacgagtcccgaaaccaccttattcagtggtgggatcaggctgtaactgaggagcttgagaaggtaaatcacaaacttgattccgcactaagacatggacaactagcatgcaatcatgctttggagtccatccgggaaactgttcatctcatgcaaggcgaaattgaaacccttaaagaaaggttactcgccaaagaagtcgagattgataggcttagggcattactttctacatggtgattatgatgtgatttatgttattgaggatggtgtatggcatttgaacctaaatatgtaactcttg

SEQ ID NO: 163812 - DNA, 725 bp, Arabidopsis thaliana landsberg
atgaaaccataaactgaaataaatccctttctcagctgctggcggtggatgccgttaatctcggcactcagggagcagagacaggaggctctctgtgagtttaaagtcaacctggtctacagagcaaattccaggacagccagggctacacagagaaaccctgtctcgaaaaaaccaaaaccaaaaccaaaaccaaaacaaaaacaaaaattatcgtgccccagtggaaccattgtggtacgctagttagttttttgggctggtgagatggcttgccgggtaagagcactgactactcttcaagaggacctgagttcaattcccagcacccacatggcagctcacaaccatctgtaacaaaaatctgatgccctcgtctggagtgtctgaagacagctacagtgtactcataaataaataaatacataaatctttaaaaccaaaaagacttcccattcacctgtttccctccttgggcttttgagggggacatagccaacagtagctcccttggatacacctgcaaaaaatcaggctgggtgcatatttgctatgtctgtaccagccaaggacaagctgaagacaagagactaaagccaagtcagcagtgtgtccctgggacaaagagtgtaggcttcattcagcaggactcgatggcgttctcaaacagattattcaagaccatctacgcagtgaaggagatcatgctagctcgttgtacataa

SEQ ID NO: 163813 - DNA, 477 bp, Arabidopsis thaliana landsberg
atggatcatgatcacatgcatgacatgccaccaccatcaccatcatcatcatcgatgtcgaatcatacaacaccacacatgatgatgatgcacatgaccttcttttggggtaagaacacggaggttctcttctccggatggcccgggacaagctccggcatgtacgctctctgtctcattgttatattcctcctcgccgtaattgccgagtggctcgctcattcaccgatcctacgtgtcagtggctcaaccaatcgagccgccgggctcgctcaaaccgctgtgtacacactcaagactgggctttcgtatttggtgatgctcgctgttatgtcctttaacgcaggtgttttcatcgtcgctatcgccggctatggcgttggtttctttctctttgggagcactactttcaagaaaccctccgatgatcagaaaaccgccgagcttcttccgccgtcttcaggctgcgtttgttga

SEQ ID NO: 163814 - DNA, 5547 bp, Arabidopsis thaliana landsberg
atgatggctcagaggtctcttttccaaggcgaatctagtattgatgaggtatttatctccacatctgaatagtacaaatcgttgcccatctaacgtcgagtatatcatgtttgtgttaatgtaggagctcgaccgtatagaaataaggatgcgaacgaggtacggcgaaaacaggaggcgcgataagggcgttccgatcgagtgtgattgcaatgctaaggttgtcgttgccacttctcttgatcctgttacaatcggaattttttttttcagttgtccgtacgaaatatcagatgtaagcatcatttcttgagttaatgttctttatttttttttctttcattttgtatccctatgaattaacctcctggtttttttataagggtcccggtcaaggatgcggtttcaagagatggtggactgttgcattgtgtgacgagtttgacatgataaaagaggagacgactgagatgaagaaggacctgaaagcaggcaacaagcacgtcgagccttaggcgaaaaagaactttcttatggaaagaaatttgaaacgctagagaagaagtatgagagcttgaacaagtatatgtgagcttagctaaatttggttttttcagtttggacttccttgtactgtcaattttaaataagtcagccagtcttgcgataactcaggcatctcacacaaataactcaaccaaacatcaagttaatctacgataagtccgccttaacgttagaataactcagccatcacacacgtataactcaaccaaacatcaagttaatctacggtaagtccgccttaacgttagaataactcaaccatcacacacgaataactcaaccaaacatcaagttaatctacaataatctgaaagagagacagattatgaatcacacacgcgaatagaaaatagaaaaatgaagacttaacattgataacataggagtactgcaatttaataacataaaattaaatacaaataacatggagatgtaattttgttatgacgatacaatcacatcaatcaccatcttgattcttcatctgattcaaaacttgaactctcgattgatccataccccagtttatcccaatcaatactaatcaccttgaattcattcttctctttgtaagccttgcttacctgctcctccactttctagaactcctcctccacattaaatccgtcctccatcctcttcattttctttaggagattaagtttcgcttgtgtctggggcagtttgagatccaagatgtgtgcttcctccgtctaccttatgttgcatctgatgagagagatgatgcctttgaaacgtttctccgtttcaagcagctttctgctggaacagccatccacacacggccttttgttggaagcgtcatccacacatggcgtcttgttggaacgtgatgcatccatgatctctgaagagttttgttgctcagggattagagaaaagacaagagaaaagagaagagttttagttgctaagaatcgacaagagaaaagatgataagcaggtttttcaggtctgcttatgtgctgaagagtgtgatttcacttcaattcccctaaaacacaaacatgtcgatgcagttatagagggtgtcaatccagtccactgttttgctagcaatcaagatgtgtacaaaaacaactaagtcaagccagattataatgatggtgggtttctagtaacaatcttaggtcaggattcaaacaagtaaaaataagaacttaaaagccctactcgatcattgggttgagtagaagcaacaggtgacaaaattaagaaacctaaatgcaatcaacaggggatacaaatagaggatacaaataacaggtaaataaaagtgcaatcaagaggggatacaaataaacctaatagaagttctaaggatggattcattgataagggtaactctagggttcatcaaatggctaataggcgaaaggtagatacccctgaccatagattcaaaaaccgggtcaatccactgttgtgacagagacccccataactctaccacttcctaatctcaactgtcgttgatgaaacatagcagagcagggtttaagcaacaatctaccaaagccaataagaagacaagccaatgtcttggtcgggtctacaaatctctggaattcgtagattagacatccatttgaacgtcttttggacgctggacgtctatgatcgaatctccatattagccagcgaaaaccggataagggccaagcgaatccagaagggtataaacctaaacactaaccacctaactaacctagagattaccctaatctaatccatcctcaaaaaccctaatcactactcaagcaacattatcaagaacacaaaccgagaaattactaaaattataccaaaatgtagatctaaacaagctaaacaactttacttaaacaatcaaatgcaaaaacgaaatagattaagagtaattaaagtttcaagattcataaacacaaagaaaaactgaaagataaagcatagatcatttggacaaatcccaaagtgatctatttatactaaaatgttgaaaccctggattcagtagaagacaagagacttgaggcggtttgggcgaatactcgaccttggggatcgagtaaagagggtgctgcaaagtctacgcctttgtgtctatcctccgagtgatgaattggtcgagtagatgcttcatcctctcatatccgtatgctcagatgtctagttgagtggggaatgaggaggattcgaggacgctttgatagctcaacaagtcttgtagagatggtcacacttggtcaagaaaatgggtcgagtagtggatcgagtaagaggggagagtagatcaatctgctgcttcatttgaggttgccttgatcgagtaagagggtcgtgtaaactgatatgatacaatggggaaatgcaaggctaaatgatgataaacatacacctaaaatgagtaaaatacagtgttatcagagaaaatggatataactattgtctaaaccctacaactccatctctaacacttatgattagtcaaatgcattgcattgtgatatatctttaccatagaaacactaacaaagttgtttactgcttctaagcaattttttgttggatttagcctcttttgggacgaaattggtatacgtgttgtctaaacatacctaatccatttataactcttataattagtcaaatgcattagattgtaatacattttgaccatagaaacactcaaaagctattgagtgcttctaagcaatgttttgttcgttttagcctcttttgggacaaaatggatataagtgttgtttaaacactccgaatccatctttaactctaataaaaagtcaaatgcattggattgtgacacattttgaccatagaaacactaataaagctattgactgcttctaagcaattttttgttggttttaccctcttttgggacaaaaagggtataagtgttgtataaacactcctaatcgatctttaactcttataattagtcaaatgcattggattgtgacacattttgatcatagaaacactaacaaatctatttaatgcttctaagcaagttttgttgattttagcctcttttgggaaaaatgggtataagggttgtctaaacactccaaatctatctctaactcttataattagtcaagtgcattggattgtgacacattttgaccataaaaactccaacaaagctattgattgcttgtaagcaattgttttgttaattttagcctcttttgagagaatatgggtataagtgttgtataaacactcctaagccatcagtaactcttatgatgagtcaaatgcattagaatgtgactcattctgaccataataacactaacaagctgtttactgcttctaagcaattttttgttggttttcgtctctttaggagaaaatgggtataagtgttgtctaaacaatcctaagccatctctaactcttataattagtcatatgcattggattgtgacacattttgaccatagaaatactaacaaagctatatactgcttctaagcaaatttttgtaggttgtaggttttttgggataaaatgggaataagcattgtctaaacacccctaatccatctctaacatttatgattagtcaaatgcattggattgtgacacatttgaccatacaaactctaacaaagctatttactgcttctaagcaaaatttttttggttttaccctcttttgggagaaataaggtataaatgttgtctaaacactcatactccatctctaactcatatgattagtcaaatgcattggattgtgacacatgtttaccatagaaacactaacaaagctatttactgcttctaagcaattttttgttggttttagcctcttttgggacaaaatgggtataagtgttgtttaaacactcctactccatctctaactcttatgattaggtaaatgcattggattgtgacatattttgaccatacaaacactaacaaagctatttactgcttctaagcaattttttgttggttttagcctcttttggaagaaaattggtataaatgttgtctaaacactcctaatccgtctctaactcatataactagtcaaatgctttgaattgtgactaaatttgatcttgaaaatactaacaaagctatttactgcttctaagcaattgtttgttggttttagcctctttttgaataaaatgggtaaaagtgttgtctaaacactcctactccatctctaactcttatgattggttaaatgaattggattatgacacattttgaccatggaaatactaacaaagctgtttactacttctaagcaattttcggttgtttttagcgtttttcgggacaaaatgggtacaagtgttgtctaaccactcctaattcatctttaactcttctaattagtcaaatgcattgaattctggcacattttgaccttagaaacccgaacaaagctattgactgcttctaagtaactttttgttggttttagcctcttttaggagaaaataggtataagtattgtctaaacactcatactccatctctaacacttatgattagtcaaatgcattggattatgacacattttgacgatagagacgctaacaaagctattggctgcttctaagcagttttttgatggttatagcctcgtatgggagaaaatgaatataaatgttgtctacaaaagcctactccatccctaattcttatgattagttaaatgcattggattctgacgctttttgaccatagaaatactaacaaatatgtttactgcttctaagcagttttttgttggtttaatcgtcatttgggacaaaataggtatacgtgttgtctaaacactcctaatccatctttaactcttataattagtcaagtctattcgattgtgacacattttgaccattgaaacattaacaaagctattgacaggttttaaccaattttttgttggttttagcctcttttgagagaaaacgggtataa

SEQ ID NO: 163815 - DNA, 313 bp, Arabidopsis thaliana landsberg
cgacctcgtaatgtgccgcaagcagcccggcatctccctcggccgactctgcgacaaatgcgacggcaaatgtcctgtgtgcgactcctacgtgcgccccacaacactcgtgcgcatctgcgacgagtgcagcttcggcaactaccagaacaagtgcgttgtgtgtggtggagagggaattagtgatgctttctactgctttgaatgcacgaggctggagagagacagggatgggtgtccgaagattataaatctggggagtagtaggacggacttgttctttcagaagaagcagcagagggtgtttgggacg

SEQ ID NO: 163816 - DNA, 466 bp, Arabidopsis thaliana landsberg
atgcatgttatgaaaccagtcctcatgataaatatccatattgcaagatatatggaggaaacatacttggtaacccatggaaatgtgagacctgccgcttcgagacacatcagtactgtgtggagttggggcgaccatcaagacatcgatttcatcagaaccaccctttgacactcttgccaaagtatccttcacaggaaaagatgaaatgtgacatttgcagagagaatatatacgattccaatctcttctgccgtatgtgtaattttgttatccacatcaactgtgccttgaaaagtaaacatgttcttgaagctttaaggcagaaattcactggaacttggagaggatggtgcaagaaaggcgttcttaatagattggttcaagttatggtctcgaggtcatatccatccaagtactagtgttatttgggatgagaagttgtgtggaaaagctgtgtcatgta

SEQ ID NO: 163817 - DNA, 3322 bp, Arabidopsis thaliana landsberg
  unsure (1)..(3322): unsure at all n locations
acgttttgtatgcaaatctaatcttgtatctttaatatgttaattctgatttagattttcgtgtctgcaggaatatgagaacaatttgttcctgcaatgtgataaatgtagaatgatggtattactttctctgagttgttcatactatgatatatcctttaagatctatactctatagtggctggcatcctttcttttcctaggtgatgttcagttcaaatatttttttgatcctggactaggtccatactagatgctatggccagctggaaccccataatggcattctgtggttatgcaacttatgtcgtcctggcgctcttgatattcctcctcgatgttgtctttgtcctgtagtaggtgattaacccaaccctttcggtatggactacggagtctctatattctttattaatagccaacaaaatatcttccagggggcgctatgaagccgacaactgatgggcgctgggctcatctggcttgtgccatatggatcccaggtataatcttcaccatttgatttgttactctgcatgtttctgctttctactaaggattttggacgctttacctttattatccaagttgtatgagcaatgattgtgatattatccagaaacatngctntcattggatgtcaagaagatggaaccgatcgatggggttaagaaagtcagtaaggtttgagctctattctttttcagtttcccttacatcaattgtcttaaatggagttagttaccttttcaactagagaagcggagcatagtctaattttcagtagccatgtgatgcttgaatagttgtctttttttcttcacacttcaaaacaggatcgttggaaattattgtgcagcatctgtggtgtatcttatggagcttgtatccaagtaagaattattttgatggcaagaaaaagctgaatcattgtgtaccatttacacatgacaatatttgaaatcttacataaatattagtcactgataagtatttaactagaacaatgatgccgattttcagtgttcaaataattcttgtcgagtggcatatcatccgctatgtgcacgagctgctggtctctgtgttgaggtactttcatatcctacaggggatcataagattctgcgtttattatacacgtttactgaaaacacagatttaacaaaagagctggttctaactatgatagcattcttgtaatgtcattgtagcttgcagatgaggataggctttttcttctatcaatggatgacgatgaagcagatcagtgcatccgcctgctttcattttgcaagaggcatcgacaaacgtcaaattaccacctagaaacagagtacatgatcaaacctgctcacaatattgccgagtatctcccacctcctaatccatctggctgtgctcgcactggtatgcagttgcattgatcaatacttgctacaaataaaagtgtagatttactgcacttatgtgggatggaattgttttgctcaaaattctcttacctcacatgtggcaatgtgtgtcttttgttcagctttaatgatgttacgttcttttatattttattctcagagatctaatctcatgtattctcacattgcgtttgcttgtattcatgttcacatctaaaattcataaaagatggcactgtataggtcagtttatagctttatcttgcaggattattaacgtattttccctctgtttctggtagagccatataattatcttggaagaagaggacgaaaggaacctgaagctcttgctggtgcttcttcaaagcgattatttgttgagaatcaaccgtatattgttggcggatactctcgacatgaattttcaacctacgaacgcatttatggatcaaagatgtcccaaataactactccgagcaatattctatctatggccgagaaatatacattcatgaaggaaacctacaggaagagattagcattcggtaagcgtttattcagaaatcgtaaaatatgctacaacttgtcaaagttgctgctatgatgcctcggtttttcatgcctttggggggtttttgaggatcaaaaatttctgtaagaagataaaattggtgggacttttttttctacttgaattcttgggatgtatggtgcattactgtgatgggtctctggaatagtgatcatttttacttatttaggattagacgggaaacgtttcccataaaacctaacatctctatcataactaataactaattttatctgaaccttttttgttttcctttaaatgatttactttcttctacagggaaatcgggaattcatggttttgggatctttgcaaagcttccgcacagagccggagatatggtaaggcattcttatattttactgtccattcttgcttagtataacgtcatgactgacaatgttgtgaattgggtgggtgcaggtgattgagtacactggtgaacttgttaggccaccaatagctgacaagagagagcatcttatatacaactcaatggtggtacgtatctgactttgtacattttatacttcttagaaaattctgaacaatattggacctaattatcagcacattgatctgtggcttttctcatctagaccgatatatcactttactttgatgtattttattgaatgatttctctggctcgagcccctgaacattctcttagcattccctttaccactctgtgttgttagtatacacatcttcctaactttcactctcttatttttagaatctgatatttttggttatgagtactgagtagttagttatcaatttaccactcctttatgatatagggtgccgggacctatatgtttagaattgataatgagcgggtcatagacgcaacaaggacaggaagcattgctcaccttatcaatcattcatgtgaggtatggtcaagcagttttgacgatttgttatttaatttacttagtatctgcaatatcatcacattacttatggatatgcttctgtacagccaaattgctattcaagagtcatcagtgttaatggtgatgagcatattatcatatttgcaaagagagatgtcgcaaaatgggaggagctgacctatgattataggtttatcttcgtgccctttagttctcgggtgactttgaaattccattattacctgattctttatctataaatttgcaggttcttttcaattgatgagcgccttgcatgttactgtggtttcccaagatgccggggtgttgttaatgacacagaagccgaagaacgacaggcaaatattcatgcttctcgctgtgagttaaaagagtggacagagtcc

SEQ ID NO: 163818 - DNA, 582 bp, Arabidopsis thaliana landsberg
atgaaaaccatatcgccttgtgatcggaaaaacatgttcgggtgagggacaactcacaagataataggtactctggccttctgtggtttgtggacggttcatggaaagaaagcgaaaaagtttcaggtctagggtggttttgctcattagtcaatgcagggtcatcaactatgggagctgctaatctgcgtagaagtctttctcctctccacacagaagtcgaagctttactctgggcaatgaagtgtatgattggagccgacaaccaagaagtagcttttttcagactgttcagacctagctagtgaagatggtgtcttccccaaccgaatagccagcattttcaacttatttggaggagttccagcgttacaaagaagagttctcttccttttctttatctttaatctctcgcaacgcaaatgtcaaagtgcactatttggctcgaaaaattcgtgcggaactgttacatatcacttttgtaaaatattttcctcaaaattggctcgttgttgtcttaaataatagggagatttgcaaaactaaccttttttactacccttttaaagacaacgggaatga

SEQ ID NO: 163819 - DNA, 1488 bp, Arabidopsis thaliana landsberg
tctgaatctctataaattttgttgactatggcaaatagtttgcgaacattgttctcagtgtccactcatggtgtctttttgaacaaacggtctgggtttttctctagtaaccgaaatttaagggtttgctctcatcaatcaactaaatccgtaactgttaatgtttctccaaataacggttagtcttgttaaaaatttgtacctttaaagttttgacttttgttagcatttatcttatcaagttatcgtgtacgctaggtgtttgttggaatgcctctgagaatatgcagtgaaattcctagattcgtatcagtttcgtgtataaggtctgacatgtgtggtattatgatgcttgggaaagatgttcatgatctgtatatgatttaacagcattgtgatgaacgaatattgatgacaattgttgcatgaaacattttacgctattaaagagtccggattgtgatatttagatggtggaaagatgttatatgtgtaaaggtggtgactattctatgtaaatgattgttgctgatacttcttgtgttttgttgtaactgtcaagattagagacaagtagtggaggtaatgttgagaaaggttttctaagatggcgaaacggagaaggaatgtaccatcgttcggccctaattgattcctcggctctggttgagtttggagcagtggttcaccaagaagctatattgggagcagaggttcatataggatccaacactgtaattggatcatcagtcaaaattggcccttctacaaagatcgggtaacggttttgcttaatgtcttatacatgtttttgaagagaatcttgaaagaatctatacttgtctacaggtataatgtttcagtcagcaattgtagtattggtgttttatgtgtcatccataatggagtctgcattggtcaagatggtatggaccaagtccatgttttcttctttaccttctgagaattggcattgaattgagattggtttttaactgttcaggatttgggttttacgtggatgacaacggaaacatggtgaagaagcctcaagtaagcacacctagattgctctcttgaatctggataacaattgtgcatcacttttatcctttgttctgtttcttgctctccctagactttaaatgtgaagatagggaatcgtgtggaaatcggagcaaacacatgcattgatcggggcaggtaacagaatatttcaagaactagttccctgtaaagctcttttctagctccatatcctttactatttatgcagctggagagataccgtgatcggggatgatactaagatagacaacttagttcaggtgtctcttcgattctatcttgcaactcccccatagatcacaagtaaatgacaactgagatgctattctgtttacttaaatattgcagataggtcacaatgtgattattggcaaatgttgcttgttctgtggccaagtaggcatagctggatcagcagag

SEQ ID NO: 163820 - DNA, 442 bp, Arabidopsis thaliana landsberg
atggcggtggtggttccggcgacggcggcgagtggtgattccggcgacggcggcggtagtgattccggcggtggtgattccggtagaggtggttgtccggcgatggtggttatggtggtagttccggcggcggcggttatccggcgacggcgacggtggttgtccagcgatggtgacggtggttgtccggcaacggcggcggtggttgtccggcgatggtgacggtggttgtccggcggtggcggcggcggttttccggcaacggcggtggttgccggcgatggtcgttatggtggtgattccggcggcgtcggttttccggcgacggtggttgtggttgtccggcggcggaggtggttgtccggcggtggaggtggttggccggcggcggaggtggttggccggcggcggtggttatccggcggcggtggttgtagtggtg

SEQ ID NO: 163821 - DNA, 846 bp, Arabidopsis thaliana landsberg
gtgatttggaactgttggtgagctaattggaagaagtggacctgatcaaatcaacattctcgaccacaagctcgagtacagtcatcctcgagttcctgaagtactcagccacaacctctacaacaaatcactcgaccgcgacactctatcattcactcgaccaataactctaccaacatggccgagtctcaccatcatcattcactcgaccaatcactctaccaacaggtcgagtatcaccatcatcattcactcgaccaatcactctaccaacatggccgactcccaccatcatcattcactcgaccaatcactctaccaacaggtcgagtatcaccatcatcattcactcgaccaatcactttaccaacatggccgagtcccaccatcatcattcattccaccaatcactctaccaacaggacgagtattaccatcatcattcactcgaccaatcactctaccaacatggccgactcccaccataatcattcactcgatcaatcactctaacaacaggtcgagtatcaccatcatcatccactcgatcaatcgctctaccaccaagccaagtaccaccatctctatcactcgacttcatactcgactgcttgcttcagagttttctccattccgcactcaaccagacactcgagcacaaagaagagaagaagactccagcttatcactcgaccattcacttgaccacctgggttgagtaccgttcttaatccgtctcgatactgcgtcgttttgagtattagagtttcagaatatttcgctataagtagcatgtattttaaattttcgttgactaagttttattccgcagacactgtgttctta

SEQ ID NO: 163822 - DNA, 630 bp, Arabidopsis thaliana landsberg
atgctcgtgccgagcgacggcagcaacatggatagtgaaaggctggccagtcccaatcgaacggagggcatcggctttacggggcgggccatcggctcatccggtgctgcaatgctgggcttcataatcgtctccatgtccctgtctctccccggtcgggagtgagaggaacctagccacttgcctaacattgcggaatatgcactggttgcacgttattcgtgcgtttgacgctctatattatcaaacaccgctgggcctatatgccgacacccgatctcaacctgcttgtcgcacttgatgtgctgctgaccgaaggaagcgtcgcgcgcgcggcccaacggctgcaattgagcccatcggcaatgagccggacactggcgcgactacgcgagacaacgggcgaccctctgctcgtcagggccggcaggggtctcgttccgacgccccgcgcgcttgacctgcgccagcgggtcggtcatctcgtggaggagggagccgccgttcttcgccctgctgaaaatctcaatctcggagaactcgtgcgcacattcacactccggacgcgggcaggctttgttgagaattttggcccgacactgattgcacgcgtcggcgaggaggcccccg

SEQ ID NO: 163823 - DNA, 2593 bp, Arabidopsis thaliana landsberg
atgttacgtggaatatttttcatattagttactgctatttgttctacgaaaactgaagcttgcgagaaaaatgcaatagtaatcataaacgatctcggtcctggtagaattctccaatatcattgtcgctacacaaaaaaagacttaggagtccaacacctaaacttccatgctattaaaaccattcatcttcaggacgagggaaaaaatataacaaaatggcattgtctctttaagcaagggcttaacatgaggtatcgtaattacgtagaagcatacagtcaaaatacagaggctcctcaatgtggtcaagtacgtgtatggactgccagaatgagtgggatatggtttaaaataagttataataatccatctggaagatatatacgaggttggaagtattgaaaacgcgttctaatatttttgtaaaactgtttaaatttatataattcttcagctgcttatgacatgaacaaaagttataattcatgtcaattgttttcctaatatatatgtcatttgatatccatgtaattgaatacatatgataagagggaaaaaaaatcttttttaacacttttcctttttctcatcaaacgccacttttttagactgaaagtggagatcagggtgatgatgatgaaagtaaagaagaatctgagtttaggtagaagttgatggatgttgaactctactctactcgacgtgtcccaactatactaaagtgtctacaatcatggctctctaccacataaaagttaaaagtggtatatccaagaactaatttgatcagttcatgaaattggttcacgacatgttacatgcggataatgttcttccaaaatctgttcatgagatgaagaagctcttgaagctttttggttttagttataatttgattttcacatgattgcatcctttattgaaagatgtttgaggagtttgttagctgtccaagatatagtccttcgagatggaagtaagataagcatactagagaggaaaagaaggggttcccgcaaaggttcagaggtatttttcgatctaaggatagatttaggaggatatttagattaaaaaggattgcttaggagttgtgttggcatttcaacaatgctagtgtagacggtccaatgcgacacccagttgattcattgacttggtctcaaataaaagataagttttcaaagtattctactaaaccaaggaaccttcgactcggcttttttacagataggataaactcgttctctatgcagaaaaaagtattgtacatgatcgatgttgttagtcaactacaacatgttgccgactatgtgtatgaaggctgggaacatcatgatgactatgctcttccctagaccaactgcaccacacaacaacatagatgtgtatcttgcacctattatagatgatctaaatggtttgtggaaagaatgtatagaggtttatgattcttatatgaaggaaaattgcacacttagaactatattgttgtgggctattagtgattatcttgccttagggacactggttagatgtatggttaaagggaaataggagtgtaacatatctggtaaggacaaagggaaataggagtgtaacatatctggtaacgaaataaaactataaattgtgtaaatatatcacttaacaaatgctattagagggttacaggctggagaacagagtatgtaatattgtgtttagctacaagatttcgaagaccgcgtgatacaccacccgttattatatgtaattcaagacactttcacactttctggggtaattgaagaacgatacaatttgacttgtgttgaagtgaagaagaaagttgcattgaatcttataaaaatgacaaggatggtgtcattgacatcaagatacaaaggtaacgaaaataatttgatgaaggaagatactgagttgtttcaggaagttgaagccgttgaagatgaagaccaggactgatgaagacaatgatgatgagaatctacctttgattattgtgacgattctgatggaacagattctgatgacgggaattttagcttgtacgggtttccaccacaagaagaagaaaaacctaatttaccaatgaagaagatgagtttaagtatttttattgaagaaaaagaagatgatcattattcaaagttagaaatgtcttctttggatttggttggttgcaatgttatgaaacaaaatatcatttggagacacgattgaagacaacaattatagtataaaattttgattttatgttcataaatcgtcaccatttatattgtttttcaagtcttgtgttaaaaagtgaatgtggaggatatgagctacaccattaagcgactctccaaaattccatgtgtgtgtgtttgtcttggaacatacatgttcaatgacagacctttctgcacatgttcgacaagcaactgatgatatacttggtatgttccacaaaggttttagtaatccagagagagaattggtaaggggaagtccagagaatggatatgagaaaatacccatatacgtatacatgataaggagagaagatcatggaaccttaaatgcgacttgaagttgatacaca

SEQ ID NO: 163824 - DNA, 308 bp, Arabidopsis thaliana landsberg
ctatacggtgtacatatgtatactgaaatgaaatatgattatgaatgttatacaaactccataactagagtttcatgtcaatgaaattcaaatctttttgattttttcaggaatttgatagaagttacggatcggggtggcagtgcatcgtggggacgcatttcggatctttcgtgactcattgcagtggctgcttcatccatttctcagttggcagccttaccattttgctttttaagggatcagtcggtgaaccggcccccccccggaccgatgctctagctaatttagacagtattgtaaaataa

SEQ ID NO: 163825 - DNA, 1714 bp, Arabidopsis thaliana landsberg
cagtatctgagccacagttacccgaacagaaagaaactcatagatctgacaatttggatgcgtactcggggattgaattactcaataggaatggtccaccttatactcctttggagtttgaacagcagcaagatcctccggagttgcaaaaattttctgtaagggttcttgcaattttaactcttaaaaatcaaggaaagataaattcattcaaaaatgacatgctcttcctttccagcaggcttatgacaatcatggtagttatgaatttccgtactttagtcctgcaatggatgaaactgtacgagttcaaggattaccatctccacacgaggtaatttatgtttctgttgttagttgttactagtttgccagcatgagttgatgcgtaagagtctagttagctcctgtttgagcagttggtttgtgcatgtgtcatagttatcttttttgttttattaactaggaaaaactgatcaagtatccttttgataatgcagcagggattaagtgctcacatgttaaataatgccccaccatccactattcccatgttacagcaacaacagcaggcatcaatgcaacagatgtatccgcaggtccatgtttcgcattttcccaatctcatgccttatcgtcaattcctttccccagtctatgttccccaaatgcccatgccaggctactcaggtaacccagcagcatatgcacacccttcaaatggcaatagctatgtgctgatgcctggaggcggttctcatctcggttcaaatggtgtcaagtatggaatccatcagcaatataaaccagttccaactggtggacctgcgggttttgggacttacaacaatcctaatgggtatccaactaatcctcccaatgtagttggaaacgctacgggacttgaagatccatctcgcatgataaataaacatggaaatatttacgttccaaatcctcaggtaatgataattgataagtatggtagttgtgcccgaactttatgtttttaccaattattttttattctgattcatgtttccttatctaacactacaggctgagacttctgagatatggatgcaaaatccaagagatctttcaagccttcagtctccatattacaacgtagctggacaatcgcctcatggtgcttatttatcatcccatacagcacaccaatcgttcaacccaactgcgcaatcatctcacatgcagttccagggtctcttccacccgtcacagcctggtacgatggcgaatccgcaccacatgggacctggcctcagtggtaatgttggagtcggtgtcgttccctctcctccgtctcaagttggtacctatcagcaatcacaacttggtcatccgaattggccatcaaacttctgaagaaaatctaacctttgtcttcttgtctaatggattatataatagccaaaagcaaatattttgattctccttatgaaacgccaaactctgttttaattaatctttatttattcaatgcataaaatgttcccagctctcaacaatttgtctataaatgctttgtctgcttccatagcccctcattatttacagctgcaggtatggtgttattctcccatggcgtcaaattgtcaaggtaaagtcctgtccgtgcttcttaatcatttactgctattatagtttcggtcgacttcaagaaccctacaatgcatgtgaaggtttttaa

SEQ ID NO: 163826 - DNA, 3382 bp, Arabidopsis thaliana landsberg
cagaccgaggacgagaatatttgagccaagtttttagttatcatctcagagagtgtggatttgtttcacagctcacttctccgggaacaccacagtggaatggtgtatctgaaaggagaaatcgaactttattggatatggtttgatcgatgatgagtcacacagatcttccatcatccttttggggatatgctctagaaacgtctgcgtttatgctcaacagatgtccatcaaaataagttgagaagacaccatatgagatatggactggaaaggttcctaatttgtcttttctgaaaatttggggatgtgaagcttatgtcaaacgattgattactgataagcttggacccaaatctgataaatgttacttcgtaggttatccgaaagagaccaaaggttattacttttaccaccctactgacaacaaagtgtttgtagctcgaaatggtgcctttttggaaagagagtttctttcaaaaggaactagtgggagtaaagtattactcgaagaagttcgagaatcacaaggtgatgttccaacttctcgggaagaacatacgttagatctacgaagagtcataaaacctatacatgtggaacctgaggtacgtaggtccgaaaggagccgtcacccacccgatagattcggagattgggtgatggacgatcatgctctatttatgatagagagtgatgaacctacgtcatacgaagaagcgttgatgggccctgattccgataagtgattagaggccgcgaaatccgagatggaatccatgtaacaaatcaaagtatggactttggttgatttacctgatggtgtaaaatccatagagtgtaaatggatattcaagaagaaaattgacaaggatggtaatatacagatatacaaagctagactggttgcgaaaggttacaatcaagttcatggtattgactatgatgaaacctattctccagtcgcaatgcgttaggtccattcggattctcctagcaactgctgctcattatgattatgagatttggcaaatggatgtgaaaacagcttatactgatgccaggtgaaagtcactggatagtagtcaagaacatccttaagtacttgagaagaactaaggataagtttttggtctatggaggaagtgaggaacttgttgtgagtggttatacttatgccagctttcaaacagacaaagatgatttccgatcacaatcaggatttgtcttttgtctcaacggaggagcagtgagttggaagagttccaaacagagcactgtggcagactttataactgaagctgagtatatagctacttctgaagcggcttaggagactgtttggattaggaagttcattactgaacttggtgtggttcctagtatttctggtcccattgatctttactgtgatgacaatggtgccatcgcgcaagtaaaagaacgtagatcacaccagaaatccaaacacatacaaaggcgatatcacctcatttgtgagattattgatagaggtgatgtgaagattagcagagtttcaacggatgcaaatgttgttgatccttttaccaaacctcttccgcagccaaagcatgagagtcatactgctgcgattggcattagatttataaagatgtgatcttatttctagtgggaggtgtttttcttttatgatatgatgttcatgttaaaatacatttggatttattttcaaattaatgaaatttgcttcagtattatttatttctttgataattaaataatagtcccaaataatttatatcattcttataggtcatcaagtacgtgacttgatcatgaaaccctataagtggaaaatgacatagattattgaagtccctaatcaaggttattaaaatgggacattaataactaagaatgactagtatgtgaggtgactgatgactaagtttcgtggagtcattaatatgtagtattaaagtcaatcacataaatatgtgttcgaaaacacagtattggactgacccgctatgagaactatacaagaatgttatatgagtgttatataactttctcataacaactatagagtatagtcctttgatctgagtttgtcatgttttcttatacatggattggtctgtttgactctttcaaacgtcaaccgtaacagatgattataaagacaatgattggcgtattatgaattgtataaggaacagggatggaacaagatgggatttgtccctcctatataacgggagataaatatctctgggcctatcgaagatttgacactgagaaatgcatggccgtgctcaaatggattgaaagtcaatcgtttattttatcagtataaatcagagttcgataaatatgattcagtataataaggatgacaccatttcttaccttatgctaaaattgagatatacagacaaagggattaccagaatagatgattccagtacaagggggagattgttgggaatgtcctgaaatcagttgtactttactctagttaaagttgtaatgtcgaggtttgatatttgtataatattaggtggttataatgttttgctagaaaccccttataatctatgagttataactcattactaatattatacaaacctacagggtcacacacctaagcaaactggatcaataaaaagagttattgggctttggcccattattaaccctaattggttagggttaaacatttggctatatatatgatatattagcaacttttgtgagatacacttttgatcacaaaaacctaaaaatagagagacaaatagtttgtctgagttttgagattagatctcaaaggaactagcattccagatctgatgcagtttgtgtgcgtgtggatatcggtagagacacaatacttagaatgctaaaataattttgatagaatatagttcacttttctgctgcgaaatatccatttattttcaaatcctatgatctagatttaatttatcgtttacacggttcctcataatttaattcattattagtatttataaatcattataaaccggtacgaattgttacacaagacttaatccatcatcttggactcaaaagtgctcgacgaagcttatcaccgcttcatgcggaatttgattccttgttatgggcaatggaatgcatgacctcgattggcaatacttctggcgcttttgcttccgactgcttagacctgatttttatcattgacaatcaagaagattggctgatattcacagcggaattggcatcatatcgctccttagtttgttttttgccttattttcgtattagattttttcctcgtagttctaatactcgagcagattgtttagctaagaaagctcgggctcgtaataactttttttccatgtaa

SEQ ID NO: 163827 - DNA, 1880 bp, Arabidopsis thaliana landsberg
ccccccccccccccccttgaaattgcatgacagttctctaaagaccgaaatgtccggtttggaatcaggacgctgtgagtcctggttttactcggttgacaggccgagtacagtggctaattatgactccagaatcttctgtgggtcgttctgctgctgccagggaggaagttgcaaggggaaagagggtttgggaggctgagccagctacaatagaggaggagcctatgttagagagggaagcatctgaggaagatgtagagattgctgaggaggtcttgccagttcttgcaagaaggagaatgaacactccaaggaagaagaatgagcccaccattgaagagcactaccagaacctaatggagctgagtttcgaagggacacgatatctccataggccaaccatacaagcattggggatctgtaaggatgttgaatatctcatggagatggccaagctagagacattcttttcctacaagcgcgagggatacaaggaggagagctgcttgttcctagccaccttgaagctccacttctatgcagatgagagggagaaagagctacataaaggggtggagtatatcacattcatggtgtatggaattcactactcccttgctattaggcaggttgatgctttattcaagttccctacctagtatgaaattcgccaaatcttcaacaaggacgagctccatgatttgtggttaacaatcgttagtccacttccctacaagttagctagggccaagagttcagcgttaataagcccggtgcttaggtatctccacctctacattgcgaatgccttcttcccgaagaagaccactggccatgttaatgagggagagctgaagatacttgatcttaccctatgcttcattttggggcaaataaggaagaagatagagatggaaggggatagggctgatacatccctttgagtggtgttgattgatcatttgataagctttagagaatatgcaaccggcatccaccaatccggttttggagacagcttgtgtgctggaggagtgatcacacccatcctaatagctgctggagtccctcttcatactcccactgtcacagccaactatattgatattgagcatttgaagaagaaaggcttcttggataggtctgctccagttaagcaactccagttcaagtttaagcactccaagctaggtctctctaggctagcacttccttgcaaggagtacaccacagttagaactggaaacaacattgactttgatcctcctccatcaatcttagtcaatgtccatgtgcctttccacgaggagccgagcatagggagtgaatcacaagaagaaggagtagagttcaaccaagccgaagctgagcaagaagagcatactcggccgagtacatttcggcaggccgagtatggccaggccgaatatgaccagtctgtgtacagtcgtgctgagcagtttgatgagcatgaggactcgtgtgaagctgcagcagagcagtatttcttcgaagattatgctgagtccgatcaagaaagagatcccggccaagttcacaagaagctgggaatgctcaagggtctagggaagtttcagagaaggttgattagtgggttgaaaaagaaggtgagaaaaatgaagagggcaatgaacggtatggctgttcaaattcaggagctgcaaagaaggcagagatcaccaccacctccagctgagttcaggagaagcaactcgatgagtgttgttgataccggatcccgcaaactggatctctgaagtattttgaaggcccatcagttttcaagtccaagaaggaccacgttgcacaaaggagatggtcaaatcttgacattaatttgtagtttaattcatgta

SEQ ID NO: 163828 - DNA, 574 bp, Arabidopsis thaliana landsberg
atggcagagactagaaaggagatgctaaaatcttctctatggggagaggttgaggtagaagttgacatcaaatctcctgctgaaaaattctaccatgtgtatgtaggaagaccagaccatgtcgctaaagccacttctagcaaagtgcaagcatgtgatctgcttgaaggagaatggggcaccataggcagtattgtcaattggaactacgtttatggtaacaaattataaatttatacctctttaagatatcgtaaatactttggtgattttattggtgaatgttttgagtgtagcgggcaaggcaaaggtggcaaaagagagaatcgaattagtggaaccagagaagaaactaataaagtttagggtcatagagggagatgttttggatgtgtacaagaacttcttgatcacgattaaagtgaccacgaaggatggaggggttggaagtgtggctaaatggcaccttgagtacgagaagaatgatgagaatgtgcctgaccccgagaatttcctccctttcttagctgagatgaccaaagagattgatgaacacctcttatccgaggaatag

SEQ ID NO: 163829 - DNA, 1222 bp, Arabidopsis thaliana landsberg
atgggtaatacagataagctgatgaaccagatctttgaattgaaatttacgtcaaagtctctgcagaggcaagctaggaagtgcgaaaaagaggagagatcggagaagctcaaggtaaagaaagccattgagaaaggtaacatggatggtgctcggatctatgccgagaacgccattcgcaaacgcagcgagcagatgaactaccttcgtctctcttctcgattggacgctgttgttgctcgactcgatacccaggctaagatggctaccatcaccaaatcgatgaccaacattgtcaaatccctcgaatcgtctcttaccactggtatttcacattctcacttttcagcaatctaatcaatttggttttgttggtgctcatagcattatagtatagattgaaaaattctgctccttgttgttgtttttgctgattgaaggatatggaatcatgcattagggtttggtttgatgaaatattagaatagctctctctcaccgtcatggatgttctgtgatctgtgatgaatttttgttgcatttctctccttttggtaagtgtagtatagagggagaagaagatagggcttataatactcttatacgttgtgctgtagaaactcgtgttatcattttctggtttgttctttgcaacaggcaacttacagaagatgtctgagacgatggattcgtttgagaaacagtttgtgaacatggaagtccaagctgagttcatggataatgcaatggctggctctacttcattgtcgactccagaaggagaagtcaacagcttgatgcagcaagtagcagatgattacggtcttgaagtttctgttggactacctcagcctgctggtcatgccattcctaccaagactgaagagaaagttgaggaggatgatttaaccaggagacttgccgagcttaaagccagaggttaattagctaacctaacaaaaaaaaaaaactgtatttggattcttcttttattgagatgttgatgctattaatccctgaacatgatgggaatgtttgtgtaaattgctcaccctggtacatgcttttgtttatataaaacctagagtgtgtttttacaatgagaaatttcatcatctgcttaatggtttggattagttgtacaaatgttaattctccagatgtgtctctggtagtagttccaccaaattttccaggtccagaaaggaatacactggagtaa

SEQ ID NO: 163830 - DNA, 519 bp, Arabidopsis thaliana landsberg
atgctcaccaccaacactctcgccgtcctcctcctcctcttcctcagtctctgctccgggcagtcacctccggcaccggaacccatcgccgccgatggaccttcatctccggttaactgtctagtatctatgctaaacgtatcagactgcttctcgtacgttcaagtgggaagtaatgagatcaagcctgaagctgcttgttgcccggagcttgctgggatggttcaaagttcgccggagtgtgtctgtaatctttacggcggcggcgcatcgccgcggtttggagttaagcttgataaacagagagctgagcaactttcaactatctgtggtgtgaaagctccatctcctagtttgtgttcaggtacatttactcatttggtacacctactttttctatgtaatttggactgcccgattcgattaaactcaatccaacggcttagagatatacctgacagttttgtaattaatcatttgtttcgttcattagcaaatgtttgcaaagtcttgaaatag

SEQ ID NO: 163831 - DNA, 1861 bp, Arabidopsis thaliana landsberg
acaaaacaagtctttgattctcttgtactctataatggtttacaacaatttactgtaatttgcagagaggtggcgatgtttgttgtgaattatatgaagagtggtatcaagtcagtggcatctaagctggctaacaaggatgagaaaggtttgaaatggctgttttgcaaagacacggattgtgtcttaccctcgcaaaccaaaccgaagctagggtcatcatcagcgtacgaattcatttaacttaaaactatatttcccattcatttgatttctcattgtgaactctgtaatgaaaaggtaaatagtcaccgttaatgtactgttttttgggttttatacgctgatcattacgtgtttataaggtgtaaggaagttcttatgagtttttcaccacccttcttaaaatagttagcttggttgaaaatagctcttttgcttcattggcaattatccaaaaacaaaatcaccagcttaggatgtcaaaaaataggttaaacgataattttatttacttccctcaaaaaagcctgagaaaatccccatcaaaggccaaaagaacagaaaaaagtttttttcacgcggtggcaatggcaatggcgtctgcttcttcctcctcctcctccatatccgtcatcattttcctcctcttggcgcctctctgcctttcacgtgagtcaccttcgcaaatcccaaacggaaccctagatctctctttactatggtacggccaattcacgcctactcaaaaggagagggttcacgatttcatagaatcgcttaacttcgacgccaaggaaggtcttgacccgaaggtatcggcgtggtggaaagtggtggagagttaccaagagaggtttgaggtgaaggatatttaccgacagaagaagagtaacagaaccgtagctccgaggattaaggtgaaggttgtccggagttatgtggatgagaagatgaagtatggaaaggaattgacaatggggaacggtgagaaacttgttgagacggctatcggaaatatgtcgaaagtggttcccgtggtattactttcggcgcaagttagggctcatggcgtagggttttgtgacggaacttgccaacataacgccctagccaaaattaaaggtttgactttctcttcgttttttttttccgtctacatctctcagatttaaacctggattaatatggcaccgtgagagatcgacactagtacaataaatatattttaagtatgtcttgattttctcctcgttaaattgcataacattaatctattttacccttgagaaaaagattattggttctacataattttgtagcttttttagtttgttctaaaagattgtagtattagacaacaaacaaaagaaaaatttgacgtcattacgtaaatcccacgcaggtcaaaaagaaccacgacggtacataatggtaagcaacccgaaggtggaatgtcccggagagtgcgcttggcctttccacacggccgataagggtccacgtggcatgacctatcaaccggcaagtggagaagtcgcagctgacgcactggttattcagctagccaccggtttagccgatttggccaccaatccagatctaaccaagtccttattcaaatctgagacgacaccgtacaacgatgacgtaaagaaaaaccatgaatcttcgtcaatgtatattgtggaccctgcaaccaagtgcactcgggtttttggatccggagcttttccaggtttcactggtagaattcgggttgacccgattactggtggagcctttaattcacccggaatcaaccacttgaaattcttgaatccaactatttgggaccctaagaccaaatcttgctggactc

SEQ ID NO: 163832 - DNA, 797 bp, Arabidopsis thaliana landsberg
  unsure (1)..(797): unsure at all n locations
atggagttcaataaaaccaatcggatcatcgtgatcttcacggtttctattttggtcaccatttctacgcatgtagaatccagatcagattctccattnnnnnnnnnnnnnnnnnnnnnnnnnnntatgaaacctatcgctagtcctgcaaattctccggcggagatatatacagactctcccgctgcgtctctagaagctccggcnnnnnnnnnnnnnnnnnnaatcctccgtccgagatagatatctactctcccgcaacgtcaccagaggctcttgtcgcatcaccagaagctcttgcggagtcttcctctgctgcaccatctggaatcaaagtnnnnnnnnnnnnnnnnnnnnnnnnnaacccgccattgttatctccggagatcaaaaccatttgcggcaaaaccgataaccctccgttatgcgaatcttccgttagtcctctgttaacgcctcaactgaaaccagacacttcctcggtcctcattctcgctattcaagcttcgatcaccgcgaccaaggcggccatggccaccgtcgaaaaagtcgacgacgcctccgattgtcaggagttatatgatgacgcagttgtgaatttggaagaggcagttaacgccgtcaagtcaagtgacattgccaccgttaacacaaacttgagcgcagcgatgacagattacagcacgtgtaacgacggttttgaagaatcgggagagcctaacccgttggctgacgtggccgataagcttacgaagatggttagtaactgtctcgccatctctacgttgatcaagtga

SEQ ID NO: 163833 - DNA, 3167 bp, Arabidopsis thaliana landsberg
tggagcgatttaatgcgatttcatctaacctcgctccacaaaagcatatgggatgttgttgagtttggtgcgcaggtaccatccgtaggggatgaggattatgatgaggatgaggtggcccaaatcgagcacttcaactctcaagctacaacaatactcctcgcctctctaagtagagaggagtataacaaagtacaagggttgaagagcgccaaggagatttgggatttactcaagaccgcgcatgaaggtgatgagctcaccaagatcaccaagcgggaaacgattgagggggagctcggtcggttccggcttcgcaaaggggaggagccacaacacatgtacaatcggctcaaaaccttggtgaaccaagcgcgcaacctcgggagcgtaaagtgggatgaccacgaggtggttaaggttattctaagatcacttattttccttaaccctactcaagttcaattaatccgtggtaatcctagatataccaaaatgaccccgaggaagttatcgggaattttgtgagctttgaatgcatgatcaacggctcaaagaaaatcaatgagctagtgatccctccacatccgaagcacaaccggttgcattcaaagcaacagaggagaaggaggagtctacatcaagtagacaaccaatcgatgcctcaaagctcgacaatgaggaaatggcgctcgtcatcaagacgttccgccaaatcctcaaacaaaggaggggaaaggactacaaatcccgctccaagaaagtgtgctacaaatgtggtaagcccggtcattttatcgcaaaatgtccattatctagtgatagtgacaggggcgacgacaagaaggggagaagaaaggagaaaaagagatactacaagaagaagggcggtgatgcccatgtttgccaggagtgggactccgacgagagctccaccgactcctcctccgacgaggacgccgcaaacatcaccgtcaccaagggacttctcttcccaaacgtcagccacaagtcctcatggcaaaggacggcaaaaggaagaaggtaaaatcaagatcctccactaaatatgaaacctctagtgatgaggatgatgctagcaatgaggaggataacttgcgcgttctttttgccaatcttaacatggaacaaaaggaaaaattaaatgaattgattagtgctattcatgagaaggatgatctcttggattctcaagaggacttccttattaaggttaaaaatgcttatgctctagaagttgaaaaatgtggaaaattgtctagtgagctaagcacttgccatgaaaccattaacaaccttagaaatgaaaatgctaaattaattgctaaggttgattctcatgtttgtgatgcttcaatttccaatcttaggaataataatgatgatttgcttgctaagattaaggaattgaatgaatctcttactagccttaaaattgagaatgaaaagttaattgctaaggctaaagattttgatgtttgcaatactaccatttctgaccttagaaccaagaatgatatgttgcatgctaaggttgtagaattaaaatcttgcaaaccctctacatctaccgttgagcacacttctatttgtactagatgtagagatgctgatgttaatgatattcatgatcacatggctttaattaaacaacaaaatgatcatatagcaatattagatgctaaaattgccgagcataacttagaaaatgaaaagtttaaatttgctagaagtatgctctataatgggagacgccctggcatcaaggatggcattggtttccaaaggggagacaatgtcaaacttaatgcccctcctaaaaacttgtctaactttgttaagggcaaggctcccatgcctcaagataacgagggttacattttgtaccctgccagttatcccgagagcaaaattaggagaattcattctaggaagtctcactctggccctaattatgctattatgtataagggtgagacatctagttctaggcaaccaacccgtgctaagttgcctaagaagaaaactcctggtgcatcaaacgatcatgacatttcattcaaaacttttgatgcatcatatgtgcttactaacaaatccggtgatggagacttgttcttgaatgctatgagtcaggaacaaggcaacatagaaaatgttaatcggtaaagtccttcgtccttcgaagcattattcctctcaggatataatgattttcggacgaaggttatgaagggcataccttcataaatacattatataatgatgaaggatgaactataaggaatataatgaacaacataaacaattatgttttattatcatgtacaaacagaagtaatcgataagattacagcatgtacctttaacttgaaggggatgaaagtacaagtatgacgcaaaagccaatgcccaaaattcccgtgaacagtacgggaatactgttcacctatttataggcacgggtcgcagcccatgcaagattacattcatgccctttacatttaccaataactctatagtaattcttcaaggtctggttcggcttttcatctttaagtcggttccactcattgctgtcacgcagaagctttcttgctcgcaccttcggatgtgtgtcaaccttcgtattatgccggtctacagcaatgccgactttagtccgaggatacctgttcacacattgtactacagaaatactgttaaatcctgtttttgaggaccttcgtatgccgaaggtccccaacagtagcccctcgcaatattaatttgttaaaataataaatttagattgcgacatggacgaaggctttaagccgaaggtccgaaaaaacaccttccctttgctagaatagcaacattcactgacaggcgggacctttcaatttttaccgcatcgaacgtataaataagagcataccacgagctcatttggtacgctctcttgccacttgctctcgctcgctcgatttttagcttttgcgcgctaagattccctgagtctttagttttaaagcttcggcattgaaaatagttttttagtgtttccgaagatgtctggagacaaggaagctgttactgagacgaaactgtctcttgatgaggagaaaaacctggggtttcttatagcgatgtcgaagaccaat

SEQ ID NO: 163834 - DNA, 572 bp, Arabidopsis thaliana landsberg
atgagccacctctcaggagcatcgaactcgtgtggaacctccgtttcccgaccaagaccaatggttcctggaattccaaagcagtgttggtgtggcgatgaaatcgttgagaggatttcaagatcaaatccaaatccgtaccgtcgttattaccggtgtggtttagctgcagaaaaaaaggtatagataaacctaatttgactagtcactaaaatacctagatttacctaatagaaatacctaatagatatacctaatagatatacctagtttatacatagatatacatgtgatttaacaatttttacaatttcaaaatgtagcttatgaacgacaatcatgtgtttaagtgggtagatgaggcttttacacatgagattgaacaattggaatttcaacttggtgttcttgaagaagaagtaagagtgatgaagatggaaaggaaccaagagaggatggaaagagatccgatggaaaagaacaaaaaggggaaggactttaagatggtagtcatttttagttctggatgtttaatcaccatggcaattgttggcatgttgtgtttgtcgtag

SEQ ID NO: 163835 - DNA, 241 bp, Arabidopsis thaliana landsberg
atgaaggcttgggtcatatgtttgatggtaataagcattttcatgatgattgagccaacactagctgctggtgggggtaaatttttaaatccaggagtgcttgatccgtgtttgcgtcctaatcctccaccagggtgtcaagcctcaggatcagctgggaaacctagagagcgagttaatgagtataaagctggatgctccaaacttacccggtgcaatcgtgtcggataatcattattga

SEQ ID NO: 163836 - DNA, 536 bp, Arabidopsis thaliana landsberg
  unsure (1)..(536): unsure at all n locations
taatgtgaaatattgctttttgtgaacgttataggggtccaagagttgcnnnnnnnnnnnnnnnnnnnnnnnnnnnnnnnnnnnnnnnnnnnnnnnnngtcggtgaccatgcgggcccggttggtggcgcgcctggttccggtctccgcgactgaccgcacgcgagagggcctgattgccgccggctcgctgaggccggcccgcccacgtggcggtctcgcctctatcgacaccaaggctctgccgcggcggaacttgagcgcggtcctatccgagttgcgtgaggaccgatgatctacatggatacctccgcgttggtgaagctgatcgtccaggagcccgaatcggcggctctgcgtcggtggctggccgacatcgaggatcgagaccatgtcaccagcgcggtagggcgcgtcgagttgatgcgaacggnnnnnnnnnnnnnnnnnnnnnnnnnnnnnnnnnnnnnnnnnnnnnnnnnnnnnnnnnnnnnnnnnnnnattgccgtcaccgatgacgtgatcgcgaaggccgaa

SEQ ID NO: 163837 - DNA, 3075 bp, Arabidopsis thaliana landsberg; identical to SEQ ID NO: 28986
  unsure (1)..(3075): unsure at all n locations

SEQ ID NO: 163838 - DNA, 1020 bp, Arabidopsis thaliana landsberg
ccgttgaatttgatctttaggtctcgaaagttacaatgtttagctgattgtgtttcgatgaattcgaggattgatgtttttggcaatatgtgtgtgcagattttgtatgtcctagtgagggttatagtttcgcattcaagtcatacctggaaaaattggattggtcttgtgttaacatcgttaggttacgggattccatataagcttcttcatcaaatggcaaagcctagtgttagtgatgctggtgaacttcttgatggtggatttgacatgagcacccctggaatgtgtgggtacgttcggaaagatttgtcttttaaattgatcaactagaaagtgcctgcttttgtctcaagtgtttctgtatagttggattctgtttccataaccaaaagcaatagtaggaggactgtttcattatcagttgtttgaaatgagtgatgttttactagttgtggctttctccgagttttatcgtttatcagttgctacataatcgtcatctttatggtggattggatttatggtagattctatagtataagcctgatgctctattcgtccttgcagatatttgcatgatgtactctacatcacctgctttgtgcaggtcggatctatcatctctggaaagttttggtacgcgtatttagtggtatgatacccatctcaattttctttattgccatattttaaggcaaacaacagatttgctctgtaggaatgatgcaaccatttacttttgcttgtttttattttagatccctgcatttggagcatacaaagcttctggtcttattaagggactattgtcacatggttcagaggtaatcactttgtcttgaatactctcaaagtgctttgaacaagggggaaataaaacatgatcatttaaaatggactgtgttttgtctatatgactgaacttaaggaggtgttgaggatgagaagactcgcaaaaagagggagaagatggagagaaaagcttctagaggacaagtcgttaagacaagatctcga

SEQ ID NO: 163839 - DNA, 1070 bp, Arabidopsis thaliana landsberg
gtaacgagacaagggaacatgaattgccaagactgtgggaatcaagccaagaaagattgtcctcatatgagatgtcgtacttgttgtaagagccgagggtttgattgccaaacacacgtgaagagcacgtgggtctcggctgctaaacgccgtgagagacaggctcagttagctgttttgccagctaagcgtataagagacgctaactcaaggggtggtggggatgacgatgatgatgacaaagaggacgagaaaaatgacagttgtggtggtggctcggctcttgcttgcacccgtgtggttaatgctagttcttcaggtatgacgatgagttttcaattaattaacatagagaaaaaatttcaacaaatctagaaaggatttaaaaacaaatttatgtgaagatctggttatgaatgttttgtcaagaaagcaacaatatgatttgattgtgaatatatgtccaccggattttgctcctttctttttgctgtttgattttgattgtgaataaatgtccaacaaaatgattttagtcactgttctatggtaaacctgacgacacaaagggtttagtcgatttttattcaatatatgatgtaaaaaataaacaatggttaattatgtcatgtgtttcaaagattttgattattggattcacgaaccaaaacgtttttgaattttatagtaattctttggttttatgaaattagggttagagactagtcacttaccaccggagataagttccccggctgttttccggtgtatgagagtcagctcaatcgacgatgaagacgaagagtatgcttatcaaacggctgtgagcattggaggacacgtgttcaaaggtattctctacgaccaaggtccatcgtcagatcaccaccgttacagctcaagcctcaatggcgaaacctctcatcaacaccatcttaacctcatggactcaactccttcagccgcaactacaaacgccgtgaccgccgttaacactaacaacggatctattgacccttcttccctttacactgcggtggcaactccgttcaacgcctttgtcgccggtg

SEQ ID NO: 163840 - DNA, 2712 bp, Arabidopsis thaliana landsberg
attatgtttaattctattacaaaaaattaaattttgtattgtgaatgaagcaccaccattcatatattccagcttaaaatcatatggttgagcggatcctttctgactctcctgaaaatgacagataatactgatcaaggatactccaaacaaagatggtacggaatgtttcttcttaattataactcaaggataccttgtttttcaaataataactcaaaaacaaggtagttatcaatatatatattaagttatattcaatcattatattttcaaacactattttttcattacttttacagttatttatcaaatactaatttaaaatataaaactatgaattttgtagggttttcctttgattatttatagggttttgtagagagaaaaagcaatcttaaaaagaagacaataaagtttggtccgaaaacgacacagatttacattcctctcgacctccagattaatatactcttaagattacctgtcaagtctttattgagatttcgatgtgtctccaagctttggtgttctattatcaccagccaagattttggaaaccgtcactttactattacttcttctctctcatagcttttcaggacttttacggggaaaagcttctgctagtctcgtcgcctaaaccaaaggtatcttcctcttccacttcttcatgttgtgtaccctataaagatctgagtaaagtcgaaatatttgtacgaaaggtttataatgcggttcggggattgactggttccaaaaaaaggaccaaaaatctaatgttctggactctttctacttgttttctgaaatatttgaagttaatgtgtcattgctaaacaatttacatgtctaattcatggatgcagcttgtcaatcttccagacagttcgaccaattccaggttctatacattttagcattttgtaagttgatttattccacattccttatacaatagtctttgttccaggatcgttagaaactatatgatacgtttgcttacgccatatttttagtggctaaaaagataaaaaccttttgcacatattgaagtgtatcatcagtggtttttgactctcctttttctgttttttttttttcaaaacaatctctagagctcttgattgtcgggtgtggaagatacacccacccactgaatccccaagtccgccagttcgtaaagtcaatcggcatgaagctagaaactgttgattctgtatgtcctttgaactatacaagtatttgctctgttggttcggagtatttttctgtgcttattgattaacgctctgatctatccagagaaatgctgcatcaacttacaacatactcaatgaggaaggcaggatcgaggctgctgcattgcttccttatggagttacatcgtaagaaactcaacacctctggaatactgtagaacaaacttcgaacagcttgagtcgatctttatagttgaaacaccaacatggtcttcttgtctactgtaaatgatatatttcactctatttgtaaaacttttgcaaaaaaatcgaaatttacaggattaccaccttgttacgtagctttaatttgattgagctttatctgaaaaatagaagatatagatgttaggggttagatttgggcttgcttttcccaaggcccaaatccaagtcaaaggcctaagcagaatgttaagtcaagagggtaggctcgtcaaaaccctggaggaatgccctacacgcagaaggctataaatacggaatagcatgtcttgtcaaaggggattccaggaggacacttacaaacaaagagaagctcgtcagctctcccgtctaaccagctcgtcagctctcccgtctaaccagctcgtcagctctcccgtctgaagcatctcgtcagccggtccgtctcaagtagctcaccaattcgaccgtctcagccagctcgtcagctcacccgtccgaagtatctcgccagccggtccgcctcaagtagctcatccgttcgcccgtcgcaagcaactcgtcagctctgccctccgaagtatccctccagccgggacgaatcaagctgctcgacagatcacccgtctcaagcagctcgacagctctcccctccgaagtatcccgccagccggtacgtctcaaccagctcgtcagctcacccgtccgaagcatctcgtcagctcatcagctcgcccgtctcaagtagctcgtcagctcacccgtctcaagtagctcgtccgtctcaagtcgcttgtctcgcccttctcaagtagctcgtccgtctaaagtagcttgtcagctcgcccttctcaagaagctcgttagctcgctcctcatcgccaaactcttcagctcgcctttaagctcttcaagctcctcggctcgtcctcaagctcctcagctcgtcatcaagctcctcagctcgtcttcaagctcttcccatcactcagcgaccatctcctcgcctagctgtcagctagtcagatcgtccaactcgtctagctatcagctcatccctcgactgcaaaactcatctacctcctcgcctagcggcagttcgtccattgactgcatagtccacctatctcgtcgcccagctcgtctacaccttcagcaaacaactcggtttgtccaactcgtctctcttccacggttcatccagctcgtcgcacatttgccggctcgtcaactacctgccgacctacctccaatgacggcctag

SEQ ID NO: 163841 - DNA, 603 bp, Arabidopsis thaliana landsberg
atggagggtaagagatcacaaggacaaggttacatgaaaaagaagtcttaccttgtggaacaagatatggagactgatacggatgaagaagaggaagtaggtagggatagagttagagggtctagaggtagcatcaatcgtggtggctcgttgcggctttgccaagtagatagatgcacagctgatatgaaagaggcaaaactgtatcaccggagacacaaagtgtgtgaagttcatgcaaaggcatcttctgtctttctctcaggacttaaccaacgcttttgtcaacaatgcagtaggtaacgtacaacctaatttacccttcaaaaaactttttgtctggatctttgaatggtttttttgagttcttgaaacaggtttcatgacctccaagagtttgatgaagctaagagaagttgtaggaggcgcttagctggacacaatgagcgaagaaggaagagctctggtgagagtacttatggagaaggatcaggtcggagaggaatcaatggtcaggtggtgatgcagaatcaagaaagatcaagggtagagatgacacttcctatgccaaactcatcattcaagcgaccacagattagatag

SEQ ID NO: 163842 - DNA, 2208 bp, Arabidopsis thaliana landsberg
  unsure (1)..(2208): unsure at all n locations
atgagtacatcatcgaaatgtctacactctatcacacaatctagcgacacacaggttaaatttttcaattttttaaacaatatagtttacattcattccacaaagtatatgtaacttctataaactttcgtcttcgttgtcaacagaggaagattgcaagattatacattccggaaccaattctcgcactaattgttagccacgtttcagaagaaggaattgaggctctgaaaaactggattaaatctggtcatgaagggaaatctgcagctttctctgtcgagacactatcccgagttcgtttagataaaagccctgacttcatcaacatgtcttcacccgactctgttcacttctcattctactccaaatgtcttgcaaaaagaaacccttacgctatgtatctccagagcttgaggctagggttctgttctctcgacatgaaaggcgccatttcattattgaatgattgtaaagatgtcattacacgcagaaggctataaatacggaatagcatgtcttgtcaaagggggattccgcgaggacacttagagactaagagcagctcgtcagctctcccgtctcaaccagctcgtcagctcacccgtctgaagcatctcgtcagctcatcagctcgccagtctcaagcagctcgtcagctcacccgtccgaagtatctcgcctaatgtaaccgtcttgtctggaccaattaactcattccagtagctcttcttgccatcatcataaacaggagaatcttcagggtcatactcgtcaggaaactccccacaaggtaagccagtcacggaagcaaattctagtagtgaaaatctcattgggtgtccaccaaaaactgtccaaaactcatactttttcttagtaagcaactgtctacataacaaggcatgaatgaccttacccgaagtcgcaaccctactaactggcaaatggaataaaggaccaaagcaagactgaagtataaaatctaattcctctgtcccatcaaaaaccttcttgataaaggatagaatatccggtctagagtatacgttcagccttcccctcggataatgatcggtggcgaagagtctatttggaaggtttgaatcccactgagaagatggttcctgagatgtcgaccctgttcattggcaagaaactagttcaagagataacgattagattaacgagtatttgtacaaactactaaaaccacaaacgtctgtgcttagctacaaacaattgggaaacatttttcgattcaaaaaaaaaattgcagaaacattcagcgagaagannnnnnnnnnnnnnnnnnnnnnnnnnnnaaaataagatgattggaaacgatttgtaccttccattgagtattccgatcagtgagaatcaactggaatgctaatgaaatctggcttacgagaacaataaatcgaaatcgaattcgattattgcagagatttgggggaaatgactatttggtttttattcaaagagtatagagttgcctgagtggcggattgatggacagcgacggaggagtcgccggattcggagcagtcgccggattcgctggagtcgcgatgtggagaaacagtaaattaggttttttactgggtaagcgtttttttacgatcgtggttggaatatggagttacccagacggttgataagacgtggttcaccggaaccagtttaaagaaaccggctaaatttgttaggttttgttaaaccaacgatttcagggtaaaagggtaattctactgagttaaagtgactaatgcttttaaagtacctatttgtggccaaagtttcaaaatagtgcctttacgtgtaatattctcttgtttttggaggataaaaggacaattctatccttcccacattaaaccatcaattgattaaccgggtctagggattttgtttgatttggtatctaataaaactaactgaacgtgtcaaaaaaatattattcgttttccattttcgaaaatctctcaatcgttcgttcttacagacttattcatggaggtcaaggaagagaaactgatggaggagaagcaatgattgccggagaagacgatccctgtgttcaccgttctgaaaaacggcgctattctcaagaatatcttcgttgtgaacagtcgcgatttctagaaaccggagagaaacggttccactgtaagcgatgatgacggtacagtagaagagatt

SEQ ID NO: 163843 - DNA, 2524 bp, Arabidopsis thaliana landsberg
aatactagcgaaattcccgaacctagttcttgatgtggatggagagcagtcgacgatactgcataaagccgtgacacaaaggaacttggaacatgcgaggaagataatcgacctctgcccttcattcgttagcgttactaacgtcgacggaaacactcctcttcatttagctgccgaaattggaaacgaatttatcctctggaaaatgttgaggtgtggagaagcagactgcatgaagattaataagcaaggacaaacagcattcatattagcatgcctcaacaatcacctcgatgctgcacttaccctcgtagaaaatatgcggtctatgacgatggtggaacttgatgcagcctttacaggacagcaaccaggtttaagattatcatcgataaaagttatataacatggttttatttaagcaaaatataaatctaagccaaaaaaattatttgtgtttttaaaataacataatttgttttgccacgcatgataatttgtttgtggacatgttgcttcttttcatatatattttttttttgataagattcatagaaatgttagttgcaatatattaaataacagaggataatattcattcgttttttttgttttaatataaacagttatcatagataaaatgctggagaaattcccgaacctagttcttgatgtggatgaagagcagtcgacgctattgcataaagccgtgacacaaaggaacgaggaatatgcgacgaaggtaatcgaccactgcccatcactcgttagcgttactaacgtcgacggaaacactcctcttcatttagctgcggaaattggaaacataaatatcctctggaaaatgttggagaccggagaagcagagtgcatgaagattaataagcaaggacaaacagcattcatattagcatgcctcaacaataacgttaattctgccagaatccttgtagaaggaacgagttctatgacgatggtggaacttaatgcagccttttcagaacagcaaccaggtataacatgtttttatttaatcaaaaaacaaaccttagcaaaatattttaatagaatttcgtggaaatgttaattgcaatatcttaaataaatggaggataactgcagatatataatttgataactataatgaaattttgattgttttgttaatgttgatatacacagttatcatagattccatactagagaaattcccatacctagtttttgatgcggatgaagagcagtcgacgctattgcataaagcgtgcaaatcaggaaaccttgagatggcaaggacactattagatgttgatcaagaaattgcagaaaaggtggataaagatggtttgacccctttgcatcgcgcggtgataaagggttcagttgaaatcctcaaggagtttctattaaaggctccttcgtcattcaacacaaccacacaaggaacaatcgaaacagttttccacttagctgcgaaataccaaaaaaccaaagcattcatcttcatggcccagagtgcaaacataggccaacttctttacagcctcgacgcagaggacaacactgtacttcatgttgccgcctccgtagactccacttctgtaagtctatattcttttctgttgcaacaagagatttgaaactgaaaatatgtttcgagtgttaaatttaatagcgactaattaaatttcatgtttattacagctagtacgccacattctttcggaaacaacaattgatgtcaccttgaaaaacaagaaaggttttgcagccgttgacctaatcgacaaagagggtgtagactttcctctgctctctctatggttccgggatgaagcagaaaaaattcaacgccctgcgagatatgttaaatttgcacatgaacctgtagaacgcatccgaaacacaaacaatggggagaagttaagttctgaaagccgtacgatggatttgctacgagaaggtagagatcctagaaacaaggaacgtgaaatgcattcagagagtctacagaacgcaaggaacactattactattgtcgctgtcttgattgcatcggttgctttcacatgcgggataaaccctcctggtggtgtccaccaagacggacccttcatcgggaaagcaaccgcagggagaacattggcttttaagatcttctcggtagcaaacaacattgctttgtttacatcactaagtatcgtcactcttctggtcagcattatatcctatagaacgaaagcactgaagatgtgtgtggtcatagcacataagatgatgtggttggccgtggcatccatggcaactgcttatgctgcatcggcatggatcactgtgccacataacgagggatctaaatggttagtctacaccacttctgctatcgctagcgttgcgctaggaagtatgtttgtgtatgtgtcatttatgatggttaaacacattttgaagaaggataaattgagacgtaaccagtctcacgggaaaaccccaagtacgaccttggacatggaagccgctggtg

SEQ ID NO: 163844 - DNA, 728 bp, Arabidopsis thaliana landsberg
gtggtcaaaaagggttcaccggagtgggcgccaatgttggtcacttgctctcaaatgcttcggcttaagagcaaggcaacacaaaaaatgttaaacgtcaaagtccttcgtccttcggagcattatttccctcaggatataacaactctcggacgaaggttacgaagaacataccttcgtaagttcaacatataaaaatgaggaggaaattatatgaagtatagtgaacagtatgaacaattaaatatgttgttattattgaattatttctatttcattactatgaataaatagaaataataacttattacaagtataccttcggcttgaaggaagataaagagtacaaatgtgacgcacgagcgaatacaagtcagtgtgaacagtacgggggtactgttcacctatttataggcacgggatgcagcccggtcaaaattacatttatgtcctttacgtttatcaataactctatagtagttcttcaaggtctaatctggtttttcatctttaagtcagtttccttttccgccgttatcccgaagctcttctacacacagcttcggtctgcgccaaccttcgtgttccttatgcttcttcatactgtggctctgatccgagtccgaagatacctgttaatgtactttactccagaaacattgttaaatcatgtttttgaggaccttcggaagccgaaggcccccaacagtagcccctcgcaatattaa

SEQ ID NO: 163845 - DNA, 3629 bp, Arabidopsis thaliana landsberg
atggcaagcctgtggcgagctgtaatcggcggtcagaacaacaattccgaagactacggaggcgtagagttctggtctaacccagaacgaaccggctggctcacgaaacaaggagagtacatcaagacttggcgacgccgatggttcgtgctcaaacaagggaaactcttctggttcaaagactccgacgtcacgcgtgtgtcacgccctcgcggtgtcgtccccgtcgcatcgtgcttaaccgctaaaggagcagaggatgtactcaacaagcaaaacgcgttcgagctatcgacgagaaatgagactatgtacttcattgctgattcggagaaggagaaagaagattggatcaattccattggacgttccatcgtgcaaaactccagatccgttaccgattctgagatcgttgattacgataacaaacactaaagtttctctgtttttgtcttttgtcaaagtgattatgatcacagctttcattgatggagtcttaaatgtaaatcttacaaaatcaagaaatgaaaagctttgtctctgcttgaaaacatgaactcatatccgaaaaacatataatataaaacctaattcttcaagggcaacgcttctggttcaaagacttacatggttcttcaaacatgtacttaccaaatatggtaacagaagcaataccttttgcacgtgatcaaatacaataacttcgtcgtacagactaagatgcatgtatggaaagttcctctcgtcattaagtgtcctaaaccctacccgcttccattcagggccgggtctggaaggaacaacaaaatacctaaaacccctctcctcttcttcttcttcctagtccgacactcttagagtcttcaaaaacattgcaagaaggaaacaaaatccatcttcttcgtctattagaaaccctaacttgagaatgtaagtattgatttcccacaacagttttctttttcctttaactaattaggtttagcagaaaacaatcaatgtaggcaagttattttttttttttcggccttgtgtaaattacaggtcttggataatcgttaagaatcttccttccaaacatgtgacagaggaacgacttcgagatgtcttttcacgaaaaggagaaatcacagacgtgaaattgaagcgtaaaaggtacattcaaatcgagtgtttttcacagctaattcttgtgttttatgttggaatcactatatttcgttttgcttttgcagtgatggcaaaagtagacaatttgcttatattggctttcgtactgaacaagaagctcaagatgctatcacatatgttaacaagtgtttcaatgatacttatcgaatatctgttgaggttattaatcttcacttaattactcagtttcacttatgtagtactagtttcaaatctaaatcagattctccttggtatataggttgcggaccctcctccgagggaagaagggaaggttaatgaaaatagtgaacattctcatgaacaagatctcggctagcctttcaaactctttttctgttgtcaacattctttatcaaaaacactcaaacaaaccgaagcattcattgtaacaaagtttttttggttgaatctatttttacattctttcaaaaaaagaaaatagtgaacatttttctaatgcttatgctaaaggagacaaaaagattaagaagaaaccagaggttgatcatgatcctcagcttcaagaatttcttgagcttaataataagttgaaaacctggtccaatgatatgtgtccaccggcaacgatcaggtctcgcccgatggtgctgatgagcctaacaaagcgacaatatcattattagattctaaaaagactagaaagattaaagttgttgctctcgttggtgatgatgtttctgatatggaatactacaagagtcggacaaagaaaaatctgtcggattcggacagtgattgtgaaacttatggttgtgaagatgcaattcatgtttttcctattgatggggatattgaagctgacagagttgacaaagagtttacaattcatgttttcggattcggacatcaggatgtttaatttggatggtgttgcagggcaatggagaaattagataaattaccctttccagggggggacgttgcatatttcaccagctaagccccgtgattatggagaccaaagaagcactttacttttaacgaataggtgattattccctaacctggtcttacttgacttttcaggttgttttccttgaaccgattgaggcacgtgaagctctgaagggaatgggcgtacaagcgtatcaagttttcttcaacattattgtttctctatgtataaagtctaaaatcctcattctttcttcccctaaagtgcttcttggagataaatggttgtcctagtctaaccaaactgcttcatcacatttccttattattacagaggggctcccctgtatctgggctcctggagatattcttgagccaaaagcacttgccgataacaatgaaaatacgagtgatgttgaagaaaatgatgtgagaagaagactcaacttggatcagcaggttggaatcgattcggatataactgaggtatgcccactttatgattgctgtggacgttttgaaaccatgtgttcgtccttttgtgtggtattgaagtatctgtactaatttatgttcgggtttagtattacagtgtaagtttcaggttaggtactgtataatttatgttcactggcttcaagttttctgatcaatcttgtaacatttcctttaaataatgcattatatttcagtcaaatgtcctttatgttaagattctgaacttcaagacactgatgagagtttgaagaagcatttgactcactggtgaagcagggaaagattctgagttttaaggtaagttttgctgacagatgatgatatgcagttaaccatcatgtctgttttttatatggttttgtagaatttgactccgaagagacagcgaccagtgtctacagagatctacaggtatattatcctagttaagtctctttaatttgaaacttgaagttgattggactcgatgaagtagggtgacaattttttgcttgctcctagggaactgttgtggatgggcatgctttgatcttgagcttctctaaaaacaaaccgagtggaacggctgggaagatttatacaaggacacaattttgacaaagttacatgtgaaaaatatatcttctgaggcaactatgaaagaagtaagacagtttttcactccatttggacagatcaagagcgttgggcttccagagaggactaagggaagatatgctggttatggttttattgaatttgagacaaagcaagaagctttaaacgctaaaaaggcattatccaacacccatttctatggacttatcttgtgtactcatctctctagcctgttcatctttgacatccttgaatgcatcctcaactcgctatttgccgtctttgcaggtgatcgagtggaaaaaggttgacaatagcatgaaggcgatccgatatcgttctgctgccaagtatgtggaccaagaaaacaataatccaaagaaaaggaaaagctcgacagttgttggttaaagaagaatcaagtt

SEQ ID NO: 163846 - DNA, 4760 bp, Arabidopsis thaliana landsberg
tcactcgatcccatcgcccctctctccacaaatacttgacctcgccacttcttttcctcaaacactcttctctcaaacactcgaccaacactcttcaccttatcctttcttctccgtcactccacttcaacaccatcatcatccgtccaaagcagcactcgacctcaccatctttcttccccacgcactcgaccgcttctcactcgcctcttcaccaccgtctcgagctaccactcgaccgctcctcgccatcaccacctctcaatcgtctcaacttcgctcgaccgcttcacgccatctctttcaagctcgtctctcatcactcggccacaacgctcatcatctctccatctacgacatcactcgaccaaggtgccatcgttctctcatctctcaaatccagccatcactcgacaacaccaccgtttcttctcttccgcgagctcaagttcactcgaccgctcctctcaaagtcactcgatctagccgcttctcaacgcctccccatcgtttccatcgccgctgctctcatccccacgaaagctcgtcatcgccgcttcactcgattaagcaaccagactcgacgtctttcaaaccgcttaaccatctctcgcctctcacggtcactcgatcgccaagcacaaccaagggatcactcgaccacgtgttttccaaaccgaaaaaaaaaaaaaataaaaataaaaataaaattttttaagaatttttggtacactcgaccggtttactctattggtttgtgtttttagttttgttggaactaacgtattaacgtttatttttgagttacatttgttttcaggtttcatcatgagtaactatagtggagaattctctatggaccctgactacaatgtggatgaagctgagtcctggtccgctagaccgagagagcaacatgtttaccagagcttcaaggatgaattcgaacgccctgcagcccgacgtaatcagagaagagctgaaatcgccagaggaaagagagcgatgtcaagaagatatgagctgattgatgaggatatcgagactgagtatgagcaagagtcatggcgcagggagacgaagctgttgaacaaacccgacgaggttatagtggaggagtatcagctttcgatcaagaagttagaagaactgtttggtttccctagtggaaagggaaccaaacccagatttgatagagaggagcttaaggatttgtgggccactatagggaacaatctaccgctaaactcggcgcggtctaagagcaaccaaatctggagtcctgtgatccgctactttcagcgatcggttgccaacgtcttttactccagggagtctacaggcaccgtatctaacacggacatggagatgatagattatgcgcttacaaaggggaagaatgttttgagaggagatctcaacaacgcaccaccagtaatgcctctgttgatccatctgtgtggatacaggaagtgggcgttgacgaacgggaagaagaaggtgagaggagcactatgcgtgggtggcattgtgacgccaattctggaagcttgtggagtacccctcaaggaaccagggttagcaccgaggatgatggacttggatcatttgcgccgatgtgagttcttggagtttgacatggctggcgaccttcaccgctacaggttcgagcattcatcgattagaatcgccaacattcttctcccctgcattgacgctactaggattctcgagggcaagaacattgacttgaagcctgcgcttcaagatctttatttcgagggcagtccgccaactgaggagataagtcacaccgaaggaggtacaacagaagatgttgatgagacagatgatatagatgaggcggagttggacacaagcatgtatcatttcagtgagcatatacctccagcgagggaaagcaagagtttgagcgaagctcacaggaacaacaacaagctgcagaagtggtgcaagaagcaggataagctactcgtcaagtgcctcagggctatcaagtttctgaaggacaagatcagctgctcctcttccactacagccattccgcagggacaactttctcaggacatgccttcgaggagatatgacgcgcccgagccaagtcggcgcaggcctgagcctagagagcaggagattccgcatgtccctgcgaggcattcatcattcgagcctcgtgaatctgggaggagaggaggaccacactcactcgatctagcagcaagagcagacgacttctacagtctcgtagtttacgcgaccgcggtgctggccgtagtagaagaagagaggtcgagtatcctcagagcggtgctggctgccacagagctgatgagatcgagtacccacctgctggagctgatacagaacaaggcggttcgtctatggcctgggagcaatcataggcagccattgacgagcaactacgttcattcttcgactgaggtaagcgcctcacttcaccattgtattatatcatctgttgtgatttgtttcttcattttttgtttctgtgattggatttgtcctgagtactctcttccaagtttattcgcacagtggactgtgtgatttaagtttgggggagggctcaggaagtgtgtgttgcattgtgtatatttttgagtctgcattcatctaaggcatagaaaaaccaaaaaaaattgaaaaatttcagaaaatgatttcacaaaaaaaaaagagtgttcatgtagttgcattacatttaggatcgagtctacagtgtttcatttaggattgttgcatatgcataggggatgatgatgagatagccttgtaagcattttgattcactggataaactcagtgccctcgttgctagttgtctgccgcgtagtcaatgaatttgaaataaaactgaaccatgcctagattgctctactcgaccacactgtcatgatctgatactattccctatcaatttgaacctgaatttgatcttgaattatcatgtctgcatcaaattttaactcatggataccctaaattaccgggattttcttattcattttgatcactcttgttaatctaagtagttggctctcctaattagagcagttaacccgaacccaatcctagactttctttcaagccctatatcacttgtgagtgtttgtgaggtcttattccgattaagcttggtagaaagtgttaggttcgtaacgatagagatagtgtctcatgtagttctagttcgcatttttcggactagataggactaggtgggcgcttatagtttgggttgggatgtgtttaaaagaaaaaaaaggggttgattcatcgatgagaaaaggtaaaagactctaggtgaagtaagctaaagaagcagaaaaagtctagtaaaggttttgggatttgtaaagaaaagaaagagttcttgttagctattggagatgggcaaaagcccttggttttaaaatgttaaaaacaggaaccttagttgttaaagaaatccaaatccgctagatgtatcaaagtgttgagaaagcttctcctagagttaagagaaaagaaaagaatgattagaaaaagggcttaaaagattcatgaatgcaaagggtagagttaagttcttatattgggattggagatgggattaccattagagcttcatttgatgtactctgggtagatgggatcttatctctgtatgcatagcttgggacttacctttagcattctactaaagcttaatcattttttttgagagatcccctgttactgaagcctattctgtaagggaccatctttgtctcttgaccttttaccttagccaaatgagttctttgatgatgcattgcttgattcacgttcctaaactaatgaatgttaaagggattggtagatttgaatgcatgtgtaggtcgagtataagagtgggattgaactataataaggcatggctaatatttttagtagaattcgatcatatcgcatcctagaactgccaacttggacattgattttatctgatttatctgatgctttggttctgaatccccaccttcaaacctctctttcagtttatgtctacttgtttgcttgagggcaagcaaagactaagtttgggggagttgatatgtctataatttgcatgttctacacatccttttaacaccattttgagtctagtttcatctatctttcatagcattcaccatcatttttgtacattttgcatctttagacgagtcttggactagtcttgcatacattctgcattctagagttgttttaggtgttttggagctattggtgctcagaaagaggaaaaatagaacaaaaagtcacatttccaccaacatacttgatcaccagtagcagagagggaagcagtcagctcagcagtccatcaacacacttctactcgatcgcaaaggagaccagcaggtccattctgccagatatacttgattgaagagatgaggaggcagtccattctgcagttctactcgatcatagagctgaaggagtccatcctgacaattctactcgatcggagagacgaccaagcagtccactttgtgagtccaccaatatactcgatcggagaggagaagaaccagtccatcgtgacagctgaccaatatactcgatcagagaggccaagaagcagcctagaccattctgtcaaccaacttactcgaccaccacctcgaccctctgatcaatccgcacttaaccagacaacctgagaaacggaaatacaagagaagagaagg

SEQ ID NO: 163847 - DNA, 1482 bp, Arabidopsis thaliana landsberg
  unsure (1)..(1482): unsure at all n locations
atgaaagacaaagatgagagtagttcacaccaacatcttaaggaaaagttgagagagcttaggaagaatgaacacccagaaaacgggtaaaaactcatctgcggtttcatggataaccgtggaaaaagctcttgagtatgtcgaaaactctcccagaaacctaatgctctctctccaacacaaaccaaaggcagagatgatacaagaaatatcgccattaaggagaaaactctttcacgactctgatgatgatgatcaaactaagaagacgacattgctttctcattcatcttgttggtcttcgaatgtgacgagttcgagtgataccacgaaagcaaagaagaagacaacgattagaagatttgtttctgttacaatggtgctgcttttgtcatgggttttagttgtgttgatgaaccactttgatcatctctccatgaatacacaaatcattactttggttcctacttgatatttttatttattttggtttgagaatgttcatcaatctcaataaataaaaaaagtttagttttgtattattacctctcgccttctcttttaattcattgaacctcttcaactttggctgtaactatgttggttaaaacagtataagtaatgtatgtatttatggttttaggaaaatcttacaaaataatactctatcattggatgaagaagcaaaaactacacccctctacatcttttctattaannnacttttttggggaaagaactacattggtggtgattaggtgcatcggtgacactaatgttgataatatgttttgtgtaaaattagtatggttaaagctaatcatttagttgagcaaaaaaagatgctaatcatttaaatacccaacggactcaaacaaaagaaggccacacattcaattgttacatctttattgggttttcatttttggaagctatttttatgaatttgcagtgttttgttgcccaaaagaaaaaagcataattccaagtatatctttcattttgaatccatcagtcatatgttttacttgaatcaactatttgttgggttttacgaagttacttgttaagaagattcaaaatatatataattagactatcaaaggaacaaaagaatgtaattgggtcataactttttccgaagcttacgtgacttgggagaaaatcaaacccattagtttcacccttaatcaaactaatcacaaattttgaactttgcaaagaaggtaaaataataatcagcaaaaagattaataaaatgacaaaagtatctctttaaaagattaataaagaaataaagaaatgacataagctctcaccgaccgacgtcttgtcttttttattcttaaggtcggtgccatgtcgacgccttcaagcttagaatctcgccacgtgtgggataaactaaccgaacccaatcgaaccagacagaccaaagacagaccagaccggactagttgtatgtcggcatcagcgttctag

SEQ ID NO: 163848 - DNA, 379 bp, Arabidopsis thaliana landsberg
atgactcaagaactccaaacacttgaggtttgtttgatgaaactttgtgtacttttgatatgaataatatgagcaagaaatcaatcttacatacatttgtgtttataggtggaagaagagatgatgatgcggaaattctatgagttaatgtctagacagcgcttaaataagaaggtttgtataaagatagtttttttttttgaagatgataatgttggtattgattgagattgatgttggttcttttgaagaaaatggagaagactcaaaatgtgtcacatggtaaagaaatagttgaagtggaagatacttctagtacatccagagagttaatcgtatatgtaaggaaaaggaaaaagaatcaaaagccaacataatg

SEQ ID NO: 163849 - DNA, 1497 bp, Arabidopsis thaliana landsberg
  unsure (1)..(1497): unsure at all n locations
gactgtaaaaccggtcagttataaataggtttttgtcgaaaacgtaatgaacaaaatgaataacgagctacaaagctcgtcttgtggcccaggntttctctcagagaattgattacgaggaaaaatattctccttttatggatgccatcatatttaggtttttaatgagctttacagctaataaaattctagaaatgcgactcatggacgtcgtaacaacatatttatatggatcattagatgctgacatgtacatgagaattccaaatggatttaaaatgactaaaaagttaaactctaaacccatagagttatgtgcaataaaattacaaagatcattgtatggtttataacagtctggacgtatgtggtataatcgtcgaagtgagcatttaataaaagaaagatatgtaaataaccctatattcccatgtgttatcatcaagcaactatatctagattcgtaattattgtagtatatgttggtgatataaacatcatcggaactcaagaggaaatacataaagcaacaaactatttgaaaggagaattcgatatgaaagatctcgggcaaacaaagttttgccttggtttataaattggacattctcataaggattttttgtacatcaatctacagctaaaagagttttaaaacgttttaaaatggataaagcaaatcctcttagtacaccaatggtcgttagttcacttaatgttaaaactgatcctttccgaccacatgaagaaaatgaagagatacttgatcctaaagtacccccgtatctaagcgcaatcggaggctttatgtaccttgcaaattgcactagacctgatatatcatttgctattaatattttagcaatatttagtttgttccttacacaaagatactggaatgggataaaacatgtttttcgtaaccttcaagggactattgatttagggttattttaccctaaaaactcaaaaggtcaaattttggttttgtagatgtgagatatttatcagatccacataaagctcgatcccaaactggatatattttcacgaaattgggggcacttctatatcgtgacgttctcagaaacagacactagtagccacctcttcaaaccacattgaaatcatcgcacttcacgaagcgagtggaactttttgtggctaagataaataagtcagcacattcaatcaagcagtggaatgcatgtgaatatagaaccaaccgtcttatatgaggataatgatgcatgcgttgcttagacaaaagaaggatatattaaaaacgctagaacctaacatatccctccaaaattattttcatatacccaagagcttgagaagaataaagaaatttaagtgaaatatgttcgatcatgtaacaatgctacagatctcttcataaagtcattacatactacaactttcagaaaacatgtccataacattggaatacgccatcaacagaatctttagagtatcgttcctagtcattcg

SEQ ID NO: 163850 - DNA, 426 bp, Arabidopsis thaliana landsberg
cacttgccaattccgatgaccaaaaacatgacgaagaaaaaaatgggttcaaagtcaccaaatattgtcgcacttgtgttaccactacttcttatactttacactctttcctctcaagttgaagtcgtggaatctacagggcgcaaacttggtaagtgtctttataacaaattcccaaatttatacatttagtactataaagttttgaaaagactaacgaacttgaaatcaaacatctcattaaattagtttaacgttaatactgcagcgttttggggaaatcctatcgtgtggactccacactcaaattcatgtggaggttctccagcatcagtatttgcttcttccaagtggacgacaggccgaccatgcagacgtagtcgtcctccaggaactaatattcctgtttctgatcaatctccatag

SEQ ID NO: 163851 - DNA, 400 bp, Arabidopsis thaliana landsberg
atgtgaatatcattaaaatgaaagtttgtagaagtttacaaaaaattaaaacataagaacatccctcgccaaaaaaagataaaaacaaggaaggaaccgcttaagtaaaagctctactcatattttagccaaatctgcataagacacttgaacaagatcgagcatccgtagatatatatgttgttgtgatatctgttgtttcgttccgtccaaattgcatatagcgtggcatgaggaatcagtctacgaagacaccttggagatctatagtcttttaaatccaaccaaactgagagagcatcccaagtgtgaattgaaaggtgaaaaggttaacctcacgccaaagctcttcacttacttcgcaatgaagaaaaatgtgatctctaggttccgggaataa

SEQ ID NO: 163852 - DNA, 535 bp, Arabidopsis thaliana landsberg
agggttgcgcttgtaactcaagtgagcgtatgttccctgtgccacaaggaacagttgtatgtccgcgggaggaagactggggcaatgaaaggtgaggagctagaagcagccaataaagagtttatcgaaatactcaagactcttcaatgtgagctcggagaaaaaccttactttagcggcgataaattcgggctagtagacattgtcctgattggattctataggggggtgccagcataccagaagtttggtaacttcagcatcgaaccagagtgtttgaagctgattgcttggggaaaaagatgtatgcaaagagagtgtgtggctaaagctttgcctgattctgagaaagttgttggatacgttttacagcttaagaagttatatggaattgagtaaggatctctctaaattgccgttttctgttctgtttagctatttgttgtgttgtgttatgtgtgtttctgataatgaaacgaagtctttgttcgaaattcggatgctttgttttgttgaaattcgatgtttggtctga

SEQ ID NO: 163853 - DNA, 413 bp, Arabidopsis thaliana landsberg
  unsure (1)..(413): unsure at all n locations
atcatgtcaaaccactgacccccaggtcgagtagaggcttcacgacatcaannnnnnnnnnnnnnnnnnnnnnnnnnnnnnnnnnnnnnnnnttcacttcaccactcgaccacctggccgagtatcaccatgagagtcactcgatcacttcactcaaccacgtggtcaagtatcatcacctccaccacctgaccatcactcgatcacaccactctaccacgaagtcgagtatcaccatcaccatcactcgcccacatactcaattgcgagcttcagagtcttcttcattctgcactcaaccagacactcgagcacaaggaagaaaagaagactccggctattcactcgatcattcactagaccacctgggtcgagtaccgttcttaatccgtcccaatactgcgtcgttttga

SEQ ID NO: 163854 - DNA, 2447 bp, Arabidopsis thaliana landsberg
attcttaaggtctgtgaaaattctcatcttttgatttatacagagtgtagatgtctatctttgcagagtcagctttgaatcagtctatatgtcaagactctatattgctgaccttatgcgtatatcttgtggtcacattgcttataggtcacagaatatagttcccacaagtcacttctaagactattgttgaaaaatctaattgatccttattctcatcatttgaatgaccgcagagagtagatgtctatctttcattggttctggggtcaagttgcatgattgattagttaaaaggttagacgtctccgtggtaacataagtgttacaattcatattattattatataaggtttaagttgattgtgattgtgaatgaagtcatgcagaattttttatatatacatagatctaaaacatttaatagctaatcacctttggaacattatataacatacataagagactgactaactgagtaatttaagttgcagtctatgaactaacttgttaggaatgcttgaaaggatgttagttttgatgtgctttaacaagtttcttaccttgttctgaatgcattgatgattgctaattagcctaaaccgtttagggaccaattcgaaaggtttggtgaaagagaactccttaggttaacttgttgcattcaactagtgattggccaatgtgactaagatttaacaagagcctaccgaaaaaatcgcttgtgaacttgtcttactgcagtaaagtgaagtaagcatatcacttctgggactataggaaattgggaggtggtgatactctagtagcaatgacaacggaaacggaaaagaagaagggacctccacagattcttaaaacagacaaggcaactaaacttgtaagattttttcctccttgaagcacaaaaatccttgaatcaaaactaaaatctagatattcttttttagcaatgagatatatttgtaagttgctaacttgcgttcatataatttggtttcaatctcactgctttgagtttgtgcgttttggaggctgagaagtgggttgccaatatgactaggcccacagaggatgatcctattgagactgcacaagaagaacggccacacaggtgaacgcaaatatctttttacatgttaatttgcattttgtttgagaaactgaagctgaatataagtatcgttgtgacccctacgttaggcttggacttggtgctcaagtgtcacgacaaacaaagcgtagaccttcagacgaccctctcgatcagaaactagaagccaagtttgctgcagtgaaaagaaaaaatgcaagattggttgcagaatctgctggttctagtaagaatgccggtgatgacagtgaggatgatgatgaatcagaaagcaaaagccaagcatttggtaagaaaaagaaaaatacaagtactcctcattagagtttgtgatgtactatatagtaaaaagtcatggccttgtatttgttttgattgttggataagagctaaaacgcataattgtagttctattggaacatggtgcttggtaaaaaaacatcatctttgtcttatttaagttcaagcctcatgttataccactctatagttataactcatgcacaactctcttggccgagtaaaactacagatgccactggaaagcaaaaacagagtatggaagtgaaagaaacaatataagagattctgaagtctttgtttatgttaaaaaagctgtggttgtgccactgcacaagaatgtcaagagatttgaccatggcagtggcaatgaaactgtacaggatagacaaaaggttaaaacaaagagcctcatcacaggttgtcgctggtgggttcctgcatcggttcaacttgaaccgtgtctctgcaactcatgatgatctcttcaactaactcatcaaggatcatttcacttgtataggaaccaagacaaccgatctcaaacttgagatccatccagcttctagttctagccatgtcttttcttactatcttatataaagtgtgaggggaaggcaaaggttggagatgccagtaaactccttcttgtgctactttagctgagatttccttgtttgagatctgaagaaatttagaaaatatgaaactttgaatcttattactctgtttctcaataccctgatagaacgttatacacttcactttatagactcttagagaacaatctagaatccttatcaacttggacagctgtaagcttgactagtcatcagctaaagaggataaggcttgaaacggatttgaatggaggagcgtcgtcttcttcacctcaacatcttttgcaggtacacaagctttagagggttttgcctttgtcgtgttctgggatttagtgtgtgggcttagattggtaactggacatgagctgggtttatctttactttggcccagttgctcatttgatgactga

SEQ ID NO: 163855 - DNA, 342 bp, Arabidopsis thaliana landsberg
aggcacgagaggctacaagagcgcaataaagaaccagaacgagtcacaaaacttcgagtccgtattcaaacaggtgttcagacagctgtcccacatggagagttggatactgagatcgataaggcacacgcagaaggggcaagtgcggcaggccaaaagaacacagggtccaagttgatagaaacgttggacggactaggagctacgcctgtgcgatcgcatgaagaggatgccaatacaccagcagcagctggcatcgttgtcgatgaaactgacacgggtgtacactatcgggaaggcggtcgcgactcaggtaatcacgaacgttaacaagacgacatt

SEQ ID NO: 163856 - DNA, 366 bp, Arabidopsis thaliana landsberg
aatgatgggaaaatccccgaatcccaaatcccttttccgcatcgaaaaggagtcctcttcaaggttcagtacgtaacaagttggctagacagtgacaagagaccgagcagacacatcaactggatcagagatctctatagttacatgacgccttatgtctcaagtaacccacgagaagcttacgtgaactaccgtgatttagacctgggaaggaacacgaaagacgtgaaaacatgcatcaaacaagctcaagtctggggagctaactacttcaaaaacaatttcaacagattgatgatgattaaagcaaaggttgatccagagaacttctttagacacgagcagagcattccacctatgatgtaa

SEQ ID NO: 163857 - DNA, 620 bp, Arabidopsis thaliana landsberg
  unsure (1)..(620): unsure at all n locations
ataactccaatagctcaaaagtttattgtccaacccatccaagagctgccgcaaaaaataggaaatcaggttactaagttatatacgcaaaaaatatgtgttgatattgatattgtctttgcaggaaatttatccaatactaaaagaatatcatcattacttcgagagaagaccaatgatgaagcaaccaacaattatgatattgttaacaaaacacatgttcgaaggttgtctgctgttaaaagaatggccagaaaagatcaatctcatcaggttataaagttatatgaattagatacaatacattttagttaatatttttatttatcttcatttggttgttgtttttctcagtaagatcaccagacttcttaactcctaatcaaactaccccaaacttaaatatattgattggggtagatgactctggaaatgtcttataggatataacaaatatatcgggacgttctaggagaggatccaacgtctataccattagattaatgtcgaataagaagaaaagtatcaaatgggcaacgttcgattcatatttgaaaattagctatttatattatgttntactatggttggctaaatttcataagttaacagaattatat

SEQ ID NO: 163858 - DNA, 662 bp, Arabidopsis thaliana landsberg
atgattatggtaaagatgatgatgatgatgatggctatggtggtgggagttgcaatgggaaatattgtggatgagacatgcaaacagacacctgactacactctctgtctttctctcctccgctccgatccacgtagctcctccgccgacaccgtaagccttgctcttatcctcgtcgacaaaatcaaggttttcactctttttccgtagtctcaatatgaataagacaatatttttgagatcacggggttaatttactaaattttaaagttaaaatatattagatttatgtcccaaaaggtaaacttttatcatttatgttaaaatgtaaatgttttttttgtcttgttgggaatgtaggcgcttcgggccgaaacggtcgggcagatcaacgaggcctacaaaacaaaaccaatgctgaaaaagccattagacgagtgtaatatgagatacaaaacgatcgtagacgttgaccgtccacactgccattatagctatcaaaggaaaccctaagttcgctgaaggggctgttgttgacgccggcgtggaagcttccattttgcgaaggagggtttaccaaaggccaatctccgttgaccagtttgactcagagaatggaaaagatttgcgatgtggccagagccatcatccgattgttgctc

SEQ ID NO: 163859 - DNA, 500 bp, Arabidopsis thaliana landsberg
  unsure (1)..(500): unsure at all n locations
caatcccgattattagcgtttgcttcagcggcgcgttcacgtgttcgaccaatcgctcaaaggcgtttagcgtttggatcatccacnnnnnnnnnnnnnnnnnnnccagagatccatgccggtaacgatggagccgatccagctatctatccgagagaccctgaagtaataattgtttcttttctcttgttttcaattttagaccatgttgaaaataaagaaaaatgttctaaaatacacaaagaaatcaactttgtttaagtttttggtgattgcttgtgtttcacggtatggatgatgctgcaaaccctaaaacggcggcggaagaaatcgtagacgatactccccgaccgagtttagaagagcaaccgcttgtaccgccgaaatctccaccggccactgcgcacaagctagagagtactcccgttggtcacccgtcagaacctcatttccaacagaaacgaaaaaactccaccgcttctccgccgtcgcttgattcc

SEQ ID NO: 163860 - DNA, 463 bp, Arabidopsis thaliana landsberg
atccaattagattcaaggagcttcatgcccgcgatattcgctggggtgtccgccacccccaacgcccaggacctgcctggcagcaacgtcctccagcagttggtcaacggtgcggatgcgtgggcactcgccatcgccctgctgggggccttcatcggagcggccgtctgggcggtcgcctcacacaccaacagccaccaccacgcagcccgtggccggatggccgctttggtgtccgccgcggcggcgtgatgatcggcgcggcgccggggctcgtgaacttcttccagcacctcgggacgacggcgaagtgaccgcgcttctcacccccgcgagtctgctcggctcgctcttcagcctgccgttcagggcggcagccaagatcgggctgtccacgacgagcagctggatcgtggcgggcgccgaggcgatgctgcaggaggtggtcaaactgatcagcctg

SEQ ID NO: 163861 - DNA, 647 bp, Arabidopsis thaliana landsberg
atggcatcgaatagtgacgcaaggcctttgccaaaattcggagaatgggatgtgaatgatccggcgacggcagagggattcaccgttatatttagtaaagccggcgaggataaaaaaacaggtcggagctctagcaaggcaccttcacagagaaaacaagacggcgttaaaccaaccaagaaatggctctgttttactttatcttgatttcctgtaaatttcttaaaacgtttgagaatagcattgagaaactcttaccttagaaccttttctcatttgcttagcatttctctttataagatgttgcagagacgagaaagtagatagtttcttgtatatcttgtttgatgtttaatgtttaatgttatgtttcgtttgaagcttaagactagattttgaaaacctactagttcagattttacaacaatgcacgttttgcaatgccacctccaaaaacaatcataatctttcttcttggtcttagttaatttaaaaacgaatagttacttgtttgacaagaaacccctcttctgctccaaagtggatgaatcaggattcagccaaatattatatgagatctgccggtttctgtgttcccagggcaaataaatgctgatgaaccggaatggattttacattccgcttaa

SEQ ID NO: 163862 - DNA, 292 bp, Arabidopsis thaliana landsberg
cttaaaaagataagaatgtaaggtggattggcacccaatactattaattttaggtaagtaacaaatcatttttaaaacgaagcttccttgttggcttagggtatacgccaccaattcgatatttcatagacattgggcctttgccgaactggactctaaaagaagtaaatgagcttatactgggccggactcaagtacgaagcccaatactaaagctgctcatctaattatttgtgcatcacatttgctgcgacccacgacttcaatttcaagtcaagttagcgtaaatgcg

SEQ ID NO: 163863 - DNA, 953 bp, Arabidopsis thaliana landsberg
atgacgaccattcgatctttaccttcttcctctcgttgttccaattcgtcttcctcttcttcttattcactcgctttcacaagtttgagcaataggcttgagaccatcttcaagaaagcttcagagctttgcactctttgtgatatcgaagcctgcgttatctattacggaccagacggagaacttaagacatggcctaaggagaaagtgaaagtgagagacattgctcttaggtatagtctattgaacgaagcattgagacgcaagaaaagcgttaatcttcatgggttcctcaacaagaagaagaacaagggtttgaagaatccgaacaagaagaggaagacttgtctgaagaacgtgaatgttttaaaagtatccactcgctgatcattaccctcccgaccaagtttctccattgattcagtccttggaactccatgtctctaaattccaagaaaggcttcgatttcttgagtcgcagaaacagaatcagacaaaaccggatcatcagagtttaacaccatcctctctgaatcattacacccaatctttgaaccctagccagttctcgctgtttatgtataaccatggagacaatactctgtctcagatcccagtctctgcatcaaatttcaatcaggattatttctcagcgttacttgaagaatctgagttgaagaatcagttaatgaagccggagatttgtggttatgatcagaatcagaacatgagcatgggtgacatcacaaacaacaaatttcaagatccggggtctcaaacaaagaagcggtacaagaatctgtcaacaactttgggttgaatcaattgatgtacaaggagttttatggttgtgatcaaaacatgtctatgggtaacatcaatagcaacagctttcaaaatccttgcgtctcaaacacacaacattactcggcggtagaagaatctgtgaagaa

SEQ ID NO: 163864 - DNA, 864 bp, Arabidopsis thaliana landsberg
atggagcagctatcagactcggaccaccgcgattctgcaaatgcaactactatctcgtcttcattcaccgccgcagaaaatggtcaaggcggcggcggcgggggagaagctatggctcgaggcttatcagcgatgctcgagtccgtcattaaagactttgactctaaagctcttgacacgctcaatagccaagatcaactctccggttctctcgatcgccttgtccaaggtacaatttaacctcttcccgagattcgtatttaacttaattggtgaaatcaatcgattcacaagcttcgtctccgtttttgttaattagattactcacaaatcaatccaattgatccgattaagtttcttaaccattatactgccattggtctaacaaaattgcttaagaattgattcttgtgaaatttttagattggatagtgttttgttttttcacacaacaaaatttgaatgtgatggaaacacagagctagatcaattactggaaaacgctccattgccattcattgtacaacacgcatcgagaatttccagcgtcaaacaaagagtttcatctctgaatcttgttcttaaatctgtccaacgacgtatcgataacatcgatcacatgctctctgccaacaccacgcaaggttattaatgctttaatcaaaaccaaatccaaaattttattagttttgggaatttgtgaactcactacttcgtcatctatatatagtgcattattatctcacttagttttcactgtaacacagagaaagcatcctcggaaactacatgatgacgaaacacttactcactctctgttactctgtcactctcatcttcggatttgggagcaaacccaaagag

SEQ ID NO: 163865 - DNA, 788 bp, Arabidopsis thaliana landsberg
atatcaataacatgattaaaaaaattggagaaaattgattttaaacctcttcatgaatgtttgcaagttgagacattctgaaaatgaagctctggttaaagctaccatcctttgctttacatagaaggagaatctcaaggattcatcatggcatccattcaaacataaaggaaccaaggacaaatcaaatatgtgtctttcctgctgtctcatcccattttaagagtgtttatatccctgatttatgatttacgttgacgtcattttgactttgaaaagtgtttggtcattcatacactttctagaccactgttttaggtaaatatgtaggagtagtaacctgtgattatgtgaatgttgatacttgtatccatattccatatgttggtgcaactggttgtgagttagcagtaatattgtaatagtttgagatgattatggttataggatctggttaacgaagaatatgagcccctgaagaagcttaaagaaaaatggggagaagatgtgcataatactttaaaaataacaatcaaggatatggatgagtataatgcatgtggtaagtacccaactccagaactatggaactttaagaaaaaacttaaatcaacactgaaggaagtgattaaattccttttgaatgacatcaagagtctaaaacgccaacgaatctgtagggtgtgttatatcttttttggttgacataggtctccttatagagtttatatatctaatgtgctagtttaaaccaacataaaccccatatagttttagtgtataaggtt

SEQ ID NO: 163866 - DNA, 974 bp, Arabidopsis thaliana landsberg
ggagaagatggtcaagtagtcggggcgtgattagcaaaaatattgtgcacttttcgataggtagacatgtgcagttcaggttgtctatttccatagttgcgaacatgagatgccgccgcttataatgatgaaaggacgtcttctgttacaagagtgtgtagattagttaaccacagtgtgagcgcagtgatgtagtacaggttgagcaaacaactaaatattcatgagtgcaagaatctagagccgcaacaaacccctaatcgtgttgcttgttctccaagtttgcgccatctagagtccaaaaggcctcaaaaagtggtttcaaacgatccggtaagaaacagaaagccggttatagtgacagatgaagataggacaccgacggaatgactgattaacgtgatgagagaagtgaacggtgtggatgcaaagctgatatttgtgaaggttcttcccgatagtgatgtcgacgaacttcagacacgtctcttgatgccctggaacagatactagatatggacttcttaaacgaggaagagttagaaaaaatagatagacattacaaaaagataagtgacagtgacaaaggagcggatgtgatcttggtgaattccgagggtctacagaggaagcttaagctcaagagatgggatatgacttccacttccaactacgtcttaggttcaggatggaacaaggtcgtcaccgaaaacattctagagacaggcacgaggcttcggctctggtccttccactccccagacatgctctttttcgccctcgttctttcagatccagatctagctccgactaaagattgggagtgcctaaatttattggctaaattgaccgtggagacggcttgtctcgaggcttcacaagacgcagatacgatgagctcactcgtctccgacacagagctggatctcgagctccggttgtcacttcctggcaaaaacagctatgttatgtga

SEQ ID NO: 163867 - DNA, 1777 bp, Arabidopsis thaliana landsberg
gtcgcagtgggaagtaccaaatgaagtaaaggcgttgaagatagttccgctgtctaaaaaactgaagaaaggaaggaaaaaaatgctaaagtttccatcaaccggggaaaagcggccaaaacgacaaaggacgcaaaacaaaaggcgtccaaggcaatcgtgtcaatggttattatttgggaatacgcctacctgagtattttacattgtttctgcagtgatttgttgttttgatagtatgaacatactatgcaatattgtatttccccttctgtaatactatgtctgtttctattgtttttttgtaatactggttatagcaagtaatatcatgtctgtttctgtcgaatttgtggtcatattagtactattggtaatactaaattggtgtgatggagttcgaatttgtttacctcaaaactcaatgaaaatgaatacagtgagttattaacagattaaaatgtattattaatcatttatacttaattaagttagaaattttaatattaaatcgttttaacttatctttagtagactcaatacaacatatcccttatacttttaagctcacttttaatattatcaccaacttaaaatgaaaaaattcatattgctacatatatttaatttataattgcacaaaatatttaaacctctatatttataaagttcaatccagtgtactactaaataaacaaattgtaaatataggaaatactgttaaacatgaaaaacatggaaagtaatactatttgagaaattggcactaccaaaacctcaggaaatagtatgctgtaaaaaggttgcgcacatgtcaaaaatctccaaaataacggcgcacacatggggaattaaatttttggtcttcccccaaaaattttcccgcctaacaaattttgagtttccttccaaaaccaaaaaatttaattttttcttttacctctttcattttcgatctctctccttctcttctttcatctttcatctttcatctttcatattctttcctctttttctttcatctctcatctcccacatctctcatctctcttctcgatttctctctcatctctcatctttctttcatctttctaccatggatagagagagtgagaaagacccctactacgatgatttgaaagcggcgaaaagagccattgagcaaatgaaaatgattgcgatgatggaagggattcctaagttttgtccatgtggtggtagcattgtcgacactcgaaaggatgaaaagagatactatcaatgcgagaagtttaaggtatgttgatgaagagaacaagtttttctaggttttgtagatctagatctagatctatttggtatttaaaagtatttcccgtttttggtaatactgcctagaacaagtaatactgcacaagtttttctagtttttgtagatctagatctatttggtatttcaaactatttcccgtttttctagtttttttggtaatactgcttagaacaagtaatactgcactagtttttctagtttttgtagatctagatttatttttgataaatatttggtattttgtaggatgatagaaatgatttgatactcatccgtaaactttgggaaaagcctatggaagaagaggtgactagcttaagagagagtgtcgattacaatcggaagaaagttctaagtcatgagtatctcatagaagaaatgcaaaaggaattgaaagcccaccgtgcaaagattgtaaacgtgagcaaagtggtattccgttctcctattgttctaaggaagtaa

SEQ ID NO: 163868 - DNA, 714 bp, Arabidopsis thaliana landsberg
ttacatttgccacgtaagaatacgtatactcctgacgtgtcctgtatatatatacacacgcacacttcaatttttcattcactaaaccagatttaatttgagactctcaaagaaacaccatggaagaagagcaacctccggccaagaaacgaaacatggggagatctagaaaaggttgcatgaaaggtaaaggcggtccagagaatgccacgtgtactttccgtggagttaggcaacggacttggggtaaatgggtggctgagatccgtgagcctaaccgtgggactcgtctctggctcggcacgtttaatacctcggtcgaggccgccatggcttacgatgaagccgctaagaaactctatggacacgaggctaaactcaacttggtgcacccacaacaacaacaacaagtagtagtgaacagaaacttgtctttttctggccacgggtcgggttcttgggcttataataagaagctcgatatggttcatgggttggaccttggtctcggccaggcaagttgttcacgaggttcttgctcagagagatcgagttttctacaagaagatgatgatcatagtcataatcgatgttcgtcttcaagtggttcgaatctttgttggttattacctaaacaaagtgattcacaagatcaagagaccgttaatgctacgactagttatggcggtgaaggcggtggtggctctacgttaa

SEQ ID NO: 163869 - DNA, 578 bp, Arabidopsis thaliana landsberg
agcactcttgttcctttctcatctcatattcacacaaacacaaacccccaaaatcacttttgttccttggactatggaactaaacctctctacacccacatcatgttcctccagcagcatctcatcatcttcgcatgaggccatccctaggaccaagggtaaaacgaaagaggaggtcacggctgagccgtcgaaggagaatcagcagcggctagagttccgcttcctgttcaacgagagtagtacaagaaacgaggctaaagcgagggtgtttgcttgcaccttctgcaaaaaagagttctctacgtctcaagccttaggaggacatcagaacgctcacaagcaagagcgatcattggctaaaagacgtaaagagatcgaaatcaactatcctgaactctccatctacagccagtacccgccaagtggactttccttcagcagcagctcctcgcagtatgatctcggggttcgttacaatcctaacattgctaaaactactaagccctatccgttcaacatcttcgcatgtcgatttggatacagagggggactaaatttccctcccatgtctcacc

SEQ ID NO: 163870 - DNA, 272 bp, Arabidopsis thaliana landsberg
atgaaggagttagtgagtaaagatcttgacgccactacaaggattgtgcttcggtatgtgtttcaaaaaacgatacgttctatatggagagagagaaatgagagaagacatggagagacgcgccatcgaggacggagaagataatcaggctaatcgacaaaaacataaggaatcgattaagcacgctaagggtgagaggtgaagagaagtacccaagaggaatccaagtgtggtttgcttcaaggcaagatcaaaatcaaggatagataaga

SEQ ID NO: 163871 - DNA, 471 bp, Arabidopsis thaliana landsberg
atgaaatggatcgaccaagaagattccctaagaagtgtcggtgtggagaacctattgtgatgaagacgttaaacactaatagaaatcctgaaaaactgtttcatgcttgtccattcgaagataatgtaagtggctcaattctgggaatttttgtgtttttgtgtcatagaagatatgcatttaccttggcgtgacaggataataggtatcatgtgtgcaaatggatggataattgtatggtgcaagagatagaagacttgatagaaaaagttaataacttagaaggaacttcgattacatttcaaaaaacttcaatgcttgtgaatcagagattgataatctgatgatgaagacgcgtgtgtgtgaggctgtggttgaaaaggaagttgcagagattaaaattcagcttcatagcttgaagaacattgtggtgtttgctttggtgttgattttcttttcaggtttatattt

SEQ ID NO: 163872 - DNA, 364 bp, Arabidopsis thaliana landsberg
atggcatacgtgatcggacagccgtgcgtggacatcaaggaccgcgcctgcgttgaggagtgccccgtcgactgcatctacgagggcgagcggatgctctacatccacccggacgagtgtgtggactgcggtgcgtgcgagccggtgtgcccggtggaagccatctattacgaggatgacctgcccacggcgttcgctccctatcaggaggagaacgtccgcttcttcaccgatctgctgcccggccaggatgcgccgatcggatcgccgggcggggccgcaaaactcggtcccttcccggtcgacacgcccctgatcgcgcccctgccgcgcagccggcggtcgctgacgcaagatcgaaggc

SEQ ID NO: 163873 - DNA, 561 bp, Arabidopsis thaliana landsberg
ctaactactccgatgagttcaagttcagtgtcagtgtcatctggtgttgacggagcccgtggttttccggtgaattgtgcgtgtggagcagatgtgacgatcttcacatccaagagtcaagacaatcccggaagacctttttccggtgtaaaaccaaaagagatccgaaaatgtggccaaacaaaagagatgtaagtagagttggtgtttataatgtgtatttatgtagttgttaaacttgtcggatttggtttgtgggttgtgcaatagggtcatttgtttaagtgggttgaggatgctgtgcaagaagaggtcgaagatgctttagaaaaatttggactcattgcaaatgagcttaacaaaatcaaatctgaggcgaaagagctacatgtgatgttacaagaactgaaagaagaagcagaattgggcaaaaaagaattccgcaagtggaaagtttgcttaacaatgtgttttgtgtggctttgcttgatcaccattgccattgtttacgtaatgtttggtaataaaaagaaacaggactttgtaatgtcggatttgtga

SEQ ID NO: 163874 - DNA, 1168 bp, Arabidopsis thaliana landsberg
attaaaacagcagagaagcgctgtttgcgtgagctgataattgagattgataagtctaatagtgataattcttcagtggtacttccaaggagcctgtatacgtgctgtagaatgctcgtgactttgaagcttaataacgcggttcttgtggatgctacgtcctcgttttcatttccatctctcaagactttgagtcttgtgtccatgaagtttccaggtgatgagctgatcaagatgcttttatcgaattgtcctgttcttgaagacttggttgtgaaacgctgtccctatgacaatgtgactactttcactgttagagtgtcttctctaaagtgtttagtcttgcatgaaacggaattagccagtataaatgctgattgcgggtttgtgatagatactccttctttggagtgcttagacattgaagatggtaggggtggtttttttgtcattgagaataatatgactaaggttgtgaaggcaaatgtttgcaattcttatgtacatacgcagcagctcatgggttctatttcttccgtcaagcgtctctatgtatgtataccatcctctaaggtaatatgtttctatagttctgttatctacatatattattggtttctttgtgatcaaattacttatgtagtgtctcttatgcaggatgcttatcctgttggtagtgtcttccactgtcttgtacgtttaacgatatgcacatgtgagacagagtggctaaatctacttatgtgtgtactcagagattcccctaaattacgagaactcaaacttgttaaggtctgcagatctaaacctgaattattcagtctctatgatatatcagcatatattttcagtagaataacagtgtgatgatatcttacttttatcttagaaccatgtctatcgatctcatcaaccgcggccgtgctggaatgaaccgagtgcagttcctgaatgtctgttgacaagtcttgaaactctcgaatgggtaaaatatgaaggaacagaagaagagaaagaagtagcggcattcatcttaagaagtggaagctgtttaaagaaggtgactatctcctctaaatccactgacatcaacaagaaatttgagatgctcaaggagttgtcattgttgttcaggcgttcacctacatgtcagattgcattcgactga

SEQ ID NO: 163875 - DNA, 467 bp, Arabidopsis thaliana landsberg
atggtagatcgacttggaggtatcccgattgtctgcccttgtggcgaggaagtagtgatgaaaacatcagctactccaaggaaccctggttgtttgttttatgcatgtcccctgggatcttccgtaagtaaatctacaaattatctgataatttctactacttgctatccaaaataactatcgataatacaggaaaattggaaccatttgttcaaatggacggatacatgtatcgttgaagagatccgaagatttatagaaaaagtgaataacatggagggttctacactaaaattgcaaaaagggctaaatttttgtgattccgtgattacctctttgtcacaggagacgcgagacctagattccgttcttcgggaagacattgaagacctgagatcgcagcttagatctatgaaaatgttcttgttttatttttgctctttattttattttttatgttttttaat

SEQ ID NO: 163876 - DNA, 2201 bp, Arabidopsis thaliana landsberg
atggccttggaggctgtagtttacccgcaagatccgttctcctacatctcttgcaaagattttccgttttacgacttatactttcaagaagaagaagatcaagatccacaagatactaagaacaacattaagctagggcaaggacaaggacatggttttgcgagtaataattacaacggtagaaccggagattatagtgatgattataattacaacgaagaggatctccaatggccacgagaccttccttatggatctgccgtcgacaccgagagccagcctccaccgtcggatgtggcggcgggaggagggaggaggaaaaggaggaggacgaggagtagcaagaacaaagaagagatcgagaaccagaggatgactcacatcgccgttgaaagaaatcgccggaaacagatgaacgagtacctcgccgttctccggtctctcatgccaccttcttatgctcaaagggttagtctctacatacaacagttatatgtatatgtgagtgtgagcgcgtgaaatattcagtcctttagctgtatttcttgacgtgtcaaaaaaaaaaaaaaaaagcaaagcctatgttctaggctttcagctaattaggacatgcataggctatacatagatatgtcatatgcatgtatgtttatatgttttgaaatataaatttgagaatgatgatagatgaatgaaagccgttatatatattgacaaaaaataaaaactaaacgaaagtcgttatttctttttttcataattttattagatcatgtagtctctaaatgaaaattttgttagtggaattgtgggagcataaataaagtcttgaacatcattgcacccaaaaaggactatacatattatagatttataatgagatggtgacataatatattttttaaaaaaattaaggtacgaaatatagacatgtttgattgtttttgcaaaaccttttgcaatttctatgtgctagactaacataaggttggtggtggttaaagggagatcaagcatcgatagtaggcggagccattaactacttaaaggagcttgagcatcatttacaatcaatggaacctccggttaagaccgccacagaagacaccggagccggccacgaccagaccaaaacaacctcggctagttcgtcgggaccattctcggatttctttgcatttcctcagtactcgaaccggcctacctctgcggcggcggctgaggggatggcggagatagaggtaacgatggtagagagccatgcgagtctgaaaatacttgcgaaaaagagaccgagacagcttcttaaactggtctcatcgatacagagcctaaggctcactcttctccatctaaacgtcacaactcgagacgactccgtcctctattccatcagcgtcaaggtacatttttctctctctttttcaccatttttttttttttttttcctaaccagattagagtgatcatgttatataataccgttgtttagggttagtgggttgaatttgcacattcaaattaaattggtatctaataattaatgggtgactaatcattactcccattgttggttttggttcaatgattattcattgattgtttttccaatcacaaatgttttgtgcatttaatgtgtctcttattaggacatgttgtgaattatttgtctgggccaaaaaaggttttccaagaccaaaaataaaaatcgttccttttttctcgttctttttgacttggatagggctggcctcaattattggggggtcaaaatcatcatttcttatttattaaaaaagacaaaattttgagtactatcataatattgattcttgtaagaatcagggaccaaaaagatgacatatgcctacacatgtgtgaatgtgtgtatatatatatgtgtactgggcatgtttggtggtcacaacactgtggatgctctgtgcacggcagaacgaaatgacgccacttgtttcaggacacattcataagcttattcctcgaaatataaacattttctttaatcatctttttaccttttcaatgactatatatcaatctttttcatgtaacttaaaagaaaatattaaaataatgggtttattcaggttgaagaagggagccaattgaatacagtagaagatattgcagcagctgtgaatcaaatcctaaggaggatcgaagaagagtcatcctttagc

SEQ ID NO: 163877 - DNA, 2189 bp, Arabidopsis thaliana landsberg
atgattgattcggatggtgaggatgactgtgtgattacgggagtgaggacggtggagcaggagctggctccggagggaaacgagatcgtgatggttcatgactacgttagtgtttcctcgagcagttctgctacaccatcctttgtactcagcccgtatgagtcagatccggagatggacgaggatccaccggtctcgccatatgttctggaggctgtcgatcactctcccgatagctctttcgcacttctatgggagggcacgtccccattctccgttttgcagccaacatgagggctgatgctattccgacgtttgacgggggctccacatcaggtatacaaataccgttttgtttcgtctgcggcgaggacgggcactacccacaggagtgtccgttttacacgccgtacatgcccatggccattacttgtctctactgtggagagtatgggcattacgtggccacatgtatgctgatgagggatgacgcccagattccttcacccacctgtacttccccatctcacgtagctggaccatcgtccccaccggttcccgacacggaggaggatcttttctttgggtgtacctgttcgaggtgtagcttagagctactgtgattcccttaggaatcataaaccttagtgtatattaggaactaaccccattttttgatgtatagctgcggctacaggggagccaatagtaaccttcggttactttgtgatattttttttgatgatatctataggcttgaataagcgggtgtgtacgatagtccagatcacccccttaccccttagggttgttaactaatgttatgttaccttatgtttatattaatgtccttttgtgtgattgcttgatttacttttattaatatgttttgtgtgtgtttttcgtgtcgcacttaaccaagtaccaaaccataggaacccttaggaagcctgaagcctattcaagagagttagggaaaagccataggaattaggatggaaccttaggattattaaactaagccttaaagctctaggaagccgaaaagttaaattgttagctaagccgtatgtggtgatgacaaaaatcacatacaagagagtggcggagtccgttagacatgcattaacttcctaggaatgggaaagaggttgtaagaagataatggtggagaccaaacctataaaagaaccgttacccaaggcgagatccttaacatgagaagcttcataaggccaacgaaggaatcggtttttttttaaggctagttacttccttagtccttagaattcgaggacgaattcttttaaggagggaagaatgtaataccccaaaccttgactatgcggccggacgtgcagtctatcgagtaaaatgcgagatcaagctaagaaaaggcaagaccagttcggccatttgatgtggcaagtcatgggtaaggagcattacaatggatcaagtccacaggtaaaggaatgactctccatcagacggactaagcatagctacgatgcgactatcggtaaacctcgaaaccattaggctagcccttagacctaggatagcttaagaaaaccttagttttaggaaaccttagaaggacttggaaaccttagaaggactaggagaccataggggaatccatttgggcagtggaatatgagtatgggtcgtgaatagtcgagggattgaacggaaaatgcggataagtgacgttagcgagcttagtcggttaattctggcatgaaacgtgttatagtcctaaagaagccttgatttgtgtcattgaccctcatgagacattagagatggagtgtgccctatcaatgttcttgcggtccgtgacagatcatgggtttcgccggaatgaagaaacggacggccaggattgaactgtggttcatgtttatccgttaaggctcaagcttatctataattccggtcatccttatcctttagggtcgagcttatccattttggatgatgtttatccagaaaaaatggaggaaaccaatcggagactgattagtgtcccggagcgcccgtggagtgacatttatcgaattttgattggtccgggccacctcctgcttgttttggccgatcttgtgaccgacttaagaccctataaatactccacttcgtcccatttgttcctcagacccaaaaatccactagaaaatgcctag

SEQ ID NO: 163878 - DNA, 887 bp, Arabidopsis thaliana landsberg
agtccggttatcaccagctttccaaaccttcagcagattgctcatttaattctactcaattccaaggtttgtgtaaaaagctctggactctaaatatcccagcaaagattaagatcttttggtggagagtattacataatgcaatccctgtggcagccaatatagctcgtaggcacatcaaattctccccggaatgtctcttttgtggtgaagctgatgaaaccactatgcaccttctctttcaatgtcgccttgcaaaagagatatgtgcactatcccccctacacataccatcaggtcagtatgaagaatcctcctctcttttatatataatgcatgaccttataactacccatcgatctagtcgtgaaaaggactatctgtttccgtatattggttggcatatgtggaaagctaggaatgatctcttgtataataataagaggtgggcgatcccagacatcattaacaaagccattatggattttgatctgtggaagttagctcaacaaactactgtcaaccaagagcctcatcatgaaggagatcccaagccaccaaatactcaaaatagccaaaagcctcgacctaattctcctttctactgctacacagatggatcgtgggtagattctaatagtacggcgggaataggatgggtgctctatgatgctcaaggtacctgccttcttaaaggctcggcagcactagaaccaatgaactcagcgttggagacggaggctattgcgttacgagaagcattagtacaaatgaggcggcttagttataagcaagtcaccttctgtggtgactcacgcatactctatggccatttggagaaggttagtaaacaaaacccacctgactatggaccttcagaaatctag

SEQ ID NO: 163879 - DNA, 398 bp, Arabidopsis thaliana landsberg
gtcggtttctgaaacgatccgccagaaatttttcactttcagttcttcgtaatcaggtgtgtctacaaacacgccggttacagaattccgggtcttaaaaaatatcctgacaggtgtatctgccgagcgatgctgggagaagaatttttcgatctgttctagcgacattttattttctttacattgatagcgataggccctttcggaccgcgttccatttcaaagctgactttgtcgttttcctgcagcacttcagatgcctggctctggtgaacaaaaatgcgctgctttgtttgcgtatcgaggataaagccgaatcctttggtttcattgaaaaaatctacccggccctgcctctgcgggtcttactgctcccgtactgggatgcctgtatataa

SEQ ID NO: 163880 - DNA, 371 bp, Arabidopsis thaliana landsberg
aaggcattaaaccttgaaaattcttgtgtgaaatggatcttgaaaaacatcgggatatgatgcatatcttaaactaggcgtgggcattcgggtacccgttcgggttcggttctttttcccgggtatcgggtctattcgggtaggaggttgagaaccattcgggtattcttaaaatttggttcggtttcggttcgggttcgggtcggttcggttattttagtaaaaatgtaaaaataaccaaaaatacccaaaatattttcgggttcgggttgggttcgggtattttattcatatatacccaaatctacccaaaatacccgattacccgtaaatatattggttacttttatccaaatataaccaaatgtaac

SEQ ID NO: 163881 - DNA, 1141 bp, Arabidopsis thaliana landsberg
atgagcagtctatcatcaagttcgactggatctacagggccgcggggaaaaggtaaagttgtaggaataccgaaaatatgttggtgcggggaaggagtcgtgtcactcatttcaaaatcggttccgaatccttgccggacatattatcggtgtggttttgctgcaaaaaataggctaaatgctgctaatcttgttcatctgattattctatttcttcaattgccatgtttaattcgctgttaatttggaaaatctatgttaatacctagctaagaaatgacgaccacacttttaaattggttgacgaagctttgctcaatgagatagagacattgacagcaaagacacgagacattgagcaagagctgaaagattttcggggatagaggtccgagttcgaaaagatggtttacgagaacgtggaaatgaagatagaaaaagaagtgcttacgaaagtggaagaagctgtgtctcaaacgaaagcgagcagtaagaggttgatgattgtgatggtgttagggtgtatgatcatacttggatacaccaaacttaaaggggaggtagtgtagaataatatttacactttgttgtagtagtcagcgggataatattgtgtctgctaaccttcgctctagtagaataatatggggactatagtgtatctgctaacgctgcaatatagaccaacggttggagtgagataaaatctcgagaacttgttattgagataaacgttagtaattaaaatgtatttgaaatcgacgttgataatgtaagataacaacaaagttagctagtaacctttacgctgaaaagggataatatagtatctactagcgcaatcctaatgcaacgatccgagtctggtcaaaatccacgaattttaaaaacaatgagtaacaatgataacaacaatgttagcgagaaaatctctaatatggaataatattgggataatagttaatctgctaacgtgagtcgaatgcaacgatgataaatatcccacaatgcttaccgagatactgcaacactaaccatatattattaacttagtagataacttattattaagtaaatacaaacgttagctgctaacaatatcgaggtacgcgacgtaaacaaaacagaatcggataactag

SEQ ID NO: 163882 - DNA, 562 bp, Arabidopsis thaliana landsberg
atgggctcacagataaggcccattgaatacaaaatccgattggtgcgttacgtacggtacattaaattggttgcaccagtcaaactttccggttcagtactaaccgaaatattggagtcgtcgtcttcttccgtcaagaagaaaccagaatttttacagagatttgaaaatcgtctccattttctaggtatagaatctccaaagagatcgatctgtgcgattcaaattttgttatatcggatctaaatcgtaattttgtgtttttttttcttcttcagatatggattggcaagggcagaaattggcggagcagttaatgcagatcctgcttctgatcgccgccgttgtgtcgttcgttgttggttacacaacggcgtcgtttaggatgatgatgttgatttacgccggaggtgttgttctgacgactctgatcacaatacctaattggccttgctttaatcgtcatcatcttaagtggttagatccaagtgaagcagagaaacatcctaaacctcaagttgttgttgttagctccaagaagaaatcctcctctaaaaagtag

SEQ ID NO: 163883 - DNA, 1924 bp, Arabidopsis thaliana landsberg
atgaagatgggaatggtgtttgtgtttgtgttgcttacagttttcatggctgtgatgtcttctacaagggtctctgctcagtcaaactgcaaaaacgagttgaagaaatcactgaagccgtgtttcagctacctgacttcttcctatccttccttgcctgatgattcggattgttgtccttcgttgctggacatatccaagacttctgttgactgtttttgtcaatacttgaacagtggaggctctattctcgatatcaatgctaacttcatacaagctcgtcgactgccagagatctgtggcgttgacccttatcttgctagtgtgtgtaacgaaggtaagaatttcttaacatcaatttatgaagaaacaccaatcctatagtatgtagtctttatgtatatagtgaatttatgttacaggagatggattgaaaaatataatagtaaggtgatggagttgcatgagatggagaactggttaggaggacatcaaacctagcatgtgtcacaaaccgaaagtatttgaactgatgtaatcgttgtttgtgtttattgtgttgaacgagtctttgtttcagttgtgtcaataatgtgtgtcttcattgggttaaggagccagctttgccactttcccattcctggtttgtaggagttacaactccatctctttgtacattctatttaagattattaaaaagccacaaaaaggcaatcttaattgtctaaagaaaagccacaaatccaaatctgagacatgggaaggagatggtaaactaaatgtttcgggttcaaactcaagagccatagatatagtatgcacaaaacagatatccaaaaggaaacaaataacttatgtcaactttataacatcctatattataaaaagaattttatcattttatgggacaaagcaataatctatcgttatgaaacattgagacctaatgtgagataagctcttgaagttagtagatataagaagcacaaaatttcaacgaatgcatgcaatgaaaagtaatgtgttgtgtttttaatgatttacctccttgttttcatttaacttgatgcattaacataccatttagacttgtcttaagattgtaagcactaaaaagattatttatcctctacaatggttctttatggttcttactccaaaaataaataatctgtccatgagacaatggaaatggcaaaaagaggcattcttacattgcccaagaaaagtgttataatttggatttaagttctaaatctgagacccattattaaccgataagaagtcattaatgggcctgtcactccaaatagaatcatctctatgtctgttgcatttttgtgtatattattagattatagtactataagatttataaagataacaaaattttacatgatcatggaatcaccaagaatcttcctccgaccgttcaatatctccgatgcagaagacgtctttaaatgggcccgtgacgatgacgtcacacgttacctccgttgggactccgttaaatccttagaagaagccaaacaacatatcttaaacaaggctataccacacccatggcgtcgttccatctctctcctccaagaaggtggttcaatcggttacgtatccgtcaagccagactccaggtgatggtcggtgccgagccaacctcgcatacgctgtcgctaaagagttttgggggcgggggatagccacagcggcggtgaggatggcggttgaacaagctttggaggattttccggaggtggtgaggctacaagcggtggtggaggtggagaacaaagcgtcccaaagggttttggagaaagctggatttcgaaaagagggtttgcttgagaagtatggttttagcaaaggagtgatcagagacatgtttctctatagttacgttaaagatgattgttttgtgtga

SEQ ID NO: 163884 - DNA, 1877 bp, Arabidopsis thaliana landsberg
atgattgatgtcatttgtacttatttctacgctggatataacatacctagagttctcaatgaaggaggttggtttttcttggaaaacatacttctgatcaaatcagtcggcggtagaaaacctcccttaactgataataagttgagaatcaagttccttcagactaccaaaatgactcatgtgcctaatagagaaccaagtaactttttccgatttgctgccttctctatgattgaaaacaagactattaattcttcaactgttcatggtaactttcttatttagatttttcaataatataaagtctattttatgaaaatattaatctttcatattatcgtttttttgtttgtagatgcttatggtattgtcgtgatagttgggaatataacaagaccggactttgttcctcaagcttcagaaaatactatactttctcaatttctcgaatttgagattaaaaattcttggttagtattttccattatatagttcgtcatctatttggttatatatttgaatgcacaaacatagtaaatattgttatctttatagttggtttaattcatagaacttagatgttttggtggaataatttgatattgttattaggggtaaatctctgatatgtgttgcaagcggatatacttgtgagttgtttgtgcaattatggaggagacttggtcttggtcttgattatgaggggaccttcggtatgaatcttacaatctgtgtgtttcgattttggaagatttctgatcacgaaggtaaatattaacactcttctcatcgtatctttaatttatcgagctaatacatataataaaaacataattattttaggtcgtcaatgtctaatttcacataatggtgcttcaaaaattgtattcaatcaaacttacccagagattaacatgactcgcatcaggtaagaacgtttatattttcattgttcctttactgataagtgtgttatataaaattttagtctggactatttatttcttttttgttttcctacattttcaagactcaattccttgaacggatgcaaccagctgagctaggtgaaattgttgatgagaattgaagacatcaagaccagaacgctttctatcttactttataaatctactatattatgcttataatatgtactgttaagactttgtttatgttttgatttcatttcctatgcatgaattttgtaaaatattaactttaattatgttttgttatatttaatgcttgctaaatcactatagttccttaagtttagataaaaatttcaaagttttgagattgttattcttatttacaatttggatttaaaatatttagataattttaacacaattttttaaacgtgaaactcaaatcaaatttaactaaaataaatgatagatatgcatgtatttaaaggaagaaaacaaatctgcaaaacttaaattttattaaaatatgtatacaatgaaccatgcatttaaaacgccatagaatcttctatattggaaacaaccatgatttcaacgaggagtttcctaatcgaacatcccataatttgtgttaaaatttgctttataatcagataataactaaaataaagctgtaaatattataaattacgccataatagaattatactacagatattattgttaacaatatattttcatatatattgtttcctaattttttagcattgttatgtttatcatctttttttgtttttttaatactttgactttcgactgaagctaaatttctattgtttgtttctattcttcgtgtacaatgaagaaaagaaagaaaatgctgtcgatcaacaacaaaaaaagtcttcaatgttcaaaacgaacaagacgtttgttcgatga

SEQ ID NO: 163885 - DNA, 711 bp, Arabidopsis thaliana landsberg
gccaaccctcatgctgaaggagaatggtccacaggcttctgtgattgcttctctgattgccaaaactgtaatcactctcttcacaattacttacatatatatttgcacgtgtaaaaagctgaaaaagtagttttgtgctaaactatattatttatcttgtaaaaatgaatggacaggttgtatcacatggttgtgtccatgtattacatttggccaagttgctgatattgtagaccgaggaaacacctgtaagtgcctttattataatacacggtatcataaataagcttgtaaataattgctgattcaaatttttgtcagcgtgtggtactgctggagcactatacgtgttgctagccgcaataactggttgtggatgtctctactcgtgtatctatcgtggaaagatcagagctcaatacaatattagaggtgatggttgtactgattgccttaaacatttctgctgtgagctttgtgctttgacacaagaataccgtgaactcaagcaccgcggtttcgatatgagtcttggtaagttatttcgatgtcattttgtttatgattgattaagttttgtaatcgcaaaacaattaacactcgtataaaaattgatgtggtattttaggatgggcggggaacgtggagaagcaacagaaccaaggaggtgtggcgatgggtgctccagccttccaaggcggcatgagccgc

SEQ ID NO: 163886 - DNA, 417 bp, Arabidopsis thaliana landsberg
gtagttttacagttttgacgagaaaactcgattttacggttttgacgaaaaacaaaattttacggttttggcggaaaaacgtgattttacgtttttgacgagacaaagtgattttacggttatggccggaaaactcgattttacggttttggcgaaaaaacgtgattttgcggttttggcgggaaaacatgattttacggatttggcgggaaaaaatattttacgattttggcggaaaaacataatattacggttttggcggaaaaacatgattttgaagttttggcgggaaaacatgattttgctgttttggcgggaaaacatgattttgctgttttggcgggaaaacatgattttgcggttatgacgggaaaatatgattttgcggttttggtggaaaacatgattttacggttt

SEQ ID NO: 163887 - DNA, 547 bp, Arabidopsis thaliana landsberg
atgagcacaatgagctcgatgagctaccactcaactgcttcaaattcgggccgtcgttattctcctccaggagtcccatcttcatgctggtgtggaacggaaatcatcacttacacttcgaagacaaaggaaaatccattccggcgactctatcgatgcgagattgcaattcaggtgcattgttttacttggtacctacaatgttgattgaatagagaacggcgtattcattcatcgaaatttatatgtgtagagggaaaacgaagagaacttgttcaaatgggttgatgaagctctattagatgaaattaggatggtcgaggagaagagaaagaaagttgtcgatgatgtcactgatatgaggatgtaggtgatggctactatgaaactccaaaacaaaaagttaaagaagatggaggatgcgatgggtaagaagatagatagtgaagtgaaggagctgggtaatgtaatggctaagtcagctttgaagacagtaggtgttgcctctgtaattctttgctaaattgtatggatgtagggaagagtg

SEQ ID NO: 163888 - DNA, 718 bp, Arabidopsis thaliana landsberg
ttttcttttgttaaagtcaatactttccacttaaagtcgagcctttacaaaaatgttttcaaggaatcttttaacagtcggggaattagagttctcatgtctttttcatattgatttaattgctaatatatatatatatatatatatatacacgactgatttttttgttttccttacgttttgcttgtttataggtatagaggctcgcggtttcatattcggttcacccatcgcattagccatcggagcaaaatttgttcctcttcgtaaaccaaagaaattgccgggttaaacaccattccaaacttttatatttaacatatgctttgttattttattattcttatatgtcaagcgatattttgagtaacaatagtgttacctatcgtttaacaaatcaagtatggggtttaattatcaaaaaaagtatggggtttaactatacgatttttaatcaggccaaataatatttgaagagtatgagttggagtacggaagtgaccggttggaaatgcatgttgaagctgtagattccggtgatagagcattggtcgtagatgatctgattgctaccggcgggactctttgtgctgccatgaatttgctcagtaaatttttctcatttttcaacaatatatctttagtaccaaaattattattatctttcaaatggctgcccattgattcaaatcatttgccacttctataaatccgaaaa

SEQ ID NO: 163889 - DNA, 742 bp, Arabidopsis thaliana landsberg
atgaccagaaggcagaagaagacggcgaaggtggtaacagtggtaatgggactgtgtattgtcgcatatattgcaggaccgtctctgtattggcatctcaatgagaccattgcagattctctccactcctcttgtcctccttgtgtatgtgattgttcttctcagcctctcctctccattcccgacggtaatcatcatcattatcgttgtctttcctttcttctttccctggtcacaaaacccaacttttgaaacgtttgattcaatgtttcttgtgcaggattaagcaatcacagtttcttaggtgagtatttttctggtaaactttttatatatttagtaagaatgctaaaacgtcgcagatttcacgtgcattttggttggatcttgtttcattgccaagattgcatgaggcacgaggaagggagtgaagagagcgagagtagttttactgaaatggtagctgaagagctgaagctaagagaagcacaagctcaagaagacgaatggcgtgcagataggttgctgctagatgctaagaaagcggcgtctcagtatcagaaagaggctgataaatgcagtatggggatggaaacatgtgagctagctagagagaaagcagaagcaactctagatgaacagagaagactttcttacatgtgggagcttcgagctcggcaaggaggatggaaagaaggaactgttgcttctgatgttatctaagaacagatcttttgcttct

SEQ ID NO: 163890 - DNA, 390 bp, Arabidopsis thaliana landsberg
  unsure (1)..(390): unsure at all n locations
tcgattttcgaggtggaggtcgaggcggacgctgatgccggtgcatcgtctgcgaagaagaaccgtatccaggtgtccaccaacaagaagccgctctatttctacatcaatctcgccaagaggtacatgcagaacnnnnnnnnnnnnnnnnnnnnnnnnnnnnnnnnnnnnnnnnnnnnnnnnnnnnnnnnnnnnnngatcctcaagaacaatggtctctccactgaaaagaagatccttacatcaaccatcggcaccaaggatgaggcgatgggcctgcttgtccgttaagccaagatcgacatcctgctgtgcaaatcatagaactttaacagtatcatgtgcagcaagaagttcgagcgcccgaagccggccgcctaggaagagatc

SEQ ID NO: 163891 - DNA, 1668 bp, Arabidopsis thaliana landsberg
aaaaaaaagaagaagataaagaggtatttatatatcagatgttcaaaaaccctaaatcgcgtttcttctctcaaatctgccgccgccatcattgatccaggtattgctctaaccttgactcttcacgtcattcgcatattactctcctcctcgctgatccattcgaattctgcactcaaatcgtgtttttgtacatcatagtttcaagcattatgattctctctagccaatgacttttcttgcgattgaatccttttgcagtctcgttatcaaaagttgaagaatttagtttagtttggttgtgtagataagatttgtaatcgcaaaattcgatctttgttacagttatggattcgagttactctgattctcgtcccatgttcgtgcaatcaccttatggtggttggaatcaaacacagatgattgattcaatggctaatccaatgaacaatgaacaaggagacttgcattcactatctgaatcacaatcacaatctcaaccgtctcagcaattacagcctgcattgaaaaggcctagacttgttgatgataacttgtttaatcctgcttcgtcgtttcctcagccttcgagtagcaatccttggatggttccatctttgaaccctcctcctgtgaacaaagggactgctaatatattctataagactagaatgtgtgctaaattcagggcagggacttgtaggaatggtgaactctgtaattttgctcatgggattgaggatttgaggcagcctccgtcgaattggcaggaaattgttggacctcctcctgctggtcaagacagggagagggagagagagagggaaagggagagggaaagaccgtctttggcgcctgttgtgaataataattgggaagatgatcagaagataatcttgaggatgaagctttgtaggaagttttgttttggggaagagtgtccttatggggacaggtgcaattttattcatgaggatctgtcaaagtttcgtgaggactcggggaagttgagagagagctcggttataagtgttggtgctactgctgctgatcaaccatctgatactgcttctaatcttattgaagtaaatagacaaggaagcatcccggtacctgcacctatgaacaatggtggtgttgtcaagactgtgtactggaagacgaggttgtgcatgaagtttgacatcacgggtcaatgtccttttggcgataagtgtcactttgctcatggccaagcaggtatgttatatgttgaacatgtatctttgctaatgcgaccttatattatagtatcctagtatagatttgcaagttctgtgtatacaggctatctctgaattctcttcttttgaccgacatttgtttgatcttgatttggttgttgattacgaaattgcagagttgcataactctgttggaagggtagaaggagaagctatgaacgcggtagcgtctgtgaataaacaagcagtggtacctgcgaatgaagcatttgcaatgaaaccgattacacaagtaacagcagattcctctggtctgaatgaagaagggcggagaaagaagtgtttgctcaagtggagcgactccaagaagattaaccgaatatatggagactggatcgatgatttaccggtgggtcaaaagtcgacaaagccagtagagagttga

SEQ ID NO: 163892 - DNA, 327 bp, Arabidopsis thaliana landsberg
atgggtttaatgaggtcgatgcttccaaatgcaaagcaaatcttcaaatcacaatctatgaggaacaagaacggatcatcctcaccatcaacaacaacaacaacttcagggcttgttccgaaaggtcacgtagcggtttacgttggagaacaaatggagaagaagaggtttgtggttccaatatcatacttgaaccatcctttgttcagagaatttcttaatcgcgctgaggaagaatgcggatttcatcactctatgggtggcttgacgataccttgtcgagaagagtcgtttctttatctcattacttctcatcagctgcattga

SEQ ID NO: 163893 - DNA, 527 bp, Arabidopsis thaliana landsberg
  unsure (1)..(527): unsure at all n locations
actatatgacgcttcttgactctttacactatttctctctttcgtatggtaggttggttctgtgacaacaatgtgctttacgggtttcctcatccgatgtatcatggtaaagacacacacacacacacacacatgtttgtgttgatatctaccaatccttaccttcttggttagactttagaatgaacaactaaccaaaggttttgtcatttaatatggtttagatgtgctttgccactttctatgatggagcaaaccttgatgtgatggataatccagtccttaatctcatatatcacctggtaagctctctcttaaactaaccatataatctgatcatgaatcttactgtcatacataatcaaaccattgtttctgcttgaaacctannnnnnnnnnnnnnnnnnnnnnnnnnnnnnaatgttgcttaattacagttggtagagttaataccattttctctggtcctcttcatcgtgagaatcctcccaccaaaacgaggcattagaccgaaggtgtacacanag

SEQ ID NO: 163894 - DNA, 432 bp, Arabidopsis thaliana landsberg
  unsure (1)..(432): unsure at all n locations
ccaatctgctgttgcgcacgttgcagacccaggtcttcccgggcctgcacgtcaaccatgtggtcgtcttcagcttcgtcggcttcgccaagctggtcgacgctatcggttgcgtctacaccgatgtcgaccaccgctactacaacaacagtgcgcagaccgactactccagcattgacatcgagcccggctatcagaagctctgcggtgacaacggcgcccccgacagcgcattggccttcgtgcgcttccgccacacggactcagatgaggtccggaacgcccgtcagcaggacttcatccgctgggccaaggaccaatactcgacctcccagctgatcagcnnnnnnnnnnnnnnnnnnnnnnnnnnnnnnnnnnnnnnnnnnncggacagatcgctgcaaagtgtggacggcctcctggacctcttcg

SEQ ID NO: 163895 - DNA, 491 bp, Arabidopsis thaliana landsberg
aaaaccaaatcactaaaccggaaaaaatggctggaggtctcgggaaatgcagcaagatccgtcacattgtgaggctaaggcaaatgcttcgacggtggcgcgatcaagcgaggatgtcttcttctttcagccgttgtgtaccgtcggatgtaccgtcagggcacgtggcggtctacgtaggaagcagttgtaggagatttgtggtgcgcgcgacgtatctgaaccatcctgtcctaaggaaccttcttgttcaagctgaggaagagtttggtttcgttaaccaaggtccgttggttatcccttgtgaagaatcggttttcgaggaatcgattcggtttatatcccggtctgattcgacccggtcaagacggtttacttgtcccgatgattttcagaagaattgccacgtggtgggaatcagaagcaagcctgatctatggatcgaatctcgaccgttacttcacggcgttactgaaaaagccgtttggtga

SEQ ID NO: 163896 - DNA, 511 bp, Arabidopsis thaliana landsberg
ttatcattattactaattattaattcattatcatcaaacttaagatatttacggatttaactttttacaggtttacatttttggcggaaaattatagatttacgtttttggcgggaaaatcacgggtttacatttttttggcggaaaaattacgggtgtacgtttctgaggggaaatcacggttttacgtttttgcgggaaaatcacggatttacgttgggaaaatcacgggtatacgttttcggcgggaaaatcacgggtaatacgtttttggcgggaaaataacgggtttacgtttttggagggaaaataacgggtttacgtttttggctggaaaatcacgggttaacgtttgtggcgggaaaatcacaggtatacgttttaggcgggaaaatcacgggttaacgtttttggcgggaaaatcacgggtttatattttttggtggaaaaattacgagtttacgtcttctcaattttatctcgtgtatatttaagaaatttggaaaaatat

SEQ ID NO: 163897 - DNA, 1283 bp, Arabidopsis thaliana landsberg
  unsure (1)..(1283): unsure at all n locations
aagaaatcgtcgatcattgattcaggtaagttctcgttctttgttatccaagtttctgcttcaagcattcatcaccaagattccaattcgttattggggttcttgcagaaacttcttcgaacattcatatctgttaagttttcacgtcgttgggtctctctgttaatctgctagaagaaatcttcgatcattgattcatgtaagttctcgttctctcataatcaagtttcttcttcttcagcatatattcgtctctgttacactttcacaccgtttctactgctagaagaaatcatattcattaccatgattccaattcttttactgggttttcttttagaataatagatcactgtttgtttttagagatcgagtttgatgaatttggtttctcgtttcttggatcagaagcaaaaatgtcagaggtgttaacacgcgggtttcgatttcgccangctgatgaagaagtgacagactaccttatgcgaaagacacaatcgccggagttcagctgctttatcaaaaccatagacatgtacgacaaggatccgtgggtacttgggcatgtgagagatccgtgttacaatcactatgaatggtattactttgttaagaaaaaccccctcgggaatgagtacttagataagcctagattgaacgggtttgaacatccacgcttgaaatgggatgtgttgaagcagatacatgatgctctgagttctggtcagaacgtcccaccaagtgtctttacttacggattccgatttcatccgactgatcaagagctactctctttgtacctcactccaaaggcccattcaccagacttcagctgcttcataagagagagagagctatatgccatggagccatggcttcttgaacatgttagatctcctttttacaaggacagtgaatggtactactttgtgagaaagtgttcgtctcgtcgtgaaaagctgaatttgatgttctacctcaggggcaagaagaaaacatggagggtcaatggtgttgttacacaaatcatagataatgacatagagaaaaatgttctgggaactaaaacaagatattctttcaatctggatgtggggcgtgtccactcaaggaccgggtggaaagtagaagaattccaattgtcttcggatcctgtttgggcggtttgcagactcacttacctgaaaaacgattcctgcgtgattgatgatagaccaatacttccgggagaagagcatcctaagcttgagttgcaagcattgaagaatttacatgaggtgtaa

SEQ ID NO: 163898 - DNA, 770 bp, Arabidopsis thaliana landsberg
ttgcagaagaagatgccgacactcacaaagctttattccatggaagaagccgcaactcacaacaagcaagatgactgctgggtcgtcatcgacggcaaggtctactctttttctcaatcttctaatttcaatccttgttcatgtgtttgtgaatcctgaagtttccttcgctttcagaaaccatatctgtgtcttgttgcctatagaatctaatgaagaatcttgtaattgctgtttatatgtagttagattgagctaatcagaatcttcttcctctttttttttgttgataatgtgttgacttcacaatcttggtccccaagaaaatgatatggctgatgcgttctctttacaggtctatgatgtatcctcttatatggatgagcatcctggaggagatgatgtgcttcttgctgtcgcaggtaagcttcttcttcttcctcttgcccatccttgctaaatgactgatctgttgttgtctctactctaatccaagtaaatgtgatgatgttgttgttgaaggcaaagatgcaacggatgattttgaagacgcagggcacagcaaagatgctagggaacttatggagaagtattttattggcgagctagatgaatcttctttaccggaaatacctgagcttaagatctacaagaaggaccagccacaagactctgttcagaagctttttgacttgacaaagcagtattgggttgttcctgtctccattatcaccatctctgtagcggttagtgtcttgttctctcgcaag

SEQ ID NO: 163899 - DNA, 1098 bp, Arabidopsis thaliana landsberg
cactcgaagaattgggtgaaaaaggttcaagcagattgcaagattcttgagaatgatttgccaggttggtgtatacacttatgcagatcaatgcttgcatcatttgttctttaaatttaactatttttgccaacagaggcaatatctgtcagagcctgtgaatcaagaatggatcttttgagagctgtaattattggagctgagggaactccttaccatgacggtcttttcttcttcgatattcagttcccagatacttatccttcagtgccaccggtatgtcctcaggaacaacttcgtacttgttctgtttttcttacttcgaaaccttaatgactccggaagttcaatttgttgttgacagaatgttcattaccattctggtgggcttagaatcaacccgaatctatacaattgtgggaaagtatgcttgagtcttctcggtacctgggcaggtagcgcgagggagaaatggctcccaaatgagtcgacaatgttacagcttcttgtctcaatccaagcactcatcttgaatgaaaaaccatactttaacgaacctggctacgtacagagcgcggggactgcatcaggcgagtccaagtctaaagtttacagtgagaacgtatttctattgtcgttaaagactatggtttacagcataagaagaccaccccaggtaaataatttgtcaaatcctcatacgtttcctgaataggctgaaatcttcttgttttccaagctgaattgggttgttctttcctgaaacttgttgtgatgaaatgtgcagcattttgaagagtatgttcaaaaccattactttgtccggtctcacgacattgtgaaagcatgcaatgcttataaagctggagctccgcttggatcgatggttaaaggcggagtccaagaccttgaagaagctagacagagcggctccaagaagtttaagaccgatgtagctagctttatgcagacagtggttgatgaattcgtcaaactaggagtcaaggagcttgcagaaaaaccagaaccgcctatgagcaatgctaacacagagaatcagagcaagaaaaaaacccgtaagagaagcagatcatcgag

SEQ ID NO: 163900 - DNA, 307 bp, Arabidopsis thaliana landsberg
ataaacacagtccgagccaatcgtgagaacgctgcgaaaaacatctatatcgcctcgggagacagccaattgagcttaatggacagtcatcaagcgcgccccgagccgctacataccgtttgccccgacgccatctctcaaacgaccacccagccgtgaagaacacctgaggcaaagacttgtaaaaaccattcattctcaaaggatcatttccggtaaaataggatcttttatgggactttcggaaatgatacaggagaatctttgaagataatgtcgaattaggaaatatttccaaagcatccga

SEQ ID NO: 163901 - DNA, 565 bp, Arabidopsis thaliana landsberg
gagaggatgaaccttttatctgacataggtgttcacatcactaaatggcgtgtctatgtggagattcttggtctctgccatcataatccaccgcgagatggtgttgaaaccacgattatgctgatcgattcaaaggtaattgtataaattagcatatcttacactgtgacttgatggaatttgaaaccctaaatttctaaatttaataattttgaaatttttatgtagtataatcgaattgatgctactattcaagaaggcaccattctgtggaagtacaaggatgtactcaaagagggtttttggtattacatgtccgactttgaagttgtggttaataccatgcctgttagatactcattttgttcaaaacagatcaagtttctcagagaaacaaccatgtggcatgttccttcactttcaacaagtagattttttgagtttgcggctccgagtgatgttgagaatgctgcacagcaagatatggattttctatctggtaatttcttattttctatttgatatcatttgttacactgttttctataacttattagaaaccctt

SEQ ID NO: 163902 - DNA, 1085 bp, Arabidopsis thaliana landsberg
atcacgtccaagttgtaaggtacgtctttggtataaacgcttctacatcgttaaactctaatattagctttggatgcacggatgcacatgcatgcaacaatttaatcactagaaacgaaagtgaaatagatctgctaactgtcactgataatgaagagtgcttaacttaggtaagcttgacattttggtttctttgtccataataaacatgttattgtcaccaattacctgtctttttttgaagtacaaacttggagaattatggtggtaaaacaaaacggaggcagatgaggacttcccctcttaaatcgtgaagtatatatatatatatatatactacgagaaaacatggtattagcgactacactattcatagctaaacagtcgcttaatcgaaatttacgactatttggcgactaaaacacgtagttggcaatacaagcgtcgctatattgatatgtagccaaacagtcgccaaatggtgaataactagcgactacataagtagtcgccattgggtcgccacccagtcgccaattagcgactgtttggctacatttatgccactatatagcgattagttggcgactgattagccactaccgggcgattgttgtaaaaacatggtaaaaacatataattaatatccaaaaactatttttcttcctcgattctcattacctttagaccggttttagttagctttaaacttcggaacttcgacgacggtcgtggctagtcccccaaccagcaacgcctgtatgaagtacccagtaagcagttcttctttcacaaccttgcaattacagcttgaggaagccaacctcaagatagatgaacaagctactctacaagcacatcgtgaggcagaggctttgcgggttgcagctgagcaagcagagatcaagcgtgttgctaatgagcaacaagaagagatcaaacacttgaggatggtgaagaagtacttgaccaaaactgaccctaggtttctcgtcttcctcgagtctgctggtgctactgcttcagaagatcaaacagaggagatcaagactgctactgcttcacaagatcaaggcgaggagtga

SEQ ID NO: 163903 - DNA, 2434 bp, Arabidopsis thaliana landsberg
atggtggaagtaatggaagaaggattgatcattgtcagtcgtaagggagtagtacgaggaaattgaaacggtattgggaggagaaatcgatgtgtattgacattgagaagtgagaaagcaacaattacgaagatgccaagggattatttgaaagcgaaatcgccaaaaagaagcatgaaccatctattagaaaagggaaacaaacagaaattgtaaagtcgtcgtgagggattgggtgagaaagagaggtttcttacaaattgattttcgtatagaaattaaaattagagaattaaaccgaaattggtttgagggtaaaatggacaatttttatattagaagtgccttgtattttgaaagtatcgtatctcggaaattgtttgagaaaagtgtcttagagtgtaatattctcataagataatttgattatgttttctacatagtataagatcactgatttgattaataaatgttaagaaaataatatatagccggatccggtatcggagtaaaccgggagagagaggtcaaagtcgacgtagacgtagacatagttcatgttgttcactttgctttcttcgtgcacctgtatatcaaaaaccaacaccgtgtgtattcctctctctctctctctctctctccccgacttttgaattttccctcagatgtgtcttcctttgtaatccattttcgctctggatcgatcttcctacgatttggtcttcagattgatcggtttctcatcggaattcccggggggagtataagcataacgaaaaggatcaaactcaggatcaacgcgacgggagaattggagattttttgtttgctagatcttgaattgagcgatcgaattgggtaattggaggtttgaagagatcagagaaatggcatctgagcagttgatgtctcccgccagtggtggtggacgctacttttagatgcagcctgagcaatttccttcgatggtctcttcgctcttctctttcgcgccggctcctacgcaggagactaatcgtatttttgaagaattaccaaaagcagtgatcgtctctgtctctcgccctgatgccggcgatattagccctgtactcttgtcttacaccattgagtgccaatacaagcaggcgagtccatctcttctctatagtaggtcttactaatatcgtcgcataatagatgcttggatcagaatcacttagaggagatgggtatcaactgtaaattgtcatgtctgactattgatcgaagtagttcttttggatacctagcttgaatctgataccactgatcgatgttatatgtcctttggaagcccggaacagagacatatttatcaatatttatatgtttcaccttagtttagtggaaaggctgcttattatagtggagctttcgacttttgaatacttgagtcctaactttagcgcttttatgtaacagttcaagtggcagcttgtgaagaaagcatctcaagtcttttatttgcattttgcattgaagaaacgtgcttttattgaagaaattcacgagaagcaggaacaggtttgtggtgacttgatatatcaaggaattttcttctactagtttgtgattccctttgagtgaatattttaaaggtttttccttggtctgttgaattgagtttgatgtggttttctttcgaatatcacattaaaggttaaagaatggcttcaaaatctaggaataggggatcatccacccgttgtgcaagatgaagatgctgatgaagttccgctacatcaagatgaaagtgccaaaaataggtcacacttgctggcatttttttttgcttggataagttgctgatgtgagtctatactcttccaacagatgccatcattttctgacaagtagactgttttgttcagagatgttccttcgagcgctgctttgccagtcattcgtcctttgggaagacagcagtccatatcagttagaggaaagcatgcaatgcaagaatatctgaatcattttctggggaatcttgatatcgtcaattcacgggaggtatatttgtaaaatctatttcacttggttgttcaactactttaaaattgttaatacctagttatgtcaagggttgttttctcttctattctagctagaaatcttagtacagcaagtgactatgcgaaaatttccatgcttttcaaacttgtattcctgtacacattgatcgtcattccatttccgaggctatatgcatgcatagttaaatgctaaatgcctaatataggtttgcaggtttttggaggtttcgatgttgtcattctcaccagagtatgggcccaaattgaaagaagactatatcatggtaaaacatctaccgaagttttcaaagagtgatgatgattctaatagatgttgcgggtgctgttggttctgttgctgcaacgataattgggaaaag

SEQ ID NO: 163904 - DNA, 407 bp, Arabidopsis thaliana landsberg
tctttgcatgtttgatcatgtatcgggagccggaattaggatcgggaacgaacttaaattccaaaaactcctctggatgaggtgttattccaaagatgatgtattaggtccaaaaataataccaatcggagggcattttgtaacttattttagtgttaacatttggcgtacaacgcgttttatgtgtactttgaaacaatggcctaattacagacattatcagaattttacagcattcaagcttttcggtatggaagatcatggaggcgtatgggattggagagcaagaaaaaatggaatttatttaaagaagaaagaaggtggtaagtttattaaaaattcggttaatatgcataaagtatatgattggataaattaaaaaagaaagcaaactatctaaaaataat

SEQ ID NO: 163905 - DNA, 719 bp, Arabidopsis thaliana landsberg
atgtccgccgagaaacgctgcagctggtgtctttccacgtccgattacattagctaccccgacgaggaatggggcaacccgcagcaccatgatcgcgtactgttcgagttcctgatcctggagggcgcccaagccggcttgtcgtggctgacgatcctgaacaagcgcgccggctatcgaaaggcgttcgccgatttcgatccgcaaaaggtcgcgcgcttttcggacgcaaagctggaaaagctgatgctcgatccgggcatcgtccgcaatcgcctgaagatctggtcggcgcgaaccaatgcgatcgcgttcctcaaggtgcagaaggaattcggcagcttcgacgcctatctctggagcttcgttgccgacaaaccgctgatcaacaaggtgcgcaaaatgggcgacgtgccggcaaagaccgagctgtccgaccgtatcagcaaggacctgctcaagcgcggcttcaagttcgtcggcagcaccatcgtttacgcgtacctgcaggcggttggtgtcgtcaacgatcatctcgtcagctgtccgcagtaccggacctgagcaagcctggacccggctccagcttgtcggcacgaagtcgcgccgcgatactgcggcggtgaaatccgtgtccgccatcgtcctctggctactgatcgcgctgctgccgctcaacggctatgccaacgcgacggcgaacggctgcgcgtcgcacc

SEQ ID NO: 163906 - DNA, 451 bp, Arabidopsis thaliana landsberg
actaatgtgaaaagaaaccctttacctagtcattacaacttcacccccgcggccgagattcctcatgcccagtcttcccaagggcgagtccgagttcaaccccaacaagcaaggtcagcagctccacgagtctccgactagctacctcctcaagttcttttccagaactccgtgaatcatgatctcccttcacctctttcgtcacaagaagtccagaatgatgcagctaatcgatcgactccacaacatgaccctccaagttctccaattcagaactctcatgtaagtcaaccatcttcctaaggaaacaacttccaagaacatgtcagttctgtgttaccggaactccaagccgataacgtaaaggctctaaacgacattcttcaagtgcctggtcgtgaggcgtggacccccgttctttctcccataccgatagaaaaaaacaacttgg

SEQ ID NO: 163907 - DNA, 649 bp, Arabidopsis thaliana landsberg
  unsure (1)..(649): unsure at all n locations
atggcacatatcaccntactcccgtggcgcgccgagcgccgcaagcagcgcgaacgcgagttcttcatgcagttgngggcggctttcgtggccggcatcctgtgcgtgctggtgtggtcgttctggatgggcatgcgcatcgacaaccagaacgagcgcaatgcctacctgcagggcgagatcaagcaggtcgacgtgaagatcgccaagatcgacgacctcgagaaagtgcgctcgcgcctgctggcgcgcaagcagatcatcgagcagttgcaggccaaccgttcgcagatggtccacctgttcgacgaactggtgaagaccatcccaaccagtgcccgcctcactgcactcaagcagagcggccagtcgatgacgctgagcggcgtggcccagtccaacgccagcgtggccgattacatacgcaatatcgaggcatcgccctggatgggccaggccgacctgagcaagaccgagaacacgcacaattcctcgcgcatgccgtacagcttcggcctgaccgtcgcgctgaaccggccgaagcaggatgctgccggcaaggccaaggctgcggctgccggccaggatgtggcctcggtgccaccggcggtgtccaaggcgaaggctgcaaccgcaaaggctgctccgc

SEQ ID NO: 163908 - DNA, 509 bp, Arabidopsis thaliana landsberg
  unsure (1)..(509): unsure at all n locations
aaccaccatggcctnnnnnnnnnnnnnnnnnnnnncatcgacgactttaaaaccattcgccgcactgccgaaaccttgggggggaaggagggtgcggacgtgttgaccgccgtcgacgggttcgaggcgctggccaagatttccgatcttcgtcccgacatcattttcgtggacatcatgatgccgcggctggacggttatcaaacctgtgcgttgatcaagaacaaccatgcgttccgttcgacgccggtgatcatgctgtcctccaaggacggcctgttcgacaaggcgcggggacggatcgtgggttccgagcaatacctcaccaaacccttcacgcgtgacgaactgcttggcgcaatccggcagcacgtacacgccaccgtcaagtgacgcgccctcgcggcattgcgcaagagagaacatccatggcaaacattctcatcattgacgactcgcccaccgacgtgaagatctttttcggtgcgctggagcgcgccgggcacaag

SEQ ID NO: 163909 - DNA, 436 bp, Arabidopsis thaliana landsberg
aatacaaaaaaagatgcaatacaaaacagaaactcgagggtcgttgtcctacaacaacaacagtaaggtgatgaacaacatgaatgtgtttccgtcggagacactggcgaagatagagtcgatggcggcagagaatgcggtggttatattcagcgtgagcacttgctgcatgtgccatgccatcaagcgtctcttccgtggaatgggcgtcagccccgccgtccacgagctcgacctcctcccttacggagttgaaatccaccgagctctcctccgtctccttggctgttccagcggtggcgccacatctccgggggcacttccggtggtgttcatcggagggaagatggtaggagcaatggagagagtgatggcttcacatatcaatggctcactcgtccctcttctcaaagatgctggcgctctttggctctga

SEQ ID NO: 163910 - DNA, 651 bp, Arabidopsis thaliana landsberg
attattcttgacttaattatcttgaaccgtcaaaaattatttaaaacattactacttaagagacacttcttcgttgccacattatagtaaatgtgtatcttaccaaaaaaaattttatagtaaatgtgaaggcaccatatccaggacataaaccggagaaactagtgaccacaacagtgaaggcaccatacccaggacataaaccggagaagctaatcccacgtacgcttctacttccatgacattgtatccggagtcaaaccaacctcagtcgtagtcgctacgagtcccacaacaaactcctctgcaaccgctttcggtatggttgcagtcgttgacgacatattgacggtgggacctgaaataacctcagaggaagttgggagagcccaaggaattttcgcatcggccgaccagaacaactttggtctgcttatggctttcaactttgttttcacaaagggtgaattttccggcagcaccgtgtccatgtatggccggaatccgatattttcgaaggtgagagagatgccgatcatcggaggtactggagcattcaggttcggaagaggatatgcacaagccaagacttttacgttcaatactaccagtggaaatgctgtggtcaagtataatgtttatatttggcat

SEQ ID NO: 163911 - DNA, 1091 bp, Arabidopsis thaliana landsberg
gatacaatgattgatgccatttgtccgtatttctaccctggatatgacgtccctagagttttcgataaaggaggttggtttttcttggaaaacatacatctgatcaaatcagccgtcggtagaaaacgtcccttaaccgataataagttgagaatcaagtttcttcaaactaccaaactgtctcatgtggatagattggttccaagtaacttttttcgatttgttgccttcttcatgatcgaaaatgagactattgattcttcaattgtccatggtaactttcttatctagattttttaaaaatattaagtctgttgatttggaaacatatatctttcatgtaatcgtcttttattgtaaatgcttatggtgttgtcgtgagagttgggaatataagaagaccggattatgttcctcaatattccgaaattccttgactttctcaatttctcgagtttgagcttaaaaatacttggttagtattttccactatatagttcgacatatttttggttatatattttaatgtagaaacatagtaagcaatgttatctttataggtggcttaatttatagaacttagatgttagagagaaataattaagatattcttattaggggaaaaactcttacatgtgttgcaagtggatatacttgtgatttgtttgtgcgtttgtggagggaacttggtctacaccttggttatcagtggaccttcggtatgaatcctataacatgcgtgcttcgattttggaacgttgctgatcatgaaggtaaatttaactctcttctcatcatatgtttttttttatagctaatgcatataataaaaacataaatattttaggtcgtcaatgtctaatcacacataatggtgcttcaagaattacattcaattaaagttacccagagattaacatggatcgcatcacgtaagaacgtttatatttacattatcccttaattgtttattgtatatttaaaaattttggtcttggttatttttaatttttctattttcctactgtttcagaactcaattccttcaacgaatgcaaacacctgagctagatgaagttgtggacgagaac

SEQ ID NO: 163912 - DNA, 792 bp, Arabidopsis thaliana landsberg
atattgcatatttgtgttgttttcaggtgatttggagttgctggtgagttaattggaagaagtgcacctgatcaaatcaacatacttgaccacgagctcaagtatagtcatcatggagttcttgaattactcggccacaacctctacagcgaatcactctaccaacaggtcgagtatcaccatcattattcactcgacctatcaccccaccaacatggccgagtatcaccatcatcattcactcgaccaatcactctaccaacatggccgagtatcaccatcatcattcactcgaccaatcactctaccaacatgggcgagtctcaccatcatcatccactcgataaatcactctaccaacatggccgagtatcaccatcatcattcactcgaccaatcactctaccaacgaggtcgagtatcatcatcacttcacattaccactcgaccccctagtcgagtaccaccaagataatcactcgatcacatcactcgaccccctggtcgagtatcatcacgtccaccacatcaccttcactcgatcacactactcgaccacgtggtcgagtaccttcatcaccttcactcgatcactctaccaccaagccaagtaccatttctatcactcgactacatactcgactgccagcttcagagtcttctccattccgcactcaaccagacactcgagcacaaggaagaaaagaagactccagcttatcactcgacccctcactcgaccacatgggtcgagtacagttcttaatccgtcccaatactgcgtcgttttga

SEQ ID NO: 163913 - DNA, 3191 bp, Arabidopsis thaliana landsberg; identical to SEQ ID NO: 1003

SEQ ID NO: 163914 - DNA, 586 bp, Arabidopsis thaliana landsberg
aaagtgttatatattgatataatcatgttatatgctatacgctttaattttgctttttcatgttttatggatgctttggacattgtaggtggtctaaaattgcctcgcatttctctggtcgaacggataacgagatcaaaaacctctggaatacgaagatcaagaagaagatgaaacatcttgggttggatccggctacgcacaaaccgatgaatgatattactcatcaaaccgatcctaatcaagataaaaaaccaaatatgtgttctaccatcaatgaaggagaagagatcaaggatcaaactccaaaagatgatgttatcacagaaacaacaaaaacattaatgttatctgataatgatgaggaacttgtggcgaaaaactgcaaaattctatgtgcagaagaagtagacttggaatctctatttgaaacgcaatgcaatgagatatcctcttcgtctttctcttcactatgtagtaatatttcaagaagtgaatcttcatcatatcttgcagaagattcgatctctttagagcaatgggacttggatatgacggatccttttgtaccatgggacctcttcgc

SEQ ID NO: 163915 - DNA, 830 bp, Arabidopsis thaliana landsberg
atggtgttggtgagtgatgatactcgaccagggggtcgagtaacgtggtagagtgaacggccgagtgtggtcaggtggtgtggcgaagtgatactcgaccaaggggtcgagtggcgtcatcgagtggcctgagctgaggatactcgacctgggggtcgagtagctgtgaagaatggctccaaagtcactcgaccagggggtcgagtatggcgatggatgcacacgacctggtggtcgagtatatcttctggttctagctcgtttcttccaatttgctcgcaaacagctccaaatcacctgaaaacaactcagaaatgcaatatgtaaacaaagctatcctaatcatgcaaagtatgcaagaatgatgagaaagatataaaacaatgatgaataatacgaaattggactcaaaacgatgatgaatggacactgaaaacatgcaaattatagacatatcacactcgacccccctggtcggttagaggacatcactacttcaccacatcactcgaccccgatgtcgagtgtcttcatctcatcacctgaccatcactcgatcacatcactcgaccccgaggtcgagtgtcttcaccttcatcgccagaccactacttgatctcgctactctagcttgaagtcaagtatctccatcacaaccactcgactacagactcgatggcaagcttcagagtcttcttcatcccgcactcaaccagacactcgagcacaaggaagaaaagaagactccagctattcactcgacctcccactcgaccacttgggtcgagtacagttattaatccgtcctaatacttcgtcgttttgagtat

SEQ ID NO: 163916 - DNA, 1313 bp, Arabidopsis thaliana landsberg
  unsure (1)..(1313): unsure at all n locations
catcgattaacaccacttatttatgaattatcaaaaaggcccaaaaaagcaaagtataaagaaataaatttttctatgggattcatgtgaaattaggcaaattactaatatctttttttttttataatcagagactcatagtgtaagaaagaagttaacaagattactattaagaatgcatcccatagacttatttaacttctttgattatcatctctctttgtgaaattaattaggcaattactaactataatatcttttttttaatcaaagtgtaagactctcgtcttcctttcttctctttctttatccactcttgctcttctttttattcaaatttcgtttttgatttatcaggggacaaacttaaagctctctcacgttaagagatacaacaggactctggctgctggtgcttgctgtttctacattactttggttgcaatgcagccatctagtggaaggcgttttacttttcagacttccgtttatgaagaagcttgtggccggcttgttttgacctcctttattgctgaaagacgtcgtccaggtaattaaattattattatactacatgtgactccttactatatagttcattaacacatcattattattattacaacaactagtatttcattcatcattgtatattttagggacaatcattaaaacgtcgnnnnnnnnnnnnnnnnnnnncatggctagcttgcctgagttcccgctggagaaccctttcgaaaacagaaaccgattttacgtggtggatgatgaatcagagctgcgagccaatgactggattcgtctgtatctggaactttctgttgccatatctgataggaccaccacggatcatgatctttccggcttgaggattgtgtcagtagccattcaaactatggagccacccagtgagtcctctctcactgctaagaatgcaactgtctacataaggtacattgacttttgtaaggctcgctgtggtcagaaccttgatcgcatagctgtagttagaagaaaccttcaatgagactacgggatgctttagtctcgacggttggaatcaaagctcagatatcatacccaaaaagaaggctacgagtagcaaacttctgtcccagcgtttaattcacaaatcacggcagatatggcggcggcggcgcacaaaccatggcgttggcttggctcatcgtcttcgcaaaacaagatccatagaatcagccatccgaaagtatacccaaaaagggtacgagtctgagcgtgaaacttctcttacggcgtttcagcattcccaaaccatggcggatatctaa

SEQ ID NO: 163917 - DNA, 1322 bp, Arabidopsis thaliana landsberg
ggtttgtgagattcgttcggactctaatggggaagaaacgaaaatccgaggctacgcggctcgatgaggttgatcgaaccatgtatggcgcgtttcgagcgcgctgctaattcgctctcgcagctctatacacatgccatgaatcaccaacgcgtttctttcctcgccggtgaacgtcgcggaatggtctctgctctctctctcttgaccttgttttatatccagtttcgatttttggcttctgggttcgatagatagaaacatagttgaaaagttttcttctcgttgcttgttttgatgttggttgactatcttgaatcgtaaattgagtgcttatgtgttgttgggtttctgtttgctctcgagattttagagtcacagaatgaatcatggatattcaatgttgtttcttatgtgttgttttggtaaagttgatctctttggcttgtttatgttcgattgattgtcgtacgtgagttaattggagacacactctgaaattggttatgatctatgaagctagtttagatatgaggctaagcaagcagtcttactgataaaagttgtggccttttgatcttgaagtgcttacttttgttttttactagattgatgaactaggatggctgttctcttttggtggcagcttgacgttcttgacgtcattcaatagtgattcatgacattgtagtatgagatttgaggtttgattggtccattgagttttacttttttctttctttttacaggagaagctttaccaatggattgtgagacaagaagaacaaggaactagagtatccacagctgatattactacctacttacaggtactttcctttgaaaacagtatctcgtttctgattacgctcctgctatgtaattggaattcagattgattatacctctcttgactagctacgcattaaagtcccaacgatctttagtttgatctgaaagttattcgtgtttaccttctaaaaccatatatgcagaatgcgcttgaatatgaacctgaggagacgtcgataccactccccatgcaagagttttatcagcaccaattcgctccaccaaacgtaaatacatcagtagctcatgttccttcaagtcacatagcacaacaacaacattatgattgtaaccaagagaaactcttgattccaccaaatggtctctcaagtccggttcgaagaacccttcaggacttcaacttgtgtgaagctgagtctggtaataataactacaatcccaactctacaggtgaacacttatcttactgaataaaatcttgtttcatttgccaaaagatgaaaaacata

SEQ ID NO: 163918 - DNA, 565 bp, Arabidopsis thaliana landsberg
cgagaatgactccttctcctcctccataacctacatatcaattccgcttcctaccaacgacgtcgtctcacgttcaatccataatctcactaccgctatctctagccaccgtccctggtcagaactcatcttctccggcgatttctctctcccggagagcttttcctctcttctcctccgatcaaagacgaatttcaactactttttcgtcaactacactatcatcgtctccacgtgtgcagcgttcgctctcatcacagctagtcccgtcgctttaatcgtcgttggcgcaatcatcgccttgtggcttatctttcactttttcagagaagatccacttattctctggagctttcaagtcggtgatcgtacggtgttgttgtttctagtcttagcttccgtttgggctatatggttcactaactccgccgtgaatttagctgttggtgttagcgttggcttgctattgtgcattattcacgccgtctttagaaactccgatgagcttttccttgaggaagatgatgctattaacggaggcttgatcgggtctaatctccgatga

SEQ ID NO: 163919 - DNA, 1990 bp, Arabidopsis thaliana landsberg
atgacagagacaaagaaggatcgtagtgggaaaagtcaccatcgtcgcttcgtacgtggtcgtgtttcattgaagttgtggccggtgttaaccggagtcgagccttgtcatcattggtttgttgggtaaggaaacctaacctgtttatgtcttcttcttctgaaaatttttgttttgatctcatagactcttagtttaaatctaggttttgtttgtgaagaagaagaagaggaaactgtgacaagtaagggttttgaggactaattacccgtcgaaccaaagagagttacatcgagcttttaccgtctcgggatacatctagctgcaaggagtccatagcattttacggtttatcaaacagaggtatattgcattcacaattcatctcgcaagtttatgataaatcactggttctgttttcagaaaagctaagttatttcagcaaaatatttcagattcaagttggagtttttggaggatatttccggtaatacctgagccgcatagaaaatatctacggtggtttttgatagaggaagtgttagggaagctatctgagctgtcaaagtcgtcggaaaaggtaaatcataatccccataacgattgcttcttaagcaagaaatttctgtttctgccaattcctgagaccctagatacacagattcaatgtgtcatctttagaacagcgtatagaggtctcaacttattccgatcgggatgaatttttgtggacagttacgtcgcactatagggttgagaatcaacggtgggattaagaagttaacggtccattgttaagttactagcacgttttggtgacacttaaagattgatttggttctccaaattctaaatttcagtttgatttttcttttcaggttttaaagtcttgaatgatgatgaagaccaaggaggccgatgcctcgaccgtgatcggggcctcgaccggcgtcagttgggacatcaacaggtgttcggctggggctgcagcgacacgcgtctggtgggacatcaacaggtgtccggttccggctgacgttgatgttcgcagggtcggtccgtttataaaacgggcgttggagaaattaggctactctggtcctctcaccatcactgccgttgggatactaacagacgtccctcatgacttcctcacacaagtccattcctctggaatcgctcttcatcacgttcccaccggtttatatcttctcatccttcattttctaaaattagggttttgcttctatttgccctttttgtttttgtttttaagtcttatagtttccgaaacagctctctcagggattgggtgggctgtggttaagtggacctggtataatcaacctccggctaatttaatgctcatatcgtacgagcatatctacttgaccactcttgacatgctaggtaggatcggatacaacactgttcggtctattcttccagatgatcctcaacaagccgcatcctccgcctccccttctacagggtctttcctctggaaaagcttactggcaagcttaccagcagcaggtccgtgtcctctctctctctctctcacactcagtacagtgttgaaatagttaagctgtgtctgacctagttatctccacggacgcagatgatatggattcaggggcacctcaggaggacaagtgcaaagaaaaaggtgaacctgccttgctttgtgagcaatgcagatttgctggccaaagctttgaagatttcaacacgcatctcaagagtgaggaccatacacattctgtaagcattctagccaaaaacgcagacttgttgtgtccatttgagtcaacaacctcttaccgcgagtttccctttctcacttaattcttccagctatgttttgcctacatctgaccccatattttgttttgtcactgagcagtctccagactaccgtaacgaagatgatgaacccgatgcagccgactacgttcgagcctctgcagacgacgaagaagagtag

SEQ ID NO: 163920 - DNA, 429 bp, Arabidopsis thaliana landsberg
acaatggccaccggtgagctagcttgcacttacgcagctctcctcctccttgacaccttatgtactttctaggctcaatattgacatcaatcctactggagccttaatgaacttgtagcttgtttgttttaattaacatgtactcaaactattttgtttacttgtaaactaggctgagaaagatgtcaacattggtgaaaacagccaatttgaacattgaatcatactggcctagtcttccgccagaacaaaaacatggatgatctcatcatgaatgctggtgccggtggatctgctgcttctcccatggccgttttttcttctgcactttcatctggaagtgccactcaagctgccccagtagctgaagagaaaaataaggtatcgtattcttctctccttgaacccttttactaattaatatactat

SEQ ID NO: 163921 - DNA, 455 bp, Arabidopsis thaliana landsberg
tttggtttggtttcctttttctgccatcatcttgtttagaatgcaattatcaatcaactcactgactggtactatctacttgtgatgacttaatgcaggtgtagatgttagcatgaacactcatttaaaagctgtgaaactcactttgaaagggaagaatccagttacattagaccacttaagtgtcaggggaaacaacattcgctattatattcttccggacagtttgaatctcgagactttgctggttgaagacactccaagaatcaaacccaaaaagccaactgcaggtaacaaaacatttctttttctgaactatgcctttgtttttgtttttgtttttgtttttgcttagactcatctttctattgttctctttggtatcaggtaagattccagcaggtcggggacgtggtcgtggaagaggtcgtggacgtggccgtggtggtcgttaa

SEQ ID NO: 163922 - DNA, 2853 bp, Arabidopsis thaliana landsberg
atgccatcaaggagatttgatgagcttgagcacaggccagagcttagtgagcagagagtctcacacgtccctgctaagcattcgtcattcgagtctcgggagcacaagagaagaaggaaggctacactcgttcgctctagcagcagatcatgcctaattcactcgaggagatcactcgaccgcggtgctggccgcagcagaagaagagaggagctgatgaggtcgatgaaattcaccggataaactcagtgccctagttgctagttatctgttgcgtagtcaatgaaattgaagtaaaactgaaccatgcctagattgctctactcgaccacactatcatgatatgataccattccctatcaatttgaacctgaatttgacctttaattatcatgtctgcatcaaatttgaactcatggataccttaaaatgcttggattttcttattcattttgatcactcttgttaatccaagtagctgactctccttattagagcagttaacccaaacccaaacctagacattctttcaagccctatatcactcgtgcgtgtttgtgaggtcttataccaattaagcttggtagaaagtgttaggttcgtaacgacagagatagtgtctcatgtagttctagttcgcattttttcggactagataggactagatgggcgcttatactttgggttgggatgtgtttaaaaaaaaaaaaagggggtgattcattgattggaaaaagtaaaagactctaggtgaagtaagctaaagaagcagaaaaattctagtaaaggttttgggatttgtaaagaaaagaaagagttattgttagctattggagacgggcaaaagccctcggttttaaaatgttaaaaacaggaaccttagttgttaaagaaatccaaatccgctagatgtatcagagtattgagaaagcttctcctagagttaatagaaaagaaaagaatgatataaaaaagagtttgaaagattcatgagtgcaaagggtagagttaagttgggactggagttgagattaccattagagcttcattgttatactctggatgggatcttatctctgtatgcataacttgggacttaactttagcattctattaaagctcaatcattcttgagagatcccctgttacttaagcctattctgttagggaccatctttgtttcttaaccttcaccttagccaaatgagttcattgatgatgcattgcttgattcacgttccagaactaatgaatgttaaagggattggtagatttgaaagcatgtgtaggtcgagtataagagacagattgattgataacaaggcatggctaacgtttttgagtaaaattcaatcatatcgcatcttagaactaccaactgggacattgattttatactttgcatgattaggatagctttgcatacatattgcatttttgagttgttttcaggtgatttggagctgtttgcgagcaaattggaagaaacgagctagaaccagaaaacatactcgaccaccaggtcgtgtgcatccagcaccatactcgaccaccaagtcgagtgactttggagccattcttcccatctactcgaccccctggtcgagtaacctcagctcaggctactcgatgacgccactcgacccctggtcgagtatcacttcgccacaccacctgaccacactcggccattcactctaccaagttactcgccccctggtcgagtatcatcactcaccaccatcaccatcactcgaccggacactcgatcatgtcttcacagtctactcaaatccgcactcaaccagacaagctgggcacaaggaagagaagaggagaagacaaagtgtttggaagcggcctggacctccatcggatcacgaagcccatctcggcccattatcactctatgggccgggcgattaggttattggcccgtctactatcattttatttcgttttgtataaatagatgtcttagggttctgtcttgagacatctagtcgacattgagtttttgcttcagttttattttccgttttactctggctgcgccgcttttgcttctgcaacctgtaattcgagatttttccaagttattcagatcccgcatttgatttcatctgtcatcttgtttctctactctttatctctttacttatgcaatattatcatttacctgcgtttatgtctttgagcaagttgtctgagtagtgacttagaattcttaaggatgggatagagtaattgtggaatccgtagtctgtagaatggttaagttttagaattaattgaatcccttcaggactagatgtgtttacttcttatttctttctgatcaactggaattcgatcccaagaaatcccgcacccagaaggtgttcgatggaatgcttgatccactagttcctaagatatgcgtctcaatcccaagtggattggccgtttagagcatttattgactctatcagtctgttcttattgcctgcatagttagattatgttaatgggaattagtctgggctagctttgcttgaggatttctatcacgggagtgaattgatctgttgttgaacctgttgtctagggatagcttgattgcgcttgttaaccattcgaataggctaggataccactctattcgattaccccatccttaggaatttctcgtctatctgatttctctgctttatcgctatcgcttaatcattctcattgcctgtttcttagttttttgcaattactcgaccaacttactcgaccacatccagtgtctggcaatagactgagcagtcgagtatagttgtcttgtttcctgtcggttactcgaccagtatactcgaccacacccag

SEQ ID NO: 163923 - DNA, 976 bp, Arabidopsis thaliana landsberg
atggagggagttggaggtgacgctgcttcaatggcatcatcacctgtacaacaacgagcgaatgaggcgtggaggctgtatcagtattacttagacaagactaagcctcacgcggttaagaggtggatcgggactcttgtgattgtagtgatatactgtttgagggttttctatgttcaagggttctttatcgtttcttttgccttggggctttatgttctaaactagttgactgggtttttatcaccacttgttgatcctgagcttgatacgtcagatggtccaatgttacccacaaaaggttcagatgagttcaaaccattcatccgttggcttccagagtttaagttctggtaattttacagtacaagctctctttatgtgctaatatctgctaagctctaaagcctggttaaaaaaatgttatgccatggacaaatcaagccatatgtgagatatctaaagagtgattttgagtgagacaagaattaagtagtgcctataagcttagggacagtgatgttatatctgtttttcgtgaatgaagacaagtgaaatacgtttagaagtgacgtcatcttgtttggtaattcttttgtgttagagtgtgagctataggttaatttatatgttggcaggtactttatgactaaggcgttctgcatagcgtttgtgatgacattctttttttttctttgacatccctctctttcggccggtactactcttcagtctcttctattggattgctctgtttgtgctgacaatgacgcgtcaaatagaacacatgattaagtacaaatacatccccttcaatctaggaaagcaagtaagttgtgcatgctaatgaactagtccaaacgtttagaaatcacaaaatgggtttgatgttgatatattgcgtattactcatttcccataacagaaatatggagggaagaaagcttctggcagcagcagctctcgcgaagactga

SEQ ID NO: 163924 - DNA, 933 bp, Arabidopsis thaliana landsberg
ctcttcttagaaatgtctgattttgtgtgtttcttcgcgatctttgtcttcttctctgttttctcgagaaaatcaaacggaaaagctatgagctttgtttcaattttcaggtttttgtcggcgaaatgtctcagagacttcatggttgcaaaacatgcgggagaaagtttggaactttaaaaggtgtgtatggtcaccagaggatgcattctggtaatcacaatagaatcgaagatgagaatggtttggaaaggatttggggtcttaagaagaagtctagggtttgctctgtttcagcttttgatcgattcaaaggatcttcttttatgactgagattgagaaacatgaggtgattgaagctgcattgaacttggttatgttgtgtcaaggagtttatgactttgcttctatcagtaatttgcctctaggtgatggtttcatggatttagagcttaaaccttgtcctttgagaaggaaactacagaaaaaatctcgctccagttataaatgcagtatatgtgagaagagttttgtgtgttctcaagctcttggtagtcaccagagacttcacagatggaaactagtgcctaaacctgagtacattgaagatgatagttcactgttagactcatcagaagctaagaagattgtttcaaaaccatcaagctttgaacatgctcaggaggagaagatcttacaatgtgttgagccgaaactagagttccacgaacagcttgctcactcgggtttcgacaagtttgatacttgcagtaaaatcaggttcagtgcattaccttctcctccagaagctaagaagattgtttcacaaccaccaagctttgaagtctctgtggatgaaaagatcttatatcgtgctgagccaaaactaaacttcagcgaaccgcttgctcactcgtgtttcgacaattcta

SEQ ID NO: 163925 - DNA, 489 bp, Arabidopsis thaliana landsberg
ccaccaccgtctgatgaatcggaaactgaatctccagggagaaaagatccggtagatctaaaacgagtgtttcagatgttcgacaagaacggagatggacgcatcacaaaggaagagctgaacgattctctagagaatctaggaatctttatgcctgacaaagatctgatccagatgatccagaagatggatgcaaatggagatgggtgtgtagacataaacgagtttgagtctctttatggttcgattgtggaggaaaaggaggaaggggacatgagagacgcgttcaatgtgtatgatcaagacggtgatggatttatcactgttgaggagttgaattctgtgatgacttccttggggctcaagcaaggtaaaaccctagaatgttgtaaagagatgattatgcaagtggatgaagatggagatggtagagtcaattacaaggaattccttcagatgatgaaaagtggtgactgtagcaatagataa

SEQ ID NO: 163926 - DNA, 428 bp, Arabidopsis thaliana landsberg
ggtatccccgagccggacgcctggtcgcacatcgccggctatgcaccttacaacgatggatccgtgcgcttctgtttgtacacaccacccagtggacggccggcaagaactttagcggatcgggtgcgttcggtccctggatggccacgcggggcgaggtgccggatggtgcgcgcctggacctggtgacccgcctgaacggccgtgaactgcagcgcggccataccgaccagctgatcttcccgatcccgcggctgatcgcgtacatctcgacgttcacgccgctcgcgcccggggacgtgatcgtgaccggcacgccctcgggcgtgggctttaagcggacgccgcccgtgttcatgcgacccggcgatacggtggaagtggaggtgagcggtgtcggtcgcctggtgaacccggtcgccgcggaa

SEQ ID NO: 163927 - DNA, 334 bp, Arabidopsis thaliana landsberg
attgagatggacaaaagagatggtttgattagtcctcaaccaatgtcagtgccaccagctcagcaaatgtctcgcattgatcaaccggtccctccctatgccggttaccctccagccactggttatccccagcattactatccacagcctggccatggttaccctcctgctccaggctatccacctcccggtcacggttaccctcctgcaccgggctatccgccagctccgggctatccatcgggatatccaccagcaccaggatatccttcaaagtaataagaacgttaaccaaaatctcaatcttcgaatcaaagttgtaatatcatccttg

SEQ ID NO: 163928 - DNA, 1409 bp, Arabidopsis thaliana landsberg
aaaaccatggattcaagaaatatgaacgaggcgaagcaggagccaaaaacgatggtgtggtgggacatcaacagctgtccggttcccgatggttatgatgctagaatggtcgctcactctatagaatcggagttgaagaaggcaggctacccggtcctctcacaatcactgccattggctaccttaactacaccttaaaacgaacccctggtgttcttaagctatctcttccacttgaatccttcttaaaaacgtcctcaacggtgaatattcttctctgtttctatattttctggtttagattcaattggctgtgtgtattgagttgctttccttgaatgaaacagatttcagatacgttttggagagatttgtcatcatgggcattttctaatcgaactccggctactttaatatttatttccggagctgatgcatactcagtttctatatccactaaattttccttgctacgacgtttgggacacaccattcatctggcatatcctcaacacgcgtccttcccttttcattctggagagttgctctgggaaagcttattgaaaggtgtttgtcctccctctgtgtatgttgaaactcatttgtgtctgaactagttagttttgaccacagatgggatgaattcaggggagcttgtggagaagtgctgtgaaatggatgaatctgcctggctttgctcaatatgcagaaattcttgtctaaccaagaagcagaatttcccagttactaagtattcagagtttctcaccctcaaaggagacagaagcttccaaggcaaaagctatgaagatttcaccacacatctcaagagtacagatcatgcactctgtgtaagcatcccaacccaattattaatccctctatttggttattaattttggttttcctagtaaatcattttgacatttggcaggaactgaacacggcccctaggcctataacccataagttggctaatcttacggaatggtactactatcagaatcatgatactaccatggtgaagaagcaatcaaaggcaagttttaatatctccaaggttatttttagaattttggtgaaactggaattcaattttcttcatgaaagtgtcaacttcaacataaaaagaatctgatttctcggaaacggtagactagagtaaactacactccaaatgtgcaatagaaatgataattttgattgatttactgacctcgattgttgctaaaacattgaagaagaggagctgtgcaatagaaatgatgattttgattgatttactgacttcgattgatgctaaaacattgaagaagaggagctttgaagaagtagaagaaaaggaacaagtagaggaagaagtagaagaaaaagaagaagatgaagaagaagaagaaaaccagtactga

SEQ ID NO: 163929 - DNA, 2023 bp, Arabidopsis thaliana landsberg
  unsure (1)..(2023): unsure at all n locations
attagagagatgtatgtaataattaaaggcacatattctatcaggttcagagtcaagttttagggtaggttttgtcaccttcctaggaacctaagaccttttgttttgtagcacttttgagaacttttaatagatgacttaaatgtgtcctgactcctgaggcttcctatttggcgttgttctgctatgatctttgttttcagaggagaaagggaagtttgatgaggtggtcgaggagaaaggtgtaaannnnnnnnnnnnnnnnnnnncggtgatgcatgtgattgggacagagatggatttcgtggacgataagcttaggtttgtgccctttcacgtgccaatcttgacactctctttattcatggtaaacatgtttgcattgtattggcacaggtctgagtttgtgttcgtcaatccaaacgcgacaaagtgtggatgtggtgagtcattcacgacaacatgaaaggcaaaattacacatataacataataagacatatataactctattactctaccacagtagtcgatgaaatttgctttgtaaatacaactatcttaaggctgtcttccgtgtaggttcgcaatttgcgacgtttgagatgatttaatgtaatgtgaataagtgtgtgtggaaatgggtttcgtttctacgtattactctggatttcttacgacttcaacaaaccaatgaaattttgacatcaaaaataactccgacataaaaattggccaagtcggaaacattttacgataaataaaaaccccacactgaagcctggtaaaaaaaagtgggtagaaatgtgagtgtggttgattactctagcccggttaaagtcagccactttaaaacacaaacatcttcctctacaagattctcacactctctctctcactcacacaaaagaagaagaagaaaagattctggcaaaaagattcatcctccattcctcctcctctgacgatatcaccgatcaacagctcggagattccacttccgacggctgctacgtcatcaagaaggttgagagaactgtgtgcaagaagaaacagggctggcgtggtaaatccatcaagacatgccaaacatccattgagatccatatccattgtcaagccaagtaagcatttctgttctctcggaattgagagttttctagggtttagagtttacttgattcgtacgggttattagtgattttagagtgtttgattttgtaagttacatgattacagagtcttccaaaccaacacggttgacactgatcaagacgatctcagtgctcttccgaaacggttctaattaattcttcgacttaatcttaagaaaatttaccctactttcaatcactaactaacttgtttctcttgttcttgattgttgttgttgcagctagaagaggaagtggagaaggtatatgactcgagaagagtgtgttccacagagaatgcaatagacaaatcaacatgaagaagacaacactctctctctctcacgtttactttgttccttgctctttctctccttgtattactgaatgttaagcagtactctaatgtaatttgcatcttgatctatctaggttactaggtttaactatctgacttgtgtcccgagtatcttttgtcttgcgcattgtgtcattccaaattaagactcttcatggtagtgcacagaaacagagtgtacctaaatctacaagtgagcataacactcgttatattttccaaagattgatgatgttgaaacacagaatcactttctttgttcacagggaacactagtaaagcagatcagatggtgttcctcctaccaacacagaaaacatcaaagtataaagattctataacctcattcctcaaagacaaaacaacaacgtagaaaatcatcagtttttccctcgttctgtctccgacttcttctccatcttcctattgtttgtttagagtggacaactcgggttcctcatcaatgtccgcaatctcccgttcgatttcggcaatttcggttgtgcccttga

SEQ ID NO: 163930 - DNA, 429 bp, Arabidopsis thaliana landsberg
  unsure (1)..(429): unsure at all n locations
atgtttataggcgagtactctctcacgatagatgataagaaaagaatatctcgacctggcaagttcaaaaaggaactcggcaccaaagtcgtcgtcactcgcggtctcgataattgtcttttcctttttccctacaagacgtgggaggctatttctaaagagactgccaagctcggcatgatgcaatccgatacaagaggattcaccagattcatgttcagcggagcttcagaaatagatatcgattcgactggcaggatacttatcccggattatttgaaagaattcggcgatcttaagaattctgtggtctttaccggcgtccatgatcgaattgagatctggaannnnnnnnnnnnnnnnnnnnacaccaagcgaattgaatccgaagtggacatgatggccgagaagctcggaagcgtcggaatc

SEQ ID NO: 163931 - DNA, 4342 bp, Arabidopsis thaliana landsberg
ggtatcagatactctcatgtcatcaaatgtcgcctagatagagcaattgccaattctgtttggactgatctgtttccctctggacgcttggagtatctaagatttaagggatcggaccatcgccctattgtgacctactttgcaaagaagaaaaagaaaacacgtggggtttttcgttatgatagaagactgaagaacaatgctcaagtcactcagctcataaaggagtgttggaacagagagccttccttctcagtcagtcagagaatagcaatctgcaggaaagagattgtggcatggagcagggaaaaacaaaggaatagccagaaacttattgagcaaaagaagatggagatagaaaaggcaatggtaagtttctgaaaataattttttatttgctagccaagatcaatctagatgggaccaaatcttataagctgggggaaggttactggaagcaaaggagtagaatcatgtggctatgtttgggagatcggaactcgggtttctttcacgctgtcactaaaaagaggagagcacgaaatcgcctttcagttatagaagatgaatctgggaaccctgtctttgtagaccacaagattactgaagttatttctgcctacttccataagatgtttcactcatacgattaggatgagtcttatacacgagcaactgtgacagaagatctgtctccctgggtatcggaggagaccaatttggcattgattgcagatccatccctaaaggaaattcatgatgctctaatgggaattcatgcggataaggcgcctggacctgacgacttcatccacgctaagctcttgtccaatctcactgggattctatcgggcatgctatcatctctaaggaccaaggcttttatcgaaggggaaccatgcctgcttcaatcaatgagactgtcatcagtctgattccaaagatcactggagccaagaaagtctcttaatatagacctattgctctctataatgcctattataagattgtgtctaaaatcttaactcaaagacttcagccgctccttccaagcctagtgtctgagaaccaatatgcttttatcaagaatagagcaatctctgataatgtcttgataacccatgaagtgccaccaagtattgcttgatggcgggaaagatagatatttctaaagcctatgacaggcgaatggaatttcatcaaagaggtccttcagtggtttggttttcacagcatttggatcaattggattatgcagtccgtcacaactgtctcctattcctttctcatcaatggttcacctcggggaaaggttgttccatcaaggggaataagacagggagatccgctctcctcatatatgtttatcctttgtggagaggtgctatcaggtttgtgccactcggcttagaagaaggggctcctacggggactaaatgttgctagaggcagtccttgcgtgaatcatttgctgtttgcagatgatacaatgttgttctgcaaaacaagtgacaaagcttgccaggagctgatgagaatcctgaaacgctatgaagaggcttcaggtcagatgatcaatggggataaatcttctatcttcttctcaaggaaaaccccagtttctaagcgggatagagttaaggagctgctgcttatctctaaagagggtggagtggggaaataccttggtttaccgaagctctttggcagaagttaaaatgatattttctcttccattgttgatagaatcagacataacgctttgtgttggtccaacagatttctccctggggcaggaaaaatggtaatgctaaaatgagttcttgcctacatgcccacatatgctatgccttgtttcagtttacccatctccctatgcaaaagaatccaaactgcgttaaccaggttttgctgggatagtattcctcagaaaagaaagatgacttggattgcttgggagaagctcacaagacctaagcagaaaagagggttgggttttagagatctacagcagttcaatgtggctttgttcgcaaaaaatcagctggaggttattaaaaaaccctagtagtctcttggcaagggtcctgttggggaagtattgtcctaatactgacttgctaaaagttaaagtttccaagacggcttctcatggctggagaagtatcctgagtggcagagatttgcttgttaaaaacattggctggtcaacaggtgatggtggatccactctaatatgggatgattcgtggatcctttctccggattttatccaacccacgggtcccgctcctctcctttcaaaaggatggagagttaaagatttgttttttcctaatttgattgactggaatgaagcacttgtgaaggatctgttccctgctttgtcagagaatatcttttctattacacctagccggttgtctgcaccatataagaggatctggattcatacccaaaatggtgagtatacggtcaagtcgggttacttcattgctagagaatgtcagtctccctctagtgttggccccctgtttaactggaagaaagaaatctggaacatttgcacttcctagaagattaaagtttttatgtggaaagctctccaaggcggccctctctactggatgtcagcttgctagcggaggcattgaggttgatccggcctataagaagtgtaaggaacctgaaaccattgaccacttgttgttcaattgcagttttgcaaagcaagtctggcttttggctcctttcgccaagggtttgtttctagctagttcagcggatttggaaagtcttgtctctcaagggaacaagctcatctgcctccctcggtgggcctagccagaagtcccctattcccctggctctgctggaacctttggattgctaggaatcaagaagtcttcaatcaaaggtgtttctctgctgaagaggcggtacaaaaagcgatcaaggcaaagagcccaatctgttactcttcccccacctggttcaatcttctcggggcaaagagcagttaatcgtaccccgcgccacagggattgtgacttttttataatctacagaacggacgcagcttggagacccggtgctcctgttgcaggtttgagctggatttttggggactgagttttagatattcccagaagtcactctttggtatgctctcatgtggcctcgcccctcatggctgaagccatagctgttcgtgcagctctctcaaatgctaggatgctcaagctcccacgcctagctttggagtcggattgtagtaccttggtcacaacgatcaatactaaatccaccctcccggaaattcatggcgtgttagctgatatccttctcagctctctatcttttaatctctttgtctgtaatcttattcttttagctgcaaattcggaagcagatgctctagcaaattcggaagcagctgcaagtttcttgatcaaaaaaaaaaaaacatattgtcttatctcattaataaaaataaattaaaatgaataatacattttgtataatattttactcaacagttctaaaccatgaaccggtttgtatgaaggaatatctattgaaatatccacattgacatatccatgtgtagaaatatttatatttaattcaatgaatttgaaatcacagtggaaaattagccagcaatacgaaggtaggttaaagatattggattagtgaagtctatatataggatataaactgtaacataacctaatattgcctttaaaaatttcttttttaaaatggaagactctaaagaaagcctaactatgtgagctgtagtagaaagttatgaagaaagcgagagttcaaatgtcatagatgtattttaaaatttttattaggaataaagctaatgatagaatgatatgttttaaaaaatctgtttttattttgtaggtgattccgatgagggaattttacattcctcagccattgatggagatcattgtaagtaaggttggtgaagatggtgttgatgctttaaagaactagttgctcgctaggagagaggggaaggatactgttccgtcaaagaaaacattagcatccgtacgaattgacaaagaccatcatttcatgtggtggtcaatgactcattcaaagtattacacattcttcaaaaagtgtcttgccgcaaataatccgtatgcgaagtttgtagagaatcacaaaggactggcttatgagttgactatagggtacttccagatgagattccgttggaaggtgtgccatggtaaacgcattggtggtttactcaacttgaatgacatgaaagtatgcgtagtacagccaccttatcagccgaaaagagttg

SEQ ID NO: 163932 - DNA, 776 bp, Arabidopsis thaliana landsberg
atggagaaagaaggaaccctggaaagagactatggccgaaaccccaccggaaaaccctcaccgggcgacttccattctgatgacacatacaacctttactttaagggtttggtaagggagaaaacatcagctcaattatcggcgggatttgaggttgcaattttcagagaagaggatgaatatctcttgtttcagatgaaaggatcacttcatgactccacagttacagttttggaggctgagcttatggcattgaagcgaggattaaccgaagccgtgagtttggggatcactcatatctcaatctgctgtgatcgttttcagatttttgaactggtaaatttttcttgaaacatttacacatttgagcatttgtttaggttttgattagttttgccaaaattgttttttaaataaatttaacatttcaaccaaaacaaaaatttacgatgacgagcaaaatctcctaattgagtaggttttgtccttgatcatgtttttaggttatggggagatcattgcctgataaagataacattgcaatgataatgtatgatgtgcaacgcataagacaacaattgacatcaagcacacctcttctggtgactggaaatcaaactaataagttagctaatgaacttgcactagaaacactagtttctaaaatgagcataagtatcgaagagaaagctctaatcgttcatgccatgtgtgaaaagtgccaacatgtgacaaaaattaaacgtggaaagtacggagtaagccgaagctcgtaa

SEQ ID NO: 163933 - DNA, 7320 bp, Arabidopsis thaliana landsberg
atgttgggaccaactcaagagatacacattagtgatgatgaggatgtcggtgtctatatattttcaggtgaaatggttagtagatatcctttgactgttgacgtcatcactccaccagaattgcccgagaaactgtcgagagtggaggtcatcaataaaagttctcttggtaagaactatgctgatttgggttcaaatgaggatgaaatgagagataatgcaaccattgtgatgggtgatatgtctataatttgcatgttttcagtgtccattcatcatcgttttgagtccagtttcgtatcattcatcattgttttatatctttctcatcattcttgcatactttgcatgattaggatagctttgcatacatatttcatttctgagttgttttcaggttatttggagctgtttgcaagcaaattggaagaaacgagctagaaccagaagatatactcgacccccaggtcgagtgcatccaacaccatactcgactaccaggtcaagtaacattgaggccattcttctcacatactcgaccccctggtcgagtatcctcatcgcaggccactcgatgacgccactcgaccccctggtcgagtatcacttcgccacaccacctcacaacactcgaccattcactctaccacgttactcgaccccctggtcaagtatcatcactcaccaccaacaccatcactcgaccaagcactcgatcacatcttcatagtctactcaaatccgcactcaaccagacaagctaagcacaaggaagagaagaggagaagacgaagtgtttggaagcggcctggagctccaccggatcacaaagcccatctcggcccattatcactctatgggccgggcgattaggtaactggcccgtctactatcattatatttcgttttttataaataggtgtctgagggttttgtcctgggcatctagtcgacattgagtttttgcttcagttttattttctgttttactcttgttgcgccgctttgctctacaacttgtaattcgagatttttccaagttattcagattccgcatttgatttcgtctatcatcttgtttctctactctttatctttttacttatgcaatatacttgtttatctacgattatgtctttgagtatgttgtctgagtagtgacttagaattcttaaggatgggatagaatggttgtggaatccatagtctgtagaatggttaagttttagaattgattgaatcccttctggactagttgtgtttactgcttgtttctgtcggatcaactggaattcgatccaaagcattcccgcacctagaaggtgttcgatgaaatgcttggtagaagatgtttgatggagtgcttgatccactagttcctgagatactcgtctctatcccaagggattggccatttagagcggtagttgactttatcagtcggttcttattgcctacatagttagattccgttaatgagaattagtctgggctagctttgcttaaggatttctatcacgggagtgaattaatctgttgttgaacctgttgtcaagggatagcttgattgcgcttgttaaccatccgaataggctaggataccactcttttcgattaccccatccttaggaattgcttgggatctgatttctctattttatcgttgtcacttaatcgttctcattgcctgtttcttagtttttgcaattactcgaccaacttactcgaccacacccagtatctggcaacagactgtgcagtcgttttcagttgtcttattcctgtctgttactcgacctgtatactcgaccacacccagtgtctggcaacagactgtgcagtcgagtacggttgtctcatttcctgtttgttacacgaccacatcttacttctggcatcagcctgttgtggtcgagtgattttagtaattctgttttctgttttctgcatgttcgcttaggactgttagaaaccccaaaactgttattgcttagcttgacttagtgacttctgatcacatcttatctcacccatttggattgacacctaaaatactacaacgacatgattggtgttttaggataattgactaaaaacctattatcagaaacactaacaaatctatttagtgcttcttagcaatgttttgttggttttagcctcttttgggagaaaataggtataaatgttgtctaaacacccctaatccatctgtaactcatataattagtcaaatgcattgtattgtgataaattttgaccattggttttagcctcttctagaggaaaatgggtataagtgttgtctaaacactcttaatccatctctaactcatataattagtgaaatgcatcagattgtgacacattttgaccataaaaacactaacaaagctatttacagcttctaaacaattttctgttggttttagtctcttctaggagaaaatgggtataagtgttgtctaaacgctcctaatctctaactcatagaattagtcaaatgctttggattttaacaaaatttgaccataggtatgagtgttgtctaaacgctcctatttagtgtttctcacccattttttgttggttttagcttcttttgagagaaaatgggtataagtgttgtctaaacactcctaatccatctctaactcttataatttgcaaatgcattggattgtaacacattttgaccatagaaacactaaaaaaactatttactgcttttaagcaatgttttgtttattttagtttcttttagaagaaaatgggtataagtgttgtcaaaacacccctattctatctctaactcatagaatcagtcaaatgcatggtagtgtgacacattttgaccatagaaactgatatgtctataatttccatgttttctgcattattcatcatcattttgggtctactttcatagcattcatcattgtttcatatcatttctcattattcttgcatactttgaatgattaggatagctttgcatacatattgcatttctgagttgttttcaggtgatttggagatgtttgcgagcaaattggaagaaacgagccagaaccagatgacatactcgaccaccaggtcgtgtgcatccagcaccatactcgacccccaggtcgagtgactttggagccattcttcccacatactcgacccccaggtcgagtgactttggagccattcttcccacatactcgacccccaggtcgagtgactttggagccattcttcccgtccactcgaccaccaggtcgagtaacctcagctcaggtcgagtatcacttcgccacaccacttgaccgcactcgaccattcactctaccacgttactcgaccccctggtcgagtatcatcactcaccaccatcaccatcactcgaccggacactcgatcacatcttcacagtctactcaaatccgcactcaaccagacaagctgagcacaaggtagaaaagaggagaagacaaagtgtttggaagcggcctggacctccatcggatcacgaagcccatctcggcccattatcactctatgggccgggcgattaggttattggcccgtctactatcattttatttcgtttggtataaatagatgttttagggttctgtcctgagacatccagtcgacattgagtttttacttcagttttatttttctgttttaccctactgcgccgcttttgtttctgcaacctgtaattcgagatttttccaagttattcagaatccgcatttgatttcatctgtcatcttgtttctctactccttatctctttacttatgcaatattatcgtttatctgcgtttatgtcttttagcatgttgtgtgagtagtgacttacaattcttagggatgggatagagtagttgtggaatccgtagtctgtagaatggttaagatttagaattgattgaatccccttaggactagttgcgtttactgcttatttctttctgatcaactggaattcgatcccaagcattcccgcacccagaaggtgatcgatggaatgcttgatccactagttcctgagatatgcgtctctatcccaagggattggccgtttagagcgtttattgactttattagtctgttcttattgcctgcatagttagattccgttaatgggaattagtctgggctagctttgcttgaggatttctatcacgggagtgaattgatctgttgttgaacctgttgtctaaggatagcttgattgtgcttgttaaccattcgaataggctaggataccactctattcgattaccccatccttaggaatttttcgtctatctgatttctctgttttatcgttatcgcttaatcgttctcattgcccgtttcttagtttttgcaattactcgactaacttactcgaccacacccagtgtctggcaacagactgtgcagtggagtacagttgtctcgtttcctgtctgttactcgaccagcatactcgaccacatccagtgtctggcaacaggctgtgcagtcgagtatagttgtttcatttcctgtgtgttactcgacctgttactcgaccacatcctacttctggcatcagcatgttgtggtcgagtgattttaggggttctggtattgtttctgttttctgcatgttcgctaagaactgttagaaaccccaaaattgttattgcttggtgggaaaagtcgtttcctcaaggctctatcaccttcttggctaagtttttctcaaactccaggactgcgagactaaggaatgatatttccggtttcacacagacaaataatgagactttctgcgaagcatgggagcgcttcaaaggttaccagacacaatgtcctcatcatggtttctccaaagcttcacttctcagcaccctctacagaggtgtccttcccaagatcaagatgcttcttgataccgcttctaacgggaacttcctcaacaaagatgttgaagaaggatggaggctggtagagaacttggcttcatcggatggcaactacaatgaagagtacgatagaagcatctgcaccaactctgattctgatgagaagcaccgcagggatatgaaagctttgaatgacaagctggacaagttactccttgtgcaacagaagcacgttcattttctgggtgatgatgagacgttccaagttcaggatggggagactctgcagtctgaagaagtcagctatgtgcaaaaccaaggatgttacaacaaaggtttcaacaactacaagcagaatcatcccaatctgtcttacagaagtaccaatgttgcaaacccacaagatcaggtctactcttcaaagctgtagaatcaacccaagccctttgttccatacaaccaaggtcaggggtatgttcctaagcagcagtatcagggcaccaaccagcagcaacttccaccacctgggttcacacagcagcaaaaccaacaaccttcaccaactccggattcagacatgaagaccatgctgcagcagataattcaaggccaagccataggagcaatggaaatcgttaagaagtttggtgaattacacaacaaagttgaccgacacttcgtcgaacttaacagcaagtacgaatccttgagcaccaggatacgatatcttgaaggcatccccacttcaccatctgttaccaacaacctaggccagcttctagggaaagcagttcagaaccctaaaaaatatgccaccgctcacgccatcactatctgccatgatcgagagctgccaactcgacatgcctctacctctatcactagggacagtgaagttcaacaaggggaggttttcgttcataatgaagttccagctgaaatagcaatagaggagctcatactcgattgcagtaatcgatctcaagctcaagtagtacctccttctcttaaaaagcatgccgctactaaaaccaaggataaagtctttgttcctccaccctacaagcctccactaccatttccagggagattcaaaaagcaactgataaagaagtatgaagctctcttggaaaaacaattgaaggaccttgaaatcacaatgcctctagtagactgtcttgcgctaataccggactcacacaagtatgtaaaggatatgatcacagagaggatcaaagaagttcaacgaacggtggcatcaattcaagagtgcagtgaaatcacccagaagatgattgttcaagaaaagttggaagatccgggatctttctctctaccatgctctattagacaattaactttcagcaattgtctatgtgatttagggacctcagtcagcttaatgccactcaccatcgcaaggaagctgggattcgtccaatataagccatgcgacctatccttgatccttgctgataggaccttaagaaaaccctatggcatgctcgaagatctgcctatcaagattaatggagtagaagtgcctacagactttattgtgctcgagatggatgaaaaacttaaagatcctctgatcttgggaagacccttcttggccacagttggagcagtcatcgatgttaagcagggaaagatagatcttaatttgggaaaggatcttaaaatgaagtttgacatcagagatgatatgaagaaaccaacaatagacggccataccttcttagttgatgaaaagggtcagctagctaaggaactattagaagagcctgcttctaaagatcaggttgaaactgctttgactaggattggtgaagctagacatctccctagtgagactttgagctatgataagtcattagactcacacaaggcagtagtaggaaaagaattctttggatcgaaaacagaggttagggcatcaaacaaggaaatctcaactcatactcgaccactatgctcgaccgtcaactcgagtaacctttcaacttgtccagagaagtcatgttccaccaaacagctccagtcacgcattttgcaatcaaatgataggttagtactcaaggagaagtctatatggcaggacaaagctataagagagttaacacacacggtgagagagctgaagaatcaaatcaaagagcttcatggaaaagcctacaaagcgcctctcgacatcaaggatgtcccaaatgatgaagtaattgctttggttagcaaagaagaatgtgaattcacattcaaacggtttagagaagacgactatcgagatgatcaaaaggaaacttacaagaaaagggacattgagtactcaactacagatttgtttagagagcatgttgagtacattgctgtatccattgaggaagaagaggagatttcaattcctctatatcaccctccttaa

SEQ ID NO: 163934 - DNA, 807 bp, Arabidopsis thaliana landsberg
aagacctcagcactccacgtcaccactcgaccacgtggtcgagtaccaccaggacaaccactcgatcacatcactcgaccccctggtcgagtatcatcatgcccaccacatcaccttcactcaatcactctaccaacaggtcgagtatcactatcatcatcactcgaccaatcactctaccaacatggtcgagtatcaccatcatcattcactcgaccaatcactctaccaacatggtcgagtatcatcatcatcactcactcaaccaatcactctaccaacaggtcgagtatcatcatcatcactcaatcgaccaatcactctaccaacaggtcgagtatcaccatcatcattcactcgaccaatcactctaccaacatggccgagttccaccattatcattcactcgacaaatcactctaccaacatggccgagtatcaccatcatcattcactcgaccaatcactctaccaccaagtcgagtactaccaccaccatccactcgaccaatcactctaccacacggtcgagtcccttatcatcattcactcgacgtccttactcgactgccagcttcagagtcttctccattccgcactcaaccagacactcaagcacaaggaagaaaagaagactttagcttatcactcgaccaatcactcgaccacctgggtcgagtgccgttcttaatccgtcccaatattgtgtcgttttgagtattagggtttcggaatatttcgctataagtagcatgcatttttcattttcgtttactaagttttaattccgcagacactgtgttcttg

SEQ ID NO: 163935 - DNA, 972 bp, Arabidopsis thaliana landsberg
ctgtctcatgtgggtagattggttccaagtgacttgtttcgatttgttgccttctccatgatcgaaaataagactattaattctttaattgtccatggtaactttcttatttagattttttaaaaatattaagtctgtttatttggaaatatatatctttcatgttatcgttttttattgtagatgcttatggtgttgtcgtgagagttgggaatataagaagaccggattttgttcctcaagcttcagaaaatcctatactttctcaatttctcgagtttgagattaaaaatacttggttagtattttccactatatatttaaatatatagcatatattttccaaaatacttggttagtattttctcgagttcgacatctatttggttatatatttaaatgcacaaacatagtaaatcatgttatctttatagttggcttaattcatagaacttagatgtttttttgaaataattttgatattgttattaagggaaaatctctgatatgtgttgcaagaggatatacttgtgacttgtttgtgcaattgtggaggaaacttggtctaaaccttggttatcagtggaccttcggtatgaatcctacaaactgtgtgcttcgattttggaatgttgatgatcatgaaggtatatttaagactcttctcatcttatcaataatttatatagctaactcatataataaaaacattaatattttaagtcgtcaatgtctaatctcacataatggtgtttcaggaattattttcaatcaaagttacccagagattaacatggatcgcatcacgtaagaacgtttatattttcattatcatttaattgtttattgtatttttaaaaatgtatttttaaaatttttagtcttggttactttttttcctactgttttagaacccaattctttgaacggatgcagccacctgagctaggtgaagttgtggacgagaactga

SEQ ID NO: 163936 - DNA, 1603 bp, Arabidopsis thaliana landsberg
  unsure (1)..(1603): unsure at all n locations
atggagatgtctgctattgtctctgctttgactcacgttgttgctggaaatgttcctcagcatcaacaaggaggcggtgaaggtagcggagaagggacttcgaattcgtcttcttcctcggggcagaaaaggagaagagaggtggaggaaggtggcgccaaagcggttaaggcagctaatactttgacggttgatcaatatttctccggtggtagctctacttctaaaggttagttttgttgggtttttattttgtcctctataaacacacgtaccctgtttcggatttaaaccacattagtacacaccattttgataaaattttacatatttcggttgtgtatccacaaaacataaaacatttaaattataagatcattctatttgataaatgttttcaataattttatgatgtagtatatacatcaaggtatgagtcacatcaaatgtttgtaacacaaaatctaaatacagttgcacttttgttgtcctcacgcaatctacaaagcaacatgtcttatatcgaaaaaccaaaacatatctacctaaaaaaaacatatctactttagttcaaatatttagtttttttattcttttcttttatcgttttctaaaatatggcgaagttagatatactttataataatttaaatataaagaaaaatgaggaataaaaaatagtaattagcgtaaagatgtaaataaatatttcgaagtgttgacaaaaataaatataataacgaaactgtacttgattatcttaagacatatactttagaattgttgtaaaaaggttggatatttaattaagaaaatgatgatgatgatgatatgccaaaagaatttatctccctccaattgcatcaagagtcgttttccgcttcctttttttttctacttgttcattccttttgtcacccatttgcctcatcactttctcatactcgctcttaaaaaaaaaactttataatatctttattggagacattaatattatcgattctttttcttatgtaagaaagtgttaattcacgagtgacaacaaaagtgtgaaattttacatgtttgtttgtttatttgcagtgagagaagcttcgagtaacatgtcaggtccgggcccaacatacgagtatacaactacggcaactgctagtagcgaaacgtcgtcgtttagtggggaccaacctcggcgaagatacagaggagttagacaaagaccatggggaaagtgggcggctgagattcgagatccatttaaagcagctagagtttggctcggtacgttcgacaatgctgaatcagcagcaagagcttacgacgaagctgcacttcggtttagaggcaacaaagccaaactcaacttccctgaaaacgtcaaactcgttagacctgcttcaaccgaagcacaacctgtgcaccaaaccgctgctcaaagaccgacccagtcaaggaactcgggttcaacgactacccttttgcccataagacctgcttnnnnnnnnnnnnnnnnnnnnnnnnnttgatgcaatcatacaacttgagttactctgaaatggctcgtcaacaacaacagtttcagcaacatcatcaacaatctttggga

SEQ ID NO: 163937 - DNA, 1362 bp, Arabidopsis thaliana landsberg
atggagaacaacaacggcaaccaccagctaccaccgaaaggtaacgagcaactgaagagtttctggtcaaaagagatggaaggtaacttggatttcaaaaatcacgagcttcctataactcgtatcaagaagattatgaagtatgatccggatgtgactatgatagctagtgaggctccaatcctcctctcgaaagcatgtgagatgtttatcatggatcttacgatgcgttcgtggctccatgctcaggaaagcaaacgagtcacgctacagaaatctaatgtcgatgccgcagtggctcaaactgttatctttgatttcttgcttgatgatgacattgaggtaaagagagagtctgttgccgccgctgctgatcctgtggccatgccacctattgacgatggagagatgcctccaggaatggtaattggaactcctgtttattgtagtcttggaatccaccaaccacaaccacaaatgcaggcatggcctggagcttggacctcggtgtctggtgaggaggaagaagcgcatgggaaaaaaggaggtgacgacggaaactaataagtggaatacgttttagggtattttcaagggaatatgtagtaaatagccatggatccaaatttttttaaagaaatagccatgagatacaatgttctgtcggaaacacatgtattattacatgtataactttagacattgaggggacaatacactatttgggagcgtgatgattctcggtttgaaatttgaaatattcagaagctaacattatactcattctctcgcaccaaaagtaatatatgagaaaataaaaatcttgttttttcttcacaccgcaaaatatcctcccaaaatcttgcgccgtcgttggcgattgcgttcaccgtcggttactctcatcttcttcaatcaagcccagaacttgattgtctccttgaaaccttcttctcgttctcgtcgccgttagcaatccaagtattaatttctgatcctcccctttccggcgaatctggtaaggtaagccattgattttcgtttatttattgccgatcttcttctattttttcctctttatacttcaattgcatagaaattaacgattgtggccagatctaaagtttggttcttttttccctctatctctatcttcttctatgtcttcccatgtatacttacataagtatcctgcatagggttctcaccgtttgtgtccagatctaagttttgatttttttttatttattctctactaaccctcaattttttcataatctctctacatgaagttagataaggcgagatctgggaatttcctcaaactctgtggattctgcttcgtccgtctagtgtttttaa

SEQ ID NO: 163938 - DNA, 1329 bp, Arabidopsis thaliana landsberg
aaaaaatgtcagtcaaccattactccacagaccaccaccacactctcttgtggcagcaacagcaacaccgccacaccaccgacacatcggagacaaccaccaccgccacatggctccacgacgacctaaaagagtcactcttcgagaagtctctcacaccaagcgacgtcgggaaactcaaccgcctcgtcataccaaaacaacacgcagagaaatacttccctctcaatgccgtcctagtctcctctgctgctgctgacacgtcatcttcggagaaagggatgcttctaagctttgaagacgagtcaggcaagtcatggaggttcagatactcttactggaacagcagtcaaagctatgtcttgactaaaggatggagcagatttgtcaaagacaaacagctcgatccaggcgacgttgttttcttccaacgacaccgttctgattctaggagactcttcattggctggcgcagacgtggacaaggctcctcatcctccgtcgcggccactaactccgccgtgaatacgagttctatgggagctctttcttatcatcaaatccacgccactagtaattactctaatcctccctctcactcagagtattcccactatggtatatatttctctttttaaccaaattattcgtctcttttctttttttacatcaaatagcttttatcttttttttgggtagacatttttattttttcctacgaatgaattgttcgtgtcctagagtgtatatcgactatctaatgttgtcgggaggattaaaacattacacccaaatatagatatcctttagctaatagtgtactataattatttctctacaagatttatgcttgcgtattaacaacctgagataagtaacattgtattatacagctattaattaatgtttgcttttctctaacctcgattgcttaatactcccagttgtagttaacatacttaatagagtagctatacacgcgcattaaagagcgcgtgaagaagaccgtccaatcccctgggacaaacgtgctttttgttcacttgtgtactattatgtttttgttttggtttctttcaattaattaatgacacgcacgtgtcggtgattacaggagccgccgtagcaacagcggctgagactcacagcacaccgtcgtcttccgtcgtcgggagctcaaggacggtgaggcttttcggtgtgaatctggagtgtcaaatggatgaaaacgacggagatgattctgttgcagttgccaccaccgttgaatctcccgacggttactacggccaaaacatgtactattattactctcatcctcataacatg

SEQ ID NO: 163939 - DNA, 393 bp, Arabidopsis thaliana landsberg
attatgggttctcttgagacatgcttacttttctttgtaatggttatgtttatgagtgcaactatgtctcgagcctcgacgagtgtagtgatttataatgatcttggaggtggtttgccactacggcaccactgcaaatcaagagaggatgatcttggataccagagtttagcaccaggtagatcgtggtcgtttggatttacaccggatatttttggccggactttgttttactgtcgttttagttggggagctgagagtcatatatttgatatctacaaacagagtagagacaaagaatttcaagagtttggttgcaaaaaatgcgaatggaaaatacggaaaaatggaccttgcaagttatataagaagaccggcatgtttgatcattgc

SEQ ID NO: 163940 - DNA, 334 bp, Arabidopsis thaliana landsberg
taatattacaaaaacttgaatgttgaaaccgaccggtacaggggtgaaatcggtggaggtgaaccggaaacagagccggataacggtgaacggacacgtggacccaaacaaggtgttgaagagagtgaagagcaccggtaaaaaggctgagttttggccttacatacctcaacatatggtctattacccttttgctcctggcatgtacgataaacgtgcacctgcaggccacatccgtaatcccactcaatcgtttccaacagcaaacgctcccgaggaaaattacgtttccctcttcagcgacgacaacgtccacgccgcttgctccatcatg

SEQ ID NO: 163941 - DNA, 3529 bp, Arabidopsis thaliana landsberg
catactgcaccaatcaaccttgatttccacatgttgctgaacaagtctacacgcctaaatttcttgtttcatgcctcaacagtatatgcaagagattcaggaggagagctacaaagctccacagaatcagggagacaaaaggaagacaattattgtctcggaacaggtttcagagctgaattgttgacaggctaagggaagacgagttgtagcacgagtgtcgatcgacacccccactaatgtcgatcgacaccaatcactggttgaagcagaatcatctacgatagctacttttcaagcttggaatcactgctataagtccaggaactacagtcacgtcacccattgcacctctcatactccatccatctcctaaacgacaaaggtactcatatcatcctcctaaacctcgtgatttcatcaataagagtttaaaatttcaaaaaacagttttacggttaagaaagccacgagtttctcaacgagcgcttgtttcttcttttgatgattgtgcaggaaaacggagtagatcacccatacctatgtcatgccctgctgatgttcaggacttccttggtagacctcacatgccaactgcctatacgccaccatggatgatgagaggttttactccgcggtatttactgccaccatctgatccacctgattcccaaactccatcaaagtcaagctattgactataaacaagcgcttagtgggaggcaacccactggtatgaattttctttttattttttcttttatttccgtttttcttttattttcttttttgcttattttggctttgaatgtcaatagggacagtgtcgtttaagtctgggggaggcgcttactaactatgtttttctttttgaatcttatttttactcttatttttctttttgagttgctttatggagtcaaaattttgtttggaattataatctctattcttgagattattgcctggttgactaatgctgcaggttaaactcaatccgactattgaaaaatccagatggcaagccaacaaacttgaggatatccttgtttccaacacaatccattaaggctggagctaatctcactactcttccttttacttcatcaaaacggttagtgttcatgaaacttgactctttgttcatacctgatagttcgaccgatgtgtaaaagaataagtgtttatagctactatgtagcgactatcaccaaaataattagtctaatttaatccgcaaaatcaagcccaaatagttttggcccaataatttcccccaattcgagaaaccctaagaagaaaacccccaaaatcacatatgatccctcttccatttctctcttcctcttttctctctatctaaccctaatctcttccccaaatcctctcgatctaaccctaatctcattattcttccccaattcttctccaaaccttctcttcaatctatcataactcactaatctctttgaatcttctcacttaatcgaacactaatctcttactcttccatttctcgatcaaatctcttcccagatctcttcccttcgtcgtatctctctctttcttctgacaattctcccctgaagaacacaatgactggtaagcgaaagagaagaaatgttcctaaagcgtctcagagaggcgttggttccaccgttgcaaacataagaccggcaaatcaatcttctaaatacaccttcataccagcagcggtagaagtttctctggacacccaagttccacgccgcgttattcttgaacctacaataggtgtagtgcatttttcgccactatcgacccccataacatcttttctagaacttagacttttagagtcaatcatcacaacgtcattcgtcagaggaagtccacaatagtcgacatctgactctagagcaaacgactccaccgcaacaacctccacaacaaacgccaacacagcaacaacctccacagcaggatcatcctccttctccacatcataactctgatgctcaaagtcacgggcttggatgttcctctcaaggtaacaacttccagaacatgatgtcgtcggatctcgaggaggatacggttgaggctctgaatgctcagcttatggtgccagaccgacatatgtataccacctttctctctctacactgttaccaaagaaaacttggtatgacatattccatctaattatgtttccttatcaatgttttaagaagtcctgtttgtactatgagtttgatgtcttaggttcatttacttgatttttaatatgagcacatgtctgagatgttatcatatatgagatatagttgattagcattgagagttagccagagtcagtttattattaggttgcttaggttctagtggttaaattaagggttcttcttatttgcatttttaatcattcaagtgttgtagacatttgtttttataacttcttgacttgtttgatttggattcactctccacttgtttacaaatatttcaaatttactcgcgactatagatcaagactggtaaggaagattacaaaacttcttacaaacaaattcgatggtccctactatagttggacatgagtgcctcatggtagagcagaaggaatatttcctggaggttgcggtatagttttctatcttatatcacttgtgttgtttcacatctatagtacttgtgttgtgtcactaactctagccatgttttctttgttttgtagtctacccacacatcggtcctcacatccacttatcaggcccgaagtcatatcaacaaatctaagatgaattggtaattaacttacagctctctctctctctcttgcaatttgaaactctgtgataatcattgtatattttataacattgtaggaggaggaattgggaagaccagtgagtgttggtgaggtcttcagtaagactcatacaaaaccaaaatggtacgtatgtcgatcgaaaggtagaaaagattgctcagacctatcaaaagaaagtgcaagaaaagttacataccctgaggcggagacttctgctgtttcagacggtacttcacaacctttagagctcacagttgatgaatgtacaaccatctttcttcaggtacacgtccaagtagctatcatctgtagttataggatcttagattgttttctgacttcaagaaatgctctaaacttattgatttcttttctgacgtgtcacagtccactaagaaggattcaagaggaactctttatggagttgggaacatgaaggggatttttctcaatggaaaacacaagcaattgagagattctttttcctctatggcaatgtaagagcagctgaaggaagctcatcataaaatcgaagagcatgctgcatataatgaacaccgtgatgctcgttacgctgagctttccaaagcggttctcgagcaagtagacatgatggagcacttgtccttggtgaagtaccaaaggcaaactgatccatcccttggtggagaagtaccaaagacttcatcgagagtcattcaacttcaactgccatag

SEQ ID NO: 163942 - DNA, 708 bp, Arabidopsis thaliana landsberg
atgagccacctctcaggagcatcgaactcgtgtggaacctccattgtccgaccaagaccaatggttcctggaattccaaagcagtgttggtgtggcgatgaaatcgttgagaggatttcaagatcaaatccatttccgtaccgtcgttattaccggtgtggttttgctgcagaaaaaaaggtatagatatatctaatttgactagtcactaaaatacctagatatacctaatagatatacctaatagatatacctagtttatacatagatatacatgtgatttaacaatttttacaatttcaaaatgtagcttatgaacgacaatcatgtgtttaagtgggtagatgagacttttacacatgagattgaacagttggaatttcaactcggtgttcttgaagaagaagtaagagtgatgaagatggaaaggaaccaagagaggatggaaagagatccgatggaaaagaacaaaaaagggaaggactttaagatggtaatcatttttagttctcgatgtttaatcaccatggcaattgttggcatgttgtgtttgtcgtagaaattcaagcctaagtgttgtaatgtttaattatgaagactaagtgttgaatttgatgtgatgaatggatatgaatctaattagaaagactaagtgttgtgttgaatctagttatttcggttaaaattcttttcttatcaattacaaaa

SEQ ID NO: 163943 - DNA, 456 bp, Arabidopsis thaliana landsberg
caatgttatttatgatcttttctatttttattctttttgtgtctgcattgaattttcctaatgctcccgtagaagcaccaagttcggacctgacggctacttacctctagccaaaaaacatgttgtaatccgcatcaaggtaaaaaacagagaaattttgaatgtacattgtagatccagtgaagatgattttgggatggtccatattccttggaatgatacatgggatttcagctttcatgtcaacttttggaaaaatacaaaatttcgttgtcactttacttggcataatggcggatctcattactttaatatttttaaagtatacagagatgataatccagatggacgttttccagtttgtaaagaatgtatatgggaagtaggaaaatatggtgacaacggccatatttgtcgtattgttcgtgatgggagacatttgccttactgttttaa

SEQ ID NO: 163944 - DNA, 420 bp, Arabidopsis thaliana landsberg
  unsure (1)..(420): unsure at all n locations
ctccatccaaagagagtctctaagaaacaaaggaataatatattattcggctccttcagacttcactacaacttttgctcctctcacgtagtgcctgtctctgcgccagtgcgtctcccggaagagctctacttagctcatctcggatacgactctacttgggagtcaatgttttcgactgaatccatggatcgtcacgatggtgatgatgttgatggtcaagaaccatctcagctctctagctatctaaggcagctagaggataaagttaaagacggccaagaagaagagacagagncgctgatgagtgagattgatatattggctgatagaacaaaagcaaattgccatgagaagttcatgttggagaaggttgattcatataggagatcccaaggaaccctgaatagaagcggttga

SEQ ID NO: 163945 - DNA, 598 bp, Arabidopsis thaliana landsberg
cgcctgatcgacaaggacgcggtgcaggccaactcgaacgtttccatgttaaaaagccagcgggtccgtttgtggtggtcgccaataaccacgcgccggtcggcaccgtggtgaccgtcatggacggtgtacgactgggcggcgtcaggaacgtttctatcgctccaacggagacgaagcactaatgcgagcccgtagccataacgatgcagacagccatcacggaatcgatcttgcgccgatgctggatttcgtcctgaacctgctgatcttcttcatcatcatcacgtccttcgtcaaacagtccggcgtcaaggtgcacaagccggatgcgttgacgggcgaacatcgtgactccggcaacatcatcatcggcattcagcccaatggtgaagtctggatggaccgtcgcaaggtttccctgccggaagtgcgcgccatcatcgagcgcatgcacagcgaacgtcctgaagacaccgtcgtcatcaccgcggacaagggtgccgagaccggcatcatgaccaaggtcatggacgaggttcgcgccggtggcgtgatgaccgtttcggttgcgactctgccaggcggtggtagctga

SEQ ID NO: 163946 - DNA, 478 bp, Arabidopsis thaliana landsberg
atgttgcatatttgtgttgatttcaggtgatttggagctattgacgagctaactggaagaagcggacctgatcatgtcaaaccactcgaccccttggccgagtagatgcttcacgacctcaagagaccactcgaccccctagtcgagtaccaccatgagagtcactcgatcacatcactcgaccacctggtcgagtatcatcacctccaccacctgaccatcactcgatcacaccactcgaccaaaaggtcgagtatcttcatcaccgtcactcgatcactctaccaccaagccgagtaccaccatctccatcactcgacttcatactcgattgccagcttcagagtcttctccattccacactcaaccagacacttgagcacaaggaagaaaagaagactccagcttatcactcgaccattcactcgaccaccttggtcaagtaccgtttttaatccgtcccaatactgcatcgttt

SEQ ID NO: 163947 - DNA, 2096 bp, Arabidopsis thaliana landsberg
atggatgtggtagcaagattagcgtcgcaaagagcggtggtgatattcagcaagagtacgtgttgcatgtctcatgcaattaaacggttgttttacgagcaaggtgtgagcccggcaattgtagagatcgaccaagacatgtatgggaaagatatcgagtgggccttggcccgattaggctgtagccctacggttcctgcggtttttgttggagggaaattcgtaggaacggccaatactgtcatgactcttcatctcaatggatcattgaaaatattgctcaaggaggctggtgctttgtggctttagcactcgtttgatctttactttgacctttgaaagtctcttcactttatgtacgtttaattaaagcatatgtgaagaggaactactttgtattgagagtaattaaatatgtctatgtggaggttgatttaatgattaactataacccattatgggcgaggtcgcataaacctctgttttatttcctactccttacaaattaattcacaagtcaaaaatacatgcaactttctctaagtgaccaaatacctctttgcaaacgattgaatcaaactcatgatcataacaagtttatgccattttaatccacaagcgaaggttcttggcgacaactttccagctaatcttccgtctcttataacttgtttgtctttcatttgtcgatttcttctcttggctttaactgatctacaattttaaggctatttgtagatttaaggtacttagacggtaataactgatggaagcccatactgttttcctctaacacatgttgcacacctaggttatgaatgaaaacgtgcaattcaactacggataaaattcgaagcggttctaagagcatcctcattggtgactttttagagatgtctttactatactttattgtaaaaattaatattattttaattttaagtcatttattagtcaagtgtttttttttgtgcaatgaggatggtcttatagtgattgagtagtgatttcttctactaaaattgtaagcaaattgaacccaaaaaaatccgacctaaaactaggtcattttatttgttaaaacgttagacgatttaacccgcaaaagggtcaaccataaaaacattaaaagactcgatttttattatttgatcactctgaatatattaacaatttcatatgaaaatattaataaaggaataaaaaatttgatgaaaatgttagtaaataaatatcataaaaacaaagaaaacaaattctttcatatgatcatattggagaaggattaatcatagaaaaaaaagagacatatatatatatatatatatataattatatttaatcaactacattcattacaaaaacatcaaaaactattatatttcttttaccgttgatgtatgtaatcaaaaacctcaaaaacattttatagatatgctcttctccgccgatatatgtaattttatttctttttaatatatagtagatgccaaaaattatcaaactttaagaactttgatatgcgggtagtcgtaataatatagtttaatttgagttgaaactcgaaaactattatatattcccaaaagacttcgtcagttaattaagaatggaaaagaaaagaaacaagaaaaaaaaaactcaagtggaacacgaaaagatggtaaaatttaaacttaattcttaaaaatttcaaaatgacttagcattcaagagaagatcgcacgacgagaaaacgtgttgcacaggtgatcttcgtcaatcattttgagtttgtcttttgtcattttttgatatttgaagaaagtttcttctcaattatttgaacttccccgggtaaatatgtatgaataattttgctcagagttgttccctttcttgatcaaggcttttatgttgacctaacaatctgttatctaatatttacatgtaatttgtttgtcaaagcagctaaaatatgaatcattcggaacaggcttcagcgtacaaagcggtaaaaaacatagttttggtgggacgtaccggaaacggaaaaagcgccactggaaactctctcatcgggaaagacgtgttcgtctcaaaagcgaaagcaacag

SEQ ID NO: 163948 - DNA, 411 bp, Arabidopsis thaliana landsberg
tcactatcgcgtgtatttcaggacttcgatttggagtacagcgaattccaaaatcgatttctggaatttgcaaaaagggagaaagatgctgttggcagcctttcaggaggagagtgcaggttattggagttgtatataatcgtcaggtcccaatctttgttcgctttattggatgagccttttacacagctaaatcccctgcaaattgaaaaggccatgcagttacttacagaagaaaaagcgcgtaaaggcatactcatcaccgaccacatgtaccggcatgttattgacatttgtgacactttgtatgtgctgaccaatggaaaaacatatctgacaaaaagtagcgctgatattgaggccttaggttatgcaagacttcaataatctcttagagccaccttcgcgccg

SEQ ID NO: 163949 - DNA, 539 bp, Arabidopsis thaliana landsberg
gttatggacggattggtaggcctcttttagtttgcgtggtccggggtatcaaccttggctaccgtgacgctagaggcagcgatccgtatgtccccctacggcttggcaagaagaaactgaagacaagcgtgaagaagacatccgtgaaccccatatggcaagaggagctaactctgaccgtcacagatcccagccaaccactgaagctggaggtgttcgacaaggacaccttcagcagagacgaccccatgggagacgcggaggtggacgtggcgccactgatggaggcggtgagcatgaacccgcgggaggagagtctgaggaacggcgccatcatcaggtccgagcggccgagcgccaggaactgcctcgccgacgagagccacgtgtgctggaggaacggcaagttcgcgcaggacatgatcctccggctcaagaacgtcgagagcggggagatacagctgcagctgcagtgggtgaacttccctcctggtcctgctcctgctggtgcaacaaccaggtgacctgatgatccatgg

SEQ ID NO: 163950 - DNA, 1032 bp, Arabidopsis thaliana landsberg
  unsure (1)..(1032): unsure at all n locations
atgaatcgtctatcgattctccttttcgttttcgcctttggccttaccatgatgagtaacacaggatccgttaggaacagaaatgtactgagtgacaaaaacgatcttatatatagtccattgcaaatccacagaccaagatatgggataccatatctctcaggtaatcttaacagtatctgtcaatatcagaaatgtcatcaattccgaacggtaatcttaaccgtaccacgtcgagttatatgatatattgatatatcacacaaagccaatcttgatatcatctgcattgataactattaagatgaagaaaaaaaaaatatagaacactgaacacgctgattgcaagtttctattttttgtggcagaaccgctcgctaatgaaatctttgaatagtactatatatttgttatagtataattcaagtaatatccccttgaaatccttaagaaccattatttttttaatgggtaaaatgccaatcaggtgaatggaaaatacccaaataaaatagaaaaaaaaagacagatttttacgggcagccttctaaacaacatttactcaaaagttgaaaacatttataaatccttcaaaaatatccattacttagaaagaaagaaaaaaacgtaaaaggaaagaaagaatgaagttacgtgtgacgatatttaagtatggttgtatgtttatacaccganaatgtgataggaggatcggtgtttatctataacaacctgccccacggacactatttacaagtgaaatgcaaatctggagacaccaatcttggtttccacgtgagacggcccggtcggttttacaattacgctttcactgatcatatacttggaaaaacgctttattggtgtcatctatggaaaggtaaaaactgggaggatcatgtggtgatcgttgcctacgaaagtagggatttgcctcatcgcgacaattgggtgaggtggtcggccagggaatctggcatctatcaaaatgttaacggtgaggagagattccgtttcaggtataattgggat

SEQ ID NO: 163951 - DNA, 250 bp, Arabidopsis thaliana landsberg
taagcatcatcatcatccttatcatcaagaaagagagaaaatgtcggattggggaccggtgctagttacggtgatactcttcgtgatgcttacgccagggcttctgtttcagttgccgggacgacaaaagtacgttgagtttggtaattttcagacaagcgctgtctccgttatcgtccattctcttctctacttctcccttgtttgcgtcttccttctcgcactcaagattcacatctacatcggctaa

SEQ ID NO: 163952 - DNA, 291 bp, Arabidopsis thaliana landsberg
atggctttggtaagaggtttcatggctgcaaagaagattcttggtggctcagtagcaggaacgaggaaagaaacttcagcaccaaaagggtttcttgcagtgtacgtcggtgagagccagaggaagaagcagagacaccttgtgccggtctcatacttgaaccagcatttgtttcaagctctactcatcaaagctgaagaagagttcggattcaatcatccgatgggcggcttgacgattccttgtcctgaagatactttcctcactgtaacgtctcaaatccaaggatga

SEQ ID NO: 163953 - DNA, 4364 bp, Arabidopsis thaliana landsberg
atgcctgattattatgtttggtataagcatggagaagaaatgaatatggatataggaacgagttacacgtataggacatattttagtgaaaatcatgaagaagtgggtaatattgtagaagatccatatgtggatatggtgaacgatgcatttaattttaacgtggggtatgatgataactatcatcatgatgataactatcatcatgatgataattatcagaatgtggaagaaccggtccgtaaccattcaaataagttctacgacttgttagaaggtgcaaataatccattgtacgatggttgtcgtgaagggcagtcgcagttatcattagcatctcgactcatgcacaacaaagcggagtataatatgagtgaaaagttggtggactccgtttgcgagatgtttacagattttttaccagaaggaaaccaggctaccacttcacattaccagaccgagaagttaatgcgcaatttaggatttccatatcatacgattgatgtttgcaaaaacaattgtatgttattttggaaagaagacgaaaaagaagatcaatgtcgattttgtggcgcacaaagatggaagcctaaggacgaccgtcgaagaaccaaagtaccatatagtcgtatgtggtatctacctattgcagaccggttgaagagaatgtatcagagccataagacagctgcggctatgcgatggcatgctgagcaccaatcaaaggagggagaaatgaatcatccttcagatgcggcagagtggagatatttccaagagttacatccccggtttgctgaagaaccccgtaacgtttatctcgggttgtgtactgatgggttcaatccatttggcatgtctcgtaatcattcgttgtggcctgtgatcctaactccatataatttaccccctggtatgtgcatgaatacagagtacttatttcttaccattctgaattctggaccaaatcatcctcgagctagtcttgatgtcttcctccaacctcttattgaggagctaaaagagttgtggtgtactggagtcgatgcgtacgatgtttcattgagtcagaattttaatctaaaagcagtactactctggacgattagcgactttcccgcgtatagcatgttatcaggatggactactcatggtaaattgtcttgtccagtttgcatggaaagtacaaagtctttttatctacccaatggacggaagacatgttggtttgattgtcaccgtagatttcttcctcatggtcatccatctcgtaggaacaaaaaagactttctcaaaggaagagacgcttctagcgagtatccacccgaatctttgacaggggagcaagtttattacgagcggttggctagtgtaaatccacccaaaacgaaggatgttggtgggaacggtcatgaaaagaagatgcgaggctatgggaaggaacataattggcacaaagaaagcatattgtgggagttgtcttactggaaggacctcaatcttcgacataatattgatgttatgcatacagagaaaaattttcttgacaacatcatgaacactctcttgggtgttaagggtaaatcaaaagacaatatcatgtcaagattggatattgaaaaatattgttctcgcccaggcttacatattgatagtacgggtaaagctccttttccaccgtataaattgacagaagaagccaaacagagtttatttcaatgtgtgaaacatgatgttagatttccagatggttattcttcagatttggctagttgtgtagatttggagaatggtaagttttcaggcatgaagagtcatgattgtcatgtttttatggagcgactacttccatttatctttgctgaacttcttgaccggaatgtccaccttgcattatcaggtacaattctaactattttttatggagaaatttttttatgtaattatttaacttccacatatattttaggaattggagcatttttccgggacctatgttcgagaactttacagacaagtcgcgttcaaattctcaaacagaacatagttttaatcatctgtaacttggaaaagatctttccaccatcatttttcgatgttatggaacatctacctatccatctcccatacgaagctgaattgggtggccctgtccaatataggtggatgtatccatttgagaggtttttcaaaaagttgaaaggaaaagcaaagaacaaaagatatgctgcaggctcaattgttgagtcatatatcaatgacgagattgcttatttttcagagcactactttgccgatcatatacaaacaaaatcaaggtaaatacctttatttatttaacatgttgctatactacttcgatcttaattcaattatatgtggcaggttaacaagattcgatgaaggtgaagttcctgtatatcatgtccctggagtacctaacatatttatgcaggtcggccgtccaagtggtgcaatgcatgtagaatggctttcagagaaagattaccaaaatgcacatgcatatgttttaagaaattgtgaatattttaaaccatttgagaggtatttttaatcactttgatttattcatagataagatcactttgatttatttgtcttcgtttgttgagacagtatgttcgaggattatctttctgcgaaatatccatcattgtccgaaaaagaactctacgtcagaagagcagaagaatatcatctatgggttaaagaatatgtaagtctacagtaattttggttcatgaatgtaactatttgtctgttttcttgtagctagcgtgatttaatttaagatcatattgatattgtttatctatattatgtaggtaacatattggaacactaattctccatttcctacttgggttcaagagattgtgcaaggacctttgacaaggttaaaacttgggcaatgtatttcacaagaggatatatgtttcatacgcaaacccacggcgctggacgaaagacatgtaactatggggtatgtgttaaaggtgaaaattacgctgattcatctgatgaagcggatttctacggtaccttaactgatatcatagaactcgagtatgagggcattgtcaatttgaggatcacactttttaagtgtaagtggtatgacccaaagattgagagaggcactcggcgaagccacggtggcgttgttgacgttctatctacgaggaagtataataaatacgagccatttattcttggtacgtaatttttaagaggtcaattatatttctcttttaattattaatactcttgtttgatatatatgtataacttgtgtttacaggatctcaagcagatcaagtttgttatattccgtactcatatacgaagaaaccaaagaacatttggctcaatgttttaaaagtcaacccgagagaaaacatttctggagaatatgaaaacaatgatccgactcttttgcaaacagaaaatgatgatgctgttttactcactacaattgaaaatcttgtactagaaaatccggtagaaagcttaaacccaataatccttgattacgatgtcggggatgctgaaccagaagacgaattccgatgtaatttatcgtcctcggacgaagatgaagtagaagatgaagatgtataaatgtgtgaatatatgtataattatttgaataaatatttgaataaatttatgatatatgcatatttatttcatatgtagaattattttaatttcaaaggtaaaaggtgactcttatgcgactaatgcgcgacaaaagtaagatttgttgacaaaaatgcgactacttaccgacaccaatttgatttgttgagcttttatatttcgaagcccaaacccattaatataggtgacaaaaatgtgactacttagcgacatgaatatgatatgttgggcttttaaatttcgaagcccaaactcattaataaaggtgacaaaaatgcgactacttagcgacacgaatataatttgttgggcttttaaattttgaagcccaaacccattaagaaaggtgacaaaaatgcgactattaagctactaccctttgttttgttgggctaccaaatatcgaagcccaaaaccaatatagaaggtgacaaaaatgagactacttagcgactaccctttgctttgttgggctacaaaatatggaagccgaaacccaatataaaatgtgaacaacttccaagaggaatctcatgggacgttgccaaagctacaagaagactcggtggtggctctgcaagcgatactcttagtgctaaacagggaacagtggacgtgtgtattgtctcccattccccggtcaaaaaccaagtggtatgttctcttcctctaatttgttc

SEQ ID NO: 163954 - DNA, 397 bp, Arabidopsis thaliana landsberg
aataacatgttcagtttcgaaacaaaaattagggttaggtatgccgataccgaccaaatgggttacatgtactacggaaattatgcaacgatgtacgaagttgcccgtacagaaatgttgcgcagtttgggcatgtcatacaaatctatggaagaagatggggtaatgatgcctgttttagagctaaattgcaaatatattaagcctgctttatatgatgacttaattaccgtaaaagtcattatcgatgagaaaccacgggcaggaattattttcaaatacgaactttacaatcaaaataatgtgctcattaatttaggagaaaccacattagtatttgtaaacatcgaaaaaaacaagccttgcatgtcgccaaaaaacttcatgaatgctattg

SEQ ID NO: 163955 - DNA, 1399 bp, Arabidopsis thaliana landsberg
tgtaatggattttacaacagttgaggtcccagatgagtggccacataattcgaattcctttgtggacatctcaacaggtataaccgtataattcattcatgtcttattttggttgtgtgcgtttccgttcaaacgtagaaatcttattagacatatcaattgtcaagtttcagatcacaatggatcttcacctcctgtaactccaaagtctgatacagtagcttccaactttgaccaaggaagttctgatgtttctggcaatcatgattctaactcttcttattccgatttagattcggacacggaggccttttactcatcttttaaccatcacctcgtatcaccagggtcaatggatagccatgacttatccccggagaaacaaatgagttatgaagaattgatgaagaaatatgtccagtgtgaagaagagcttaggactacgagtttgaaacttcaagaatttgagcaagagattgagaaactaaaggagaccgagaaaaaagaatcggttgttctgtttggcgagtatctacgtggtgagcgagaaatcgcacaaggagaaattgcgattagggacatagctattgagactgagagaaagcgagttctcgaggtgcaaagacaggtggttgatttggaaactgagctttcagacttaagtttcaaatttgagcatctagtgaatgagcatgaggtgagtagggactgtttagatgtgtcattttctgaaatctctaagctaagggaaatgttgtgtgattgtcagcaaaatttctctattgagaaaacaaaactggtagatcagataaagcattctgaggcagagaaaatggagatgcagaggaaagaggttgagttgcaagctgaaatcagtgcattgaagacagacttggccacacgtggtgagcatattgaagcattaaacaaagatttcgacaagcacaagctgaggtacgacatgttaatggcagagaaagacggagtatgtgctgaagtagacaatctaaaagcagagatgagatcaagagacatccaaattcagcaaatggaggagcaacttaaccagctggtctataagcagacagagcttgtgtctgaatcaggaaatgccaagaacactgttgaggaactgaaagctgtggttaaagaactggagattgaagtagagctgcagagtaaggccaagaaaactgtggaggaactgagagctacggtctgggaaatggagaagcatgcagagttgcagaggaatgcgatatcacaaggagaggaagagaatcgagaggcgattagacagctttgtttctctctggatcattacaaaagcggatataaacagcttttgtggtatctttcgggcaataaccagcaacatcaaacaaccatggtcgtgtga

SEQ ID NO: 163956 - DNA, 871 bp, Arabidopsis thaliana landsberg
atggacattcacacagaagcacttcgtcttgctcaatgtcgtcgcttgcgtggtaagcctctcttggatttaggttttgattcaaattgctcaataaagatctggactttatgtcactttgtaaacaatcatcatcatgggttctgttgcagacagcaatttcagcatcgtggctcttctttgctgcgattcctactcttctggttcgttctccaacattttgcttttacagatttcttcaaccctttgatggattttgaaggttgatttgagttttactttggaatgttgagaaaggctttcaagaaagcagctgagtctcttgaaaagcttttggatgtaactagagaagagctaccagatacaatggctgctgttcgtttatcgggaatggagatcagtgacttaactatggagctcagtgatttagggtttgtctcacatcccaccatgatgattaccaatttcttcatatctgttttgtaactctttcagtgtttgtgtagccaaggtatcactcaaggtgttaaaagctcgacacgggctattcgtgtagctgaagatagactaagacggttaacaaacatgaatccaggtctgacctttcacttctgaactcttctattcgaactatggactttcatggttaactccatttttacctcatcagtagcttcaatgcaggaggtgatgcgtcaacccaagacagatgaaacagaaccaatgttggctaaacaagcgaggagctttagagaaggtattgttaagggacgctctttatggcaattgttctccacaatcactcgtttctctaaaatcactacaagttatcttgcaaagcgtgctaagcagtagaagcctagaaggtgat

SEQ ID NO: 163957 - DNA, 476 bp, Arabidopsis thaliana landsberg
aaaaattcagaaacttatcatataatggatcatggtaacatgccaccaccatcaccatcatcaatggtaaatcataccaattccaacatgatcatgatgcatatgactttcttctggggaaagaacacggagatactcttctccggctggcccgggacaagtctcggcatgtacgttctatgtctcatcgtcgtcttcctccttgctgttatcgtcgagtggcttgcccattcttcgatccttcgtggacgtggctccactagccgcgccaaggggctcgttcagaccgcagtctacacactcaagacaggctttgcttatctcgtgatgctcgccgttatgtcctttaacggtggagttttcattgtcgtatcgccggattcgccgtgggtttcatgctcttcggaagcactgctttcaagaacccctctgatgacgagaaacccttcgaacaactatgatcactttttatttta

SEQ ID NO: 163958 - DNA, 608 bp, Arabidopsis thaliana landsberg
atgtcttcggatcgtcacacaccgacgaaagatccaccggatcatccgtcttcttcctccaaccaccacaagcaaccacttcctcctcaaccgcagcaaccactcagccgctatgaatcgcagaaacgccgcgactggaacacgttcgtccaatacctaaaatcacaaaatccaccgttgatgatgtctcaattcgactacacgcacgtgctaagtttcctaaggtacttagatcagtttggtaagaccaaagtacatcccaagcttgtgtcttcttcggacaacccgatccacctggtccttgctcatgccctctcaagcaagcttggggatctctcgatgctttgatcggacggttgagagctgcctacgaggagaacggtggacggccggattctaacccgttcgccgcacgtgcggttcggatttacttgagggaagtcagagagagtcaggcaaaggctcgtgggattccttacgagaaaaagaaacggaaacggccgccaactgtcaccaccgttagagttgacgtcgcttcttcgagacaaagtgacggagacccttgtaacgtcggtgctccatctgttgccgaggccgtaccgccttag

SEQ ID NO: 163959 - DNA, 643 bp, Arabidopsis thaliana landsberg
attgtcaaggagggtttggttgaattgggtgattatgtggcagccatacgcaatgcagtgcagtatgtgaggtcttcaacttcaaggtgtgattcatttgaccagaaagttgtgtctgcttctaattcatattctacaactatactttggttgtgtctgcttctaattcagtagcttcttataagtgctatggtgagatagtgactataaaaacgaatttggtgtcactaggcaataatttagacaaggatctgaaaactaaggctaaagctatgttaggaaattttgttaagtattgggatggaacaagaaacattaatgtctatctaatagttgcaagtgtctttgatccaaggaagaaaatgcagtttgctaatatgtgttttgcaaagctttatggggaagatactactgatgctaaagagatggctgaaaaggtcaacaatgttttgactactctgtttaaggagtatagtagtcgttttcagaaaacatcgtggtagtggtccatcatcacagtccactcagacttcgactacggctagccaaggtgagccctctgatttgatgtatgatagtatggggtatgagaggatgggctttgcttataaggagttggttgatgagattagggttgatgatg

SEQ ID NO: 163960 - DNA, 306 bp, Arabidopsis thaliana landsberg
atggacaaagttatgagaatgtcgtccgaaaaaggggtggttatatttaccaagagctcctgttgtttgtcctatgcggttcaagttctcttccaagatcttggtgttaaccctaagatccacgagattgataaggaccctgaatgccgagagatagagaaggctcttatgaggctagggtgttcaaagccggtcccagccgtcttcattggtggcaagctcgttggttcgaccaacgaagtaatgtccatgcacctaagcagctcgctcgttcccctagtgaagccatatttatgttaaacaaca

SEQ ID NO: 163961 - DNA, 568 bp, Arabidopsis thaliana landsberg
atggcttctgccggcttaggtagctggagaaaggatccggtgtacagaggaatccggtgccgaagtgggaaatgggtctccgagattcgtgagccgaggaaaaccacgagaatctggcttggaacttaccccacggcagagatggcagccgccgcctatgatgtggctgctatggctcttaaaggaagagaagctgtcttgaactttcctggatccgcccagtcatacccggttcctgaatcaacatccccagcagatatacgacgccgctgcggcagccgcagcagcaatgaagggatgtgaggaaggggaggaggagaaagaggcaaaggagaagaagagtagtagttcgaagtcgagagcgcgtgagtgccacgtagataatgatgttggatcttcgtcgtggtgtgggacagagttcatggacgaagaagaagtcttgaaaatgcctaatctgctggctaatatggcagaagggatgatggttgcgccgccgtcgtggatgggttctcggccgtcggaggactctccggagaattcaaatgatgaggacttgtggggctattga

SEQ ID NO: 163962 - DNA, 904 bp, Arabidopsis thaliana landsberg
acaaaagatgatccgagacaatggtcatctggtatatgcgcttgcttcgacgatatgcagagctgtatgctactactctctgtcatccaaaccttcttcattttactacacgaatcaaatttgttaaaggtgcctctttgaattgacctgtgaaattgccatgtgttagtgtgttcagatatgttcataaagataagtgtggttctggttgatagttcttgcagagttttttttggtttagaagaataaccaagtgcatttcttgaataggctaggaagaaacttagattgcttatgttttgagcttccttgtgttacttctctaggacttgattctgttttcttgtttatgctgaagatcatttagacaatggtttgaaatgaacattacaacttactgtggtttgtttcgtatgcacaggttgtgtaggtttgttctgtccttgttatatctttggcaaaaacgcagagcttctggggtctggaacatttgcaggaccctgcttaacccattgcatctcctgggctttggtcaataccatttgctgctttgcaactaatggcgcattgctcggtctaccgggatgctttgtgtcatgttatgcttgcgggtaccgcaaatcattaagagccaagtacaatttacaggttagaatttctcaaacgacacatatgtggataataccattaggtatgtatgtggcgcttctgactgatttaacattctttgattcaggaggctccatgtggggattttgtaacacacttcttctgtcacttgtgtgccatttgccaagaatacagagagattcgagaacaaagcagtggttcatatcctcttgacatgaagatggctatcaccgatgcccccttggctcaaaccatggaatcaactaactgatca

SEQ ID NO: 163963 - DNA, 1775 bp, Arabidopsis thaliana landsberg
acatctgaagcagctaaagtgttggatgtttcacataacgacatgggcggcaagcacccagtggacacaacaaggtacctttgttcttggccgccctctaattcgggtgaaattggaagagaggtgcttggtatatactaggatgcgtatttggtgcttagagatttgatgaaactgaagcagttagatattagagacaacgacctaatatttgcaggtgaagagttcagctcttttgtccgccaggtttttccaaagcttgtatggcttgatggccacaaactcgcaagttaaagataaatgttaggccacttgttttaattaaagtataaaactctttcgtttttttggattcattttcatgaaatcaaaagactacaagtctacacgtgcttcaagcttgaggctctaaatgaagtggtaggaaagaatgaaataataataaaaaaagtcagaaaaatggatggtctgagatcaaagtgaaacctactccacatacacatcccaacttcttccccgccatgtggacttttctttttcctactttctctctctgcattctctcttacacctgtctttatctgaaaaataaccgatgagctcgtcgccgtcaagaaatccaacgaacgccgaagcacctccgccaccaccaacatcgacggatgctgtggcagagggttcgtctaagaaagtgaggaaaccatataccatcaccaagtcaagagagagctggacagaggaagagcacgataagtttcttgaagcacttcaactgtaataatttatctctgtttctctgtttttagagacttcaaatttcttagtttgctgctgatttctgagtttagttagttatagactgaacaaacagaggaaagtttatgttacttagcttaggtctagtagtaacttagctataaaaaatctgcttagctaaaaagatctgcttcttggagcacttcaactgtaataaatttatacttgtgttgactttttgaaagtgttattgatgtaactaggacctgattctgctgatactactactcctctatgttccttaggtttgatcgtgactggaagaagattgaagattttgttggttcaaagactgtgattcaggttttaaaatagcttactctgcatttttggtcgcagttactttgtggcaatgttttcaacttatttgactttgtactgcagataaggagtcatgctcaaaaatactttctcaaggttcagaaaaacgggacattagctcatgtgccacctcctcgacctaagcgcaaagcagctcatccgtatcctcaaaaggcatcaaagaatggttcgaatattttataatacttcttagtttggttatagagttgagtttttaactcacattttcttgcagctcaaatgccacttcaagtttccacgtcttttactactacgcgaaatggcgacatgccgggatatgcttcatgggatgatgcctcaatgctgctaaacagagttattccaccacaacatgaacttgatactctttgtggagcagaaggcatgcgttctcatctgtactcagtttttatattttgctttggtagtctagtcactctatcttctgaagttttcatatgctaaatgcggcttacatatcattgtttcagttgatgttggatcaaatgacatgataagtgaaactagtccttcagcatctggtatcggaagctcaagcagaacactatcagattctaagggtttgagactggcgaaacaagctccctcaatgcatg

SEQ ID NO: 163964 - DNA, 509 bp, Arabidopsis thaliana landsberg
atgttcgaactgaaaccgcatgcccacgccagctagcgcgggcattacgaggaattcgtgcaacaggcgcgcggcctgcttgccggcgaacgcaacctgatcgccaacgccgccaacttcagcgcactgatattcaacagcctgccccagctcaactgggccggcttttatctttacgacggtaccgagctggtggtcggcccgttccagggcaaacccgcatgcatccgcatcgcactgggcaagggcgtgtgcggcaccgccgcgcagacgcgacagacgcaaatggtgcgcgacgtcaacgcacacgccaaccacatcgcctgcgatgccgcctcgcaatcggagatcgtggtgccactggtgaagaccgacggctcactgctcggcgtgtgggatgtcgacagcccggtcaccgatcgtttcgacgacgaggatcgtgccggcatggaagcactaaaatgccgtgttcatggacgccgtgcacgactgaccacattcgtggacga

SEQ ID NO: 163965 - DNA, 579 bp, Arabidopsis thaliana landsberg
atgcccctgcatctctacaactccaatgttgcaacagccacaggcgccgatggcacagatttattcacaggttcatgtttcacattttcccaatggtatgccatatcgtcagttcctctctccagtctatgtcccccgaatccccatgcagtatatgctcaccctttaaatggcaatagctatgtgctgatgcctggaggcagttctcatcccagcgcaaatggactcaaatatggaatccagccattcaagcaagtctctacagggggcccaacgggttttgtggactttcaacaaccccaatgggtatatgtcatcccaatggacaggcaaccaagagatctttcaggccttcagtcttctcctcattacaacatggctggacaaacacctcacggtgctttaactctgctccagtccaatcgtctcatatgcagtttcaaggcgtcttccattcgccagagcctggtccaatggcgaatgcacaccataaggggcttggacttggtagtaacgctgggcttggggttgctccatctccttctccagttcaagtccgtgcctccttattcatcttaa

SEQ ID NO: 163966 - DNA, 511 bp, Arabidopsis thaliana landsberg
agtacgcgccacacgagcgacgacgccgcgcgtcgcctgttttaagccgaagcgcttatgaagctctgcgagcgctacggcacccagttggtgatcaacgacgacgccgaactggccgcgcgcctgggcgtgggtgtgcccctgggccagaccgacggcccgctgaccccggcccgcgccctgctcgggcgtaatgcgatcatcggctcgacctgccatgcgcgcctggacctcgcccaacaagctgcccacgaaggcgccagctatgtcgcctttgggcgctttttcaattccgtgaccaaacccggcgcccctgctgccagcctcgacctgctggagcaggcccgggatcaggtcaagctgccgatcgccgtgatcggcggcatcacccttgacaacgccgtcccgttggttggccatggcgccgaccctgtggcggtcatccacggctttgttggggccgacagcgcgcaggaagtcacccggcgtgcccgcgcctttaacgccctgt

SEQ ID NO: 163967 - DNA, 589 bp, Arabidopsis thaliana landsberg
atctggagctgcattccttcttgcttttcgtctccgaatttcccaactaaaaattaaagaaatgagtagcaattctgagaattcgattgcgagtacacaatccgtcagccgttggggacgtcggttaccatcgaagtgtcattgcggattagacgtggtcatctatacattgacgccagcaaagaaccgtggaagaccatacttccgttgtcctacgcgtaaagatgtaattgatttgaggattttattggtttcgttgttaattgatttgtgattgaatatgcaggaccatttgtttaaatggattgaagatggtacatacgaagtggtcgtagacagttggccgaaattgtccgccatggacagtgagataaacgcagccaagtccgaggttgctgtcgagctagaagcgttacaggtgatggtgaaagaactgaaggaagaagtgatgaggagcgaaagggaaaaccagaaatggaaattgatgatcaaactttgctgcttttgtcttggctttattatcattgtcattgtacttggtatcttaatgttcccaaaaaccaaggaacagaggcttcttcttggctac

SEQ ID NO: 163968 - DNA, 531 bp, Arabidopsis thaliana landsberg
atgaaggcgatgccgaccgcaaggttggccgcacccgccgcggcaaacgctggcttcaacagccagcccgcaagcagcacggccaacgccaccggcaacggccattcccgcagccagggatggcccgccgaacccgcctgcatgtcttgtccgccgtgcatgtgtcgctagtatgcatgacttcggaggcgatccatgcaaaccatcagctgggacgaattcaccagggttgaactgcgcgtgggccgcatcatcgaggcccgcgtgtttgccgaagcgcgcaagcccgcctacgtgctgcaggtcgatttcggcccggacatcggcgtgcgcaaatccagcgcgcaaatcaccgcgctgtaccagcccgacgagctggtcggcaagctggtggtgggcgtggtcaactttccgaaaaagcagatcggcccgttgatgagcgaatgcctggtgaccggctttcacgacgccaacggtgacgttgcgctgtgcgtacccgatcgaccggtcccgttgggcgccaagttgtgt

SEQ ID NO: 163969 - DNA, 482 bp, Arabidopsis thaliana landsberg
atgttgcatatttgtgttattttcaggtgatttgaagctgttggcgagctaattgagagaagctgacctgatcatatcaatacactcgaccccatggccgagtagatggcttcacgactttaacaaaccactcgaccccctggtcgagtagaaggcctcatcacttcacaccaccactcgaccctgtggtcaagtatcatcatctcgaccacctgaccatcactcgatcacaccactcgaccccctggtcgagtctcttcatcatcacacactcgaccgatcagtctaccaacaagccaagtaccaccatctccatcactcgacatcatactcgactgccagcttcagagtcttatcgattccgcaatcaacaagacactcgagcataaggaagagatgaagactttggctcgtcactcgacccgctacttgatcacctgggtcgagtaccattcttaatctgtcccaatactgtgtcgttt

SEQ ID NO: 163970 - DNA, 567 bp, Arabidopsis thaliana landsberg
  unsure (1)..(567): unsure at all n locations
cttgggctttcactctaccatttatttgtaacagtcaagtctctactgtctctatataaactctctaaagttaacacacaattctcatcacaaacaaatcaaccaaagcaacttctactctttcttctttcgaccttatcaatctgttgagaaatggcttccaaatctagtttcatggctaccttcaacattgtgactctcatgctcatggtggcttcctccacagtgacagctcgccctctcatgaaaccattcatggggacgtcttctcctaccacaagccttgtgtacaggctcaagcttgatgaagatacagggtactgctgggactcactgatgcagctccaacactgttctggagagctgatcttgttcttcctcaacggtgagacttacattggccctgggtgttgcagtgctataagaaccattggacgcaagtgttggcctactatgattggtgttcttggttttactgctcaagaaggtgatatgctcnnnnnnnnnnnnnnnnnnnnnnnnnnnnnnnacaatggtgaagaccatgctcttgcctcctcaacactg

SEQ ID NO: 163971 - DNA, 611 bp, Arabidopsis thaliana landsberg
gccaaggcccattagatgagcccacgattaattcggttcctctcgtgaattcaaccgtagattatcttgtatcaacgcacgtgataacgccacgtagacgatccgtgagattgatcaaaaaccaatcatgttcgtatcagcacctctatatatatctcggtatcactcggagagcgatcattaatcgtcaatttacaactagtcgcgaaatccgaattttatccaaagcaatggcaccgaaggcagagaagaaaccgtcggagaaagcaccaaaggcagataagaagatcacgaaagaaggaggaagcgagaggaagaagaagactaagaagagcacagagacgtacaagatctacctattcaaggtgttgaaacaagttcatcctgatatcgggatctctggaaaagccatgggaatcatgaacagtttcatcaacgacaccttcgagaaaattgctctggaatcgtcgcgattggctaggtataacaagaaaccgacgatcacgtcccgggaaatccaaaccgccgtaaggctcgtgttgcctggtgaattagcgaagcacgctgtttctgagggtaccaaagccgtcaccaaatacaccaaatcttag

SEQ ID NO: 163972 - DNA, 509 bp, Arabidopsis thaliana landsberg
atgattgagaggaataattttgatgttcttattagggaaaaatctctaacatgtgttgcaaatggatatacttgtgatttgtttatgggtttatggagggatcttggtcttggtcttgattatgaggggaccttcggtatgaatcttacaacctgtgtgtttcgattttggaagatttctgatcacgaaggtaaatattaacactcttctcatcgtatctttaatttatcgagctaatacatataataaaaacataattattttaggtcgtcaatgtctaatttcacataatggtgcttcaaaaattgtattcaatcaaacttacccagagattaacatgactcgcatcaggtaagaacgtttatattttcattgttcctttactgataagtgtgttatataaaattttagtctggactatttatttcttttttgttttcctacattttcaagactcaattccttgaacggatgcaaccagctgagctaggtgaaattgttatgagaat

SEQ ID NO: 163973 - DNA, 594 bp, Arabidopsis thaliana landsberg
atgcaagtggtcggggtcaacgcactagaaattccacaagaactaaacgataagaacaaataatcttcatagtctctcatccaatcttacaaactttctgatttcctttctacattcatcgaccaatggcagcaaacaaaactcttcctacgtatttttgcagaaactgcgagaatccactagctctcggtgaagatctcatctccaaaaaatttgtggtaacaaaaaaaaaaaactaaagaatgttatagctttaccaaaaaaaatcactttttcatttcttatcggatgattttctagagatgatcaagtctcttcataatctccatcggttataaaatgcaaaatgtttttgaatatggattatagggagcttcagggccagcgtttatgttttcacacgcgatgaacgtggtggttggaccgaagattgggaggaaactgataaccggatcgtatgtagtggcagatgtgatgtgcagtaagtgtggtgagacgttgggttggaaatatgttgagacattcgatcttaaacagaggtataaagaaggcatgtttgtcatcgagaagctcaagttgaccaaaagatattga

SEQ ID NO: 163974 - DNA, 429 bp, Arabidopsis thaliana landsberg
ttaaaaacatacttgaaaatgcaaggaacgatttcttgtgcaagaaattataacatgacgacaaccgtcggggaatctctgcggccgctatcgcttaaaacgcagggaaacggcgagagagttcggatggtggtggaggagaacgcggtgattgtgattggacggagaggatgttgcatgtgtcatgtggtgaggaggctgcttcttggacttggagtgaatccggcggtccttgagattgatgaggagagggaagatgaagttttgagtgagttggagaatattggagttcaaggcggcggaggtacggtgaagttaccggcggtttatgtaggagggaggttgtttggagggttagatagggttatggctactcatatctccggtgagttagttccaattcttaaggaagttggggctctgtggttg

SEQ ID NO: 163975 - DNA, 3915 bp, Arabidopsis thaliana landsberg
  unsure (1)..(3915): unsure at all n locations
atggaaggactgaaccatgcaatcttggaacttcatgaaatgattagaggttaccccaattttgaatttgaggattggtcaaaggagcctggttcagaagaagaagactactctgttgatcagaaagaagcttactttgaagaaaaatcaaatgagtactcatcctaccgtatgtcaagagaggatgcagaatatgattcaggaactgaaaattcaaccactgaagatgaggacttttctgttcctcttttaaaccttttttctgactaagctctataacagtcaagcttagtgaattaaaacaagctcacttgggaggaagtcccatgtctatccaggtatataactttctatttttcttgttatttttgatgtttttgtttaagtgtttcaggtttatctcattgatcattataaagtcaacggtcgagtaaactcaaaacaagtcaagaatcatctccatcgttgatcaagcaaagtgaggaggagagctttaagccgttgatttgaatgaccaaatgagagaagcatcagacccgtttgatcgagtgacttctttaggtttattctggtccgtttgatcgagtgatgaaaagcaaagcattctccaccgtctgatcgagtgaagaatccaaagagaccaccttgtggactctgacgcctcgtgacccgcctccattgaaacgttgttgtctctttgtcttcttgtccccccccataatcgctttggttcccccattgcaattcccgaactcaacaacctcatctctccacctcccataccaaagcaatctcgaattctcatatctctctatatctctttttcttgcacttcctctttccatcaaaaactcaacaaaatcaatctattttcttcatcactcgatttcttaacctttgagtctctctttctcaatgacaaacaggcgcacgctcctgtcaaggattaagaacagagctttctccccatcgaagaggtacccaacaccttcttcgcatgcagtagctcgaggactttctgaaccatcacccaaggggtcgagtaggagagaacaagcaagtttcgagatcgatcacagcgaatcaagccaagaggaggaagtgatgcaagaagaagaaacttccagctctcccgctggaaatactcgatcctgaaggtcgagtaagtcctttgcaagggaattctcaaggaacaaggtagacagcacacgaggaaagaagcccgtggggaggaggttggaactggtagatgaagactttgaggaagaaatggcttcaccagaggattaaatggcttcaccagaggaggctgatcagacagagagaggaggtggtgatgatttggaatcagagaagtgtgcaattcgaaacgagtactacaagctgctgaagcgaaatgagtttttaggaactcgataccctcatcccgagaccatggagagactcggcatctatgatgatgtagactacatgtttaagcactgcagcttgaatattcacatgtttcggccaatagagggatatgaggaagagaccatcgagtttctttcatcggtagagttgttcttatatggagagtcaaaagacgatggaatcaggccagacggaagtttgggatactttaagttctttgtgtatgacgtagagtatcggcttccaatcgagtatcttgagctgatgtatggatttctaagcggaaaagacacaagtcatcgttttgacaagagagagcttcagtcattctaggccacgcttgagtctaaacatgggttttcatcctctaggaccaagagcaacgagataaggagtccggtggtcagatactttcataggtctttagccagtgcactatttgcaagagagaggaatgggacctttgtcaatggaaagctaaaattaacggagacagcgctgcaggagctacttggtttagcatcagatggtacagttctagctagagatcagacagacgcttcaatctcattctacctaatcgaacatttgctgaattacagaggatgggctaagggacttaagaaaccaggaagaatggttgtgggaggagttttgaccccaattttgagagcatgcaatgtacctatgcattcaaaaccgattcctccgagatggattgatatgcagcatcttatcaattccaagagtttttggtcgcagtagaagaatggcctatataaatataggttcggtcaccatacaacaggactatctattttcgtcctcccaaatcccgcttccacttcgatcagatattgtggcaacatttagttttgcccaccagtggagaacctctatacttcaggtgatgaagttgtgcaaatggaaggagtgaatgatgatgaggctccaatccatcattcagataatgaggcagaacctatggacgagtcttacgcaacacaacagttttactttgaggagtactccgcaccgaggcgaagtaaagagtcaaaggaaattcacaagcgtcttggtttcctccaaagctggtgtaagttccacgacaaaggctctcacggcactcaacaagaagtttaacaatctccaagtcaagatcagctgttcttccttaactacgacaataccacaaaacatgccttttgggagaagcggatccactcgtcaagaacctatgcatttcgatccgccttcaccaccaaaacagtcttcatatgagccgagggaacaccatgctgcaccttcaccaacaaggcaatcattgttcgaacctagagaaaaggaaaataggagcaagttgaaaaagcgaataagaacaaggaaatcagatgctggagcaagccactctaccgcacgacttgaggagccactcgattaacaacccgagcaaagggtcgagcgttcagctaatccaagttcagcacaacccgttccttagagttacacaaaggagagtatggccgatttggtctcctcctacttcacctgatcaatgaggtaacaccacctcaaccattgtatataccatagcatctttttattattttttgtttgttttgtgttttggtcttgatttctttctcagacttttattactcaagggactctgtaatttaagttgtgtgtgtgtgtgtgtgtgtgtggggngggggggttaaaacatgtttaacattgtgttctcttttcttatttcaaattttgcatcatctaaggcatagaaaaaccatttaaatttgaaaaaaaatcagaaaatgatttcacaaaaacagagtgtcatgtagattgcatatcattttaggattgtatatagtgtgcttgcatttaggattgctcatttgcataggggatagtgatgatttcaaaccgataagcatgttttgattcaatgaagtaagttcaatgccctgttagttctatgttgcataaccgattgtatctctgaagtaagactacaccctgctttgaatttgtaacttgactatactactttgattcgaaactcgcttatctgatgccattccctatctgttagaaccgtaacagaattacaaatcaccatgtctatgcattgtttgtgaactcatggctaccatatacatacttggattatcttattcacttaaccaccctctgttaatccaagtggttgactctcatttttagagcagtttcccataccctaaggctagccttatttcaagccaatgatcatttgtgtgtaattgtgaggtcttttttgattgagtttggtataacttgttaggtatgagccgacaagagcagcctttcatgtagacctagcccacgctttctgggttagctaggactaggtggagacttgtatttgggattgggattgtgtatggaatgattgaaaaagacaatgagaatgaaaagaaaagaaaaaaaaagtgagtaagagtttagagttcttaaggg

SEQ ID NO: 163976 - DNA, 3353 bp, Arabidopsis thaliana landsberg
cttgggttactcgaaattactctgctttgctctctctttgtctatttccgtatagattctgtctctagtttaaactcagatggtttggctttactctcgcttctcaagcactttgataaagtcccacttgaagtagcttcgacgtggaaggagaacacatctgaaaccactccatgtaataataactggtttggagtcatttgttatctttttggtactgtcgtcaagacccttaatttgtctgcttctgggctttcaggccaattaggttctgaaattggggagcttaagagcttggtcacattggatctcaaccttaacagtatctctggtttattgccttccactttacgaaactgtacttcacttgaggatttggatttgtctaacaatgatttttctggagaagttcctgatatttttggtagcttgcagaatttgacgtttctgtatcttgatcgcaataatcttagtggtctcattcctgcaagtgttggtgggttgatagagctcgtagatctgaggatgtcatataataacttgtctggtaccattccaaagtcgcttgggaactgcagtaagctggaatatctggctttgaacaacaacaagttaaatggttctttgccagcaagtctctatctactcgagaatcttgctgagctgtttgtcagtaacaacagccttggagggaggcttcattttggttctagcaactgcaagaagttggtttctttagatctctcgttcaatggtttccaaggcggtgttccacctgaaattggcaactgcagtagccttcagtctttagtcatggtgaaatgcaacttcacaggtacaatcccatcatccttgggtatgttgaaaaaggtttcggttatcgacctttccgataatcatctctcggggaatatccctcaagagcttgggaactgcagcagcttggaaaccttgaagctgaacgacaaccagctccaaggcgagataccacctgcattgagtaagctaaagaagctacaaagcctggagcttttttttaataagctgtccggtgagattcctattggcatatggaagattcagagtctgacacagatgctcgtttataacaacactctcaccggagaactaccagttgaagttactcagctgaagcaccttaagaagcttacactgtttaacaacagcttttatggagatataccaatgagtttaggcctgaatcgaagcttggaggaggtggaccttcttggtaaccgttttacaggggagataccaccccatctctgccatggacagaagttgagattgttcatcttgggttctaatcagcttcatggtaagataccagcgtctattcgtcagtgtaagacccttgagcgagtcagacttgaagataacaaactttcaggtgttcttccggaattccctgagagtcttagtctttcctatgtgaacctcggaagcaacagctttgaaggatccatccctcgtagcttgggaagctgtaagaatctcatgaccattgacctttctcgaaacaatctctcgggtgtgatacctccagaactgggaaatctgcaaagccttggacagttgaatctttcacataatcatctggaaggtcctctgccatcccagctatcaggctgtgcgagacttctgtattttgatgttggatccaactcattgaatggttctgttccatcaagcttcagaagctggaaaagcttgtccactttggttctcagtgacaataattttctaggagctattccacagttcttggcagagcttgaccgactctcagatctgcggatagctcgaaatgcttttggaggtgagattccttcctcggttggcttgttgaaaagtctacgctatggcttagacctcagtgggaacagatttactggtgaggttccaactacactgggggctcttatcaatctcgaatggctcaacatatccaacaacaagttgacagggtctttatcggttcttcaaagtcttaagtcattgaatcaagttgacgtctcgtataatcagttcacgggtccaataccagtaaatctgttatcaaattcttcaaagttttctggaaatccagacctctgcattcaaccttcttactcagtgagtgccataatccgcaaagagtttaaatcttgcaaaggtcaagtcaaacttagcacctggaagatcgcccttatagcagctgggtcctcactatccgtagtggctttgctttttgctctctttttggttttatgccggtgcaaaagaggaaccaagacagaagatgccaatatcctcgcagaggaaggtctttccttgttgctgaacaaagttctagcagccactgacaatctagatgacaagtacatcattggaagaggagctcatggagttgtttacagagcttctttaggatcaggcgaagaatacgcagtgaagaaactcatctttgcggaacacatacgctcaaaccaaaatatgaagcgggagatcgaaacaatcgggctagtcaggcacagaaatctcattcggttagaaaggttttggatgaggaaagaagatggcttaatgctgtatcagtacatgcccaatggaagcctacacgacgttttgcacagaggtaatcaaggagaagcagttcttgactggtctgcacggttcaacatagcccttgggatttcacatggactggcgtatctacaccatgattgtcatccaccaataattcaccgcgacatcaaaccagagaacatactcatggactcggatatggagccacacataggagatttcggattggctcggattctagatgactcaactgtttcaacggccactattactggcacaactgggtacattgcaccaggtacatatatttctcaacataacacgttcgtattttgttcaccgttaccttattcatgctctgatgaccgtattgctatcaaacagaaaatgcgtacaagaccatgaggagcaaggaatcagatgtttacagttatggagttgttttgctcgagctggtaacaggaaagagagcactggacagatctttcccggaagatgtcaacattgtgagctgggtcagatctgtattaagcagctacgaggatgaagacgatactgctggtccaatcgttgatccaaaacttgtggatgagcttctggatacgaagctcagggaacaagcaatccaagtcacagacttggctcttagatgtacggacaacaggccggagaacagaccatccatgagagatgtggtgaaagatttgactgatttgaaaagttttgtaagaagcacttctggttcagttcactagtttcatatg

SEQ ID NO: 163977 - DNA, 662 bp, Arabidopsis thaliana landsberg
ccacgtgcagtgtcgctgccgctgatcaagcagccgcacggcatcctgaccgcgcaggtcaacgatgccagtctgatgcagagcgctgactttattctggcagtgcgcgcccgcatgccactggagcagatgcgccatctgtttctgcaacaggccaaggtagcctcccagcaaacactgctggatcttatccgcctgcaactacccggtataccgctcagcccattgcctgtggccccgcggcacctgccgttccacgctggcttcacctatttccagctcgatcgcacctcagccaactgggaaaagctgatacccaagggcgccaacagtttcggtttccatatcagcggcgaattcccagagttgcagttgcagttctgggccatacggagtcaatgacatgaccacgaccatcgaaatcggcaacgaccgcgtcgaccgctctccgcagaagcctgatgtactgccaggccagttgccggcggctacgccgcaggacgacttcctgcgcaccggaccatccgtagacatccgcgacaaaggcagcatgctctacgattcggtattccgtatcgatcaggatgacgacctgcagttccaactgcgtggccatagcctcaatcctctcgtggatgccgcccaaccgttgctcggtgctg

SEQ ID NO: 163978 - DNA, 1380 bp, Arabidopsis thaliana landsberg
atggctcccaaggctgtagttctgcttggtctatttgcagctctaatcgtcgtcacaaaaattgccgctgcatccgctacgtaaatattaatgtggaaaccttattatatgtaagagaccatctcaactatttttatagcatgttttatatagagtattttcaatgttgtcaatattatttttaaaagtcaaaattaatttacattcgtatttttcatagttggtttaagagaagaaatagttttgaaatttgggagagtaatatcttatgaaattatgtgttgttttggataggtacagtgaagtcagagagtggggaaaccgtgcaacctgatcaatataatggcggtcacggcggcaatggaggctacaacggaggaggaggttacaacggaggaggaggtcacaacggaggaggttacaacggaggaggaggatacaatggaggaggacacggaggaagacatggttactgtcgctatggctgttgctacagaggttaccatggctgttcaaggtgttgttcgtatgctggagaagctgttcagactcagcctggtcactaaattaaacaatataataagttgaccaccatgcatgattgtacctagatatacacttacgtgtatatgactataggttaattaattatggtgcgtttgtaatgaagtgccttataagtaatgggaataaagtttcatgtaatgtctgtgtttaagttgtgatctgagatgtttgcataataaaatcttgtttgttgtttacactattatcttaagtttttgtgtaagagttttccattatcatactttctaggtcgaagaaaaacacctagagactctatcgaggttttgcacacacgtacctatacttccaaagttaactaaatatacgaaagtaccataaattatctcacatttgatgtgccaaaagatattggaaacttattgtgtcaggttacttgaggctcagaaatttgacccttttgtgtctcacaagcttgcactgactcggtgtttaggtttcagtgcctcccaacgaataaaaacagtcgctaagtgtagggaggagtagttgaatgccatttaatcagactggaagattggttaagagctgagactaaaaataaagtttgcatttatgtttaattatattgaagactaaatttgtaatattctaaacgatggtggtacatgagcaagagttaataaaaatttatttggttacttgtagcattaaagtatcatatttatacaacaactactgtacaaaccttttcaacagacttgcgcatcaatatgctggatgtcttgatcggacgcagtttgacaagattattgatagacctctgcgtaaagacgttgttatcttcttcagaag

SEQ ID NO: 163979 - DNA, 414 bp, Arabidopsis thaliana landsberg
ttggtagtctttatgttcagttgtggtttgtgtgttctttcccgttgtggttcatgtcagcttgtatgtagtatgctcttgggagttgtttatgttctagtgagtttttcatatccccttgtatccgttcaagatgttcggggtcgggtgatttcttggtttttcgtgtgtgtttgtggattccggggttcgagaagaggttctctctttgttgcccatagggttgtgggtgatgctattcgtgttgttgtggtttatggtatgcatcgaggtgaagttgggttttaaggttgtgtgttcggaagaggtgcggtatttcttgttatttgtagatgcggtttagttttttgtttcgttcgtgatgttccccctatgtcattgggtggttgtaggcctttttgataaagatgtgta

SEQ ID NO: 163980 - DNA, 342 bp, Arabidopsis thaliana landsberg
ttacaaatgatttaatgatcaaatgcacgcgttcgacgtcttggagatcccgtacggcgccgtcttctggaactgctcgcccacgggccggcgcccgccgggcagctgaccgcggccgtccgcgccgagttcgggatcagccagcccgcggtctcccagcacctgaaagtgctgcgcgaaaacgggttcgcgaccgtccgggtccacggcacgcggcggctgtattcgctcgacgccgaaccgctgcgcgcggttgacgagtggctggaccgctaccggcgcttctggcggcagcgtctggacgctctggacaccgaattgctccgcggtgcccgtgagacc

SEQ ID NO: 163981 - DNA, 6867 bp, Arabidopsis thaliana landsberg
tgtagaggtcaatctctgtgttactgtcgtccaacattccatgccagtttctccggttgctgttgcgtgccatgacttcaattctaacagtgaggacacagattatgactctgaagaagaactacaccaatttgcacttgaaagtgccttggtgggtgcaacgcaagacccaactccgggaggaacagagccagctacaagaagtagtacaaggacggaacttttccctacaggaggcgtaactattagaaagcctgaagactacattcgtcttaaaagcccggcatgtggacctacagacaaaggaaaaggcataatggacacaagtgataaggcagggcctgctggtcctagtaggcaaagtgggacagaagacagcgacagtgacgatgatttgcttatagtcccattcacaatgctacctaatctgccagctatcccattccagaaaatgttaatgcttaaggtgttgattcatcaagggccgcggttggaactccgactggccatcatgtatctcctactacaaatggtgtggaagaaactgcaattcaaaggcataacattcttttttggggtcgagcacaagaagcattaaacaccatactatctgatttcagtgatgatccaatcctattcggtcgagacgccccaccagtatttaatgatggaaaaggtgaaggtatatcctgcaatccgtctataaatatatacatgctttgctgatttatctgaatgcattggaagttgatagttcgtttacgtagtttatgttttctataccattctatgtagaatgattggttctatttcagtatcgtttatcatacatgtgctgaatgatggtcattgtgtttcaagtgtagactctgcattctttgatgttaaatatgaaggagtcaagcggtttgttggcagagtatttaagtccaagtctgattgcaagattaagatagctatacacgtcatcaaccgcaagtttcactttcgaactgcgcgatccactccaaagtttatggtcttgaaatgcatctctaagacttgtccatggcgtgtgtatgcttctaaggttgattcttctgatagctttcaagtgcgacaggcaaatcagagacacacctgcaccattgatcaaagacgtagataccaccgcttagcaacaactcaagtcataggcaaacttatgcaatctcgatttctcggtattaaacttgggccaaatgctgtgtgattaggaagttcctgcttgacgactaccatgttagtatatcatattggaaagcttggcgtgctagagaggttgccatggagaagtcattaggatctatggcaggcagctatgcactaatccccgcatacgctggcctacttgagcaagcgaacccaggcaagtctgtgctttacagagtatgatgatgagccaaatggaccacggtgtttcaagtaccaattaattgcatttgcagcctccattaaaggttatgcatttatgcgaaacgtcattgttgttgatggaacctctatgaagagccgatatagtggctgtctaatatcagcatgttgccaagatgggaatttccagatcttcccacttgcttttggtattgttaacaacgaaaatgatagtgcatatgaatggtttttttcacaagctcaacattatagctccagacaatccggatttaatgttcatatcagaccgccatgctagcatctacactggcttgagtaaggtgagaaacacagcaattttcattcagtcttttgtatattatacaagtaatgtctgatttgttgactattccaatcaggtatacacgcaagccaaccatactgcttgtacagttcacctttggcgcaatgtcagacatctgtataagccaaaaagcctttgccagctaatgtctgaagctgtcgaagcgtttgatgtcactgagttcaataggatatttctcaagatataaaacttaaacccaggatgtgctgcatatttagttgatttgagtaagtttgtttccttcttcataatattggtcatcaagcacagattgatatttactagttatagattcagttgtttacataaccctttatttttggtggatgtagggttttcagaatggattctttagagtgcattcaaaagtgcattcaaaaggtcggcgtttatagtgcattcaaaaggtcggcgtttcaatatcatggatagtaacatctgtgagtcatggaacaacgttataagagaggcacgggagtatcctcttatttgcatgttggagtacataagaacaaccttgatggattggtttgctactagaagggctcaagctgaagactgccctacaactttagctccgagagttcaggagcgagttgaggaaaactatcaagccgcgatgtcaatgttcgtgaagccgatttgcaactttgagttccaggtccaagtaaggactggtgaatattttattgtcaaaggggacgagtctacgtgttcttgtttggaatttcagggattagggagaccttgtgctcacgcaatagcagcagctgctcggcttggagttccaacagattctttagcagcaaacggatatttcaatgagctagttaaactaagttacgagggaaaaatctatccaattcactctgttggtggcaaggtcgcacccggaattgcttcaggaactacaggggaggtgcatccaccatttgtgcaccggccaccaggaagaccaaggaagataagaattttgtttcgtggtgaattcaaggcaagttcataaaagtaacacagattgttgtccattctgttttttaaaagctaacagctgctatacttctaattttcagcgcaagaagaccgcttcacagaggaggtgttcatgttgttgtggcacaggccacaacaaagcctcctgccgtaatgctatataagaagtcaactacttctatggggggggatattaggtgttatgatataactttctggtatgggctaaataacggttgttcccgcattgtttgcggaagcgagagtgtctacttctactaatgcacgctacgatacatttttcaaaatagtaaggtatatccaactgttgtgtatactttcttattttgattgttatgtgctccctgcaattcgtgtatatttgtgttgctttcatgagtcccgatgtaattaggaaatgccatgtaacaccgtttttgaaatgtatatattagaaaccccgcattttgtcgatttccacttatttggtccgtcttctaattgtttgcaagtttaatgatcgcaaattgtttacaaactgatgtaatctcgcattttatgatatcaaattgtttaccaaaatcaaaaactataccctaatactgcctaaggaacccaagcaaataggtttacgcactagattatgtaactattgcatttaaatgtaactattgcatttaacatcactactggcctaaatcataagcaaaccaaaacataatagtgccttatggaaagaagcactcattttctgatgcataccaaatacacctacaatagtctctattttaatgatctcaaattatttccaaaattcaaaaactaaaccctaatactgcataaggaacccaagcaattcggtatatgaactgtattatgaaactagtgcattgaaaagcactactgcgctaaatcataagaaacgcaaaccatattcgtgcataatgaaaccattcactcgttttatggaaattatgaacaaacagtccggttgaaatgatatggtttatgaagtttgttgtataaaccggattagtagatgaaatttcactggttcgtgaccttctatcagtttaatgtggtttattacatttctgattctatatgctgacttgaaaagtgtataggcagatggagggaaatagtctacatatgtctatactattccatttagccatatgctttctatttaatttcgaccactcattacacaacgcgcccacccgtcgtcgttttgatttgggggtaatctgtattttgggttcataccttcacttctcgtgagccaaattgagactgtccagttaaaagaaaatgggagatagagggagagggattccaagtcgatgtcgctgtggagaagatgtggttttgagaacttctaagaatgtcaaaaacccagggagactcttttatgcctgtcgatgtggagtggaggtaattatagggatctattagtattgttcactactggaacatgtttgacttctgtatttggtatgcatcagaatgttcgtggtcacttgtttaggtggacagatgaaacaatggtggaagagatggaagacatatttccgaagattgaaaaacttgaaggatcttcattgacattacaaaaaggggtacaagctgtagaatgcgagatggaaactctggccattgagactcggacatgtgaatctgttgtttccggattcgagaaggagttgcttaggttagagaatgatcttcaaggttgcaagatggaattgcgtggcttgaagaacattcttgtgtgtgtattgttgatgactcttgtttatatgttcctgttgtagtctttgtaattgtgtttcgtttctatttataggcctgttgtattaagttggttacccgttgttgtatgtattattcagataatgcacttaccaaagatttaaagaagttgagtaaccataatgtggggaaaaaatatcattttggttacaaaatccttaatcaagaattcaacataacatgaaaatattatcctatgtatcttattatacaaacattctgcaatcttcttaagaacatcactattaattggtgaatttaaaaacaaagagtcactgattacataaaaacattcggggttggttggcggcttttgcacttgaagactcaagcagaacgttcttctggagacaatgtattgaaagttttgattgcatattgtttagcggcagctcgcatcatgtcctcatctagtttcccacaaaactccagtgcgttaactgaatgtagctctagtaagataacacatgaaattccaacaagacctgaaaatcacacgtgaaatatatatgtcacacaaatcaaattgaaatacttatcgaaacatgatcatgaaagacaactgatatgtctataatttgcatgttttcagtgtccattcatcatcgttttgagtccagtttcgtatcattcatcactgttttatataatttctcatcattcttgtatattttgcatgattaggatagctttgcatagatattgcatttctgagttgttttcaggtgatttggagctgtttgcgagcaaattggaagaaacgagccaaaaacagaagacatactcgacccccaggtcgagtgactatggagccattcttcccacatactcgaccccctggtcgagtgactttggagccattcttcccatctgctcgacccccaggtcgagtaacttcagctcaggccactcgatgacgccactcgaccccctggtcgagtatcacttcgccacaccaccttaccacactcggccgttcactctaccactttactcgaccccctggtcgagtatcatcactcaccatcaacatcatcactcgactggacactcgatcacatcttcatagtctactcaaatccgcactcaaccagacaagctgagcaaaaggaagagaagaggagaagacgaagtgtttggaagcggcctggacctccatcggatcacgaagcccatctcggcccattatcactctatgggccgggcgattaggttattggcccgtctactatcattttatttcgttttgtataaatagatgtcttagggttctgtcctgagacatctagtcgacattgagtttttgcttcagttttattttctgttttactctgttgcgccgcttttgcttctgcaaccagtaattcgagatttttccaagttattcagattccgcatttgatttcatctgtcatcttgtttctctactctttatctctttacttatgcaatattatcatttatctgtgtttatgtctttgagcatgttgtttgagtagtgacatagagttcttaaggatgggatagagtagttgtggaatccgtagtctgtagaatggttaagtttagaattgattgaatccctttaggactagttgtgttgactgcttatttctttctgatcaactggaattcgatcccaagcattcccgcatctagaaggtgttcgatggaatgtttgatccactagttcctgagatatttatctctatcccaagggattggccgtttagagcgtttattgactttatcagtctgttcttattgcatgcatagttagattccgtgaatgggaattagtaagggctagctttgcttgaggatttctatcacgagagtgaattgatctgttgttgaaccagttgtctagggatagcttgattgcactttttaaccattcgaataggctaggatagctctctaattgattaccccatccttaggaatttctcgtctatctgatttctctgttttatcgttatcgcttaatcgttctcattacctgtttcttcgttttgcaattactcgaccaacttactcgacctcacccagtgtctggcaacagactgtgcagttgagtacagttgtctcgtttcctgtcccctactcgactagtatactcgaccacacccagtgtctggcaacagactgtgcaatcgagtaaaactggatcatatcctgtctgttactcgaccggttactcgaccacatcctgcttctggcattagcttgttgtggtcgagtgattttaataattctgttattgtttctgttttctgcat

SEQ ID NO: 163982 - DNA, 285 bp, Arabidopsis thaliana landsberg
acattagtattcatcgcttttgttttgtcgtctttggctccgaccaaagcagtggtggttagagtcgaggaggaggagaaagtggtgtgcatagtgacagatcttcgagtatgtctgccggcggtggaagccggaagccaaccatctgtgcaatgttgtggaaaactgaaagaacaattgtcgtgtttgtgtggttatcttaaaatcccatcatttactcaatatgtttcatctggaaaagctcaaaaagttttaacaacttgtggtataccaattcctaaatgt

SEQ ID NO: 163983 - DNA, 413 bp, Arabidopsis thaliana landsberg
aattttttgtgattttggcgggaaaacttgattttacggttttgcgagaaaatgtcgtttacggttttggcgagaatacgtgattttacggttttggcggaaaacactttttgtgattttggcgagaaaacgtgattttacggttttggcggaacaacgtgattttacgattctggcgggaaaacgtgattttacgattttggcgggaaagcgtgattttacgggtttggcgaaaatacgtgattttcaaatttggaaggaaaacgtcattttacagttttggcgggaaaacgtgattttacgattttagcggaaaaactcgattttacggtttggcggaaaacagaattttacgtttttggcggaaaaacgtaattttacgtttttggcgagaaaacgttattttacgattt

SEQ ID NO: 163984 - DNA, 555 bp, Arabidopsis thaliana landsberg
aaacttgttggcccaaaaacttcaacaccgcttgatgcactcccttgagatgtttttttcaaaaataatggggaacgtaggccaaaaatcttgtgccgatgttagaaattgcctactcacttgcaaggaactcgtaaactcagctgatgatgtctaagtttttaaaaatttgaaacaacataagcttctaaggaagtcgttgcttgctgtcgggaactacactgatctaatggtgaaatgtcggctccatgctaaccccaccgcgcaatacgtttaacgagtttttgattatttttattacaacaatacaattaatgggttacattttttgcaaaatatgatcgttatgaagattttcacaattgcattcttgtatgcaaagaactaggtgcatcagcaaatgataaatgcgtgctcaaaactcttaatcttgctccgttggtggattaatcgttctcggcatgcaaataccttcttactatgaagaaatatcttgacaacaacaacccaaattctcactacaaaaaatgtataatacgctattttgtccttgat

SEQ ID NO: 163985 - DNA, 719 bp, Arabidopsis thaliana landsberg
atggggaattgtcaggcggtgaatgcggcagtgctggttctacaacatcccggcgggattatcgaccggtactatagctctgtatccgtcaccgaggtcatggctatgtatcctggtcactacgtctctctcatcattcctttgtcagaggaggaagagaagaatattccagcgacggagaagggagatgataagaagcagaggaaggctgtgaggtttacacgtgtccagcttctccggccaacggagaatcttgtgctcggtcacgcttaccggctcattacttcacaaggtttcgccttttgctttctttctttttttttctcctcgtgtgtgtgattggagtttatggttttagatggttattgtaattttacagaagtgatgaaggtgttacgggaaaagaagagcgccaagacgaaaaaacatcagattgagaagacaaccacggcgaagaagttctcggacaagaaagttccggtaaagacatgggattttgctaaaagatctatctttactctgtttttgaattgtgacgtaaaaaactgtgacctctttcgtctaaatgatcgatagacgaatcaagttaatgaggtttgtgttttatttgataggagaagaaacaagggaagcaatttcgtgttataaggaattcaacttccctcttaaagtctaaaacatggaggccgtctcttcagagcatctccgaagctactagc

SEQ ID NO: 163986 - DNA, 586 bp, Arabidopsis thaliana landsberg
acgtcaaacttgtccccttctcctacaaactctcttcgtcttccacatttttaagtctctctctagctctctctcactcactctctccacatatatgtctcctataagtcctcctgccagtggggttgggcttggctacggtatagccatcgccgtaagcatcttggttctcatatcttttataatgctggcctcatacatctgcataaggtcaaaatctacaggaagagacgaagccacgagtgacgtagttcttgacttgccgtctgccgcggctgaggtgaagctcggtctagaccggccagtgatagagtcatatccaaggatagtgttgggagatagccggagattaccgaggcccaacaacggcccatgttcgatatgtctatgtgattacgaggctagggaacccgttcggtgtataccggaatgtaatcactgcttccacactgattgtgttgatgagtggctccggacaagtgctacgtgtcctctttgtaggaactcaccggctccctctaggctagccacacccttatccgacttagtcccactcgcctttcaaatcaggtgaaagttaaagacc

SEQ ID NO: 163987 - DNA, 209 bp, Arabidopsis thaliana landsberg
atgaatgaataagaacaacattgagttacatttgtaccttcggcttgacagaaggcaaaggtacaaacgtgacgcacgagcgaagacaagtcagcgtgagcagtacgggggtattgttcatctatttataggcacaggacgcagcctgtgtgaaattacatttatgcccttcatgtttactattgacttaagaacaatctgtcggggac

SEQ ID NO: 163988 - DNA, 511 bp, Arabidopsis thaliana landsberg
  unsure (1)..(511): unsure at all n locations
caggttcttnnnnnnnnnnnnnnnnnnnnnnnnnnnnnnnnnnnnnnngagaagaggaagcataagctcaagcgtcttgttccatcaccaaattcctatttcatggtaataaaactttgaaacctttctccttatttagaatcctgtaaaaaccaaatctctctgtttagaaactgtaatacttcaagttttttaatcggattctaatttacttgtatgaagtttatctactctttctgtggactctgatttttgtttaattttactgtagcttgttaggtgctctgactgtatcaacatgtaagatttgaaatcaatattttcctgttacataagataaaattaagaaacttaaaacttattatgggctttgttcttttactgcagcacaactattttcagtcactcacagacagtcgtggtatgcggaaagtgtcagaacgttctgtgccaacctacaggaggcaaggccaagctcacagtaggatgctctttcaggaagcttaccgat

SEQ ID NO: 163989 - DNA, 554 bp, Arabidopsis thaliana landsberg
ttccaatactcagtaagaagactacttagaaaatgtaaatgtggtgcagtgtctgtaatctagattgcatatacattgaagaacccaaagattgaattgttgttcgtatggcttaaatgaggtaatgctgaaatcgatttgtgaacaaaagagaatatgtgattaatatcattaacataatactcaattttgctgtacgataatcgacatttgtttcaaatggaccgatatagctatggttgaagagatggaagaggttgagagtgttgtttacaagacacaagtagatgtgtgatccttagagaaaggtttatatgatgtgggagctgagatggagagtctagcaggtgagacacgcacatgtgtgaccatatcaagtagctatggaaatgagattgaagtcatcaaagcatttttaaaaggatgtgagaaggagattggagagctcaaagccatgaacttttgtagtaagaaagagattcaatctcgacgttacttcaaaaattttatcgggtgtagtttagttatggtttgtagtctatgttttcatcttt

SEQ ID NO: 163990 - DNA, 208 bp, Arabidopsis thaliana landsberg
atggataaacgagaataatattgaattacatttgtaccttcggtttgacagaaggtaaaagtccaagcatgacgcacgaatgaatacaagtcagcgtgatcagtacgggggtactgttcatctatttataggcacagggcgcacgtgtgtaaatttacatttatgcccttcatatttactatttacttatgaacaacccaacgaggac

SEQ ID NO: 163991 - DNA, 275 bp, Arabidopsis thaliana landsberg
atctagttaataattgtaggtcatgcatgtatcattttgaggaaggtttctgaaattctaagattttacatatatatgtgataaatgaattagcagcatgcggtggaaagtgcattgtgagatgctcaaaggcaggacaacatgaagaatgcctcaagtactgcaatatatgttgccagaagtgtaattgtgttccttcgggaacttttggacacaaagatgaatgtccttgctaccgtgatatgaaaaactccaaaggtggatccaagtgtcct

SEQ ID NO: 163992 - DNA, 893 bp, Arabidopsis thaliana landsberg
atggggacagctctgggaaagccatttgccggttttttccaccaagaagaatcgaggatagtgttgttcggtctcgacgctgccggaaaatcatcaataatgcacaaactcaaaaccggagaaacccttaccacaaccatgcctactattggtaaatctcattatcacttcttttctttctgatattgaatctagtcttctctatgaattcctgaatcactgtttctaggaacggatgtggaaagtgtaaaatacaaggattcaaacttacgcttttgggaaatgggcggccaacaatgttacaaggtaggagaaagttgttaatttttataaacagtaagatcatatctgattatgggtgattcaaaaaaacatttcagtggtttccaatgacgaaacatgacttccaagaaatagcggggcttgtgcttgtagtcgatagcacagacagagatcgaatagaagatgcgaaagattttcttaatgcggtaattgatgaggtaacaaacaagacctgacttctctaaacattgagcaagtcaaataatctaatgtttgatgccgtgtataacagatacaagggagtgtaccggacaatgtggctgttcttgtatttggaaacaagcatgaagttcctggtgctatgtctgcttctgagatcagtaacaagcttgatctcacttctcttcgtcaaaaaaactggcagagaaactggtaagaagataagaaaaacctttcaagtctctaattttgcgaatatgatcgattcttctgatgatctgtcccttgattcttgcttgctaggcatgtccagagaacataaagcattctctggtgatggtttacatgaaggactcgtctggctgttatacaatgctgaaagaatgtaagaa

SEQ ID NO: 163993 - DNA, 463 bp, Arabidopsis thaliana landsberg
gtctccaaaaagttagacgaggagcaaatcaatgagctccgggagattttccggtcatttgatcggaacaaagacggaagcttaactcagctcgagctcggtcacttctccgagcactagggataaaccaagtccagaccaattcgaaacgctaatagacaaagccgacactaaaagcaacggactcgtagagttcccggagttcgtagctttggtctctccggagcttctttcgccggcgaagaggacaactccttacacggaggagcagcttctccgattgtttaggatattcgacacggatggcaacgggtttatcactgcggcggaattggctcactctatggctaagcttggccacgccttgacggtggcggaattgacggggatgataaaggaggcggatagcgatggcgatggccggattaacttccaggagttcgcaaaggctattaactctgct

SEQ ID NO: 163994 - DNA, 291 bp, Arabidopsis thaliana landsberg
attaaaacaataactattccctacgattctgccgaatttgtagagacggaagaagatatggcggcgtatttggaagcatgtctggaggaaaatgatcccgctttgatcgcgcatgcgttgggggttattgctcgtgccaaaggaatgacgcagctttcgcgagagaccggaatcacccgcgaaggactttatcgtgcgttgtctaaagatgggaatccggagtttgcaacagtgctaaaagtattcaatgcgcttgggttgcgcctgcatgcttcggcgaattaacatcta

SEQ ID NO: 163995 - DNA, 300 bp, Arabidopsis thaliana landsberg
atgaacacagcccgagccaatcatgagaacgctgcgggaaacatctatgtcggctcgggagacagccaactgagcttaacggagtcatcaagcgcgccccgagccggtacataccgtttgccccgaagccacctctcaaacgaccaccgagccgtgaagaacacgcgaggcaaagacttgtaaaaaccgttcattctccaaggatcatttccggtaaaataggatcttttatgggactttcggaaatgataaaggagaatctttgaagataatgtcgaaatcaggaaatctccccaaaac

SEQ ID NO: 163996 - DNA, 345 bp, Arabidopsis thaliana landsberg
gcccgaacggttgcccgagccatgtccctcacgtatgccgtcatcgccgccctgaccatcgccgccaacgccggtgtcgccgccgccgacctcgcgggggcgcggttcgtccgcgccaacgcggccgaggtcggtgtgcggccgccctgggtcccggtgctcgccgcgctcaaggccgccggagccctcgggctgctcgccggactcctgggcctgtggcacctggacgtcgcggcggcggccggtctggtgctcttctacgccggggccgtcgcggtgcacatccgcacccgggtcctgcacaacatcgccttccccggtgccttcctggcgctcgcggcggcg

SEQ ID NO: 163997 - DNA, 251 bp, Arabidopsis thaliana landsberg
atcgtaaaccgacattttcccgcaaaaaccgtaaaatcacgttttcccaccaaaattacgttttccgccaaatttgaaatcacgttttcccaccaaaatcataaatccgcattttccgctaaaattgcaaaatcatgttttcatctaaaatcgtgaaattgcatttattaccaaaaaaaacattttcccgtcaaaatcacaaaaaagtgttttctgccaaaattgaaaatcacgtttttcgccaaaagtgt

SEQ ID NO: 163998 - DNA, 328 bp, Arabidopsis thaliana landsberg
attggtacgctggcgggttggttgacggccaatcgtgtacaaatgaccaaaatgcctgaattagtatcactatttaatggtatgggaggggcttgtgcagccttgattggcattatggaatacgaacataatataggtaaaacaggcgctctggcaacgattatagccggaatgattataggctcggtctctttcagcggaagtatcattgcttttctgaaactgaatgaaaccatgaaaaaacctatcagacttccgtcttataatattctgaatacaatagtaatggtagccttaattgctttcggggtatacatcgtttatgcgc

SEQ ID NO: 163999 - DNA, 416 bp, Arabidopsis thaliana landsberg
caataccaaacatattggcgggaaaatatgattttacggttttggcgggaaaatacgattttacggttttggcggaaaaatatgattttacagtttgctgagaatacacgattttacggttttggcagtaaaatacgattttgcgattttggcgggaaaacatgagtttgcggttttggcgggaaaaaaaaaatttacggatttgcgaaaacatgattttatggttttggcgggaaaacatgattttgcggttttggcataaaaataagatttttgcggctttggcgaaaacatgattttgcggttttggcgggaaaatataattttatgattttaggtggaatagcgctttctataattttatatcaaaattatgattttgcggtttttggcaaaaaaacgcaatttcacgattt

SEQ ID NO: 164000 - DNA, 362 bp, Arabidopsis thaliana landsberg
gactcttcaacgaattctccgtcagcagccgacatactagcagcttgcagcactagaccacaagcctcggccgtggctgtagccgctgcagctctgatggacggtggaaggaggctgcgtccacctcacgaccatcctcaaaagtgtcctcgttgcgagtcaacacatactaagttctgttactacaataactacagcctctctcagcctcgttacttctgcaagacttgtcgccgttactggacaaaaggcggaactctaaggaatattccggttggtggtggatgccgtaaaaacaagaaaccatcttcctctaattcctcctcctccacttcttccggcaaaaaaccatccaacatcgt

SEQ ID NO: 164001 - DNA, 525 bp, Arabidopsis thaliana landsberg
tctgcagatatgagtgtagaaatctcgagtgttggggaagaaggaagtgggaaccgtgggtttccttcaaagtgtcgttgtggtagacatgtcgtcatctatacatcaagctcgaagaagaatccgggaagaccttactttcgatgtccaacctatcaagatgtaagtagatttgattttgttttattgtttttggtcataagtaaataattgtcgatggaattacaagaccatttgtttaaatgggttgaagattgtgtgtatgaagaggttgtagatgcaataccgagaatctctatcattgacagcgaggtaaacaatgccaaatcggaagttgctgtcgagattgctgaattaaagggtttgatccaagaattgaaagaatattatatgtggatcaaaagagaattgatgagatggaaatcgctgaccaaagtgtgcttggtgtgcctttgtataattttcattgcaattgagatcataatgttctacaagaccaaaaatgaggaacttgttcttggttac

SEQ ID NO: 164002 - DNA, 593 bp, Arabidopsis thaliana landsberg
  unsure (1)..(593): unsure at all n locations
ctagcgaaaaggtctataaaaaggtcaaactcatcatcttctaattgctctttatctctctctccaactttacctttaacaaaaaaaaaatggcaagcgcgaatccagaaaccgccaaacccacgcctgcaacggtggacatggctaatccagaggagctnnnnnnnnnnnnnnnnnnnnnnnnnnccaacggcgacggcaagatctcagtcctcgaactcggcggtgtgtttaaggctatggggacttcctacacagagacggaactcaaccgcgtgctcgaagaagtcgatacagatcgcgacggttacatcaacctcgacgaattctcaactctctgtcgctcgtcttcctccgctgtagagatccgtgacgctttcgatctctacgatcagaataaaaacggactgatttcgtcctctgagatccataaagttctgaatcgtcttggtatgacttgctctgttgaagattgtgtgagaatgattggtcatgttgatactgatggcgatggaaatgttaatttcgaggagtttcagaagatgatgtcgtcgtcttctctcctcaacagcaatggatccgccgctcctcct

SEQ ID NO: 164003 - DNA, 417 bp, Arabidopsis thaliana landsberg
caaatattagttttttatatttataaatttattttatgtttttggcgggagaacgtgattttacagttttgacgggaaaactcgattttacggttttggcggaaaacaaaattttacgtttttggcggaaaaacgtgattttacgttttttgcgagaaaacgtgattttacgttttggcgggaaaacgtgattttgcggttttggctggaaaacatgattttgcggttttgacggaaaaacgtgattttgcgattttgacggaaaaacgtgattttgcgattttgacggaaaaacacgattttacggttttggcgggaaaacgtgagtttgcggtttgggcgggaaaacagaattttacggttttggcggaaaacggaattttactgttttaacggaaaaattcgatactgcggttc

SEQ ID NO: 164004 - DNA, 450 bp, Arabidopsis thaliana landsberg
aagatagaaaaaatggaggatcagataacacaacttaaagatattttcgaccggttcgacatggacgcagacggaagcttaacaatcttagaactcgcggcacttctccggtcactcggtctcaaaccttccggcgatcaaatccatgttttgttagctagcatggactcaaacggcaacggttttgtcgaattcgatgagctcgttggtacaattcttcctgatcttaacgaagaggtcctaatcaattccgagcaattactcgagattttcaaatcgttcgatagagacggtaacgggttcataagtgcggctgagcttgcaggagcaatggccaagatgggtcaaccattaacgtataaagaattaacggagatgatcaaagaagctgatacaaatggtgatggtgttataagctttggagagtttgcttcaattatggcaaaatct

SEQ ID NO: 164005 - DNA, 279 bp, Arabidopsis thaliana landsberg
  unsure (1)..(279): unsure at all n locations
ctggaaggaactttctctgcagcangnacagacaaaagcacgcggggagcggggaaaaaacaacccacccccaacgccgaagcaggagcaaccaggacagaaacaaagcacggggccgaaccccccccaggcgacaaggcaacagccacgaacagacaccgaccccccggaaaggacaaaagaacgggacccacnccgggacanacaacgcaccacagacagangancannacgccccaaccgggcganncnaccccaccccccagaaagaaaagaacc

SEQ ID NO: 164006 - DNA, 1113 bp, Arabidopsis thaliana landsberg
ctaagcttgattaagtcaaaattcttttttgctacacttctagttgagccaacaaaaatgatgctaaattatattattcgaagaaaagccattatctcgattgacccttcaaataatttgaccgttcagagaaaccattgaatcttgatcgtctcagaccttttcacataatatgtatagaccaattcaaaaattgttttatgtttagttagttcaccgttattaaatcaataaatttgatttaaaaattagcacgtacgcttaaaactctttaaaaattgaagcatgattaggtcattgtcctggttgtatatttttcgatgatttaatctgacttcaggtcgagcaagggactactacttctctttacactataatttttttttttttttttacagaacctaccaatactttaattttttattttgttccaaagtctgatcaacattacaaagtcaaagtattagtttattccaacaacaacaaaattgttatgattaacaaattccctatataacctatatataaagccatatcttccaaacgtacataaaccaactcgcgcgttcataaaatagtctatacaaaaatcctcttacacttaatcttcttcataggaaatttgagaggattaatgtctcaatcacttttcaatctcaaaagtttatctcgctcgatcaacaacacaatcagaatgtaagtctatccatttgtataaaccttatggttttagaaaatactgtatattggttaattcttttgaatatgttgcgttgtaaactaaatgagaattctttttttttatataaatattattctaggagaagatacattgtgatcacaaaagcctctcaaagggcatatacaattggaagtagtcaagagaagccatcgtgggcatcagaccctgataccggatactttagacccgagaccgctgcaaaagagttagatccatacattgcaaaaacctctcaagttcaaggtaaaatgatgagaggagaagagttatggtggatgcctgatcctcagaccggatactatagaccagacaattttgccagagagcttgacgcagttgagctacggtctttgcacttcaacaagaatcaa

SEQ ID NO: 164007 - DNA, 589 bp, Arabidopsis thaliana landsberg
atgagaaaaggaagttaccttcgccgacttaaattatctcacaatatcaatgtcgatggttgttaatttttccgaccaagcaattactatggaaagtctcggaatctccgggtcactgtttcttgaattggttaatattactgtgcaacgatctctctcccttcaaacaaaacctctggaacaatttaaattgagttgcctccgccttaaccaaggcattgtgacgatgttttttgcagcgaattaaccgccactgtgattggagagatgacgtagaagtcgattaggaatctccccctgattcgggttatcgtttggatctgactctgtttctgcatcgtctcctccggaagaagttttaaaaaggaaacgacctacaaggcttgatataccgattggtgttgatggatttgtagctccgattttttcatcgcccgatgtaactgtgacgtcgagggaggaatgtagagaggttgaaagagaaggtgatgattattctgtttattgtaagagaggaagaagagaagctagagaggttgtatcaagttgggctccaatgataatgttagatgagcaaacaaaaaagtgc

SEQ ID NO: 164008 - DNA, 3104 bp, Arabidopsis thaliana landsberg
  unsure (1)..(3104): unsure at all n locations
nnnnnnnnnnnnnncgtttctcttttttatcgacgaagcgaccgaggatgagcggactcggacggcggactcggtccgagtcaaaagagtgagagacgagacaataagagaagctattaccgagatgaggagagtgaacagcgagctgagcgggaagagagagacgtccacggccgaatccagcgacgccgataggttcagcgagagtggtgtgagcgcagccgaaggtgaagttagagacggagacggaagggagagagagtgagtcggagtagagttttgcgacgagagagccgtcaccgtaagcgtagtagaaaggaggacaagggtaagaagaagtgttgcaatctccggtttcgatgaaatcaagaggacagttggagatagcgcagaggtcggaggagggaagggaagagtgagcggcggagcaagaaggggaggagcaggagacggtggtggcggaggaggagagagatgaaggaggagaaggagggagtggtttggattcacagaggatgcaagtgaaaggacggcaagggaaccaaacgaggtcgcttccggtgtccaagtacaaggagacggctgaggaggaggagccgacggagagggagatgagataatcgctgccggaggagatagggagtgaaagttgttgttgttgttgtttgtggtggtggcggcggaagcgggcggaggaacgggaggaggatgatttgagaaggtggagaggagatgaagagtgttttgaggttgagagagagtgggagagatggaggagaagaggtgttgataatgatgacacagagaagtgggaatagtattggagaattgttgtgtagaggaagaagatcaaacaagttttcatggtggataataaaacagtggagtccaaggaatggttttgaatttttgaagcagaggaggtcgagtgtttttataggacagagcaaagacatattgtgagacgattaaaaaataaattattgttggctttcatttcagcaaatatagatatttatggttttgacaaaaagatatttacataattatttgggttggctgattttcgagccataaactatttcgattctcagctttcacccccggacttttgggcccttaaatttccaccatcaactttcatattcccaaaattacatcatctactttcggattcatgcttaaacatacattttcaattgaaccattcatttaaccgggattaaccacaaatccgcgtttactgtaccgcgattgtgattaacccgactaatacccagacccgttaagaaaacgacgtcgttttcatttcgtttaactcatcaaaaagaggaaaaaaacgacgtcgttttcattcttctttaactctcaaatcgatttggtcgttcttctttaatctcgacactgtgaaattagggttcttgagagagaaagacaaaaggggatttggggttttcttcttcgattcgaatttctgggtctcgatttgggtttcgaatagggagaaatgaagaattggtgggaggaaggattgatttaccaaagcgatccagatgaccccgatttcgaacctccagagagtgacattgaagccgacgatggaagtgatagtggtgatagcggagtcgaggaggacgaagccaccggagttgagggagacgacgttgggatagatggagacagagaatctgatggagaggagaatagagaagacgatggtgacatagcgtctgatggagacgtcaatctagaagacgatggagacagagatgaaagtcaaaagaagaggacgagagaagagaaaagaaaggaggaagaggctgaagaaggtcaaaagaagaagagaaaacagaagaaggatgagccggaagaagatttggccgagaggtttgagttcgagatagaggaagcagtagctatgtggtatgatgagttaaagattagaaggaacgaaataccagaaagtgataatgaagaagaagatcctgtgatcactagagataggaagattagattagcttcggatgataggttagctataggcagaatattcttcactggttttgaattcaaagaggttgtcttgcattatgcaatgaagcataggataaatgctaaacaaaataggtgggaaaaggataaaattagctttagatgtgctcaaaggaaggagtgtgaatggtatgtctatgcctcatactctcacgagaggcaattgtgggttttgaagaccaaatgtctggatcattcttgtacttctaatggaaaatgcaagctgttgaagaggaaagtgattggtagattgtttatggataagctaaggttgcagcctaatttcatgcctcttgacattcagaggcatatcaaggagcaatggaagctagttagtactattggacaagtgcaagatggaagacttctagctcttaagtggctgaaagaagaatatgcccaacagtttgcacaccttcgaggctatgtggcagatatcttgagtacaaacaaaggatcaactgcaattgttgataccattagggatgcaaacgagaatgatgtcttcaaccggatttatgtttgtcttggagcaatgaagaatgcgttttacttctgtaggcctctcattgggatagatggaacatttttaagcatgcggttaggggatgtctgttcactgctatagctcatgatgcgaacaaccaaatctatccagtggcgtgggcaactgttcagtctgagaatgcagacaattggctctggtttttgaatcagctgaagcatgacttggaactaaaggatggcagtggctatgtggtcatatcagatcgttgcaaggttagtattatcttatgtctgattgtttaattatgtatagatgatagtgctttatagatgctaatgtgtttgtatttgacaggggattattagtgctgtcaagaatgcattgccaaatgctgaacacagaccttgtgtgaagcatataatggagaatctgaaaaaacgacatggttcattagatttgctgaagaagtttgtatggaatctagcatggagttacagtgatacacaatacaaagctaatctcaatgagatgagagcttccccca

SEQ ID NO: 164009 - DNA, 2488 bp, Arabidopsis thaliana landsberg
gaaccatgcatcataaggtttatccatatcagccatcctatcaaatgcaactttatacttaagtgcacttttcaacatcaagtaggtagaattccacctagtaacacaatccaataccacacttcctcttgttatcttctcaacctccacccaacgcttaaatgattccagcctttaattagaagacctcacatattttacagcattacgaacacttacgatgctattacttatatcttcaagaccttcattggcaatcaagttaagaatgtgtgcaccacaacgtatgtgcataaaatcaccattcatcatcaaagcatcactatttctgttacttagcctctctttcaaaacagtaatagctttatcattggcgcttgcgttatccactgtgatagaaaatactttctcaataccccaatcatccaaagatcttaaaaactgattggcgatggtctttcccttatgatcaggaataggactaaaactaataattcttctatgcaattgccaatccatgtcaataaaatgagcagtaacgaccatataactcaatgtcgtaatagaagtccatatgtcagtggtaaatgacatggcctgcctatttcgacttaaaatagtcttcaatgcagttttttcagctctgtacagaccaacaacatccctagtaattgttcttcgcgatggaatagtaaaccaagggacagccatctcacaaaaatgtttaaacccatcattctccacaaaagaaaacggcaactcgtccatgataatcattttcaccgttgcttgcctacacacgttttgatcaaaaggttttatcatgccagcaccattaccaccaccactagagactatgacattctgagaattagattcaagatgatccaaataagctttgcactttctcatgtgtgtattcatattgctggttccacatgtagcaggattacatgaatagattttaccacaataattgcatgagcaactattatcatcatctttcaacctcgtaaagactttccatgctgttgatcttgtaggtagttttctttttgcctttggcgacactgttggagactcgggttcttttcttttattgctagtcgtgtttcttttagacatctacaaacaaaacatgtataaaattgttagtcaattgaaagaatacaattacgtttctattaaagcatctttcattattagtaaactaaataaacatgtttgatctgttttcttgcacgaaaatccattgattattggtatgaatgctaagatatattatatatattgtaaacaaacaaaatcacccaacctacatgaaacctattcttaaaaattaaaaaatctaagtaaatagaagaaacaagacaacgcaaacacagatttttcttttccatgactttgcggtgtacgtacagattgaaaaaatcatcatatactcataatatttaattaaaattgagatgagcgtaattgtattgctagagagtagttaaaaatcataccgtggctgtagagagtagagagagacgacggaagaacaaatgaaacgaagttagaagtaaaccttaggtttttactttttagggttagagttttagttagagataaataaatatttagagttatttgtaatattatttatagaattaattaattaagtatataaagacattgggttgtcggttcggtttggtttcgaacaaaccgaaccgacccatttgggttgagataaaatacaaccgaatagtttgagtctaagattggatttggtttgggtcggttctgtggtcggtttggtttggttaaaatgtccattcctcaattagcagaattttttgccatcaaactagttacaaattataggttcggtaggttcctttgggtagttgggtttaatgatttacacaacaccgtcaataaatttccctttgcctatgaccaattaatgacggtttaatctctttttcctttctttccctataaaaaaattctcacgtgcgtctatcgaaattacactagaattttcttttttccatgagaagtttttttctctccggctaaaggaagaagagaaggtaccacaatgcctcctcgcacggcaaaggataaacaaaaccccaagctcccaccggaggtgactcgcctactctacattcgtaaccttccttttagcataacaagcgaagatatgtacgatcttttcggaaggtacagtgcgattcgtcaggttcgaatcggttgtgaaaagggcacaaaaggcacggctttcgtcgtatacgaggatatctacgatgctaagaaagctgtcgaccatctctggcttcaacgtagcgaacgggtaccttgtcgtgcactattaccaacatgcgaagatgagcaagaagtttgaccagaagaagagtgaagatgagatcaccaagttgcaggagaagtatggagtctctaccaaagataagtaattgtccttgaattcgatcttctt

SEQ ID NO: 164010 - DNA, 391 bp, Arabidopsis thaliana landsberg
catgacgactctaactcctcccgaagttcctttcgacatagcttcaacgccgccgtcttcgttcgattacgagctcatctccgtaaaaccatcctctttcgtagcttacacttctctcagagatatcatctcttctccgattaactcttcactcaatttaccgtcgatcaacggtagctgctctcctgttatatccaccgccgccggagatatctcgattcgtaatcgtctcgttaagcaagctgctttgtcttatcttcaaccaacggtgcttacttcgtcggatgattctgctggttctcaattcttccgtcgtgtatggtttcatttatccgccgggatgcagttcttgcgacgtgtgtttgattggatttttcaatcgtttcgtgtt

SEQ ID NO: 164011 - DNA, 304 bp, Arabidopsis thaliana landsberg
cttggttctctttgaaatagttgggttagaggatataaattctataaggtatcgatgtttaattgatggttcatggttcatggaaagagagtgatacttttccgggtttaggatggtttagtacactacctattgatgatgagccaacaatgggcgcatctaaccatcgacgaagtttaacatgtctacaaacagaagttaaaacactcatttgggctatgagatgtatgattgccaagataagcgagaagtgagtttccttacaaattgcttaattctggtgaaggtgtcttctccggatgga

SEQ ID NO: 164012 - DNA, 474 bp, Arabidopsis thaliana landsberg
tctagaaaatgcaatatcatgattaagaaaatcttcatgatgaattcgtctaacataaatttcctaacaattttctactcaatgtttataatcatctttatagtattgatatctttgataggctgtgaaactctacaacatgatggaaaagtatttccaatgaaaggtcctcttactagggttgtgatttataatgacaatgattatcttttaggagttcattgtaaatcaagagatgatgatcatggcttccatattctacaaaaaggtggattatatggttggatgttttccgtgcattttatgaattcgacactctacttctgtggatttagcttagaacaagtaaaaaaaggtgtgttcgatatttataaagcggttagagattcttctagatgtagaaattgtacttgggaagcaaaggaagatggtatttatggatatggcgagattcctaagaaaaatcctttgttt

SEQ ID NO: 164013 - DNA, 1749 bp, Arabidopsis thaliana landsberg
atgcattgcttgattcacgttccagaattaatgaatgttaaagggattggtagatttgaaagcatgtgtaggtcgagtataagagacggattgattgataacaaggcatggctaacgtttttgagtaaaattcaatcatatcgcatcttaaaactaccaacttggacattgattttatttgctctatcagatgctttggttctgagtccccaccttcaaacctctccttcaactatgtcttcttatttgcttgagggcaagcaaagactaagttttgggggagttgatatgtctataatttgcatgttttcagtttccattcatcatcgttttgagtccagtttcgtatcactcatcactgttttatatcatttctcatcattcttgcatactttgcatgattaggatggctttgcatacatattgcatttctgagttgtttttaggtgatttggagctgtttgcgagcaaattggaagaaacgaggcagaaccagaagacatactcgaccaccaggtcgtgtgcatccagcaccatactcgaccccctggtcgagtgactttggagccattcttcccatctactcgacccccaggtcgagtatcctcagctcaggccactcgatgacgccactcgaccccctggtcgagtatcacttcgccacaccacctgacctcactcggctgttcactctaccacgttactcgaccccctggtcgagtatcatcactcaacaccaacaccatcactcgaccgggcactctatcacgtcttcatagtctactcaaatccgcactcaaccagacaagctgagcacaaggaagagaagagaagaagacgaagtgtttggaaggggccaggaccttcatcggatcacgaagcccatctcggcccattatcactctatgggccgggcgattaggttattggcccgtctactatcattttatttcgttttgtataaatagatgtcttagggttctgtcctgagacatctagtcgacattgagtttttgcttcagttttattttctgttttactctggctgcgccgcttttgcttctgcaacctgtaattcgagatttttccaagttattcagattccgcaattgatttcatctgtcatctactctttatctctttacttatgttatattattatttacctgcgtttatgtctttgagcatgttgtctgagtagtgacttagaattcttaaggatgggatagagtagttgtggaatccgtagtctgtagaatggttgagttttagaattgattgaatcccttcaggactagttgtgtttactgcttatttctttctgatcaactggaattcgatcccaagcattctcgcacccaaaagatgttcgatggaatgttaatctaccagttcctgagatattcgtctctatcccaagggattggctgtttggagcgtttattgaagaaaaatctcgaattacaggttgcaaaagcaaaagcggcgcaacagagtaaaacagaaaataaaactgaagcaaaaactcaatgtcgactagatgtctcaggacaaaaccctaagacatctatttatacaaaacgaaataaaatgatagtaaacgggccaataacctaatcgcccgacccatagaatgataatgggccgagatgggcttcgtgatccgatggaggtccaggccgcttccagacacttcgtcttctcctcttctcttccttgtgctcagcttgtttggttgagtacagattt

SEQ ID NO: 164014 - DNA, 573 bp, Arabidopsis thaliana landsberg
aactacatgaccggcgctgagaacggcgtgagaatgacgtcaccagagacgtcttcaacatcttccctcgccaccacaagtgtccacgtaagcgctctcgacggactcgtgaacgtgaactctctcttcaccatcgccgtcttcgttggtctttccttagcgactccaggacaacacagcctcgaacaacgatccagctgcgacgcaagtgctgacgtcgccaagaagctactggtcttcgaagtcgtctccttcagcttcttcctcttctcctctcttgtagctcagggtcttaagcttgccttaaaccttcttaatagcaaagacgtcaacgagattttcagagctcacatcaatatcaaggttttgagatggggaatgatggcttctgctgtcggatctgtaatgggctgtctcttcttgatgctctctatggttaatgtgattcagatccgtcttggtttgctctcttgcggcagcaaatcggcggctcaagctgttgcaacgctcgtcactctggtttcctctgctctgctgatttacatctctaccgccatttacgctttctggcat

SEQ ID NO: 164015 - DNA, 225 bp, Arabidopsis thaliana landsberg
tcagtgttacgtgatctatctccattcttatgtgttgcattttatttgtgtaattaaatagaggagatcattgggggtgaaggaaggacgtgccaatcaaagagccaccacttcaaatacatgtgtacgtccaaccacaactgtgccatagtttgccgtaacgagggattttccggtggtcgctgccatggcttccatcgccgttgctactgcacccgcctttgc

SEQ ID NO: 164016 - DNA, 351 bp, Arabidopsis thaliana landsberg
agtcagaggttttcggaatcgatgaaaacgtttctgaaaagagctgaggaagagatcatcagagtacaagctcaagagagcgtagcgttatcacttgtaaaagaaatcacagagtatttccatggaaactcggctaaagaagaagcgcatccgtttagaatattcttggtggttagagacttcctcggagtagtagacagagtctgcaaagaagtagggatgataaacgaaagaacaatggttagttctgctcataagtttcctgttccagtgaatccaatgatgccacaacctcttcctggactcgttggacgaagacagtcttcttcttcgtcgtcttcttcttcctct

SEQ ID NO: 164017 - DNA, 542 bp, Arabidopsis thaliana landsberg
ttaattaacatgattgttgtgtataggaatcagcagcatttagaagtatacctgtagttataatgtcatctgagaacgttcctacaagaatctccagataagagctctgtttatttaacattaatatgagtcttattgatttttgaattggcaggtgggtgttatttgattctttggtttgaataagtctttgaactatgtacaaaattgtggtggtttcttccaacagatgtttcgaagaaggagctgaagagtttttcttgaaaccagtaaagttagctgatcttaccaagttgaaacctcatatgatgaaaacaaagttgaagaaagaaagtgagaaaccagttgccatagaagagattgtggtttctaaaccggagatagaagaagagtcatcagtgattgagatcttgcctctccaccaagaagttgaatcggaacaacttgaaccaatgttgagtagtaataagagaaaagcaatggaagaagtgatatctacggatcaaccacgtcctaaatacaatgatatcacaacctcggtc

SEQ ID NO: 164018 - DNA, 354 bp, Arabidopsis thaliana landsberg
ttaactattaacttacttttaattttgaaggtgatttcaatgtcagaatttcacattcctcagccgttgatggagatcatcgtaagcacggttggagaagatggtgttgatgcgttgaagaacttcttgctagctgggagagaggggagagatgcggttctttctgagaaaacattagcttccgtacgaattgacaaaaaccatcatttcatgtggtggtccatgcctcattcaaaatactacactttcttcaagaagtgtcttgacgcgaataatcttcatgcgaagtctgtagagaatcataaagggctggcttatgaatcgactacagggtactttcaatgagatgccgtt

SEQ ID NO: 164019 - DNA, 1071 bp, Arabidopsis thaliana landsberg
aacaccatcgtcgttgctcagttgcagagacaatttcaagactacatcgtttctctttatcaacaggttcgttcctaaccaaacttttcttactttggctggattctcacttttgggcttagataagcttaaggtgcagttatgtgtgaatttgaatttttttattttttttataaagatgatataatatgttgttgttttgaagggatttctggataatcagttctcagagttgagaaagttgcaagatgaaggaacccctgattttgtagctgaagttgtctctctattcttcgacgactgttccaagcttattaataccatgtctatatccctgtaagctttgcttactctcttaggcttctcttttttatctaacatgggactttgtctctaatcctccttcatattcatttttgagggtgtaaattagcttcatatattcatgacagcattttatgagtttattataaacattagggagcggccagataatgtggatttcaaacaggtggattcaggtgttcatcaactcaagggtagtagctccaggtttgtcacagtgaacactgctaaatttgcttttctagttttaagtgaccaaactacattgattttaatggctcagtctctgctttgtactcagtgtcggtgcaaggagggtgaaaaatgtgtgcatatctttcaaggaatgttgcgatgttcagaaccgtgaagggtgagtatattttttagcttgttgatgcaaaatgttattggatctctaaacttttttattatatgagaagctattcttctaattcacacacaaattgtgataatgatatctggcacaggtgtctaaggtgtttacagcaggtggattatgaatataagatgttaaagactaaacttcaggatctctttaatgtgagttttaaactttgcgaaaacctacttgttctgcttgtgtattctttttactgagccttttgctacttctcattcttctgtttctgttatgttatgttgttgcagttagagaaacagatcctccaagctggaggtacaattcctcaagtggatataaat

SEQ ID NO: 164020 - DNA, 562 bp, Arabidopsis thaliana landsberg
atgatcgattcggattgtgaggatgattgtgtgatcacgggagtgaggacggtggagcaggagctgggtctgaagggacatgagatcgtgatggtccatgtctatgtgagtgttcccacgagcagttctgccacgccatcctttgcacttaacccgtattcaccgatatcctacgagtcagatccggatgaggatcgaggatccaccgatttctccatacgtcacggaggctgttgatccgcggatttctccatacatctcggaggctgttgatccaccgatttctccatacgtcccggaggctgttgatgactcttcagatagcccttttgcactgttatgggagggcacgtcccccatatttcgtttcgcggcggacatgagggctgacgctattctgacattttacgggggctccacatcgggtatctagataccgttctgtttcatctttggcgaggatgtttattacctgaggactgttagttatacacgcagtatatgcccatggccattgcttgtctttactatggagagtatgagcattacgcggtaacctgta

SEQ ID NO: 164021 - DNA, 276 bp, Arabidopsis thaliana landsberg
ctcggacaacctaaggcacaagaaaagtattccacaagtttagccaagatcaaccctaaaccctccggtagctctaccgttgaatcgaagagccaagacaataactcacctagtttaaaacgttggagatcgtcctccggtaaatctacgaggctaaattgtttatgttctccgacgacacacgccggttctttcaggtgcaggtatcaccgcgttgattcgttgacacgtgccgggtctattgggtcgaacctcgctgttttattgtcgtccaag

SEQ ID NO: 164022 - DNA, 210 bp, Arabidopsis thaliana landsberg
atgaataaacatcaacaacatttatattacattgataccttcaacttgtcagaaggtgaaaatgcgagaatgacacaagagtgattacaatctagcatgaacagtacggtgctactgttcatctatttataggcacggggcacaacccgagtgaaagtacatttatgcccttaacattcatctataatcataacatgaattattaaggat

SEQ ID NO: 164023 - DNA, 343 bp, Arabidopsis thaliana landsberg
atgatcgaagaaaacagacgggagaagggggagaaggtcaaagaagaggaagaaacaggaaagaggggaaaaaaatcttgagaagaagaagagtagccttttttttttttttgaagggagaataatgacttacatctagggtttttttggcttttatatgtgttcccctttaaaccgaataaaccgatcggttagtgtctgccgaaccgtaccgaaccgttaaccgaaatctcaaattaagtttgccgaccggtttactcctttcttaaatgtcggcgccgataaccgaatgtttcggtttgatcggttcggtttgaacggtttttgccgtaaacccaggcct

SEQ ID NO: 164024 - DNA, 414 bp, Arabidopsis thaliana landsberg
atgttagtgaccatatttttaatgttagttactattacatgttttgggctaaatcaagcttgcataaaaaatcatgtagtgattcttaacctactcgctcctggtcgtattctcgaatatcattgttactccaatgttgatgatctaggcgtgaaaagattagactttaatgccactccatttacaattaaattccatgatgaaatacccaatttaacaaaaaggaattgtattttaaggcaaggacctaacaatagcatggagtattcatatgatgttgaagtatacaaagcacgaccaagacttattcctcgatgtggtcaactacgcgcttgggctgcaagaatcgatgggatatactttgcaagaaagtataatacaccattaaaacgagtattattttggaacaaataa

SEQ ID NO: 164025 - DNA, 763 bp, Arabidopsis thaliana landsberg
gctctccaggttgcagcgataattggaggcgctgctgttgctgctgctgcttatgctggtaaatatggaatagaggcatggcaagcgtttaagctgagaccagttaggcctagaatgcgaaaattctatgaaggtggtttccaagctactatgaatcgaagagaagctgctctaattctcggtgttaggtacctttctttctgtctttagagtttagcctctcactacaaatgatactagtggtcttgggacttttgttttaaataaggtttctcttctgctagttttgtaaagtctccgctgtgtaaatgatttgaaataggcggtatggtttctcacactagtcctcctcgagggactcctcctgttcttaaatatatcttcatctttggctagtcataggggagtttctttctgactctttcatttttggtagaattggtaaatgatcatttataggcagtaggtatgccacactagtttttaacaagtttgcataggggccaaactatgttcttacacaagggtaaatggtttgcatatgtttagtggtggtttttgcgacattattatggcttgatgagtttgtcacttgtggtgtttgaatagggagagtgtagcggcagagaaggtgaaggaagctcaccgtagagtgatggtggctaatcatccagatgcaggaggaagccattaccttgcgtctaagatcaatgaagccaaagacatgatgcttggaaaaaccaagaactctggttctgcgttt

SEQ ID NO: 164026 - DNA, 354 bp, Arabidopsis thaliana landsberg
  unsure (1)..(354): unsure at all n locations
atgnnnnnnnnnnnnnnnnnnnnnnnnntcgtaaggacaggaatgattcatccgcggggctttaatcctggacacaccaaccgactcgattcaccaccagtttttggagattttaccaaaatgcaaccaaagactaccaaccattcaaatatcatcggagaaagtgagcggtccaagtacagtaattgtcatgtgtcgccggctatcaagtcgggccataaatctaagggtcgccgtaagctacaaccgacaagttggtggagtgaggataagctagaccggctcatcgggtcggattcatcctctgctaaggatattttggatatgttatgtagtgaagatcatgatgagtat

SEQ ID NO: 164027 - DNA, 297 bp, Arabidopsis thaliana landsberg
acatgtgagaaggtgatgatacgagttgatgataaatccgcaattgcactgactaaaaatccgttgttccatgggggaagcaaacacattcatcggaggtaccatttcatacgagaatgtgtagagaatggtcaagttgaggtagaacatgttcccagaattgaacaaaaggctgatatcctaacgaatgcgcttggaagagtcaagttcggagaaatgagggatctcattggagttcaagatgtgccaaaggaagatttcaagcttaagggggaggatgttggtttaaacttgaag

SEQ ID NO: 164028 - DNA, 586 bp, Arabidopsis thaliana landsberg
atggctcagaggtctctttttcaaggcgaatctagtgttgatgaggtatttatctccacatctgaatagtacaaatcgttgcccatctaacgtcgagtacatcatggttgtgttaatgtaggagctcaaccgtatggaaataaggatgcgaacgaggtacggcgaaaacaggaggcgcgataagggcgttccgatcgagtgtgattgcaatgctaaggttgtcggtgccacttctcttgatcctgttacaaccgaaaaactttttttcaattgtccgtacgaaatatcagatgtaagcatcttttcttgagttaatgttctttattttatttctttcattttgtattcctatgaatcaacctcctgttttttttataagggtcccggtcaaggatgcggtttcaagagatggtggactgttgcactgtgtgacgagcttgacatgataaaagaggagaagaatgagatgaagcaggatctggaagcagccaataagcacgtcgagccttaggtggaaaagaactttcttatggaaaagaaatttgaaacgctagagaagaagtatgagagcttgaacaagtatatg

SEQ ID NO: 164029 - DNA, 273 bp, Arabidopsis thaliana landsberg
cagatattgtttggagctcttcttcttcaacagaaggtggcattcatttttaagtatgtgttccaaaatgcgatccattccctatggaaagaaagaaatgcacggagacatggcgagcaaccttcgccgatagaaaagatagtgaagttgattgataaaaacatttgcaacagattatctactctaaataagagagacgaggagaaatatgtagtgagacttcaaatttgatttgcattgagatagtagtatagtatctctttgtgtttcgat

SEQ ID NO: 164030 - DNA, 512 bp, Arabidopsis thaliana landsberg
cgataaaagaatacatacaggatgttagcaaaggcgtggtatcgcttttgaaagggatgaagaagaccgggtattatttctttcatccgaaagagatcgtcacgcagcaataccccgatatccgcagcagcctgaagctggcagagcgtttccgcggggaagtggtgatgccgcatgacgccaacaatgaacacgcctgcacgggctgtactgcctgtgaactggcctgccccaacggcacgatcaagatcattaccaaatttgatatatcgccggaaggcaaaaaaaagaaagcgctggatacattcgtataccacctggaattatgcaccatgtgcaatctctgcgtggaggcctgccccacgagtgcgatccgcatggcacagaactttgagcacagcgtgttcgacaggaggcagctcaccaaaaaaatgaacccccccccctccaaaataagggagggagttaaataatgaatgcatcggccatcatattctatattatagcacccg

SEQ ID NO: 164031 - DNA, 393 bp, Arabidopsis thaliana landsberg
atggctcgttcgaaccagacagctcgtaaggcaacaggaggtaaggctccacacttcgccatgagagtatggcaacactcaactccgccgcttaagaaaccatatagatacaagccaggaacagtggcactcagggagatcaggaagtaccagaagaccacagacttagttataagaaaactccctttccaaagactggtgaaagagatagctcagagtctcaaggcagatctaaggttccagaccggtgctgtttccgctcttcaagaagccgctgaagcttttatggttggaatgtttgaggacaccaatttgtgtgccatgcatgccaaaagatcaactatcatgcctaaggatatccagctcgctaaaaggcttcgaggcgataggggt

SEQ ID NO: 164032 - DNA, 539 bp, Arabidopsis thaliana landsberg
atgaatccttcatccaacctgttcctgattggcccgaccggggccggcaaaacgtccatcgggcgacgcctggccgcgcacttccagcgtccctttctggatctggatgccgaaatcgaagccagcacgggcgtcgacattccacgcattttcgaagtggaaggcgaagcgggctttcgccgccgcgaggccgaactgctcaacgccctcagtcaacgcgaaggcatcatcctggccagcggcgccggcgccattctcgacgccgtcaaccggcaacgtctggcggcacgcggcttcgtgttgtggctggatgtcagcgtggcgcagcaactggcgcgactggcactggatcgctcgcgccccctgctggccgcgccggatcgccaacaacggctcgaaaccatggccgccacgcgcacggcgctgtaccaatccatcgccgacttgcacattctctgccacgacgaagccgtcgaccaggcggtccggcgcacgcaggccctgctcgaagccgtctggatcccactcaatccggtatc

SEQ ID NO: 164033 - DNA, 520 bp, Arabidopsis thaliana landsberg
tcttcacctgcgtcaatggattcatcttttcaaatttctctgcgttcgttgccgggaggaaccctaaaactaggatatgagagattagcctgagcgggtcgggttttaatgacccgtttcctaattaaattaaccgacccggattgaggcccatttattctattccctttctagaataaatgtctaatattatttttacatcttctacgtgaattcgggtacccgttcggattcagttctttttttcggatacccgttcggattcggttctttttcggatatcggatttatttgggtaggaggttgagaaccattcggatattcttaaatttcggttcggtttcgattcgggtcggttcggttattttagtaaatatgtaaaaatgaccaaaaatatccaaaatattttcaggtttgggttaggttcgggttttttctcatatatacccaaatctatccgaaatacccgattacccgtaaatatattggttacttttatccagatataaccaaatgtaac

SEQ ID NO: 164034 - DNA, 530 bp, Arabidopsis thaliana landsberg
atgagttgcatttctgggaattcatatcctcgtaatcaagacggaggtcgttggggacgtgggtttccttcaaagtgtgaatgtggattagacgtcgtaatctatacctcggcgtcgaagactaaccctggaagaccattcttttgctgtccaacgaaacaagatgtaagtagttttgaaattaaaattggtcttttttggtttcatcttaaaattttcgattcataatgtaggaccatttgtttaaatgggttgaagatggtgtgtatgaagcggttgcagacgctttaccaaaattctccatcattgacagtgagataaacaatgctaaagttgaggttacaatcgagattgaagtgttaaaggctatggtcgaagaactcaaggaagaaggaatgtggaccaaaagggaaatcaagaaatggaaatggatgagcacattgtctttggtgtgtcttggtttaattgtcattgcaattgtgatcataatgttctataagaccaaaaaccataagcatgttcttggttac

SEQ ID NO: 164035 - DNA, 219 bp, Arabidopsis thaliana landsberg
atggctacgcacactggagatgattgatttagacatggaccaaaacccacttctgtaaggttgttgatggaacccatgatggcctagtatggttaagaaactatgggcccgcgaacaaccgcttggatggttagcgcaagggctatattagcggtgggcctatcgaatacgaaggggatagataacgcttccgttctgctggatggaaattgggtgagt

SEQ ID NO: 164036 - DNA, 524 bp, Arabidopsis thaliana landsberg
tcattttattattttaaatatataaattcattttttgggttttgccaaaaaatgtgattttgtggtttttacagaaaacatgatttaatggaaagtatgattttccggttatggcggaaaatatgatattgcagttttggtaagaaaacatgatgttacggttttggtaaaaagaatgtaattctttgattgttttaattttggcgggaaacacaattctgtaatttttccgcaaaaatcgtgattgtatagttttggcaggaaattactatcttacggttttggcaaaaattacgactttaggggttttgacaaaaaactcaattctcagatttttctggtcttgacagaaaccaatttggtaatttttccgccaaaatcgtggttttttttttgaaatgttattttgcaaattttccgcaaaatcataattaggcaaaaacaatgatgagaaaaaagtaattttaattttcaaaaaaaacgtaagtttgcaattttggacagaaaatgataatttgttattt

SEQ ID NO: 164037 - DNA, 545 bp, Arabidopsis thaliana landsberg
atgggagaagacggaatttgcttggagtgcaagaggccaacagaaacagtggttaactacaagaacggagatacaatctgcattgagtgtggccatgtcatagagaataacttcatcgatgaactagacggtgctccgaccaaccctaatctcaaatccggccatctccccactatcatcttcaaacctaacggaagatcttcctcccttgcctcaaaattgcgccgaacacagaatcagatgatgaaaaataagcaggaagaagttgtaatgaagaaagcctatgcggaaatcgagagaatgagtgaagcgctagggttaactttcggtatcagttatacggcgtgcaagattctttcgaaactagataaaaagaacttacgcggccgaagagtttgagagggctttgcgcggcctctgtatcaagggcatgtagccaagtgaatataccaaaaacattgaaagagatcacgacagtggccaacgtggatatgaaggagataaacaaagcggtgaagcttcttgaagattctttcggtactgtt

SEQ ID NO: 164038 - DNA, 502 bp, Arabidopsis thaliana landsberg
  unsure (1)..(502): unsure at all n locations
ttacatacctgatcacaaagcccgcctatgaaattcaatcccttagcctttattatcaacatcgctataccactggcaaccggtgcaaccggcggtttctttactgcacattctgtaaatacctggtacccctgcactggccaaaccagcttttaacccgcccaactggatctttgcacccgtatggacagcannnnnnnnnnnnnnnnnnnnctcggcttacctggtctggcagaaaagaagagaaattgtccattttccgcgtactgctgccatttatctcatacagctgatcttaaacctgatgtggtctttcctctttttctatgcacagcaaataggcctggcactaatagagatcattctcctgctgatagtcatcatcattaacgccagggtattctacaaaactgacaagaccgcgggactgctatatataccttacgcgctttgggttagctctgctgccctgcttaccgcaggcattttcagattgaactga

SEQ ID NO: 164039 - DNA, 300 bp, Arabidopsis thaliana landsberg
atgagccgtcgtgctcgtgccggtggtggtcaaagttctctgggttatctctttggaagcggtgagccccccaaaccagcagtggcaccagctgcaagtgctccacctgttgagaaaccatctgctgcaaagactgatgcggtcaagcaggttgctgctggggttaccagccaaaccaataactaccacagggctgatggtcagaacactggcaacttccttacggaccgtccttcaaccaaggtccacgctgctcctggcggtggctcttccctgggctacctgttccgtggcaactga

SEQ ID NO: 164040 - DNA, 303 bp, Arabidopsis thaliana landsberg
atgggaatttcgaaaaaatctcaagttagcagagaattagacaccgatggaaaaaagtttatattcgccaaaacatcgattcgggcttcactaaagccggtgaagacgaaactcattaagcctgagagagaatcagaagatggaatttgtatcactcccacggcgagaggagcaaagactccggagtgtccggcggctccaaggaaacgcccaccggtgttgaaatgtcagaacaatattggtatagagtactttgtgcctccttcagatttcgagttggtgtttatacaacgccgttaatgt

SEQ ID NO: 164041 - DNA, 545 bp, Arabidopsis thaliana landsberg
  unsure (1)..(545): unsure at all n locations
agaaaatgaaattttgctttaccttgtaacgttctttgttctctcaaacggtttggcaaacggacaaactgtgatttggaaattcttgcaagaaagctgcagctacaagcccgaagttcanatacaatctatgtgtcacgtctctcgaaaccaatccgcaggccaaaaccgcaaaagannnnnnnnnnnnnnnnnnnncatcgacgaaaaacgccgtgaccaaagcgacgaccttgaaaggaactgttgacaagattatcaaggggaagaaagttaacaagatgactgcaatgccgttacgtgattgccttcagctttataccgatgctattgcttctttaaacgaagctttagcgagcgttaaatcgcgtaattacccaaccgttaaaacggttctgagtgctgcaatggatgcaccaagtacttgtgaaactggattcaaagaaagaaaagcgccatctccggttacgaaacccaacgataatttgcatcagatgattctgattcctctagaatttacaaataagatgaaatgaaatcaccaa

SEQ ID NO: 164042 - DNA, 276 bp, Arabidopsis thaliana landsberg
gttaaggattattgactataagatcttttgttgtaaaaaggatcaaattttcaatagaaaatgtttatctattttgatgtaagtgagatatgaaatttttttatgcaggagtttgacaaagggtatggaccagcatggcattgcatagtgggatcaagtttcgggtcgtttgtgacacattcgacaggttgttttatttatttctcaatggacaaactctacgttcacctcttcaaaaccaaagttcgtcctgcttctccccattgattttcttct

SEQ ID NO: 164043 - DNA, 324 bp, Arabidopsis thaliana landsberg
agtttcactgctccgccatcaacagctccaatatctgaaatgagatcgaatcagagctcaagttcagctgaagagtcaaagaaagagaacgacgttgctcagcttaacaaaggaaaagggttattgggccactcaccaaacaggcccaatgacaacacaaccaacacaacagcgaagcccaacaagtcttcttcctcttctcaacagacaagaccaccacctgtgcaagaaaacaaaaccagagtgaagacagagaagaggagcgtctgtatggagccaatcaacacaaagaacagatttggttgtttggtgacctgcgaagct

SEQ ID NO: 164044 - DNA, 375 bp, Arabidopsis thaliana landsberg
  unsure (1)..(375): unsure at all n locations
atggatggtttgattccaatggcgtttaaggctatgagaaaaaaccggacccgacggcgttacgagtgtctctcttcctccgccggaacgactaaagattcctacgacgactccgacttcttccccttcgccgctaaatccgatcactccgttgtatctcgaccttcgtcgtcttttgatcatatagagatgaatannnnnnnnnnnnnnnnnnnnnnccgccgtggatggtcggtgggagatttctcatccatgtcttctcttgaaggaagaagatctggtgccgagggcgaagatgtcggtttttctccttcacggcgaggacaacttgtgaggaatataagccatagattgttctcttgtgtctcgggtgaa

SEQ ID NO: 164045 - DNA, 389 bp, Arabidopsis thaliana landsberg
atgaagaagaagttagatcggagtgaagcagttagatcggagaagaagacgttaccttggaggcaaaagagatcgagtcgcgactgctgctggagaagaagagtcgcgacggctgctggagaagaagagtcgcgacggctgctggagaagaagagtcgcgacgactgcaggagaagacgaaccgcaacggagaagaagaagaagttagatcggacggtggaagttggaatggaaagaagaagttatatcggagaagaagacgttaccttggagaagaaacagatcgactcgcggctgaacctggagaagaagagttgcggcggctgctggagaataagaggcggcgacgtaatcagatcgaagaagaagagaggcggcggcgaagaaaa

SEQ ID NO: 164046 - DNA, 359 bp, Arabidopsis thaliana landsberg
ataaagcttctttggaaatctcagcattgcactaccgttgcttgcaaatctagaatctggattttaagatacttccggtgctcttgttcatgtttgcaccaatgggattgttttggtgacacatggaggttttgaaatgggtcaaggatttgcatacaaaggttgctgcaacggcctttaacattccccttagttcggtttttgtgtcagaaacaagcacatacaaggtacatctaactcaaatacatgcactcagtggacttttggccaagacaagattattattgttctctcttatcatttttgtggtctcttcataggttccaaatgcctcacaaactgttattgctctcttgtct

SEQ ID NO: 164047 - DNA, 404 bp, Arabidopsis thaliana landsberg
  unsure (1)..(404): unsure at all n locations
atgaataatctttttgttttgctcattattatagctttgagtggggatcgaacaatggaagcaagctttggccaaaaaaccaattacactttagaaactcttttagcaggaattatgatgttcttacggttcattgcaaatctaaagatgatgatctcggtattcacacagtggctcgttcatacgaatataattttaagtttgaggatagcgttttcggtaggactgagtttttctgtacactaatgcatggggttggttctaaatattctgtaannnnnnnnnnnnnnnnnnnnaaacctgcttttgttgcaagtaccggtgtnnnnnnnnnnnnnnnnnnnnnnnnnnnnnnnnnnnnnnnnnnnnnnnnnnnnnnnnnnnnnnnnnnnatgtatggttgg

SEQ ID NO: 164048 - DNA, 478 bp, Arabidopsis thaliana landsberg
atggcggtggtggttccggcgacggcggcgatggtgattccggcgacggcggcggtagtgattccggcggtggtgattccggtagaggtggttgtccggcgatggtggttatggtggtagttccggcggcggcggttatccggcgacggcgacggtggttgggcagggatggttgtccagcgatggtgacagtggttgtccggcgacggtggttgtctggttgtccggcgatggtgacggtggttgtccggcggtggcggcggcggttttccggcatcggcggtggttgccggcgatggtcgttatggtggtgcttccggcggcgtcggttttccggcgtcggtggttgtggttgtccgtcgtcggaggtggttgtccggcggtgtaggtggtcgtccgccgccggaggtggttggccgccggcggtggcttatcccgcgtcggtggttgtcctggtggttagtgccgttcgtggtat

SEQ ID NO: 164049 - DNA, 246 bp, Arabidopsis thaliana landsberg
cccatggccgcattcaccgtgcgcgtgtcggaagagaccgcaaacaagctggagcagatcgcggagaagtccgaccgctcgcgttcctatatggccgcgcaggctattgaggacttcgtggcccgcgaagaatggcagcttgctgaaatcgaagcgggtctggccgaggctgaccgtggcgagttcgccagcgacgaagacgttgccaaggtcgtcggcaaatacgtcaagtccgcccgccagtca

SEQ ID NO: 164050 - DNA, 279 bp, Arabidopsis thaliana landsberg
aacaaggggcacgggcatccgctgcccaagtttggggagtgggacgtgaagaatccggccacgtccgagggcttcaccgtcatattccagaaggcccgcgacgacaagaagaccaccaccggccctggggctgggaacgcgcgcgcaggcattccgccggccttcatgaacggcggcggcgacggcgggtacaggcccgacttcggcgacggcaaccagtacacgccgcccaaacggaagaagtgggccttctgtggctgctgaatcgaagctcgctgt

SEQ ID NO: 164051 - DNA, 300 bp, Arabidopsis thaliana landsberg
gaagcaagtaagactcaaagagaaagacgaggagcatcgtcactaaagaagatgctgatgaagagatgttcaagcttcgtgaagaagagcaacgaagaagacgtgcccaagaagggctatttcgctgtctacgtgggccacttcagagaccgccacgtcatcccaatcacatccctcaaccatccaaccttcaagatgatgctgcaaaaatcggaggaagagtttgggtttaggcaagagagcggcctcaccattccttgtgaccaaaacacctttctcactctcttagactcaatcaca

SEQ ID NO: 164052 - DNA, 204 bp, Arabidopsis thaliana landsberg
ataaacaaaaataataaataattacatttgtaccttcggctcaacagaaggagaaagaacaagtgtgatgcacaagcgagtaccaatcatcgtgaacagtacgggggtactgttcatctatttataggcacagggcgcacctgtgtgaaattacattgataccctttacaattgattacaatcatgaaacaaactatcatgggt

SEQ ID NO: 164053 - DNA, 366 bp, Arabidopsis thaliana landsberg
atgaatctcgccacaaagtttcatgtgatggtacttttgctcattgtaattggagatgtttgtgccaatgtaggcgcaaggccgctagaagaagtttccaaagaacttatggataagaagaccgcttcggttcctaagacactgttaccgttcgcaccaatatcattaccaacattaccgccagcgcagttaccaggtttacccactccgccaaagatgtctaatggtgacactggaggagttgatgagaacgcagatggtagactacccaaagatgcttcagcgggttcccatggtgccacagccagaggatatcgttccggaggtggcaggagtgatgtgtctggcagcactgacccttggcct

SEQ ID NO: 164054 - DNA, 592 bp, Arabidopsis thaliana landsberg
atggtgcagagatctcttgtccttggtgactctagtgttgatgagaaattggtttcagaagaaaatgaggtatttatctcgaccatctaaatagagcaaatcgttagccatctttctattgtatagtggtaatgtaggagctggatcgtatggaaataaggatgagaatggtgtacggtgaaaacaggaggcgcgataagggtgttcggatcgagtgtgattgtagtgcagcggttgtcgttgccacttctcgtgatcctattacaaggggaaaactttatttcggttgtctgtatgaaatatcagatgtaaacatcttttgagttatgattcttttattttatttttatttttctatccctatgatttatgtctgatttataagggtcctgttcgaggctgcggtttcaagaggtggtggactgttccattgtgtgacgagttagacaagagaaaagtggagaataatgagatgaagcatgatttgtaagcagccaagaagcgcgtcgaggctcaggtggaaaagatctttcttatggaaaagaaatttgaaacgctagagaagaagtatgagagcttgaacaagtatcaa

SEQ ID NO: 164055 - DNA, 435 bp, Arabidopsis thaliana landsberg
gcagaaaaaaataaatatatgtatccagaatatttagttgaacctatgcgggcggaactgaccacagcagggtttgaagagttgaaaacagcagcagaagttgatcaggccattaccggtgaaggaactgtttttgtagtcgtaaattcagtatgcggctgcgcagctgcaaatgcacgtccggcggcaaagctggccgctgccaatgaaaaacacccggataaactggtaaccgtatttgcgggtatggaaaaagatgcagtagacagggcaagaggatatatggtcccattcccgccttcatcaccatctatggcattatttaaagatggcaagctggtacacatgatcgaacgtcaccagattgagggccgcccggcacagatgatcgccgacagcctgatcggtgcatttgagcagtattgctaagtgggc

SEQ ID NO: 164056 - DNA, 260 bp, Arabidopsis thaliana landsberg
aactgttcaacgagcaaagcatagttagtagctgcaagcatcggagccgtggaagcttccaaggaccaattaggaatgtgtcggtggaactacttgatccgatcagtgaataacgtatccgtaacaacatgagatccgcttctgaggctatcagattcttttcatccatcgccgtcgcttctagtaaggatgatgacaagtcaaagcaatctgaagagtcacttagaacggttatgttcttgagctgttggggtcctaac

SEQ ID NO: 164057 - DNA, 719 bp, Arabidopsis thaliana landsberg
ttgacaactttagttggaaaaaaattgagtatatctagaatcattggaggtaaaactggctctttgtatagctgtcacaattggtcaagccgtgttgactctttacttggaaaagaaacttagtataagtagaaccattggtcagtcgtgttgactctttatagattgctctttgtatttcgaatcttcttgtgtcttttacattactatgtacatgaaattggtctaattgctctttacctgtacaaggaaccatatagtattgatctaattgcctttatctttgtttggtgatgctgctctctagaaaccctccatggtgacttacaaggagccacataacatagttctaactcccatagttgttactctgtggacaagaccctgaaaccagagaccaatttgacctgtataaattaatatcaagagaaaataatcgcagtaaggacattattgatacctttaagactaaagtatgtaggtttggacaactcttgaggagaagtggcattacttgccaacctttatccttggcgtgagaggaatgataggagacacggagagacatcatcgagaacagagaaacttgtcaagctgattgatagaaatatgaggaaccacttgagcaccataatagcgaaagggggagaaaaaatcattggaggatttcaagtgtggtttgcatcacgacaaagtcaaggatagatagattgaaccat

SEQ ID NO: 164058 - DNA, 531 bp, Arabidopsis thaliana landsberg
atgaaattctcgctttaccttgttatgtcctttctcctcttaaactgtttcgcaaccgcacaatctctgattcgggattcttgcaaaaaagctacaactaaagacccgaaactcaaatatgatttctgcgtcaagtctctcgaagagaatccgcagagcaaaaccgcaaagagtcttgaaggtttggtcttcgtatcgaccaagaacgttgtttcgaaaacgactagcttgaaaggaatggttgacaagattctcaaggaggataaatatgaagtggagaggccgttacttgattgcctcgaactttataccgaagctattgattccttaaaccaatctttagacactgttaagtcgcgtgattacaaaacagctaccatgcttatgagtgctgcaatggatgcaccgggaagttgcgaaactaaattcacaaaaagaaaaaaggctgtgaaatctccatttacgaaagagaacgatgtcttgtttcacatggttctgattcctatagctcttacaagtatgttagatatg

SEQ ID NO: 164059 - DNA, 228 bp, Arabidopsis thaliana landsberg
gctccgaagaatctatcaatggaggagagcggcagcaacaatggcagcgtgagcgatatttctcgagtgaaactcgatcaggttgccacatgggttgtttccgccttcttcacctgtcttgaacgctgcgcttgcctcaatctctccaccaccgatcttgacgacgatgacgatgctaagtatcttcctctcgtcgtctccgctactcctcgtccctccgaagacatt

SEQ ID NO: 164060 - DNA, 520 bp, Arabidopsis thaliana landsberg
atcactcgaccgggacactctatccaccactcgaccacgagcttgagtagctaacatcaccgtttctcaccaccactcgaccaattggtcgagcacatccatcacaatgcctcgccattcactcgagctgctgatcgagcaacaccatcgccaccttttgtcaatcactcgatcactacaactagaccccatggtcgagtaccaccatcatcattcactcgtttcatcactctggcaccaagtcgagtccaccttgatctacaactcgatatgctgactcgactgccagcttaagagtcttctgaattacgcactcaaccagacattcgagcataaggaagagaagaagactttggctcgtcactcgacccactactcgaccacctgggtcgattaccgttcttaatactccccaatactgtgtcgttttgagtattagggtttcagaacatttctctataagtagcatgtactttatatattcgagactaagttttattccatcgacagtttgtgtgtt

SEQ ID NO: 164061 - DNA, 201 bp, Arabidopsis thaliana landsberg
gcggattggggcccagtgttgatcgccgtgatcctcttcgtagttctatcgccggggcttcttttccagattccggcgggaggtcgagttgtcgaattcggtaatatgcagacgagtggcgcttcgattctcgttcacgccatcattttctttggtctcatcactatctttaccatcgccataaacgtccacatctattcc

SEQ ID NO: 164062 - DNA, 301 bp, Arabidopsis thaliana landsberg
atggatcccaagaaagctgatattagtcgtttagaggcacttcctcaagatctacttggagaaatagttgctaaagttggagcaacaacagctgaagattttcacaattgcattcttgtatgcaaagaactaggtgcatcagcaaatgacatacacgtgttcaaaactcttaatcttgctctgttggtgaagaaaccgttatcgggcacgcaaacaccttcttactatgaaaatatgtcttgacaacaacaacccaaatgctcactacataaaaggtataatacactactttgtcctttat

SEQ ID NO: 164063 - DNA, 291 bp, Arabidopsis thaliana landsberg
atgtcgcgtcgctgcgaactcactggtgtcggtccgatggtcggccacagcgtgagccactccaatatcaagaccaagcgccgcttcctgccgtcgctgcatcagcatgacctggcctcggatgcgctgggtcagtccttccgcttgaagatctcgaacgccgctctgcgcacgctcgacttccggggcggcctggatgcgtttctggtcaaggccgacgatgaggcgctgtccttacgcgcccgtcgcctgaagaagcagatcaaggcgaagctggccgagaaggctgcg

SEQ ID NO: 164064 - DNA, 315 bp, Arabidopsis thaliana landsberg
atacaatcgagcgcgatgtagcgggtagtgagaatgctgcactctcactgagatgagtcagtgtcgcgccaggaaatgcctaagcagtacagctcaagatttatgggtcacaagcgcaagtcatctacgacaaggcacatgggttacatctagacatatctgtagagcgcacacgtacaccaccataacacgtatgtaagggtggtcttacgcatccgatctccccgcctgctgtatgacttctaccatccgtctaggccgaatcttcttacgaatctgtctcagcttcaccacgtgcataagcttatatacatg

SEQ ID NO: 164065 - DNA, 2411 bp, Arabidopsis thaliana landsberg
aaatctaagtgccaccgcaacagagacccttaagttaaactagtctcagactcaatcaccattgacgagagctaacctaacaggcattacgaatcaacaagttaaagccaaaacgctccctacaacaaataccttagtacagggccacgattctctggaattagtggttcagacatttcatcgaacaccttttgggcgcggaaatgtctgggctcaaaattccagttgatcagaaagcaataggcattaagaacaactaatccagaagggatctataaatcaaactcaaccgcctagcatactgagaattctaaactaccctaacccatcctcagaaacctagtcactactcatacatcattgcagaaagcataaacgatgataagaatgaaaccatgatatcagtagagtaataacaagatgataacaggatgaacaacattaaacgaaatcaaaagcaaatactgaatagattaagagaaatctggattacaaaaacgtcaagaacacagtgtctgcggaataaaactttgattatcgaaaatgtaaagtacgtgctacttatagcaaaatatttcgaaaccctaatactcaaaacgacacagtattgggacggattaagaactatactcgacctaggtggtcgagtgagtggtcgagtgatcaattggagtcttctgctcttccttatgcgggagtgtctaggtgagcgcggaatcgtgactctaaagctggcagtcgagtattatgtcgagtggtggatgatggtggaactcgacttggtggtagagtgattggtcgagtgaatgatgatggtgatactcggccatgttgcctagtaatcgagtggtaaatcgaaatggtgaaggcagctactcgaccaaggggtcgagtggtgttgtgaagtgggaaagtcatcaactcaacctcgtggtcgagtggtggatagagtgtcgcggtcgagtgatttgctgtagaggttgtggccgagtacttcaagaactccaggatgactgtactcgagctcctggtcgagtatgttgatttgatcaggtccacttcttccaattagctcaccagcagctccaaatcacctgaaaacaacacaaatatgcaatatacgtgcaaaactatcctagacatgcaaagtgatgacaaatggatgttcaaaacgtataaaatgcacacttatcactttcctttctaggataggaaaagaaaaagaagaaatggttattccgatatgttaggaggctgaagaatatcgatgaactaaaaaccatcctcaaggaggtgtggaatgatgaccctctatcctcaattgaagagagataaggagcctgcagaggggctatagtacgatggacaagagagaagtagaggaatagtcaggtggagatagagcactttagagagcggttagaacatgcaatggtaagccatgttcatgatgagtccctccttcttttgattaattcagatctaaatgctgcttatcaaagagaataagagttctaaacacaaagaagtaggcagaacttgctcactttaggagatcaaattctggattctttcatgcggtgacaaaggggagaacctgtatcaataatctcacagttttggaggatgcaaatgggaccaccttttataaggatagccagtttgcctcagtgatctcaagttgttaccaggaactcttttcatcagatctgacttggcctgctaagataaggaaatttgtggaagatgcaatttgtcctcaagtctctgaggagattaattcagttctgataagggatccttcctccctggaaatcaaggaggcttcgtcgacattcaccctgacaaagccccaggctccaacggtttctcagctagtttctttcagtcaaactgggactttgttggcgatgccctagtaaaggaaatccaaggttacttctcaaccagtgtactccaagcttcaatcaacaaaacttttatcaggcttattcccaaagttcaagggccaaggagggtactggattacagaccaattgctctctacaatgttgtggatcaggttttctccaaagtgctaaccagaagactcaagacagtcctgtcccctctaatatgtgagaaccagtctacttttgtggctggtagggcaatcttagataatttgcttatcacacatgagatgcttcattaccttaaggtttatagggctcgaaaaacgtctttttagctatcaaaacagatatgtctaaggcttatgacagattagaatgggagtttattcaggctgttcttgatagaaaggatttccatccaacttgggtaaattggatgatgtagtgtgtgaagacaatctcttattccttcatcattaatggagctgctatgcgtgatgttattccatcccgaag

SEQ ID NO: 164066 - DNA, 534 bp, Arabidopsis thaliana landsberg
atgagtagtaattccgagaattctatttcaagtactcaatacgtaagccattggggacgtgggtttctatcaaagtgtcattgcggattagacatggtcatctatacatcaacgtcagtaaagaaccctggaaaaccatacttccgttgtcctacgggtaaagatgtaagtataattgttttttggttttattggttttagttgataattggtttgtgaatgaaaatgcaagaccatttgtttaaatgggtcgaagatggaacatacgaagaggttgtcgatagtttgcccaaattgtccaccattgaaaatgagatcaacgcagtcttatccgatgttgcagtcgagatagaagcgttacaggtgatggtgaaagaactgaaggaagaagtaataaggagcaaaagggaaaaatagacatctaaattgatgatcaaactttgcttattgtgtcttggctttattatcattttcattgttcttggtatcctaatgttccttaaaaacaaagaacagaggcttcttcttggcttc

SEQ ID NO: 164067 - DNA, 267 bp, Arabidopsis thaliana landsberg
cttgtctctatgttttctcctaaatccagcttctatgttatccactgaagtgaatcttagactcccatctgtgtaacgacatgttgcagctgatttaaaactatatattcacgaaacagttttccatttcaggacttcgattcagcctacggcccggcatggcactgcattgttgggacaagctttggttcatacgtgactcattccacaggaggattcctatattttcagatcgacaaagtttacgttcttctcttcaagactgcc

SEQ ID NO: 164068 - DNA, 210 bp, Arabidopsis thaliana landsberg
atagagaaatagaaacaatatcaaattataaatgtaccttcggcttggaaggagatgaaaatacaagtgtgacgcaaaagcaaatgccaagtcaacgtgaacagtacgggggtactgttcatctatttataggcacggggcgcagcctgtgtgaaattacattcatgccccttataaaaacttacaacattgactcagacctttatggac

SEQ ID NO: 164069 - DNA, 366 bp, Arabidopsis thaliana landsberg
atggaagcatcgagaaatcgatcgctcgtcggaaacaaccgatctccggagatgaacgaaaacgacggcgaagatgttgcggcttcggcagcggtggaggtgtgggatacgttgagtaatggattcaaacgtgcacagctttatcttgatcagaatcgtgatttgatacaacgcgtcaacgaaaaccacatgtctcgaatcccagataacgtcgctagaaacgttggcttgatcaacgaaatcaacggtaatatctctcaagttatggagatttactctgatttatctctcaatttcgccagaaatatcgatcagcggcggaggacgaccaaggacggcgacaccacaactaccaccaccggttct

SEQ ID NO: 164070 - DNA, 302 bp, Arabidopsis thaliana landsberg
agcgacagcatcatcgccacgctgcggcggcacgagctggaattgcaccgccagggcgtcgcccatgcggccctcttcggctcggttgcgaggggcgaggcgcgggccgatagcgatatcgacatcctcatcgacctcgatccctcggcgcgattgagcgtgttcgactatgtcggcgtgaaagactacctcgccggcctcttcgagcggccggtcgatgtggtcaacagggccgggttgaagcctcatctcaagcccgccgttctgacagaagccgtgcatgccttctagcgatccggctc

SEQ ID NO: 164071 - DNA, 246 bp, Arabidopsis thaliana landsberg
atgttcgtattggtgccatccacaatgcctattttgcttgtctctgaatataaatttttgtttttccccgatgatatgaccttcctctttaatctcaatcttcttgtcatgcattcacctccccttttcttgttccttatgcccatagttcgcttcatcatgttggatggtcctttgtgttttctggttacaaagtgtaccaatattctcctttgtgaaagtagtctctcgattggtggatgagca

SEQ ID NO: 164072 - DNA, 1627 bp, Arabidopsis thaliana landsberg
caaaattattctaccttaaatgtatccgtttcagtctttgaattaattattcaacgttcgaatttgaaaccactccgggcctcctttacccttcggcccatttgtcttcttcaattcgagtagtcctaacttcgatgttgcacccacttcgccaatcgacatctcacccatactcttactttgaagaatcttacgggcttttcatcttatgggcctcccatacttgtgtagcaatctttggccggtcccgagcccatggtgcgggatccgacaccaacacttatagccaaatatcccgaaaccctaatacttaaaacgacgaagtatttggacgggttaagaactgtactcgacccaggtggtcgagtgagaggtcgagtgaatagctggagtcttcttttcttccttgtgctcgagtgtctggttgagtgcggaatgaagaaggctctgaagcttgtcatcgagtatgcagtcaagtgttgtgatggcgatactcgacctctaagttgagtgacgaggtcgagtagtggtctggcagtgaaggtgaaggcactcgacctgggggtcgagtgatgtgatcgagtggtgttagaagatactcgacttccaggttgagtgaagaggtcgagtggtggtctgatgatggaggtgaagacactcgacctcatggtcgagtgaagtgatcgagtgatggtctggtgatggagatgagggcactcgaccaagaggtcgagtggtgaagtgaagtggtgatgtcctctgctcgacctgggggtcgagtggtctcttgagatcttgaagctcctactcgacctcttggtcgagtggtttgtcatgatcaggtctgcttcttccagatagctcgtcaacagctccaaatcacctgaaatcaacgcaaatatgcaacatgcatgcaaaactatcctaaacatgcaaagtgatgacaaatgatgtgaaatggtataaaacagtgatgatatgatgctaaagtgatgacaaatggatgctcaagacaagcaaaatacacacttatcacatacacatgacatcaagtcatattcgactccaaaaaactaaccaagcttcttcttgcttctcaaagctttgatgggaccccaggtcgagtgtcttcaccttcattgccagaccactactcgacctcatcactcaacctggatgtcgagtatctcctgtccttcactcgatcacatcactcgaccccgaggtcgagtgtcttcaccttcattgccagaccactactcgacctcatcactctacctggaagtcgagtatcaccatcacaccactcgactgcatactcgatgacaagcttcagagccttcttcattccgcactcaaccagacactcgagcacaaggaagaaaagaagattccagctattcactcgacctctcactcgaccacatgggtcgagtacagttcttaatccgtcccaatacttcgtcgttttgagtattagggtttcgggatatttggctataagtagcatgtacttcacattttcgcagacaagaagtttttacctagttttattccgcagaccttgtgttctagactttttgtaatccggatttctctttatctattcagtattcagtattcagct

SEQ ID NO: 164073 - DNA, 372 bp, Arabidopsis thaliana landsberg
atgaggttgatagtgcacaatatgttgtcttgcaacattaaaggagtggtcaacaagtttcctctgcgaatcgaagcggagaaggtaacagtaaaagaggttgatttcaacccggattttctcaggtacatgtttgccaaaatcgattggaaggctctagtggatggtgcacgttctatggaatacaccgaacttcccgataacgcaccagacacgacgacgctggaatctgacgaaacattcctaaggaaattccaccacgcgttgctcgagcttcaccttgaggaaggctcactcgtctgcccagaaaccggtaggaagttttcggttagcaaaggaattcccaatatgcttctccacgaagatgaagtt

SEQ ID NO: 164074 - DNA, 516 bp, Arabidopsis thaliana landsberg
cttgcaaaacttcttatcctcaccacacttgtaacaacaatatcagtaatatccagagccaatgaagagctaatgatgcaacaatgtcacaactctgacaatcccaccttgtgtcttcgctgtctaagctccgaccctggttctcatgaggccgacaaagtaggactggctcgtatcatcctcaaatgcatcaactcacacctccttgttctcaccaagaacgcttccactttgggctcgcagcactaccagaatccaaatactgcagcagcgttgaagcagtgcggtttgggtttctcaacggctaagcatggcgtgggagaggccgacactcaacttataaccggagattacgacaaggctgcgtatgacgtcagcgtgaaggtggtgaatcctccggtatcgtgccgcaacagtctcgaggcactcaacattcaagtcccttcaagtttccgttaccatatggatgtatacttggcgttgactcaagctctcctcaggatcgttgatcgcttc

SEQ ID NO: 164075 - DNA, 582 bp, Arabidopsis thaliana landsberg
  unsure (1)..(582): unsure at all n locations
atgttattaatggctagctacaagaaagatgaacaagaagagaatcataagtggtacctcgatagtggtgcaagtaatcacatgtgcgggagaaaaagtatgttcgcggagcttgatgaatcggtgagaggaaatgtggctttaggagatgaatcgaagatggaggtaaaaggtaaaggaaacattctcattcgattgaagaatggagatcatcaatttatttccaacgtttactatattccgagcatgaagacaaacatcttgagccttggacaactcttagagaaaggttatgatattagattaaaagataataacctttcaataagagaccaagaaagcaatctcattaccaaggtgccaatgtcgaaaaatagaatgtttgtcctcaannnnnnnnnnnnnnnnnnnnnnnnnnnnnnnnnnnnnnnnnaagaggagtcttggctatggcatcttcgattcggacatctaaattttggaggattggagttgctttcaaggaaggaaatggtgagagggctaccttgtataaatcatccaaatcaagtgtgtgaaggatgtctacttggaaagcaattc

SEQ ID NO: 164076 - DNA, 506 bp, Arabidopsis thaliana landsberg
atgacccccaacgttacacagagagccggagggtccacaccggttggaagaccagcgtccctgcctcagcagtacgacttcactccggcgccggcgcctcaagctcctctgatgcagccgcctcaagccgtcggagcctcaacgtcagcccccccactaccgcaactatccgccgccgcaacaactattccagagctccaccactcagcgtgttgatccgccgccgccgcaatctgaagaggcgcagtttaatccaccgccagaagctcctctaaaccaagaacaaccggagtctccaaatcccaactctcaggcatacaaccatccatcttctcaaggcaataactttcaagagggagctccttaatcgttgtcggagctacaagaagactgagcgagggctctcaatgacatacttatggttcccaggagggaaatgtggaccaccgtactgtctcatattcccaagccgaagactgaatagtatgtgcccttcctcaacccta

SEQ ID NO: 164077 - DNA, 885 bp, Arabidopsis thaliana landsberg
atgaatacaacccgagcctatcgtgagaacgctgcggaaaacatctacaacgcctcgggagacacccaactgagcttaatggacagtcatcaagcgcgcccgagccggtacataccgtttgcccgaagccacctttcaaacgaccatcgagccgtgaagaacacccgaggcaaaaacttgtaaaaaccattcattctcaaaggatcatttccagtaaaataggatctttttatgggactttcggaaatgataaaggacaatctttgaagataatgtcggatcaagaaatctttccgaagcctccgaagaatatggaaaatatctttaatacgattatcctccagaaccgacttaaggataaatggaaatctttcgagaatatcgcgagggaggcggtttaacgaccctatataaagtgtctcagggacttcacaaaagggtcatctttggatactcacaagaaacacataactttatacctattgagaactacgaatggcttgatcctttcacagggtacgtaggcaatccattatggatgcagctatacctttttaaaaccataactctttttctgttgttgagcaaaaccctaatgtatttcataagagattagaacctcttttgtaatcgagtcttggatagaatacctaatgaagagaaattactagatttgttttccctctctaaacaaatctattgtgtgaatccttggttcaacaattggcgccgtctgtggggaacgacaaagaactctcttcgcatatcattcatccaagtattcgatgtacgctcatcaaaccaagacaatcagatccgtctacttgcggggggatttcccgtcaagatacaatgaaccagatgacgtacaacaattccacggat

SEQ ID NO: 164078 - DNA, 209 bp, Arabidopsis thaliana landsberg
atgaataaacatggacaatattgaattacatttataccttcggctcgacagaaggtgaaagtccaagagtgacgcgtgagtgaataccagtcagcgtgaacagtacgagggtactgttcatctatttatagccatagggcgtagcctgtgtgaaattacattcatgtccttcatgtttactattgacttaaggacaatctatcgaggac

SEQ ID NO: 164079 - DNA, 267 bp, Arabidopsis thaliana landsberg
atggctttcgtgagaagtctattgggagcaaagaagattctaagccgctccaccggagcaggatctgcggcaccaaaagggtttcttgcagtgtacgtaggagagagccagaagaagagatatttagtgccactctcatacttgaaccagccttcttttcaagctctgctcagtaaatccgaagaagagtttggatttgatcatccaatgggaggcttgaccatcccttgccctgtagatacatttatcaccgtcacttctcagctt

SEQ ID NO: 164080 - DNA, 291 bp, Arabidopsis thaliana landsberg
  unsure (1)..(291): unsure at all n locations
atggcatcaannnnnnnnnnnnnnnnnnnnnnnnnnnnnnnnnnnnnnnnnnnnnnnnnnnnctttgagcaggctctagcaacctatgaccaggacactcctaaccgttggcaaaatgttgccaaagtcgtgggtggaaaaccaacagaggaggtaaagagacactacgaactcttagtgcaagacatcaacagcatagagaacggtcatgttccattcccaaactacaggactagtggaggctgcactaatggcaggcttagtcaggaggaaaaaaggtatgtattgtcc

SEQ ID NO: 164081 - DNA, 432 bp, Arabidopsis thaliana landsberg
atgagtcgtctaatatttttcatattagttactgccatttattttgtaggaaatgaagcttgcaaggaaattgagattgtaattaagaacacacttggtccaagtagaattcttcaatatcattgccgctcagagaaacactaatttaggagtccaatatttaaactttaaaggtacaaaaatcattaaatttaaggatgacggaagtcggaaccaagcgatcgatttggaaatgtctttttaggcaagagattaacatgaagttttataacgaggttgaagcatatgttccaaagtttttaaactatcctacaattccaaattatattcaatgtggtcaactacgtgtgtatattgctagagtagatcatatatattttcgaatggatggacgtgcggcattgcctgtacgttctggcgttcataatgtgc

SEQ ID NO: 164082 - DNA, 275 bp, Arabidopsis thaliana landsberg
accaaggagctagcaaatacagattatgacgccacgactagattcatataggtatgtgtgttccagaacatgatccattccctatgatgagaaagaaatgataggagacatggatagcaaccttcaccgatggaaaagatagtgaagctgattgacaagaacatctgcaaccggtagtgtactctaaggaaaggagatgatgagaaatatgtattctactgtggtttgcatcgagacaaggataataatagtatagaatctcattgtgatttagt

SEQ ID NO: 164083 - DNA, 281 bp, Arabidopsis thaliana landsberg
atagtctctgtaggaggtgattctgttgcggatagtacagtcaatcaggcgaagcacagtatcctctgatctgaaaagtattaccgatggagccgattgtttagatcaccctagaggaagagccggagagcattgtcaagctagaagacaaagtcttctcctatcttttggaccttgaagggcttgcatctgggagacagaggcagaccatgagcggagaggttggaattggggttctcaaagcaattgatgaccaaactatccaagacagatagctctgg

SEQ ID NO: 164084 - DNA, 345 bp, Arabidopsis thaliana landsberg
atgattggcctgcctgcaaacacacgcatctggatcgccgccggtgtcaccgacatgcgctgtggcttcaattcacttgcggcgaaggtacagacggcgcttgagcgtgacccatatggtggccatgtttttatcttcaggggtcgtcgcggtgatttgctcaaggcgttgtactggagcgacggcggcctgtgtcttctggcaaagcgtcttgagaaggggcgatttgcatggccgcgtgccgacgccggcgtcgtgccgctcacgaccgctcaactctcgctgctgctcgaaggattcgagtggcgtcagccagtcgatgcagcacgcccgcgcagtgctttg

SEQ ID NO: 164085 - DNA, 249 bp, Arabidopsis thaliana landsberg
tcggatccagaagccatggacaaaagcatcagcatcacctccaacgttagcacgacgacttccatggaaaagatcgaccacgccgctagctggatcagcgcaaccgtaatatccgctttcttcacctccctcgaaccgtgcgcctgcgtcaatctctccacctctcacgacgacgaagacgacgacgacgacgagtcccatcaccgtcctctcgctctctccgccgctcctcatccaaacgacatcgtt

SEQ ID NO: 164086 - DNA, 207 bp, Arabidopsis thaliana landsberg
acttcaatggcggattgggctccagttctcgtcggcgtggtcctgttcgtgattctctcaccgggacttctcttctcattacctggtaacaaccgcaccgtagatttcggtggcctcaaaaccaacggcaaagccatcgctgttcacactctcatcttcttcgccatttacaccattttaatcctcgccctcaatctccacatctac

SEQ ID NO: 164087 - DNA, 361 bp, Arabidopsis thaliana landsberg
ggagagaagcagttagatcggagagaagtagttagatcggagaagaagacgttaccttggaggcaaaagagatcgagttgcggctgctgctggagaagaagagtcgcgacggctgctggagaagacgagacgcgacggagaagaagaagaagttagatcggacggtggaagttggaatggaaagaagaagttatatcggagaagaagacattaccttggagaagaaacagatcgacttgcggctgaagctggagaagaagagttgcggcggctgctggagaataagagacgcggcggagaagaagaagagaggcggcgacgtaatcagatcgaagaagaagagaggcggcggcgaagaaaa

SEQ ID NO: 164088 - DNA, 432 bp, Arabidopsis thaliana landsberg
aaggtagggaaaaagtcactgcataggtccctgtcagacatatcgctggattatcacagagaagaagagaaaggactggggacgatagtggaggtagagaaggcaaagtgcgagtgctgcgggatgagggaggagtgcacgatggagtacatagagagggtgagggagaagttctttgggaagtggatatgcggactgtgctcagaggcggtgaaggaggagagggataagagggaagaggaagggctagaaggggccttgaaggagcacatgagcgcctgcctcaggttcaacaagctcgggagggagtatccggctctcttccaagctgatgccatgagagatatgctccggagaagcacgaggggtcagtctattatccctaagcccgccatttcccgtacttcaagctgtattcctgccatcaccagg

SEQ ID NO: 164089 - DNA, 413 bp, Arabidopsis thaliana landsberg
atggctgatttttccgattcttttgtcatgaagatgacagtgaagaccacaccggagtcagatttagctttaacaaacctcgcatattgttctccgtttgatctacatcgtttcgccgttcccgaaaccgccgatctcttcctcgctaacgtcggagaagtttttgttctatcaatctcatatcctttttttattcacttacgattttgatcttattcacacttttatttattaattatcgtcgtttctaaacattttgtcccacgggtttatcacatcttttttcagattccaattaagcagttataccttcttatggagatggcaggtctgaagagccggtttacattaggaaggaaaaactcgacatcactcatttcatggattgtcttcaggaatttacccaagagatt

SEQ ID NO: 164090 - DNA, 507 bp, Arabidopsis thaliana landsberg
aacgcagtcacacaatcatcatcacaagcgacgtttccagctgcaatgcaacgaaagccaccaagttactcaatcagcgacgaagatctcgaatccagaggctttcttctccgtcgaacaacagaaggacttaacttagaccagctgaattcagtctttgcagccgtgggattccctcgtcgtgacacggcgaaaatcgaggtggcgttgcagcacacagacgcgttgctttgggtagagtacgagaaaacgcggaggcctgtagcgtttgcgagagcaaccggtgacggagttttcaatgcgatcatatgggatgttgtggttgatccatcgtttcaaagctgtggacttgggaaggcggtgatggagcggttgattgaggatttacaggtgaaagggatttgtaacattgctctgtattcagagcctcgagttctcgggttttatcgcccgcttgggttcgtctctgacccggatgggatcaaaggaatggtttttatacgcaaa

SEQ ID NO: 164091 - DNA, 1174 bp, Arabidopsis thaliana landsberg
caggccgagtacatccagcacaatactcgaccacctggtcgagtgacattggagccattcttcccatctactcgaccccgtggtcgagtaaccgcagctcaggccattagataaaaccactcgaccccccggtcgagtatcacttcgtcacaccacctaaccacactcggctgttcactctaccacactactcgaccccctggtcgtgcatcatcactcaacaccaatacctccactcgaccaagcactcgatcacatcttcagagtctactcaaatccgcactcaaccagacaagctgagcattaggaagagaagaggagaagaagaagtgtttggaagcggtccggagcttcatccaatcacgaagcccatctctgtccattatcactctatgggccaggcgattaggttcccggcccatctactgtcattttatttcgttttgtataaataggtgtctgagggttttgtcctgggacatctagtcgacattgagtttttgcttcagttttattttctgttttactctggctgcgccgcttttgtttctgcaacctgtaattcgagatttttccaagttattcagattccgcatttgattttacgtgtcatcttgtttctctactctttatctctttacttatgcaatatacttgtttacctgcgtttatgtctttgagcatgttgtctcagtagtgacatagagttcttaaggatgggatagaatggttgtggaatccttagtctgtagaatggttaagttttagaattgattgaatcccttcaggactagttgtgtttactgcttatttctttctgatcaactggaattcgatccaaagcattcccgtacccagaaggtgttcgatggaatgcttgatctactagttcctgagatattcatctctatcccaagggattggccgtttagagcgtttattgactttatcagtccgttcttattgcctgcatagttagattccgttaatggaaattagtttgggctagctttgcttgaggatctctatcaccgggagtgaattgatttgttcttgaacatgttgtctagggataggttgattgtgcttgttaaccattcgaacaatcaaggataccactctattcgattaccccatccttaggaatttctcttctatctgatttctctgtttt

SEQ ID NO: 164092 - DNA, 294 bp, Arabidopsis thaliana landsberg
tgatgcatggatatttcggactggcggcaaaagatcgacgaactggatgagcagattgttcgcctcatcagtcagcgcgctgaggccgcacaggcgattggcgaactcaagcggctatcggaccttccggtctatgagccgaagcgtgagcagaatgtcttcgaccatgttcgcgcagcgaatcccggcccattggccgatgccgagatacagcacgtttatgagcgcattatcgacgtgatgcggagcctgcagcggcgggacttgtagacggcctgattgagatcgaattca

SEQ ID NO: 164093 - DNA, 325 bp, Arabidopsis thaliana landsberg
aagaagaaagaatcgagaggagaaattgggaagaacatgtcgttgatatataagaagaaactaacggtgttggtcgttgacgatgatccatcttgtcgtacactccacatgggaatcattcaaatggctggaggattcccttacatggtgaaaaacggcgagaaataagaagctacgtgacatgaatgtgacgtcaatgatcgtggggatgacgtcacatgaggacgagactagggcattcatggaagctggagttgaccactgcttgtcaaagcccttaacctttggaaagatcgcatccatcattgaccatctcaaaaccgca

SEQ ID NO: 164094 - DNA, 360 bp, Arabidopsis thaliana landsberg
ctaaaatctgagaaatgttcttggtttgttttggatgatgataattgcagctcagctactaacagattgatcacatcaaaggatcatgcttcagtgcagctcaacattggtcatcttgatgctaatggactctacactggtcaattcactacctttgctctctgcggttttgtccgtgctcaggtttgtcaagtttagcttcttgatcataaatcttgttactctagctatagaattggccctggatcattgtgttattagtgttggaaacattgttaatggtttctagaaacgatgtagggtgatgcagacagtggagtcgataggctatggaagaaaaagaaggttgaagccaaacaa

SEQ ID NO: 164095 - DNA, 419 bp, Arabidopsis thaliana landsberg
aaaaaaaagttcacaatgaattgtttttcttattttttccttgttattatattatgtgcaggattgaataatgcgaagttcaacgaaaaaaacttcataatttttaagagttctcttggtccgaaaaaacttctcaggattcattgtacatcagaacacgacgacaccgactacgtttacctgagacatggacaaacttacgcattcagttttcatgatagtgtcttgaaaactatatttgattgtgagttaaagcaaggaagtagttattataattacaacttttatgcaagatttagggcatataaaggtggaggtctgatagttcactacggtaaaaagaacttttggatgctagagaagatggtatttacttcacacatggtaaagcaacacctaacttagagtataaatggatc

SEQ ID NO: 164096 - DNA, 1034 bp, Arabidopsis thaliana landsberg
agatttgagtcatgaattctgttggtgtatataggaggaggaaactacatgatgaacagatctatgtctttaatgaacgtgcaagaagatcataatcaaacaatggatgaagagaatctatcagacgatggggcacatactatgctgggagagaagaagaagaggctgcaattagagcaagttaaggcattagagaagagctttgagcttggtaacaagctggagccagagaggaagatacaactagctaaagcattagggatgcaaccaagacagatcgcgatttggtttcaaaacaggagagctaggtggaagactagacagctcgagagagattatgattcactcaagaaacagtttgagtctcttaaatccgacaatgattctctacttgcctataacaagaaactccttgctgaggtatgtatctatataagtaagtatatatgtgtgtttatatagtaaataaggtgtttaattcaactttcatttctaatttgattgtgtttgtttttttctttggtttttttatttttggttttgcactaatagtaataaccaacgtaagataaatctaggactacaaatatttttctgattattggcttggattggtacaatttatgtagtatatatatatgtgtatatatatcagtgtatatttatatatatatatatatatgtatcttgtgtgaattaaagtcgtttaatacgaaatgcaatagattattgttaggcacatgatccaacactataagatgtttgtcaaaagacagtaggtgttttgtttattaataaaaaggattcttgatcaatatttacaatttaattaatacattcccatatgactatcaagtaatggcatgtgtgcgctaaccaaatttgacaagaatactgatttttatatcatatcatttttgtgtgttttaaatgattttactacttattgaaatgtaatagttacaagattttcaaaaattacttaagctaagtatatgtaaatatataatttacatatataatcaaacagttta

SEQ ID NO: 164097 - DNA, 210 bp, Arabidopsis thaliana landsberg
atgaatgaacataaacaatattgaattacatttgtaccttcgacttgacagaaggcaaaaagtccaagcgtgacacacgagtgaatacaagtcagcgtgaacagtacgggggtaccgttcatctatttataggcacagggcgcaacctgtgtaaaattacattcatacccttcatgtttactattgacttaaggtcaatctatcaaggac

SEQ ID NO: 164098 - DNA, 310 bp, Arabidopsis thaliana landsberg
catgggtcggaaaagcaaaaaagggtaccgaatatatcacatgataatctttattctggttttcattgttttgtggacggatcttggaaaggaagccataagttttcaggattatgatggttttgcacattatcaaatgacgaaacatcaagcatgagagctgttaatctgcgtagaagtctttcctactccatcaaaagtcgaagctcttctttgggcgatgaagtgtatgatcggtgcagataatcaagatgtagcgttctttacagactgttcaaacttgctgaagatggtggcttccccaactgaa

SEQ ID NO: 164099 - DNA, 396 bp, Arabidopsis thaliana landsberg
tcatctaaaatatttgtcgttctctctataatccttttctatgtcataagttcttgtcatggatacaatccttttgctaaaaccgttgtcacagtcaccaacaatatcagcccgcaaacaaccttgacaataagttgtagatctaaagacgatgatctaggtgagcatctgttgctgcatgggcaagcgtttctatggaagtttagaccaagctggtttagaacaacgttgttcacctgcaagtttctttggaataacaatgtcaaatggtttgatacatatagatctgacagagatcaaggtcattgttatagttgtaattggtctatcaatgctgacagtgcttgtatttcaggaaacttcaacaaaaaatttgataggtgttatccatggaat

SEQ ID NO: 164100 - DNA, 507 bp, Arabidopsis thaliana landsberg
atgggaaacagcctaaggtgttgtctggcttgtgttcttccatgtggagcactagatttgatcaggatcgttcatctaaacggctacgttgaggagatcacacggtcaataaccgccggagagatcctccaagcaaaccctaaccatgtcctaagcaaaccatgttctcaaggagttgtccgcaaaatcttgatcttgtctcctgaatccgagctcaaacgaggaagcatctattttctcatccccgattcttccttgccggagaagaaaaggcggagaaaggacgctcctcgccggaagaagaatctccaaaaccctagtgccgacgccgccggccgagaaattaaaggtgatgaggaatgtgtgaagttgtgtgagaagtacttagaagaagtagtgtcgtcggcgtcgacaggtaaagagcaccgtcatcgccggcggcacagcagatcggcgtcagtatccacgtggcgacctctccttgacagtatctctgaggatcttaat

SEQ ID NO: 164101 - DNA, 465 bp, Arabidopsis thaliana landsberg
atgtcgctgattccaagcttcttcggcaacaacaggcgaatcaacaacaacatattcgatccattctcactcgacgtatgggatccattcaaggaacttcaattcccgtcatcgtcttcgtcggcgatagcaaacgcacgtgtggattggaaagagacggcggaggcgcacgtgttcaaggcggatttaccggggatgaagaaagaagaggttaaagtagagattgaggatgatagtgtgcttaagatcagcggagagagacacgttgagaaagaggagaagcaggacacgtggcatcgtgtagagagatcgagtgggggattctcgaggaagtttaggttaccggagaatgtgaagatggatcaagttaaagcttcaatggagaatggtgttttgactgtgactgtgcctaaagtggagactaataagaagaaggctcaagttaagtctattgatatctctggc

SEQ ID NO: 164102 - DNA, 270 bp, Arabidopsis thaliana landsberg
atgaaggaaattacaagcaaatatcatgataacaccaagagattcatccttaagtttgtgtttgagaatgcaatacatttcatatggacggagaggaatgatagaagacacggagagcgaccctcaacaacggaaaaaatggtcaagctgattgataaaaatgttagaaaccgtttgagtactctaaggcaagggaaggtagagaagcatgtcgaaggactccaagtgtggttcgcatcgagataatacaccgaggatataggaatttat

SEQ ID NO: 164103 - DNA, 504 bp, Arabidopsis thaliana landsberg
cagcaaaatcttcacattgcacgtaaaaaatatctttatacaatgaacggcatgagtgatcttctccggcgctccggctccttcaccatcatcgttcttccaacatcgccaccgtcacggtggtatgatgcatatgactttcttttgggaaaaaacacggaggttctattcgacggatggccagggaccagtctgaaaatgtattgggtctgtctcgccgtcatttttgttatttccgctttctccgagtgtctatcgcggtgcggtttcatgaaatccggtccggctagcttgggaggcgggctattacagactgcggtttacaccgtgagggctgctttgtcttatttggtcatgctggctgtgatgtcgttcaatggaggagtcttcgtggctgcgatggctggttttggattagggtttatgatttttggaagtagggcttttagggccactagcagtaacagtcacaccgaggttcaatcacattgttgatttttgtct

SEQ ID NO: 164104 - DNA, 603 bp, Arabidopsis thaliana landsberg
atggcaactgaatctttcaaactcgatgttcatgtacaggctctgtctcaagatcggtcattagggttcataagtacgaaactaatcagtctacatagagaagtcgaggaatttctcattaacgacaaggatgattgtgtcacgagtctcggatcttacccggatgattcttctacttgtcacgacccactaatctctctgacactcccaagtttcaaaccaaacgacgtctatcaacatctccagacccaactccacgatcatgacttgtccgagcaaatatcttctaagattgtcgaagcccaacaacggcaaacaagtcaaagtttttactcacaacaacaacctttattcatgattgtctctgtcaaattgactcaaaaggtatacagtgttgtcccttgtatttcttctccgtcagcaacagatgtggaccaagaagaagaatcggagacttgtgcaatctgtttggagaatatgtcgagatctgagaattattgccagatgccttattgtaagcattgttatcatgaaggatgtgtcaccaagtgggtgattggtcataataactcttgccctctctgtcgcaaacctgttgacaaa

SEQ ID NO: 164105 - DNA, 508 bp, Arabidopsis thaliana landsberg
ttcactcgaccaataactctaccaacatggccgagtctcaccatcatcattcactcgaccaatcactctaccaacaggtcgagtatcaccatcatcattcactcgaccaatcactctaccaacatggccgactcccaccatcatcattcactcgaccaatcactctaccaacaggtcgagtatcaccatcatcatccattcgatcaatcgctctaccactaagccgagtaccaccatctctatcactcaacatcatactcgactgtcagcttcagagtcttcttcattctgcactcaaccagacactcgagcacaaggaagaatagaagactccagcatatcactccacctctcactcgaccatctgggtcgagtacaattcttagtccgtcccaatactgcgtcttctctgaaatattttgagtattaggattttgaagtattttgctatagttttgtaatccggatttctcgttatctattcagtatttagtattcagtatttgtt

SEQ ID NO: 164106 - DNA, 327 bp, Arabidopsis thaliana landsberg
gacgcggtcgaaatgccttcagcgacagacatggcggccatgcaggccaatgccgacaaggccgcgcaattgctcaaggcgctgggcaacgcccagcgcctgcgcgtactgtgcatgttgggcgagcatgagatgtcggtcggacaaatcaacgagcagctgccggaattgagccagtccgcgttgtcccagcatctggcccggttgcgtgaggaccagatggtgcatacgcggcgtgagtcgcagaccatctggtactcgctgccgccggggccggcgcgcgaggtgatcgccacgctctacggcatttattgcgccccggtgcgc

SEQ ID NO: 164107 - DNA, 466 bp, Arabidopsis thaliana landsberg
ataaagcttctttggaaatctcagcattgcactaccgttgcttgcaaatctagaatctggattttaagatacttccggtgctcttgttcatgtttgcaccaatgggactgttttggtgacacatggaggtgttgaaatgggttaaggatatgcatacaaaggttgctgcaacggcctttaacattccccttagttcggttacatgcactcagtggactttggccaagacaaaactgttattgttctctcttatcatttttgttgtctcttaataggttccaaatgcctcacaaactgttattgctctcttgtcgttttgattgcctcttaatagcttcctaatgcgtcacctactgctgcttctgcgagctctgatatgtatggtcctgcagttttagacgatgttaatcatattatagcaaagttggagcctgttacatctaaacacaatttcaacaccattcgc

SEQ ID NO: 164108 - DNA, 429 bp, Arabidopsis thaliana landsberg
atggattcaagagacaccggagaaactgaccagagcaagtacaaaggtatccgtcgtcggaaatggggaaaatgggtatcagagattcgtgtcccgggaactcgtcaacgtctctggttaggctctttctccaccgcagaaggcgctgccgtagcccacgacgtcgctttttactgcttgcaccgaccatcttccctcgacgacgaatcttttaacttccctcacttacttacaacctccctcgcctccaatatatctcctaagtccatccaaaaagctgcttccgacgccggcatggccgtggacgccggattccatggtgctgtgtctgggagtggtgattgtgaagagagatcttccatggcgaatatggaggaggaggacaaacttagtatctccgtgtatgattatcttgaagacgatctcgtt

SEQ ID NO: 164109 - DNA, 472 bp, Arabidopsis thaliana landsberg
gcagcagaaaaatggcgttgtactttatccagaaatttgttcaagagaagaattggcagacttattctcaaatactgtttattctctgccacatcttctaatcatgcagagattttaccaattcatgaagctagccgcgagtgtgtatggctaagatccatagttcaccatatacaagaagactgtggtatgtatgcagggaaaaagactccaacaattatgtacgaagacaatgcagcatgcatcgcacaactctaagactgatacatcaaaggcgatagaacaaagcacatcctaccaaaattcttcttcacgcacgatctacaaaagagcggcgatgtacaagttctacagatccgttcgaatgataatctggctgacttattcaccaaggcgctacctactgctacttattcatcgtatcggattacgccgtctcaaagatctcgacgaatatactcataagggggag

SEQ ID NO: 164110 - DNA, 424 bp, Arabidopsis thaliana landsberg
aggttgaagagcggtgagaccaatggtgtccaaagtaatgtggtaagagcaagcagcagaatgcgtggactggttgtatttctttacgctactgagctgtaagttttcctcctaatattgaacaagaaagaattgtagtgtaaaaatacatagacaaggaaacaagaagagcatgcatttataatcaaacctggagcaaattgtaacgatgaaggccgagcctggcataaaggataaccaaggcaggacatggagaagactcatcgttacagattgtttcatttccaccaaagcgtggtactctctttataaaggaactctagaagcgacagagggttaggatgtgtgacgatgaaagacatatatgtgaatcgctttttaagaaattaacaacgaactaacaatgatgaagaatattaccgcg

SEQ ID NO: 164111 - DNA, 537 bp, Arabidopsis thaliana landsberg
atgagttctagctctgtcacatctggtgtcgttagagagcgtggtgtgccgtcaaagtgtgtgtgtggattaggagtcacgatctttacatccaagatgcaagaaacccaggacgaccattcttccgctgcgttagcaaacgagatccgagcgtgtggactagcaaaaaagaggtgagtatgttataccaatttcttagccaagcatttgttctacaagctaacaaagtgtcaatgggtagaggatgcattagggtcacttgttcaaatgggtagaggatgctgtgtttgaagaaatgaagatgctctaccaagaattgtcatcattgcaaatgaggttagcaagggaaaatcagagacaaatgtggtaaaagaacaaatacaagaattgaaggaagaagcacttctcaggaaaaaggaactccacaagtgtatttggtgcttgaaagtttgttttgtgtggctttttgttatcacaattgtagttgtttatggaatgtttggtcaagggaaccaaaagaaactcgctattggttat

SEQ ID NO: 164112 - DNA, 487 bp, Arabidopsis thaliana landsberg
aagtgtgttttaacgatttcaggaaaggttcacggatctttggctcgtgccggtaaggttagaggacaaactccaaaggttgcgaagcaagataagaaaaagaagcccagaggtcgtgctcacaagcgtctgcagcacaaccgtcgttttgtcaccgcaggtaatttttccgatctagtttctttgttgattcctttacagtgtgttagtgttcattgttgaattcgatttttataaagcgatactactgcattgttgaatgtggttaataatattgtgaatttgaataagaattgtgaatactcgagaaatgtgttatattggaacacttgtggttcgatgttttagactagagcttctgaatttatcatttggttttgactcaaatgcttattacgttgcgtatctattattggttagtaatggttcattgatttgtgcagttgttggtttcggaaagaagagaggacccaactcttctgagaaa

SEQ ID NO: 164113 - DNA, 653 bp, Arabidopsis thaliana landsberg
atcttcccgtttattgggctgacccatttaatatcacatacatatgtcttttttctttatatgtatagataaccaaacaacaaaaggatatattggtatattggtttattaaagcaaacaacttattatggagcttggacttataagaacacatgtgtggttatgagttttgactttgcttatgaagagtttaatatgattgaattacccgttgaggcttgcattgtttgacaaaaatatcgagcgagcctcattaactacggaggcaagttagctgttttagaatactccagcctttcgtctaatgacaatgtggacctgtgggttatggaggatgcagggaatatgcagtggtcaaataagaatctggtcttacctctttcacaaatgaagtttttccatggcgataagttggagatacaatgcatgagtcgatgcagtcagattaggctggtaaagacaaatatcagagcgtttgaaactagacactctgtcatatatgatttggagaagaacaaaataagaagcctcgcaataaagaaattctcacgtctctggtttttggatatagagagagtctttgcattggactatttgggaggatgatcttgagagcattatgtatttagagacctgaattaagtttgaataag

SEQ ID NO: 164114 - DNA, 352 bp, Arabidopsis thaliana landsberg
gtatcttctctgacgcatatatcagatgtacccagctttgttcttaaatccgggtgtgacaatatgatttttttttcatgtcagtttgatattccggattaagaggccacccacccagctgatgaacgcctattgcgagcgccagtcagtcggtggacatgaatgccattgccattgcattcctgtttgatgcgcgtaggcttcgtggtgcttgcaaacccacttctccagtatagcttccagtttccagcatttgactgatatttggcatgcctgtccagctggaaatgggaggacggcgacgagatcgacggacgccatgcttcaccagactgccttcgctggtactctg

SEQ ID NO: 164115 - DNA, 525 bp, Arabidopsis thaliana landsberg
ttgagtagcaattccgagaactcgattgcgagtacgcaatccttgagccgttgggaacgtgggttatcatcaaagtgtcattgcggactagacgtggtcatctatacattgaagtcatcaaagaaccctagatgaccatacttctgttgtcctacgcgtaaagatgtaagtataattgattttggattttattggtttcgttgttaattggtttgtgattgaaaatgcaggaccatttgtttaaatgggtcgaagatggtacatacgaagtggttgtagacagttggcctaaattgtccaccaggacaatgagataaacgcagccaagtgagatttgcagtcgagctagaagcgttacaggtgatggtgaaagaactgaaggaagaagtagtgaggagcgaaagggaaaaccagaaatgaaaattgatggtcaaattttgatgtcttggctttattatcattgtcattgtacttggtatcctaatgttcccaaaaaccaacgaacagaggcttcttcttggctac

SEQ ID NO: 164116 - DNA, 3213 bp, Arabidopsis thaliana landsberg
  unsure (1)..(3213): unsure at all n locations
nnngcgaccaacaaggagaggttggaagacttggagacaagtcaagaaatgatgcaggatgagttacaaaagatgaacgtggctatggtagacctgaagggcgaactggaggagaagttcacacgactgatggaagcggtgagcaatcgtgacagtggcggctctgcaggctcacgaggtagtcgcagaactgatgggaaccgagcccacgcaccagggtatcggggagagcacgaaaattcgtttgcggctgtagacgttccaccggagagaccgcgacacgtgaagctggattttccaaggttctcagccggagatccaacggaatgggtgagcaaagtaaaccaatactttgattaccaggaggtgccagtggagcagcttgtgcggttcacttcgtttcatctcgacggagtcgccaacagatggtggcaggctacagcaagcgggctccgaaacgatcgtatttcgatcacgtgggaagtttttgaacgagagctctgggctaggttcgggccacacgaaggagaaaatttccatgaggcgttgatgcagctgagacaaaccggttcgttgaatgattatcaagaggaatttgagaagcttcagagtaacattcacgaatggtcgcaagaagcattggtgggcgcttttatgggtggtctcaatcactccatctctgaaggaattcgaatgtttcagccgaagtcgttacgagaagtgatcaattacgctagattgcgtgatggacagttacagagacagaggaaggagtatcgtcgaccaacgacattccccagaaccacgacggcgacccctgtctcagctataccggaaaatcgcagcaaaaaggtgcagggtcagacaccgaagaaactgtcatgggacgaattcaggagaaagaggagtctgagactctgttttagctgtgacgagcgttacgcaccgggccaaaaatgccgaaaacctcaactgttactcatggagggcggtgatgaggaagaggaggaggaagaacttcccgacaatccaatcgaacctgaaatcaccctacaggcactaactggttgggatacaccccgaacgttgcgggtacatgcggtggttaactggcaggagttggtggcgcttattgacagcggctctacacacaacttcataagtgagaaagcggccaatcgccttaatctgaaaatcacggccgtcaaaccattcaacgtgagggtagccgacggtcatccacttcggtgtcgaggttcgtatcagaaagtcaccatggacctgagtggtgtctcatttgtgctcgagttcttcgttttacctctacaggggctggatgtggttttaggcgtccaatggttggagctgctgggcccaaccttatgtgattggaaggcccataccatggaattcgaatgggctgggcagaagaggatggttcgtgggctactgtataagcccattacccaagtccagccagaggagatttctaaagaggcacgaatgggccaggcctgttttgcactcaccttccagccagaaaacgacgccgctcccccacaagtccccatcgagatgagttgtcttcttcaacagttcgaggaggtttttcaggtgccgtcagaactgcctccgtctcgcgatatcgaacaccacatcacgctgaaggaaggcgtcgaccccgtaaacgtccgtccctaccgctatgctcactttcagaaggcagaaatcgaaaaacaagtggaggagatgcttcgatccggcttgattcaaccaagctccagtcctttctcctcaccggttctcttggtcaagaaaaaggacgggtcttggcgattttgtacagactaccccgctctcaactccgccacagtgaaggatcgattcccaatcccaactgtcgatgacatgcttgatgagctacatggggccaagttcttaaccaaattagacctcagcgctggataccaccaagttcgtgtacacctaccggacgtgccaaagactgcttttcgcacacacaacggccactacgaatatctggtaatgccattcggattatgtaacgcaccatctacattccaatcgttgatgaactcagtctttcggagtcatctacgaaaatttgtgctggttttcttcgacgacatactcgtgtatagcagttcatgggaagaccatttggaacatgtgcgtgtggtgtttcagattctccagcaacataagcttttcgtgaaatttaagaaatgcgagtttggaaagttggagctggagtacttgggtcattttatctcaggagaaggagtgaaagtggatcagtcaaagattcaagcaatgcttgactggctggcaccaaccaccatcacggagctacggggttttttggggcttaccgggtactacagaaaatttgtgaaggattacggtatcattgcacggccattgacgaatctgttaaaaaaggggaagttcgaatggaatgaaatagcagaatcggcattcacactactgaaggaggctatgatgacaacgccaacattggccatgccaaactttgatgccccattcatcatccaaacggatgcctcgggcgatggtataggcgcggtgttgactcaggacgggaagcccttggcgtttatgagtcgctctttgggagtagcaaagcagagctggtccacctatgctcgggagatgttggccattgttattgcgatccgtacatggcgaccatatctcctaggacgcaagttcattattcagacggaccagcggagtttaaggttcctcctcgaacaacgcatcctcactccggagcaacagaaatggatgggtaagttggtgggttacgattacgagatcacttacaaacccggtaccgccaatgcagcagcagacgcgctgtccagaaagtcgggcagcccctgtctcaacaacatctttgtacctcacacggctgtctgggaagagctcaagcgcctagccacgacggacccgtaccttgtcaagatcgggaagctcgctaggacaacaccagggcagccatactcgtgacgaaacgggctcatctgcttcaacaacagagtggtacttcctccgggatcccatcttatctctgatttattacaagaatatcataattgtgtcatgggtggccattctggggtactgcggacttttatacgactagcacaaatgtttttatgggcatcg

SEQ ID NO: 164117 - DNA, 366 bp, Arabidopsis thaliana landsberg
ctggtacatgaaaaaaattgacactaagaaatgtgaatactcgatacaagacttagtggactttgcaaattcagaagaacactctcgcagaaagacgacaaccactattgctatctatggatggtgtcctcggccttagaatacgttaaaaagtttgggatcaaaaaagaaccgtctcgcccatttcacgcatatgccatttgtcctaaagatgtacctcatcgctctccttctatagagctaagttacatatctgaggtggtgtggttgaacaggattgaagatgatctttgttatatgaacgtccggtcgctgccagtatccccattttctttttcgaatatcgagaaaattggattccagaga

SEQ ID NO: 164118 - DNA, 3659 bp, Arabidopsis thaliana landsberg
atgattttggttgatgaaaaggtttgtatcatatgatttagagttctttaacattggttctttttttatgtgcctatgaaatcttctgccagttttttatatgctatggttttttcttgggctaattagcagcatcatagaatcacagctaccgtttcaaaatgcaactatctgtacagttttaggcatgttctcaaagagggtttctggtatcacatctctcatttccatgtcatttcctccaccaacacagtcaagtatacttggaaccctcatttctatatcaagtttaagtgggatacatccgtttggcctatgtcagaaataaagaaatgtgatttcacaaactggattttccccattgaccttgagtattcttctacagagaatgtctcggacgttactagtaagtaaaattttttgctttatgtatttgattgtctacactgtattaatagattgcaattttctatgatgcatagatgctattggtgtggtgtcaagtgtgtcttctattcagaggtttccctatgtttgtcgccaggatgagatcgattatgagtccagatatgttgaatttgaacttatgtataattggtaagtttttaagtttatagatttagaataagttaagttgcagtctttatatttttcatagatgaattgattatgtagcataagtaatgtcgaatggtatagggaacaaaaagacaagtgccgtgctgttgggaaatgctgtgaatggtttgttaagaaatggtatagggaacaaaaaatttaagtgcattgctgttgggaaatgctgtgaatggtttgttaacaaatggtctagacgtatctgtagaccaacatacaactatgagccaattgtatgtgttgtgcgcttctggagaatctctgagcttgaaggttagttttctaacatctctagagaattgtagtttaccttcacttgtgttctgtgatctttagaatttatattgttatttgtatgttaggtgaaaatgtcttgacgagtgaatttggttgttcacgtctagacatagatccaagattcccttactttgatcttgcaagttacatgtaagtctttaaagattttaacatttatctagtttacaagtaacaacaatgactaagtttctgttgccctcatattttgttaataccagccggagtttcaaagatgatgatgatgaggacgtgacaatggaacaagtttgagaagcttatgagaatggagtttgaagacttacattgaattattctatcgtcccaaaaacttatttctattttcatgtttgtgaccttttgaattgagtagtgttttttatttatgctatgtttttaggattcaaacatatctatctctatgctataactatttatttgtgtttctctgtcatttgagaaatctgaacttctcaaatgcatttgcgttttaatttatttgatatggcagctaagttaagtagtgatctgatacctttagtggctgagaaataataacataatcgccgactttctatcatacagtccactataaatggtgctctacaaaaggaaactgaatattatcattcacgatgatctagggctaattgggtacatagattgaggctaattttatatattgtcattcaaggccattaaatgaaaaaatgcaaaaacatagcaagtttagatattttgctcacctagaaaatattatattaactaacaaacagatcttctaaaacttggtatggtctctattccatttaattttaacagttctataaaatcttgatgcatcatcttaaatcacttactactcatatcagtctaaagttacgaaatgggaaaaagaaaaacagccctcttttagatctaaatttacctccaccatcagagaagagaccacgtttagttaacagaacaatttctcaaagaaaaattacacagtttaatggatctaatgctattggtgcttttactaatggttctattcctcttagatcaactttcaacagagtattcagagatatcactaatttgccagtcaattgtgatgataataatcaaacaactacttctactcagcctagagggtctgcaaaatctattccatattcacatggtaatatcattttcaaccttaagtgatctatcttttatattttatcaacttctacaagacattaaagtctcacaaagttatttactaaaactcaaatttatctcaggttcatttgaaagatcaagacttacatcgttttcaaagaaaacttgctttagcatcaaacaacttctacttctactatttcattttatgacctcatcgaaatttattgaagtcattataaagatgcttaaccgttgcaacccttatgttagaaaatttaggacagccagagagaggattcaaacaaatgatgaagagccatttcacatgcgtattatcgcagatcgtcaaggtgttgatggcaggacatatagtatgcataccacatcagaggttgcagccttgatccctgcagattttcgacatggcatgcctgatagggacattgttatagaaaaaaaatcaaatgggcacctaaagaggattaaccagattcacatttcctatttggctctgcaatatccactaaaattttgttatggtgaagatggcttcagacctggaattgagaagtgttttaaatcaaaaagtaagaagaagaataagaagtgtatcagcatgagacaatggtttgcattccgtattcaagagagggaagttgagtgccaaactctattacgttcaaagaggttgttccagcagttcctctgtgatgcttataccactattgaatctaacagattaaactatatcaagtttaatcagtcgaaacttcgatgtgaaaactacacatctgtaaaagaagcagttgcagctggagcaaccactatggaagaagaaggtaaccaactactgattccagcttcattcactggtggtcctagatatatggttcaaagctactatgatgcaatggctatctgtaaacattatggttttccagatcttttcatcacttttacctgtaacccaaagtggccagagataacaagatactgcgataaaagaggtttaaatcctgaagacagacctgacattatagcccgtatttttaaaatcaaactggattctctaatgaatgatttaactgtgaaaaagatgcttgggaagactgttgcatgtaagtatggtttagtatactacattactatttatcaaaatcatctaatttgaaagtactcattctgttttgtttgtacttgcagcgatgtatactgttgagtttcagaaaagaggattgcctcatgcacacattctcttattcatgcatgctaagagcaatttaccaacagcagacgacattgataaacttatttctgctgagattcctgacaaagaaaaagaaccagagctatacgaagttatcaaaaactccatgattcacggttcatgtggttcagcaaatgtcaattctccatgtatggttgatggagaatgttctaaactttatcccaaaaatcagcaagatataaccaaggttggtagtgatggttatcctatttatagaagaagaaaaactgatgactatgttgacaagggtgaaattggatgtagc

SEQ ID NO: 164119 - DNA, 208 bp, Arabidopsis thaliana landsberg
ataaataaatgctcataatatttatggttcattaataccttcggttcgacagaaggtgaaaatgtgagagacgcaggagcgattaccatgcagcgtgaacagtacgggggtactgttcacctatttataggcgtggaacacaacccacataaaattacatccatatcctttacatttggtagtagttctataataatccaccggggtt

SEQ ID NO: 164120 - DNA, 413 bp, Arabidopsis thaliana landsberg
gtggccaccaaaagcgcaggctcaggagctgctggttgggcgcctgagaagcgtgcagccgtcgagaagagcatgaagcgcaacttgatgcacgttgctcgctatttgtcctgatctatatcatgaactatctggatcggtaagtgcaatggtcagaagcatcccagataacttgctaacactcgcttttgtcacttacagtaataatatcgctgctgcaagacttcgaggtctggaagaggatttgcaactgagtcaaactgaatatcaaacctgcctcagtattctttacgtgggatacatcttgatgcaggttccgtccaatatcttcatcaacagaatccaacggccttcgctatacatcggtgttgcgatgttggtctggggtgtcatctcaacattgtccggagtcg

SEQ ID NO: 164121 - DNA, 301 bp, Arabidopsis thaliana landsberg
catgcaaatcgagatcatggtggaagtagcctacgcactccccaaggaacaactcatcatcttggtcagggtaccgtccggcacgaccgcggaagacgccatcaagctatcggggatcctgcagaaattcccggagatcgacctggccatcaacaaattcggtgtcttcggcaagctgaccaagccggatacggtgctgcgcgaactggaccgcgtggagatctatcggccgctgatcgcggacccgaaggaggtccgtcgccagcgcgccgcagaaggcaaggtcatgaaaaagggctgg

SEQ ID NO: 164122 - DNA, 438 bp, Arabidopsis thaliana landsberg
ctagtatcaaacgagcgtgagagaaagtgagatcgatcagtgttcttgaggatcaaaacctcacattcggcaacttttgctgagagagtcgaggcgaagacgcttctcttcgaacaagtaagcgaccggtatatgctctttgtctaggcgaaagccaacaatgagttgattaccgagcttgaaggcgggggaagccttgaagaggagaagaagcaagtgctggcatagaaaaaggaatacgctgatgccgaggcgacatacaacaagctcgtcgtagagctaaaagaggagttgaagatccctcctgtttctcctaacttgattcccaatagcctcgggaatagatcggccgagggccttgcagatgaggttggcgttactgatcatgcaagctcaaacctgcgcgaagatgagacgcgcccttccgaagaggagcct

SEQ ID NO: 164123 - DNA, 567 bp, Arabidopsis thaliana landsberg
atggctagtctttatcttctactacttcttcctctgtttttagctcttattctcgcagccaccattacagaatcaaaatctttctcaacaacagtgaaggcaccatatccaggacataaaccggataagctaacccacttacacttctacttccacgacattgtctccggagacaaaccaacctccgtccaagtcgctaacggtccaaccacaaactcttctgccaccggtttcggtttggttgcagtcgttgacgacaaattgacggtccggcctgaaattacctcagaggaagttgggagagcccaaggaatgtatgcatcggctgaccagaacaagcttggtctgcttatggcttttaacttggttttcacgaagggtaaattttccgacagcaccgtggcgatgtatggccggaatcctgtattgtcgaaggtgagggaaatgccgatcattggaggtacgggagctttcaggttcggaagaggatatgcattggccaagactttggtgttcaatattaccagtggagatgctgtggtcgaatataatgtctatatttggcat

SEQ ID NO: 164124 - DNA, 541 bp, Arabidopsis thaliana landsberg
cacgtagccttcaacagtattctctcggcaatcacctccaatttggatggaaaaaaatggaggaaaccccaagaaggtattcttaaatgcaatttgaattctttttggataaataaacaatcgatgtgtggaggagcttggattgtaagagatatagggcaagctaaacaccatgcacgagatgcgtttacgccaattcaagatcgaacaggggctgagctgcgctgcattctacggtcgttgaaagcatttcaagatattcacgtctccaaggtgataatagagttggaatatccagccgcagtaaacgccgttttgcagccgtccaaatggcctttctacaggaattggttaacacaaatccatgagattgctggtgcatttgaatcttgtacattccgtcatattgccacaaacgcaaatctgatcgctcgatccatttctcggagtgtgattgaagacagaaggtttcagttttacatagcacttggagcgagagccttcatggcttcacaatcaagtgtttgagaagagtaaagtt

SEQ ID NO: 164125 - DNA, 405 bp, Arabidopsis thaliana landsberg
tctagtcatatatgaccgagtagaagcttcaagatctcaagagaccactcgacccccaggtcgagtagaagacatcacaacttcacctcaccactcgaccacgaggtcgagcgtcttcatctccatcacctgaccatcactcgatcacatcactcgaccacgaggtcgagtgtcttcaccttcattgccagaccactacacgacctcatcactctacctggaagtcgagtatcaccatcaccaccactcgactgcatagttactacctggcaacagactgtgcagtcgagtatcgctgatatactttctatctgatactcgacctatcactcaaataccatagctattgaaaataaaacttcaagctcttcatggatggttccatgcttatgtaggtacttacaa

SEQ ID NO: 164126 - DNA, 665 bp, Arabidopsis thaliana landsberg
atgtttaggataattttgcatgcatgttgcatatttgtgttgttttcaggtgattcggagctattggcgagctaattgaaagaagcggagttgatcatgcaaaacactcgacccctggttgagtagataattccacgacttcagcagaccactcgaccccctggtcaagtagaggacatcaccacttcacctcaccactcgaccccgaggtcgagtgtcttcatctccaacacctaaccatcactcgatcacctcactcgaccccgaggtcgagtgtcttcacctccattaccagacaaccactcgatctcaccactctaccttgaagtcgagtatcaccatcaccaccactcgactacatactcgattgcgagcttcagagtcttcttcattccgcactcaaccagacactcgaacacaaggaagaaaagaagactccagctattcactcgacctcccactcgaccacctgggtcgagtacagttcttaatccgtcccaatactgcgtcgttttatgtattagggtttcggaatattttgctataagtagcatgtacttaacattttcgcaaacaagtttttatctagttttattccgtagacactgtgttctagaccttttgtaatcttgatttctttttatctattcagtattcagtattca

SEQ ID NO: 164127 - DNA, 327 bp, Arabidopsis thaliana landsberg
atgtggcaaaagaagatgtttttctatcttacagtgcttaagctgagccaatacacacgtgagaataaacctattctcctagcagataacactgaccctcgtgcgcttgggagcatccacgttgagaatatggtgatttctacatccaaagtcgcctttccgatatgctgaacaatatgtatcataatgtcaagacttagaaggagttgtgggattctcttgacaagaaagtatcgcaccgaagaagctggatctcaaaaataagcggtggactcacgactattgatggagaaaattgaggagttgactaatcccctccatgagata

SEQ ID NO: 164128 - DNA, 764 bp, Arabidopsis thaliana landsberg
atgggagcccaaccacaagagtttcagcaacggcaagtgtatccatctacttcttcttctacttcatcttctttctcgccttcatcctccggttcaagtggctcgtttggtacagcattcatagttctagccgcaattcttgttctggcagcactggcttgtgtgtttggaagactatgcaaccgcggtggaaagcaacacaaagacaaaaacaacaacaaagcttcgaagcatgagaaaccatcgtcaaagaagagccgtgagattagacctgtggagcgtgaaccaagagaaagaggtgatgtggagtttggtttcgatatgaagcggcctggtcctatgagcaaacccactggtcgaaacggaggggacatagaatttgggtttgataacaagagaggaggaggtggtggtggaggaggtggaggaaaaggagggaaaagaccacctccggttatatattaaccatgtgtaaggtgacctcagtcacggaggtttcagacttcaagctccggtcagaacattgtcttaataagacaagagaattcatcaatgcttgttcactttatcttattcttgcttgtttgtttttggtcttgttttgggtcgtttggttttgtttcatatgggtatgaaacttaggtatcaaatatatatgaaagcaagaaaaaaaatatgagataacaagtaacaattagaagactcattatgtaaaaaaaaaaatcagaagatggagttcttcatttatgttatcacactcaaca

SEQ ID NO: 164129 - DNA, 376 bp, Arabidopsis thaliana landsberg
ataatcaaaagatatgacgagatcattctctccggtggtgtctctcttcttattactactgcaaacgatatgttcagccactgtggaaaacgcagcggattgtgcggcggtgggaacgctgatatcgtcgtgcacagagtttgtgaactacgggtatccggatccgataccagggtcgagttgctgcgacgcgatgactgtgatcggaacttactctgattcgtcggagaagagaaagtggctgtgtaactgcttcatggatctcatcaatgtctataactctaacgccaccgccatttctactttgtctggcttctgcggcgtcgttttgggcttcaccatcgaccctaacaccgactgcaatttgtaactcacc

SEQ ID NO: 164130 - DNA, 450 bp, Arabidopsis thaliana landsberg
atggagagctcaaacaggagcagcaacaaccaatcacaagatgacaagcaagctcgtttccggggagttcgaagaaggccttggggaaagtttgcagcagagattcgagacccgtcgagaaacggtgcccgtctttggctcgggacatttgagaccgctgaggaggcagcaagggcttatgaccgagcagcctttaaccttaggggtcatctcgctatactcaacttccctaatgagtattattcacgtatggacgactactcgcttcgccctccttatgcttcttcttcgtcgtcgtcgtcatcgggttcgacttctactaatgtgagtcgacaaaaccaaagagaagttttcgagtttgagtatttggacgataaggttcttgaagaacttcttgattcagaagaaaggaagagataatcacgattagttttgttttgatattttatg

SEQ ID NO: 164131 - DNA, 259 bp, Arabidopsis thaliana landsberg
atggcgaagaacaaggacgacataaagtatgcaacggctcaagcgaagctatcgggaagacgaagcaattcgtgtaagctacaaacacgggacaccattagagggaggcaagatcgcagagtcggagcctgtagagctgttctcgagtgctcaacgtatcgagaagggaaaagagcagtcagcagcatccggcgatcaaacacagatacaacgtgacatcaaagatatcaagggaacacgtacagacgatagtcccgct

SEQ ID NO: 164132 - DNA, 526 bp, Arabidopsis thaliana landsberg
caatatcaaacatattggcgggaaaatatgattttacggttttggcggaaaaatacgattttacggtttaggcgggaaaatatgattatacggtttgctgagaatacacgattttatggttttggcggtaaaatacgattttgcgattttggcgggaaaacatgagtttgcggttttggcgggaaaatatgattttacggatttgcgaaaacatgattttatggttttggcgggaaaacatgattttacggttttggcgaggaaaacatgattttgcggttttggtgggaaaaacatgattttacggtttgggcggtaaaaacatgattttacggtttgggcgggaaaaacatgattttgcggttttggcgggaaacatgattttacggttctccgaaaaaacatgattttacggttttggcgaaaaatatgattttatggttttggcgggaaaaacatgattttgcgtttttggcggaaaaacataatattgccattttggcggaaaaatataatttagtggttt

SEQ ID NO: 164133 - DNA, 394 bp, Arabidopsis thaliana landsberg
atgtacatatagatatttttcatgttagttattgctatttcttatggagtaaatgaggcttgtaaagaaaacaggatagtatttaaaaaccgattcggccctggtaaaattctccaatatcattgtcattccccaaaaatagatttaggagtgctatacctagagttcaacgctattagaatcattagatgaaggattcaatataacaaaatgggattgtctttttaagcacggccttaacatgaggttccatagttatatacaagtatacagtcaaaatacatttgctcctcaatgtgatcaactacgtcaatggagtttcataaagagtgtgatagggtttacatatgatgatcgtcgaccttcaggatgcaaatatcgttggagtatttcc

SEQ ID NO: 164134 - DNA, 402 bp, Arabidopsis thaliana landsberg
atgtctgcaaaacgtgtcttcgagaagttcgataagaacaaagacggtaaactatcattagacgagtttcgtgaagtggctcttgcgttctctccttactttactcaggaagatatcgtaaagtttttcgaagagatcgacgtggacggtaacggcgagctaaacgccgacgagtttactttgtgcattgagaaaatgttgaaggaagtgtttgttttctgtgatgttgacggtgacgggaagataccagccagcgagtcctatgtgactatgactagcctcggaaagaaattcaccgaggagacttctgccgaaaaggtccgagcggcggatgtcgatggtgatggctatttgaactttgacgagtttatggctttggttattggtgacatataaattgct

SEQ ID NO: 164135 - DNA, 742 bp, Arabidopsis thaliana landsberg
gggtggtttggagctgttggcgagggaattggaagaagagagccggaaccaaaaaacatactcgaccaccagttcgagtaactccagcagcacactcgaccaccaggtcgagtaactccagcagcacactcgaccccctggttgagtaacattgaggccgttcttaccaatcactcgaccccctggtcgagtaaccacactccaggccactcaaccactaggtcgagtaacacttcgtcacaccacctgatcaccactctgacattcactcttccacattactcgaccacgaagtcgagtatcatcactcaccaccactcgaccaagcactcgaccacatcttcagagtctactcaaatccgcactcaaccagacaagctgagcacaaggaagagaagaggggaagaagaagtgtttggaagcggcctggagctccatcggatcacgaagcccatctcggcccattatcactctatgggccgggcgattaggttaccggcccgtctactatcattttattttgttttgtataaataggtgtctgagggttttgtcctgagacatctagtcgacattgagtttttgcttcagttttattttctattttactctagctgcgtcgcttttgcttctacaacctgtaattcgagatttttccaagttattcagattccgcatttgatttcatatgccatcttgtttctctactctttatctctttacttatgcaatatacttgttt

SEQ ID NO: 164136 - DNA, 413 bp, Arabidopsis thaliana landsberg
tagatttcaataacatataataataataatattttcaaatttggcaaaaaataattttttgtgattttggcgggaaaacttgattttacggttttacgggaaaatgtcgtttacggttttggcgggaatacgtaattttacggttttggcggaaaacactttttgtgattttggcgggaaaacgtgattttacggttttggcgggaaaacgtgattttacgattctggcgagaaaacgtgattttacgattttggcgggaaaacgtgattttacgggtttagcgaaaatacgtgattttcaattttggtgggaaaacgtcattttacagttttggcgggaaaacgtgattttacgattttggcggaaaaacgtcggtttacgattttggtgggaaaatgtgattttcgatttt

SEQ ID NO: 164137 - DNA, 330 bp, Arabidopsis thaliana landsberg
gaaatctataactcgcttagagactcgttcgtgaaaggaacgtcggacttggaaaaagcagccggggtggcgatgtttgacacgtgttataacctttcggctaagacgacggtagaagtcccgaccgtggcttttcatttccccggcgggaagattttggctttgccggcgaagaactacatgattccggttgactcggtggggacattttgtttggcatttgcaccgacggcgagttcactagcgattatcggaaacgtgcagcaacaagggacacgtgtcactttcgatttggcaaattctctcattggattctcgtctaataaatgc

SEQ ID NO: 164138 - DNA, 210 bp, Arabidopsis thaliana landsberg
ttaatagcttggaggattaaaaacatgactattgctttccaattggcagtttttgcattaattattacttcatcaatcttactgattagtgtacccgttgtatttgcgtctcctgatggttggtcgagtaacaaaaatgttgtattttctggtacatctttatggattggattagtcttcttggtgggtatccttaattctcttatctct

SEQ ID NO: 164139 - DNA, 665 bp, Arabidopsis thaliana landsberg
ttcctgataagtgtgcattttacatgttttaagcatccatttgtcatcactttagcatcatatcaccactgttttataccatttctcatcatttgtcatcactttgcatgtttaggatagttttgcatgcatattgcatatttgtgttgttttcaggtgatttggagatgttggtgagataattggaagaagtggacatgatcaaaccaatatactcaacctgatcaaaccaatatacttgaccttgaggtcgagcaccgacatcctggacttcctgaagtactcggccacaaccaggcgtttcaccaacatccgtcactcgaccccctggtcgagtagctgccttcaccatatctcaataccactcaaccccctggtcgagtaggtgccctcaccatctcgatccaccactcgacatcatactcgactgccagcttaagagtcttctatattccgcactcaaccagacactcgagcataaggaagagaagaagactctagctaatcactcaaccaatcactcgaccgcctaggtcgagtactgttcttaatttgtcccaatactttgttattttcagtattagggtttcagaacatttcactataagtagcttgtactttatattttcgagactaagtttttttccgcagacacttttagttct

SEQ ID NO: 164140 - DNA, 933 bp, Arabidopsis thaliana landsberg
actatgatccgaaatgtgagtttgttgtacccgccggatcacatttgttcaactcgttcccttagtagtttttataataaatatcaaatcaagtgtattcctaaaaatattgttaggaaaggaactatcttataacggattctagctcaagatattttattttttctaagactcgtttgcaccagcctaagaaattgtttaacactttttatgattctcaatcgtgttgatcgataattgagtttctaaggttttaatatttacagccatgattcgtaaaagtgtcaagtgtgcatataataacatagaaaaaataacaatttcttaatttatattacaagtgtcaagtgtgcatataataaataggaccaatcataatcctttacagctaaaacttgaatcaagttatattatcatcacgagtcttttgacccaagaaaaaacttctctgagtttcggcccatggaactttcgcagtcggacccaacccgagatcctgatacccggtacgatcaacgttgctgttgtttccccagcttccgccgatcaagaagctccaccgccgttggttactcctcctggggacgaattcgaaccgtcgatgacagtaatcacagcggcgaccacggcgacgagccacgttggtggatccgagcatccttgaagatccgagagtggtcagaaatcgttgctggtccacggtggaagactttcattcgtcgattcaatcgcgatccacgacgcggccgcgattgggacgcaagcgagaagtttcaatacgatcctttgagttactctttgaacttcgatgacgacgacgaggaggatgaatacgtcggactaggtggattacgaagcttctcgacccgattcgcttctgtcccggtctactcaggtaaagctccggcgatttcgccgacgtcgttgtctgcg

SEQ ID NO: 164141 - DNA, 528 bp, Arabidopsis thaliana landsberg
atagagcctttaacggcgcttaccgctacggtcacgactacgtcgatgggggtcgtgccgccttggcgagatctgcgtccgtctgaaggtatgcgtctgactccttgggggtcgtgggtggcggagatacgcgtaccgaatgagagatctgggatctggttaggttcttatgcgacgcctgaagcggccgcgagagcttacgacactgctgttttttacctgcgtcgtccttccgcgaggcttaattttccggagcttttggctggacttactgtttctaacggcggaggaagaggtggtgatttatcggcggcgtatattaggagaaaagcggcggaggttggtgctcaggttgatgcgcttggagcgacggtggttgtgaataccggcggcgagaatcgcggtgattacgagaagattgagaattgtcgtaagagcggtaacgggtcattggaacgggtcgatttgaataaattacccgacccggaaaattcggatggtgatgatgacgaatgtgtgaaaagaaga

SEQ ID NO: 164142 - DNA, 303 bp, Arabidopsis thaliana landsberg
atgacaagcaagaaggtggcaattatggtgattgtaatggtgatggctagtttagtcgtcgagaggtcagtggcgattgacctttgtggcatgactcaggcagaattgaatgaatgcttaccagcggtgagcaagaataacccgacgagcccatcgttactttgttgtaacgctctgaaacatgctgactacacttgtctttgtggctacaaaaactctccgtggctcggttcttttggtgtagatcccaagctcgcttctagtctccctaaagagtgtgacctaaccaacgccccagcttgt

SEQ ID NO: 164143 - DNA, 327 bp, Arabidopsis thaliana landsberg
caaataagctggagagaatttgaaaaggtagaacttcgggcaggcacaatactcgaagtactagattttcctgaagcgaaaaaacctgcgtataaaataaaagttgactttggagagttaggaattaaatggagcagtgcacaaattacaaaactttatacgaaagaggagcttataggaagacaaataatgggtgttgtaaattttcctaacaaacagattgctaattttatgtcagagtttttggtaacgggatttgccaatcaagatggcgatattgtgcttgccgcaattgacagaaaagttcctgacggatcaaaattacat

SEQ ID NO: 164144 - DNA, 578 bp, Arabidopsis thaliana landsberg
gctttaagcgagattgcagtaaacaaggttgatgagtcggtttctcgctttctcactgaaacaagaaagaaaacaactaaattattgaaataaacacaagcctaagatctagagaacaaagacacgagactacaaaaaaaaacaagtaacaccaataatcaaatctgaacaaatcttacgtttaagttcgtcgaggacggatttagacatgaatgattgagtttttagaggataaagatgaatagatgataatgaattgatgaaggagaagagatgtgatgatgaatagattggagaaaaatgttttttagatcggagaagggctcacttggtttgcaagaggcagtgaagaagcaaaataaaacaaattagggttattgactagggttaagcttatatatgattgcatattttaataaaccgatcggtccgattaccgaaccgacccgacccgaaatccgaacaccaaaattaaattcgccgaacggttagttacagtatcttcggttttcgccgataaccgaaattatcggtttaatcgggtcggtttgctcggttcctgccgtaatcccaggcct

SEQ ID NO: 164145 - DNA, 356 bp, Arabidopsis thaliana landsberg
ggagtgtgcttccatcctgaccaggatagaattatcagtgttcgtgaatgcgcccgatctcaggtaataaaatctctaatgttccttccttgttactcatctagcatcaatataagtgtaaagagtttttgttttggaaattgaagtaatgttagcttatgaatatagctcttttaagtgaaatggtggttttataaaaaaaattgcaggggtttccggatagctataagtttccagaaaatataaaagacaaacataggcaggttgggaatgcaggccctccaccattagcgtttgctcttggtcggatgcttaaagaagccctacaccttaggaacatggaaatggatatttaa

SEQ ID NO: 164146 - DNA, 489 bp, Arabidopsis thaliana landsberg
ctcaacttccgagccgccatggacgccggagtagcagtaaaagctgacgtggcagtcaaaatgaagagagaaagaccattcaaagggatcagaatgagaaaatgggggaaatgggttgcggagattcgagaacccaacaagcgttcaagactttggctcggctcttactctactcccgaagcggcggcgcgtgcatacgacacggctgtcttttacctcagaggaccaactcgtacgctcaacttcccggagcttctgccgtgtacctccgccgaggatatgtcagcggcaacgatcaggaaaaaggctacggacgtgggagctcaagtagatgcgataggggcgaccgtggtgcagaacaacaaacgccgccgcgtttttagtcaaaagcgtgactttggcggcgggttattagagcttgttgacttggacaagacacctgacccggaaaatctcaatgatgatttggtgggaaaatagactgaaaaa

SEQ ID NO: 164147 - DNA, 252 bp, Arabidopsis thaliana landsberg
atcttgtcatctgtaactctaaccaaaacgttgattttgggggaagaagtgaaagcgacatgcgatttcacaaaatttcaagtctgcaagccggaaataataacaggaagtccaccgtcagaagaatgttgtgaaaagttaaaagaacaacaatcatgtttgtgtgcttacttgataagtccatcgattagtcaatatattggaaatgctaaaagggtcataagggcttgtggtataccttttcctaattgt

SEQ ID NO: 164148 - DNA, 240 bp, Arabidopsis thaliana landsberg
taagcgatgtcgtacgacgatgttgagatagaggatatggagtggaacgaagagattcaagcgtacacgtatccttgtccttgtggtgatttgttccagattacaaaagaagatctccggctcggcgaagagatcgcgaattgcccaagttgttctctttatatcaccgtcatctacaatatggaagattttcaaaacgatacgaagaagaataacgaacctaaaactcgtcaccctgtg

SEQ ID NO: 164149 - DNA, 758 bp, Arabidopsis thaliana landsberg
ctccgatttcttccaacaacaacagagtcctcgctccggagtcaaattcaaactaagtaaacactacgcattctctttacaattatcatatcttcttgaatatttttaaggttttccaaaaaagaacactttttttttagtctaatgtttcttattaaaaaccaagagttaatagtactgatccaatgaaaaacagagctattgtatctcaaaacaaagcatatatgttcttaaatctcatacgagaaacatatggagggtatagagttttagtccatctatatggttgtaatgtacatgcttaagtgtaatgtacatgtttcttggattaatgatgctcataagtgtggaagagcctgaatcattcggaatgaccatggtgatattatgttctatgcgagagagatgtttctacctgcctcaaaccgcattgccgcagaattgcatgagatcttttggtactacaaagtctgagtgattcacatcaggataatattgaaatttggtcagattgtaatggtgctctggaagccataaatgattatctcaattggccaatgtatttttcttacttatacatgattcatcgtttaatctcaaaatttgggaggatcgtctttaaactaccatctacaaaagtgaatgcaatcgcaagggatatagttttgagtgtcacgaaagaaggacaatacatatcatatttagctcgtgcaggtctgagttggttatatgcacggactaaagcagaaaaacataat

SEQ ID NO: 164150 - DNA, 984 bp, Arabidopsis thaliana landsberg
gatccgtcgcagaagattgattatgtgttcaaagtggtgttgatcggcgattccgcggttgggaaatcacagatacgggctcggttcacaagagacgtattcagtatggattccaaagccacaattcggtgtcgatttcaatactcgaacgctcgttattgacgataagaacatcaaagctcagatctgggacatcgcaggccagaaacggtactatatccttctccgatcttagttctatcttctctgatttaacaatggataaaatattgcttcgaactcgatgatgttacagtgttgctgttcaatttcgattttgatcttcgtgtgtacctgagagtgacctcattttgactagagagtaatcgactcttttagaagttggaccattagtgttggaattgttcgattttgttcttcggcaacattgtaatgtgttgttatagcattctcctgaagaatcaaattatgtagtgatgatcacattcacatccaagtggctaatcattgtgcatggcatgttttctccattgtacatagcaatgtggttggtttgattagtgacattcttgttcttttgctgtgagtagacacagagctattacataagcctactacaaaggtgctgttggtgcaatgttagtttacgatatgacaatacgtgaaagctttgagcacattcctcagtggttggaagaactacgagtgcacgcggataagaacattgtcatcatcttgattggtaacaagacggatttagagaaccagagatcggttcctgtggaagatgccaaggaatttgcagagaaggaagggctttttttccttgagacttcagcactaaactccacaaatgtcgagaactctttcaacactctcttgactgagatcttcaactaggtgaacaagaagaatctcgctaagaccaccgtgtcttgcagctcacaagtcattcttctaagaccaccgtgtgttgcagctcaa

SEQ ID NO: 164151 - DNA, 716 bp, Arabidopsis thaliana landsberg
gtcacgatgaagcaagcttcttcttcttcttcgtcacgtaattcaacaagtttaacaaatagacttaaaaccatcttcaagaaagctgaagagctttcgattctctgtgctattgaggtttgcgtcatctattacggaccagacggtgaactgagaacatggcctaaggagagagagacagtgaaagacatggctttgaggtataaagaggccagaaaacgcaagaagagccgcaatcttcatgagttcctcgagaaggagaaggacaaggacaaggggaagacgaatttgaagaagaattggtatccaaactttgatcattactctcctcaacaactctctcaattgattcagtccttagaacggactctttctactctgcaagaaaggcttcgtattgttgaggcgcagaaactacagaacacaaacttggtgcatcagagtttaacaccatcgtatctgaaccagacccaacacttgaatcctagcaagttctcactgtttatgtacaaccatggagatgctactctctcacaactcccactgtctgctccacactccaatcaactcatcaattaccagaatcacttgatgcagcatggttttggtcagaacatgtgttcggacaacatcaccaacaacaactttgaacatcctggcgtgtcaaacacacaagactactcaccgttactttcggtacaagcatctgcagtgaa

SEQ ID NO: 164152 - DNA, 493 bp, Arabidopsis thaliana landsberg
atggctagtggaagtgagcgtgtggtggttgtcggagtagatgattcagcccatagctaccatgcactcgagacggctcttgatctctttttcatacctttcaaggccaacccacgattcaaacttgtcgtcctttacgctcgaccaacagcgaccttcttcctcggtgttgctggcccgggaacggtcgatattataccaatggtggaagaagatttaaacaagaccgcggacttggttaagaagaagtgcgccgaagtgtgctcggctaagtccgttgagatctcgtctttggaggtgattgaaggagatccgagaaacataatgttggaagccgtggagagacatcatgcatgtgttcttgtccttggtagccatggttatggagctgacgtcaagaggatgtttttgtggagcgtcaagtgtgcgtaactatttagctcattaagcacattcctccgttctgatcatcaagaagcctaaggataaacct

SEQ ID NO: 164153 - DNA, 362 bp, Arabidopsis thaliana landsberg
  unsure (1)..(362): unsure at all n locations
atggggagcttaaagctgagcacatttgcaatagtcgtttgtctctccatcctcctcatatctcctataggtacgtaaaaaagaccaaaatattttgatccaaagatctaaaataaatacatgtttatgaaatattgtctctttgtatggatcatacagaagtgaatggatggggaaagtgtgacttacgaaagggtttatgtagactcgcggacacgatctctacttgcgatgtaccatgcagggcagtggacagcaagtatcatggaggcgaatgcttacatgctggtggtggtcaagggatatgttggtgctgccgtgattatgatgctgcanagagcggtgctgagaaggaaagcatg

SEQ ID NO: 164154 - DNA, 415 bp, Arabidopsis thaliana landsberg
gaatttgttactgatttgagagaaatgtgtggatttgtgtttaggttgcatcacaacgaaagagctaggaacagtgatgagatcattaggtcaaaatccaacagaagcagagttacaagatatgataaacgaagtagatgctgatggtaacggaaccatagacttccctgagtttctgaacctaatggctaggaagatgaaggacactgactctgaagaagagctgaaagaagctttcagggttttcgataaggaccagaacggtttcatctcggctgctgagttaagacatgtaatgacaaatcttggtgagaagttaactgatgaagaagttgatgagatgatcaaagaagctgatgttgatggagatggtcagatcaattatgaagagtttgtcaaagttatgatggcaaag

SEQ ID NO: 164155 - DNA, 211 bp, Arabidopsis thaliana landsberg
gaacataaacaaaaaatattattgaactacaagtgtaccttcaatcggaaggaaatgacaatacgagtgtgacgcaaaaagcaaatgtcaagtccgcgtgaacagtacggggatactgttcatctatttataggcacgggacacagcccttgcaaaattacattcatgccctttacatttgataataactctatagtagtctatcgagatc

SEQ ID NO: 164156 - DNA, 1097 bp, Arabidopsis thaliana landsberg
atgaccagctcttccgctccttcacgcaaggtcgctctctttctctcacatgtcttcaaattcatgtttctctttacaaaaactttgatgattcaatctgagaaattgtgttctttcattcatgcgtaggctttaagcaagatcgcgtgtaataggttgcagaaagagctttctgagtggcaattgaatcccccctctggatttcgtcacaaagtcactgataatcttcaaaagtaattttcattttcaaaatctttcgttttttgatttctttttttgaaatttttgattgttttttttgtttttgtgtggtttaaagatgggtaattgaggtaacaggagcacctggtacgctttacgctaatgaaacttataatcttcaggttgagtttcctcaacattatcctatggaagctcctcaggcaagtttttcattgtgttggttttgttctgaaaaatttgttgattttgattaagggtttatttcaaatttcttaattgtggcttaattaactgaaaccagtgttttttttaatggttcttttgcatgttttggtcagagaatttgtttgagatatagtgacattttttctgcttggtttttgtgttgtgttctgattttcatttgtttggtttttgatcaggtgatttttgttccaccagcacctttacatcctcatatttacagcaatggacatatttgtttaggtaattttactcattgtttctacactacttactctttgcatttgctcttactttttggtttctctgaaatgctagctcaagtcatgtgtgtgtcaatgaaattagtttatctgtttgatacttacatatataggttgttcttgttcacggaatgtaatgtagcgaaaagagaagcaatataagtaacaatacccttaagagtcctaatatattatatcaacattgttaccagtcttaaactttttctcagtctgtctcattcttaaagagttcctaatactagcgtcgcatgacatgaaattaggtgtgaatgtgttatcaacgccataaagaaaaccaataccgtcccttttggactctatggtgaattctttagcaaaatcagaatc

SEQ ID NO: 164157 - DNA, 312 bp, Arabidopsis thaliana landsberg
tccgtgcaagccacagcacaatttttcggagacgttcaacaggcaatgagatgcgtagcaaaactaatgccatgtcatccgtacattcacttgtcgattcctccgccgccattgtgttgtaatcccatcatacagatcgcctagaaggatgtgtcgtgtctatgctccgccttcaaacatccagacttgctcaggttccttgctctcaccaaagagaacgctattaaaatccccgactcatgtggtattaatcatgatccgtcagtctgcaacaagactaatcgtgagttctttttatctcttattagcttt

SEQ ID NO: 164158 - DNA, 561 bp, Arabidopsis thaliana landsberg
ctaactactccgatgagttcaagttcagtgtcagtgtcatctggggttgacgaagcccgtggtttccggtgaaatgtgcgtgtggagtagatgtgacggtcttcacagccaagagtcaagacaatccaggaagacccttttccggtgtaaaagcaaaagagatccggatatgtggacaaacaaaagagatgtaaatagagttggtgtttatattgtgtatttgtgtagtgtatacttgcttaacttgtcagatttggtttgtgggttgtgcaatagggtcatttgtttaagtaggttgaggatgctgtgcaagaagaggtcgaagatgctttagcaaaatttggaatcattgcaaatgagattaacaaagtcaaatctgaggcaaatgagctacatgcgatgttacaagaactgaaagaataagcaatattgaacaaaaaggaaatctgcaagttgaaagtgtgcttaaaagtgtgttttgtgtggctttgcttgatcaacattgccaatatttacataatggttggtaaggcaaagaaaaaggaatttgtaatgttgtat

SEQ ID NO: 164159 - DNA, 2934 bp, Arabidopsis thaliana landsberg
tgtatcttgaatgatcaaccaaaccactttggtgaacccacaacaatgatcctcacatatgaaaattatatgtacaatttccaagagggagtcaaggaaggtagttggtataacatgaaaaacttctatgtaatgagatcaactaaacatacaaaatactcttggtgtcctttggaaattcaatgtatctggctaacaagtatgtggcctattagtcctaaatctagtagcaactaccttgattttgtctcttgagatgaagtcaaatatgctactgatcaagacaagaattatgtgacaggtaatttgatttgtgtaatttcaatcaaaaaatattgtagttttagaaatatataaagttaggactaactagtttaaaacaaatgttgttggtgtgatttcaaatgtatctcctattcaaaggtttccatttgtatgccgtcaccgagagactaattatgaggcaagatatgtgtcttttgacatcactgataacatgtaagtttacattatctttgctatattattttatgttcagtttgtattttttggaccaaaacatcattatgtataaaatgttttaaaattttgtggttgaaggggaaaggttataacttgttttgtaaatggtagctcttgtcagtttttcgtcacaaactggtttaagaaaataacttatgtgacttataactatgagccagtcctcattgttatacgtttctggagattctcggagttcaatggtaagtttgttagagtttcccattcgtgaacaatgtttgaatgcaattaaactgtattttgttttttctttttgtttaggtaataactacaattaaactttacattaatccaacttttactgattttgacactcggagatacttgtaagtaacattctatcatataaagagtatataccaaactttattttacatgttttacacagacatgtctttgaagttggacaagtttatgattatgtgaaaatggagttggatcatgataactaaagtggatatagattgatgtcttattgtcgatcgttcgtcgtattgcatagtcaccaagagtgtgtcgatcgacactcctcgcttattcctggaccaaaatcgtctttagcttctttttccttaacttttgctccaaaatgtcttcttatctacattgttgtcccattgcatagaatacctgaaacgacactaaaaagactcgagaaataacataaagactcaaaatcctatatctaaaacatagataaaatcggtgaaaatcgggttatatcaactcccccaaacttagtctttgcttgccctcaagcaaacaagtagacataagctgaaggagaagtttgaaggtggggattcagaaccaaagcatcagataaatcaaatagaatcaatgtccaagttggcagttctaggaagcgatattatcgaactctactcaaaaacgttagccatgccttattatagttcaatcccactctatatactcgacctacacatgttttcaaatctaccaatccctttaacattcattagttctggaacgttaatcaagcaatgcttcatcaatgaactcatttggcttaaggtacaggtcaagagacaaagatggtcccttacagaataggctttagtaacaggggatctctcaaaaaatgattaagctttagtagaatgctaaggtaagtcccaagctatgcatacagagataagatcccatctacttgaccagggggtcaagtggtttgttgaagtcgtggaattatctactcaaccaggggtcgagtgttttgcagtgatcaactccgcttctttcaattagctcgccaatagctccgaatcacctgaaaacaacacaaatatgcaacatgcatgcaaaattatcctaaacatgcaaagtgatgacaaatgatataaaacagtgatgatatgatgctaaagtgatgacaaatgaatgctcaaaatagataatatgcacacttatcagcaactatacatcgctcgggaattcgtggaagtctttgtgttggtggtctcttaacgccaatactgggagctgtggggatgcaatttggaacccctgacgagttctccaagttctttagcctcgaatatctcaagggaaaggattttcttgacaagataactccagcggatcgctatctcttcaagttcaaacactcggagcttggaccttctcttctacccctacaatgcgagagtcggactttggtgaagacaaggcgcaacatcaatttcatgccatttccctccgccttgaacatcgacattggaggagctcgggaagatgaaccggaatatagcccagccgactatgagcaacatgagtactttactcaagctaattatgaggagcaaatcgagtttgagcaacatattgatcaaccggagcaagggggcagcgaacaagagcaagctcattatgaagaaggtgctaagcaagagggagatgagattgctgaagttcacaagaagcttggtgtgcttgaagagcttggaaacctttacagtaagacaatgaagggtttcaagaagaagatgagaacaatgaagaagtcgctcaagagtatggctgctcaactcaaggacttccagagcaagccaaggccaccatctccaaccgccaaagtaagaaggagcggttcaacgagctcagctgcaaggagagctgaaaggatcgatcaaccccgagcttcatcttttgagcctcaggaagtgatctcctatttgagagaaccaaggagcaggcaaagacgagcttccacacgctcgaccggacagaacgagcaacaccctcccgcctcaacttcagcccctgcctatacccaagagagtatggatgactatgtctccatctacttcaccttaaaactgaggtagcaccacctctccattgtatatacca

SEQ ID NO: 164160 - DNA, 404 bp, Arabidopsis thaliana landsberg
  unsure (1)..(404): unsure at all n locations
gattataggccaatttcgttattaaacaatagtatgaaaatcctaacgaagcttttggcaaatcgtctgcagtcgttcatgtctcgtttaattcataggaaccaatatggtttcatcaagggcagatctattcaggattgcttggcctgggcttatgaatacattcacttannnnnnnnnnnnnnnnnnnnntcattgtgctgaaactagacttcgaaaaagcttttgacactgttgagcatgaactgattcttcaagttttgacccacannnnnnnnnnnnnnnnnnnnnnnnnnnnnnnnnnnnnnnnnnnnntttctggcacttcttcggtgttgctcaatggcgtccctggtaaatccttccattgcaagcgaggtgttaggcaaggagaccctctttcg

SEQ ID NO: 164161 - DNA, 441 bp, Arabidopsis thaliana landsberg
atgaagacgatgcgaggtttacgaaactgctcaaacgacgccgtaacgctagaccagacggttcatcctcctcctcctcctcttcctcctccagcaccaccaacagtctcctcctccaccgcctcgacgagcctgtcgttcgatgaagaggaaacatcagagtcaaagatcggacggctgatatcagagcatccagtcatcatattcactcgattttcctcatgttgcatgtgccacgtcatgaagaagcttctatcgaccgttggagttcacccaacagtgatcgagatcgacgacggagaaattgcttacctcgccgttgaagccgctccggtgcttttcatcggtggtacttgcgtcggtggcttcgagtcacttgtagcacttcacctaagtggtcagcttattcctagactcgtcgaggttggagccttatgggca

SEQ ID NO: 164162 - DNA, 510 bp, Arabidopsis thaliana landsberg
ggaccaaaacaagcccgaggagaagtgaatcaagaatcagacaagtgtttttcttgcacacagctttttcagaaggaattgacaccgagcgatgtagggaaactaaataggcttgtgatacctaaaaagtatgcagtgaagtatatgcctttcataagcgctgatcaaagcgagaaagaagagggtgaaatagtaggatctgtggaagatgtggaggttgtgttttacgacagagcaatgagacaatggaagtttaggtattgttactggaaaagtagccagagctttgtcttcaccagaggatggaatagtttcgtgaaggagaagaatctcaaggagaaggatgttattgccttctacacttgcgatgtcccgaacaatgtgaagacattagaaggtcaaagaaagaacttcttgatgatcgatgttcattgcttttcagacaacggttccgtggtagctgaggaagtaagtatgacggttcatgacagttcagtgcaagtaaagaaa

SEQ ID NO: 164163 - DNA, 219 bp, Arabidopsis thaliana landsberg
atgaaggcatgggtgatatgtttgctagtgattttcgccgcggtgattgctgaaccagtggagagtcgtcggaagtatctagaatatggtgcgattaccaagtgcgctggtcctaatcctcctccgggatgctatcctcccggggcccaacaaaagaaccctactcccgttaacgagtatagccgtggctgcagcaaaattcatcggtgcaggcgcgat

SEQ ID NO: 164164 - DNA, 388 bp, Arabidopsis thaliana landsberg
  unsure (1)..(388): unsure at all n locations
gttgcgaaaagactcttctagggcccaaacttttataggtcactgaaagttaatttttttctttttctgttcttaattgaagcgtgggtattcgggtacccgttcgaattcgttttttttttccggatatcgggtctattagggtagaaggttaaaaaccattcgagtattctaaaaattcggtttggttcaagttcgggttcgggtcggttcgattattttagtaaaaatgcaaaagtaatcaaaactacccaaaatattttcagatttaggtcgggttcgggttttttacttatataataccaaatctaaccgaaatatccaattatccnnnnatatattggtcactttttaaaaaaatataaccaaatgtaaccaaaatactaaa

SEQ ID NO: 164165 - DNA, 839 bp, Arabidopsis thaliana landsberg
cttaaaagattctctctagaacagagcacctctgttgagtagcccaatgattgtaagagcacttgatgtagataaaaatccattccgtcctcgagaaaaaaatgaagaagtgcttggtcttgaagtaccatacttaagtgcaatatgagcattaatgtaccttgctagtcatacaagacctgatataaaatttcggtgaatttgttagcaagatttagctcattcccaattcgaaggcactagaatgagatcaaacatctacttagatacttgtagggtacaaaagatatgggtctattcttctctaactcgtccaaagaagacttgattggttttgcagatgcaggatatctatccgatcctcataacgatcgatcacaaacaggacatgtgtgcacctacagtggtactcctatttcttgttgttctatgaagcaaaccattcagctacttcctctaaccatgcagagattttggctatctatgaagctagtcgtgaatgtgtatggttaagatcaattatccatcatatacgaggagattgtggcttacctacatgaaaggaagtccctatggtcatgcatgaggataatatagcatgtatcgcaaaactgaaggatagatacatcaaaggtgacaaaatcaagcatattctaccaaaattcttcttcacccatgatctacagaaggatggtgaggaacatgtcacacatattcgttcaagcgagaatttggcagatttatttaccaagacgctaccaactgctactttcaagaagttagtataaaatcttggattgcgtcgtctcaaagatatgtgatgtattcatgagggggag

SEQ ID NO: 164166 - DNA, 594 bp, Arabidopsis thaliana landsberg
acgaacccataacttcacatcaccactcgaccccgtggtcgagtaccaccatcaccttcactcgatcatttcactcgatcacataacgcgaccacctgcgcgtgtgtgttcacctccaccacctgaccatcactcgatcacagcactcgaccaatcactctaccaacgtggccgagtcccacaatcatcattcactggaccaatcactctaccaagaggtcgagtatcaccatcatcattcactcgaccaatcactctaccaacatggccgagtcccacaataatcgttcactcgaccaatcactcttcctacaggtcgagtcccacaatcatcgttcactcgaccaatcactctaccaacatggccgagtcccaccatcatcattcactcgaccaatcactcaactatcatggacgtgtcccaccatcatcattcactcgaccaatcactcgaccacatgggtcgagtaacattcttaatctgtcccaatactgtgtcgttttgagtactagggtttcggaatattttgctataagtagcatgtactttacattttcgagaacaagtttgaatctaaatttttatctagtttt

SEQ ID NO: 164167 - DNA, 240 bp, Arabidopsis thaliana landsberg
catctgcaatcgcataacagcgcatgcattgttttaaaaaacatatattataatgattatgatcttatttcggttttgcagccgatggcatcagcctagaatgttttgcaagagacatgccattactttctaaatttgaacatagaagttgacaatctgagcgagcgtttgtctcaccttcttgaatctgtcgatgaagatagtcctgacgccagcgttattagaagcctacttatgcga

SEQ ID NO: 164168 - DNA, 433 bp, Arabidopsis thaliana landsberg
acaattttttggaatacgcaatttttagattttaaggttttgacgggaaaaatacaattctccgattttacgaatttgaccgaaaaacgtaatttcgtaaattttcctcttaaatcgcgattttaattggcgagaacacaattttacggttttgatgagaaaacgcaattctccgattttatggttttgacgggaaaacacaatttttctgccaaaatcgtgattttattttattggcgaaaaaaacataattttacagttttggtgagaaaacacaattctccgttttggcgggaaaaaacaattttatgattttacagttttggcagaaaaaaacaattccataatttttccgccaaaatcgtgattttattgtattggtaagaaaaacacaattttaccgttttgtcggaaaaatgcaagtcttcgattt

SEQ ID NO: 164169 - DNA, 1128 bp, Arabidopsis thaliana landsberg
cttcttgcttctcaaagctttgatggtttagccaaaagttcaaatgagtctttgtctttgtatcttctaacaaggaaacactacttaggcttttaggataagattgcggtttaagttcttatactcaatcatacacatgactttaactcctatagggcggcggatcacgctccaagcttcttcgtgcttctcagagctttgatggcttacccacagcccatatgagtgattatggctgtaccttctatcaagaagacgctgtgtatccttgaacgaaaacaatacggttaaaggtcttgtgtcaaaaagggatatatgaaagacgactatgttcatctctttgtgaaaagacctgttcgaagatctcccatcattaatcgaggttacttttcccgttgggctgccttccgaaagcttatgtctcagtttcttctaagcgggacaagttctaagaaacagatactgtctctcggagctggctttgatactacctattttcagttgctggtgcgtcttctttttcttctcctttttgttagcttttaccaaattcaccattcttcggcttattccagggatctctcgcttcttctcttctcattttgtaggatgaggggaatgggcccaatctctatgtggaacttgattttaaggaggtactactggatgagcgtgctgacaaaagtatccatcatgtgttttgagtctaatgcctaaatggatttgcttcttacgttaggtgactagcaagaaggctgctgttatacaaaactccagccaactcagggacaaactaggagccaatgcatctatttctattggtaagagccttttttccccccatgtattattatgtagaatgatccttttcattatgatgcatttcagcttgtgcactcatatttgtcttcattccgcttctactagctactaactcaaccacccccttttactttgtaccgttagcgtctagtttcagttgcttactcttaactcgttgggctgtttatctgtacacacgaaggacaagtcctcagtgatcattacaagttacttccagttgacctgcgcgatataccaaaattaagagatgttatatgctttgcagatatggatctaaggaatgcc

SEQ ID NO: 164170 - DNA, 1609 bp, Arabidopsis thaliana landsberg
ctagaggaaatatataaatcagctagtgttccctctttggatatttttgtccaaatgcaagtttctatttgtaagtctgcgtcgatgccaacatgtatatatttactaccacttagttttacttatagttccatgtggaacatgtgccccaaatacatctattgattagaaactaataaattgtcaagaatcaacatgggatattttaacttcttaattttttttgtttgtatatatattgtccacttcccacaagttgtaatataatcttataacaattaacacttgagaatatcatatttgagttatttgttgtatgttacctttgatttcaagtggatacataaacgacgatattgtttttgttatgctaacaattattggaccacactatatattataatcaaactgttacattacaaatcttgtagatactcttaagagttttactaattattggtgttcatcattatttgaaacaggcattatcacaagtgttcgagtccagattgcaatgtgaagaagaagatcgagagagatacgaacaatccagattacatattgacgacatacgaaggtcaacataaccacccaagcccttctgtagtttattgtgattcagacgactttgatcttaactctctcatcaacaattggtcctttcagacggcaaatacgtatagtttctctcattctgctccatattgatcgtagttacaagtttgtgtatatagatgtatatatatatcaccaattcaccatcgtaatcacgtctcacatgtaactacgtacatatatcttgttcggggttcgttttgtaatgtattgaattggtggaggtggaatggaagtcatcttgtatagttgtacttgtatgtaaggtttgatagtaattttttataaagtaactaatttgtacatgagtctcttttatcgccctatgtatatgttgagctttagaggatcggtgtagctttctgtgcatattgtatgtaagagcatccacattcgtgaccctcttacaaatatctttactataatttattataaaagttaatgttattttaattttgagtcatttattagctaagtctttaaaagtataaaacgtttatgcagagacatggaaggcaccggtctccctagatgacatctagctacaccttggcgcatttgcgacattaattcgtggttgagttagaaggatcaaatttttttctctcttaatttgtcttatattttatgtcttaaaactggtaaaacttatgtataactgtcttatgaaatttcttataattagatgggcttttactcgtatataagataactataaaggtaggcaagactcaccggaggaggactgatggaatgctggaacgcattatacgagctcaagtcatgcaccaacgagatcgttctcttcttcctcaacggtgaaacaaaacttggtgttagttgctgtcaaaccgtagacatcatcaccaccgattgttggcctgcgatgctcacgtctctaggctttacctctgatgaaaccaacgttcttcgtggtttctgtcaatctccaaattccggtggttcttctccggcgccttcctctgtgaaactt

SEQ ID NO: 164171 - DNA, 480 bp, Arabidopsis thaliana landsberg
ttgcttcagagagtcctcgagctgctgcatgcgaagaaggtgttggatatctcttcgatggtgagagagctctgttccggatccttgacaagagcgtgcacttgtttgtcattgagaacaagaatgggagagactcaaaaccaaaattcagtaggttaggagattgaatgatggagataacaaatgaatattgcaatgtttttgataagaaggggaagtgaaggaaagagagagagttataagaatttgagaatgttttggtatgggaggtggagatatgaggttgttgagttcgggaattgcgatggggggggggaccaaagtgattatgaggggacaggaagacaaagagacatcatggatttcaatggaggcgggtcacgagccgtcggagtccgcaaggtagtctctttggtttcttcactcgatcggacggtggaaagtacttcactcttaagcactcgatcaaacggaccagat

SEQ ID NO: 164172 - DNA, 558 bp, Arabidopsis thaliana landsberg
catattttcaatatggtaggccaaatgaaatcgtttctcttcttattcgttttccttgttctaacaaaaaccgtcatatcagctagaaaaccatccaaatcgcaaccaaaaccgtgcaaaaactttgtcctctactaccacgacataatgttcggtgtcgacgacgtgcaaaacgcgacttctgcagcagttaccaacccaccgggcctcgggaatttcaaattcgggaaactcgttatcttcgacgatcctatgaccatagacaaaaactttcagtccgaacctgtggcaagagctcaagggttctatttctacgacatgaagaatgactacaatgcatggttcgcgtacacacttgtgttcaactcgactcaacacaaagggacgttgaacataatgggagcagatctcatgatggtgcagagtagagatttgtctgttgtcggagggacaggtgattttttcatgtctcgagggattgttacgtttgagaccgatacctttgaaggtgctaagtattttagggtcaagatggatatcaaactctatgaatgttac

SEQ ID NO: 164173 - DNA, 1365 bp, Arabidopsis thaliana landsberg
gacgttcaaatggatgtctgatcttacgaattccagagatttgtagacttgatcaagagattagctagtctgtttattggctttggtagattgttgcttaaaccctgctctgctatgtttcatcaacgagagttgagattaggaagtggtagagttatgggggtctctgtcacgggagtggattgacccggtttttgaatctatcgtcaaaggtatctacctttcacctgttagccacctgatgaatcctagagttgcccttatcaatgaatccatccttagaacttctattagatttatttgtatctcctgttgattgcacttttatttacctgttatttgtatcccctgttgattgcattttagttacttaaattcgtcacatgttggttctactcgacccaatgatcgagtagggctgttaagctctcatttttacttgtttgaatcctgacctaggattgctactagaaacccaccatcattataatctgccttgacttagttgcttctgtacacatcttgattgctagcaataacagtggactggattgacaccccctatagctgcattgacatgtttgtgttttaggagaattgaactgaacctcacacattcagcacataagtaggcctgaaaaacctacttatcatgcatcaatccaattaaacaaaaaggattttaaagcgctttaatatggataaagcgaatcctttaagtactccaatggtcaatagatctttaaatcttgaaaatgatccatttagactttgtgaggataacaaagaatttctttgtcccgaaataccttatattagtgctatcggtggacttatgtatcttgcaaattgtactagaccatatattgcttttgctattaatttgcttgcaaggtacaattcatccccagatatgtctttaccattggaggaactacaatctcgtggcgttctcaatagcagactatagtcgccacttcatcaaactacgtggaaataattgctcttcattaagcatgtagagaatgtgtttggcttagatccatgactaaccatgttcaagaagcaagtagattaatcatcaaaagagagccaacaacaatatatgaagataatgctgcatgtgttgctcaaatcaaagaaggatatatcaagagcgacataacaaagcatatcccttcattattcttctcatacactcaagaactcgagaaaaacaaagaagtcgacgttcattacatttgttcaagtcacaatgcagcagatttatttacaaaggcgtttccaaccttcacatttagaaaccatgttaaaagtattgggcgtcatttacgagacctgtgaagtcttttcgaggaggagttc

SEQ ID NO: 164174 - DNA, 362 bp, Arabidopsis thaliana landsberg
acaatgattgagagtaattttctttatttaatatgtagcagattccaatgatggatatacacattcctcagccgttgatggagatcatcgttagtaaagttgctgaagatggtgttgatgctttaaagaactggttgctagccgggagagagggaaatgatgctattatgtcgacgaaaaccctagcctctgttcgcattaacatggacaatcattttatgtggtggtcaatgcctcattctaagtactacagtttcttccaaaagtatcttgccgcaaataatccgtatgcaaagtttgtagagaagaacaaaggactggcgtatgagtcgacaacagggtactatcagatgagatgccgt

SEQ ID NO: 164175 - DNA, 1944 bp, Arabidopsis thaliana landsberg
atgcattgcttgattcacgttccagaactaatgaatgttaaagggattggtagatttgaaagcatgtgtaggtcaagtataagagacggattgattgataacaaggcatggctaacgtttttgagtaaaattcaatcatatctcatcttagaactaccaacttggacattgattttatttgctctatcatatgctttggttctgagtcccaaccttcaaacctctccttcaactatgtcttcttatttgcttgagggcaagcaaagactaagtttgggggagttgatatgtctatattttgcaagttttctatgttcattcatcatcgttttgagtctagtttcatatcattcatcactattttatatcattcctcatcattcttgcatattttgcatgattagttgcatgattaggatagctttgcatacatattctatttctgagttgttttcaagtgatttggagctattgacgagcaaattggaagaagagagccggaaccagaagacatactcgaccccttggtcgagtaactccagcagcacactcggccccttggtctagtaacattgaggccgttcttaccaatcactcgaccccctggtcgagtaaccacactccatgctactcgatgacaccactcgaccactgggtcgagtaacacttcgtcacacccctgaccaccactcggacattcactctactcgaccacgagatcgagtatcatcactctaccaccactcgactaggcactcgaccacatcttcaaattctactcaaatccacactcaactagataagctgagcacaaggaagagaagaggagaagaagaagtgtttggaagcggtccggagcttcatccgatcacgatgcccatctcggcccattatcactctatgggacggtcgattaggttcccggctcatctactatcattttatattgttttgtataaataagtgtctgaggggatcgtcctgggacatctagtcgacattgagtttttgctttcagttttattttatgttttactctggttgcgccgcttttgcttctgtaacctataattcgaggtttttccaagtcatcttgcaatattagattccgcatttgatttcatcggtcatcttgtttctctactctttatctctttacttatgcaatattatcatttacatgcgtttatgtctttgagcatgttgtctgagtagtgacatagagttctgaaggatgggatagaatggttgtggaatccttattatgtagaatggttaagtttttagaactgattaaacggcgggactagttgtgtttacttcttatttctttctgatcaactagaattcgatccaaagcattcccttacccagaaggtgtttgatggaatgcttgatccactagttcctgagatatgcgtctctatcccaagggattggacgtttaaagcgtgtattgactttatctatctattcttattgcctgcatagttagattcggttaatgggaattagtctaggctagctttgcttgaggatttctatcacgtgagtgaattgatctgttgttgaacctgttgtctagggatagcttgattgctcttgttaaccatccggaaaggctaggatacaactccattcgattatcccatccttaggaatttcttctctatctaatttctctgttttatcgttatcgctttatcgttctcattgcctgtttcttattttttgtaatcactcgaccaacttactcgaccacacctagtgtctggcaacagactgtgcactcgagtaccgttgtctcatttcctgtgtgttactcaaccagcatactcgaccacacccagtgtctggcaacaaactgtgtagtcgagtataactgtttcatttcctgtctgttaatcgaccagttactcgaccacgttctgctttctggcatca

SEQ ID NO: 164176 - DNA, 875 bp, Arabidopsis thaliana landsberg
ctaacgctatggcagctgcaatccaacttattacttatttatttaaagtattgttgtggaaaattggagttgaaatatttgctttgtactagatataagttattttgaaattggattaagattggtgacgtgaaatgtaaacagacccgagcattatcatttacttatttgatcctgtatagtgtttgtgcgaaaacatctctcattgtgttacttggtcttggagtcagctttatctaccatgtaatcacaatcattactttcttttcgtttgaagtgggaagattgtgaatgtagaggtggtggatggaggactgagttgctcaagcggcgttctagttagagctgtcaattgggcaggccgcccatgggcttgcccagtccaaatgcatatggatgggttatattccggaccataaaacaaatagtccaattgggcatatgaccagttttgtccgcagataatatgggcttgaccatatggacaatgggctacccatgggcatgaattgagggaaaaatataattctccgattttacaattttgacggaaaaacgtaattccgcaaatttcctctaaaacgcgattttattatattggcgagaacacaattttacagtttcgacgagaaaacgcaattctccgaatttacggttttggcgggaaaacgcaatttttctgccaaaatcgtgattttattatattggcgaaaaacacaattttacagttttggtgagaaaacacaattcttcgttttggcgggaaaaaacaattttacgattctaccgttttggcgggaaaaaacaatttcataatttttccgccaaaatcgtgattttattgtattggtaagaaaaacacaattttaccgttt

SEQ ID NO: 164177 - DNA, 411 bp, Arabidopsis thaliana landsberg
tacatatttatttgatggaaaaaaagttgaattgtgtttttggcggaaaaatgttgaatatcatttttggcgggaaaatgttaaattgcgtttttgaccggaaaatgtgaaatcctttttggcgggaaaatgttgaatgtcgtttttggcgggaaaatgttaaattgcgtttttagcgggaaaatgtgaaatcatttttggcggaaaatgttgaatcgcgtttttggcggaaaaatgttgaattgcgttttggcggaaaaatattgaatgtcgtttttggcgggaaaatattgaattgcgttttggcgggaaaatgttgattgtcgtttttaacggaaaaatgttgaatgtcttttttagcgggaaaatgttgaatgtcttttttggcggtaaactgttaaatcgcggttt

SEQ ID NO: 164178 - DNA, 715 bp, Arabidopsis thaliana landsberg
atgccttcgatttgggattcagaaagatggtttaatcagagaattagggccaagattgggattgctgtcgcggctacggctttaacggcggtaaacttcaacaacggcagtggcgaaagggatggtttaatcggtggctccaggattcgagtcgtcggtttgagagagtgtggctatgtcttagggttttctcgagctcagagggaaaatatgtctgttcgcagaaaaaagaaaaaaatcttttaagtgtttcgcggtttgagtcattttagtttcccgggttagaagaattctattatagcgttagaaccttgctatatgagtaaatctatttaatagcgttgataaaacgttgttatacgaaaacaaaatttgtaaataatcctcaatagcacttgagtaatccgtgctataacgttattctatcaatgaacaaatttcttgtagtcgcaatagcgtgctcaagtattattggataaagctttgggttttggcgtagacaaggacgatttttccagttcaacataattctcaatggtgtgttccggaagagataatgaaactcttagcatatccacgagattttgacgtaaaacaaggaagaagacaagaaaaaagtatccatccgttggagaacatggaaaaggaggtaagaagaggtcgaagaggccaagtggtttgggtgagtggtttactaatgatggtaaagatgagg

SEQ ID NO: 164179 - DNA, 792 bp, Arabidopsis thaliana landsberg
  unsure (1)..(792): unsure at all n locations
atgcgatcattacctttttcctcttcttcttattcactcgcttccacaagtttgagtaacagacttgagactatattcaagaaagcttcagagctttgcactctctgtgatatcgaagcctgcgtcatctattacggaccagacggagaacttaagacatggcctaaggagaaagagaaagtgagagacattgctcttaggtatagtcaattgaacgaagccttgagaagcaagaaaagcgttaatcttcatgggttcctcaacaagaagaagaacaagaagaagaagaagaagaagggtttgaagaatccgnncnataagagaaagacttaacttaagaagaacgtgaatgttttaaagtatccactcgctgatcattactctcctgaccaaatttcacaactaattcagtccttagaacctcatgtctctaaagtccgagaaaggattcgttttgttgagtcgtataaacagaagcagacaaaaccggatcatcagagtttagcatcaatatcttctctgaatcatcagacccaatctttgaaccctagccagttctcgttgtttatgtacaaccatggagataatacgctctctcaaatcccagtgactgcatcaaatttcaatcaggattttctccgcgttactacaagacgaatctggcttgatgaagcaggagctttgtggttatgattagaacatgtttatgaacaacaacaaatttcaagatccttgcgtctcaaacacacaagatagctattctgctcctaccaaccttcttatcgacgactc

SEQ ID NO: 164180 - DNA, 414 bp, Arabidopsis thaliana landsberg
gttgaatgttgtttttggcgggaaaatgttaaattgcgtttttggcggaaaaaatgttgaatatcatttttggcgggaaaatgttaaattgcgtttttgaccggaaaatgtgaaatctttttggcgggaaaatgttgaatgtcgttttggcgggaaaatgttaaattgagtttttggcgggaaaatgttgaattgcgttttggcgggaaaatgttgaattgcgttttggcggaaaaattttgaatgtcgtttttggcgcgaaaatgttgaattgcgttttggcgggaaaatgttgattgtcgtttttggcgagaaaatgttgaatgtcttttttgtcgggaaaatgttgaatgtcttttttagcgttaaactgttaaatcgcggttttggggaaaaaatgtgaaaaaaaaattg

SEQ ID NO: 164181 - DNA, 615 bp, Arabidopsis thaliana landsberg
aacatgtcgcaagtcctctactctctaacgatcgtctttgttttcttcgcttcgacaaacatccagaaaacatcaggcagtgcatcatcctactcccaaaaccacaaaacgttcgtgaaaaaggcttgcaattcgacaacataccccgacaaatgcttcaagtccttatcctcctactcatcgaatatcaaatctgacccgatcaagctatgcaccaccgcgcttaccctcaacgtgaaatccgcaaaggaagcaacgtccgtcgtctctaagcttctcaaaatgtctcagaaatcaaccaccggacgaaagggtaaaatgttaccagaggctcttatactcaaggactgtctcgaggagatgaaggacacaattattgagctcaagcaagcgatcacggagatgaagaatctacaagatggtggctctatggctgagcatataacgaacgttaggacgtgggtgagctcggcgttgaccgacgaagggacttgtacggacgggttcgaggaggtgaaagtgaataaagaaacaaagaagaaggtaaataaggttgttgaggaacttgcaacgacgactagtaatactttggcgcttattacgaatctacgttac

SEQ ID NO: 164182 - DNA, 311 bp, Arabidopsis thaliana landsberg
atggctccaagaacctctcttgcactcttcgtttctctcaacctcctcttcttcacttgcacctctgcaaccacagggacttgtcctatacagatcagtacttgtgccaatgtgctcaatctagtggacctaacattgggaaaccacctgtaaagccatgttgctcgctcatccaaggcttggctgaccttgaggctgcgattggtgtctgccctgaccttagggctaacgttctcggaatctacccttacgttcctatatctctcagtaggactctctccgacgctgcaacagacggctactcgtctgca

SEQ ID NO: 164183 - DNA, 384 bp, Arabidopsis thaliana landsberg
agctaacaacaattgagattttaaagactaaaagaacatgtagaagatgatgaattgatgaaagaaaagaaagttagcaaaattatggattaagttagagaagaagatgattctctatttcacttttgcaagaggaggcgtcgatccaaaagaagaaaatgagacaaaattagggcaactgactcattagctttataaatggctgtagatatttggtttaggtaaaaccgatcggttccgattatcgaaccgacccgaaccgaaatccgatttcccaaattaattttgccgatcagattagaagaatcagttcggtttatgccgataaccgaaaatctcggtttgcgggtcggtttggtcggtttccaccaaactcccagcgat

SEQ ID NO: 164184 - DNA, 507 bp, Arabidopsis thaliana landsberg
acgatgtcgaagatggttatgttgctgagctccgatggtgaatctttccaggtcgaagaagcagtcgcggtccagtcacagacgatagcacatatgattgaagacgattgcgtcgccaatggagtccctatcgcaaacgttacaggagtcatcctctcgaaggtgatcgagtattgcaagaaacacgtacttgatgatgttgatagtgatgattctactgaagcaacaagcgaaaatgtaaacgaggaacccaagaacgagctcaggacttgggacgcagagttcatgaaaaaatttgatatggaaacagtcatgaaactcattctcgctgctaactatctcaacgtccaagatcttcttggtctcacttgccagaccgttgcagatcacatgaaagatatgtcgccagaggaagttcgagaactctttaacattgagaatgattacacacctgaagaagaagacgcgattcgtaaggaaaacgcttgggcttttgaggatctaaag

SEQ ID NO: 164185 - DNA, 578 bp, Arabidopsis thaliana landsberg
gctttaagcgagattgcattaaacaaggttgatgagtcggtttctcgctttctcactgaaacaagaaagaaaacaactaaattattgaaataaacacaagcctaagatctagagaacaaagacacgagactacaaaaaaaaacaagtaacaccaataatcaaatctgaacaaatcttacgtttaagttcgtcgaggacggatttagacatgaatgattgagtttttagaggataaagatgaatagatgataatgaattgatgaaggagaagagatgtgatgatgaatagattggagaagaatgttttttagatcggagaagggctcacttggtttgcaagaggcagtgaagaagcaaaataaaacaaattagggttattgactagggttaagcttatatatgattgcatattttaataaaccaatcggtccgattaccgaaccgacccgacccgaaatccgaacaccaaaattaaattcgccgaacggttagttacagtatcttcggttttcgccgataaccgaaattatcggtttaatcgggtcggtttgctcggttcctgccgtaatcccaggcct

SEQ ID NO: 164186 - DNA, 444 bp, Arabidopsis thaliana landsberg
tcaaaggagatggaaggtgacttgaatgtcaagaatcacgagttcccaatctctcgtatcaagaggataatgaagtttgatccggatgtgagtatgatcgctgctgaggctccaaatctcttatctaaggcttgtgaaatgtttgtcatggacctcacgatgcgttcatggctccatgctcaagagagcaaccgactcacgatacggaaatctgatgttgatgccgtagtgtctcaaaccgtcatctttgatttcttgcgtgatgatgtccctaaggacgagggagagcccgttgtcgccgctgctgatcctgtggacgatgttgctgatcatgtggctgtgccagatcttaacaatgaataactgccgccgggaacggtgataggaactccggtttgttacggtttaggaatacacgcgccacacccgcacatgcctggagct

SEQ ID NO: 164187 - DNA, 249 bp, Arabidopsis thaliana landsberg
atggctgatgcaacggagaaagccgagcacgaccgtattttcaagaaatttgatgctaatggcgacggaaaaatttcagcagccgaactcgaagaagctcttaagacacttggctcggtaacagctgatgacgtcaagcgtatgatggctgaaattgatactgatggtgatggaaacatatcgtatcaagaattcactgattttgcaggtgccaatcgtggacttatgaaggatgttgccaaaattttc

SEQ ID NO: 164188 - DNA, 473 bp, Arabidopsis thaliana landsberg
tccactcgaccattacattcttacccaccacgaccccttggtcgagtagcagtcatcacaatttttcaccaccactcgaccgcctggtcgagtaacaccatctccacttttcgccattcactcgatcactgccactcgaccccagggtcgagtaccaccattcactctcactctctttctcactctaccaccaagtcgagttctaccatcttccaccactcgacttgatactcgactgccagctttagagtcttctctattccgcactaacccagacattcgagcataaggaagagatgaaggctccagctcatcactcgacccatcactcaagtactagggtcgagtactgttcttaatccatcccaatactgtgccgttttgaatattagggttttagaatataatgcaatatgtaggatgtatcttttattctcgagactaagttttattctgcagacagtttgtgttct

SEQ ID NO: 164189 - DNA, 612 bp, Arabidopsis thaliana landsberg
ttacgtttttggctgaaaattttcgggtttaagcttattggcggaaatatcttgggtttacgtttttggcgaaaaataacggatttacgtttttggcgggaaaatctcgggtttacgtttttggcggaaaaatctcgggtttacgtttttcgcgaaaaataacggatttacgtttttggcgggaaaatctcggatttacgtttttggcgggaaaatcataggtttacgtttttggctgaaaaatcacggggttacgtttttgacggaaaaatcatgggtttacgttttgggcgaaaaaataaaggatttacgtttttggcggaaaaatctcgggtttacgtttctggcgggaaaatcacgggtttacgtttttggcgggaaaatcacggggttacatttttggcggtaaaatcacgggtttacgtttttggtgggaaaattacgggtttacgtttttggcgggaaaattatggatttatgtttttggcgggaaaatcacgggtttacgttgttggcgagaaaatcacgggtttatgttttttggtggaaaaattacgagtctactttttctcaatttcatcgcttgtatatttaagaaatttgaaaaaatat

SEQ ID NO: 164190 - DNA, 619 bp, Arabidopsis thaliana landsberg
ataagatgacgacacgtgtatgcaacgtgaaaattgcagggtagatcaacgtttcacagcagcttcacggcttcaccgacacgatgcaatcctcttcaccggagaattttttgccagtcagcaaataattcagctcctccatgaaagttctacatctgcccgcctttggttgtaccgtacgccttttgccaaaattcgccgggagagattttttggatttagtttggccaccggagatttaaacttcagctgatgaggattggaataatccttggaggaccatcaaaacacgacgtgaaccccaactcttcatactcctctccaatcaaccgcaaacatcttgatctatcacccatgaagaaccgacgcccttacgctcttattagcaaagcgaggaatttaccttcacatggaagaaaaatcaagcatccaatgaacaaagatccatctaaaactctcccggaattaaacatcttccaagattggaagtggtgatttgcaacttgcaaaaggtcttatcaaaaaaccggcaataaaaccggaagaaattccgaacaagtcggaaatttaaaccggcaaaataccggaatcaaaagaaaacaaagaaaagcaaactaac

SEQ ID NO: 164191 - DNA, 792 bp, Arabidopsis thaliana landsberg
tatttaccttttaaatgtggatatagttcgaaagcgtataacaaacctttgcttatttgcatcaagcttccgaggctcattcacgacttacacgaactatcacttaaaaaataaatttagtctgcatcgcttaatttgaatattaacatcagttatagttgatgtacataaattttacattacttatataaatgaatttagaattggtgatgcaaatattttgcctcacttgaactaaatatttatattgcttattatagttaatagaataaaagttttagtttcatgagctcaggatagaaataaaagaaaaagagattttccctgtttatggatcacttgaataatgcttgtctttttgccctaacggatgattaagaattattctttcctcatgtttcagtgattatatttcataatagaaaattaaacaatacctgatataaaggaaatttaaccaatcataaacatcataaaatactatattatgtttttataaaatacatgtcaaaacggcgcttagaaattttgttttataaaacaaggcttgggtggtgcaaagacttacatatgaaaattgttttttttttaacatcattgttgttctttttttgtttgtcggtatcgttgttaatcttgtttcaaaagaatatcgttattaatctttgtaaaaaagaatggttatatatatatatatatatatatatatatatatatatataattaagaatataaatattttattataaataaaatagattaagaattacaaaaaatagatctcatattata

SEQ ID NO: 164192 - DNA, 455 bp, Arabidopsis thaliana landsberg
atgaaggtctctcctcgtttaaagtcagcccttctcctattgttcatgatccttgccacaggttattaattcataccatcatgatacatctaaataaaaactcacgtcaacatgtaatcatctacatccctaatatatttgcaagtcaacataatatgatacatatcttggtatccgtctttttattttggttaacatatttgatgtatgattatgatttatgcataagcttgtggataagcccatgttaatttcatgttcgaataacgtttaaccaatgtcttgtagtgatgggtccggtcagggtagaggcacggacgtgtgaaacgagtagcaacttgttcaatggaccatgtctgagctcaagcaattgcgctaatgtttgccacaatgaaggtttttcagatggtgactgccgtggattccgtcgtcgctgtttgtgcaccagaccctgt

SEQ ID NO: 164193 - DNA, 399 bp, Arabidopsis thaliana landsberg
catgatttagttatactgcatgtacaattaagctacctatttttcttatagatgtaacaaataaacttcttttgttatgcaggccgaccatcgatttttgttcataaaaaaataaatcttcgcgaagaggttattttaactaacatatgaaggggaatgtgtttcatgtaactttgtgcataaataagcatacattttctaaatttgaatacataataaatcttttttgctttcaataaataattttggagctgaatttggttaaatgataatgtgactcagatggtggaaagaagcatgcatgagcatgagaggcttctaagaatgaacacaaaggattatgggaacaacagtccgtcacctagacttgagaggcctcctttcaagcttatacccaat

SEQ ID NO: 164194 - DNA, 499 bp, Arabidopsis thaliana landsberg
atgcaaactccatccaaaggttctgcacacctattaccattcaaagacacaattgacaaaatagctcgtgagttacaagaaaccaaagtaaaggcagcctgttatcagcaaataccagctgctatggattaacagaacagaccagttgatgttcaagacccacctaatgttgatcaaccaagaaacattggtgctggtgatgccccaaggaatcatcaccaaagacaagggatagtgccttcaccagttcagaacaacaactttgagatcaagtagtggtctcatctcaatgatccaaggaaacaagtttcatggcttacctatggaagaccccctggaccatcttgacagttttgataggctctatagccttaccaagatcaatgggtgctacaatgaagactatgatcgctcaatgagaggaactggaggtagtgagaataaatagagcaaagatatcaaggatctgaatgaaaagctagacaagctgttagactcg

SEQ ID NO: 164195 - DNA, 1690 bp, Arabidopsis thaliana landsberg
atgcattgcctgattcacgttccacaactaatgaatgttaaagggattggtagatttgaaagcatgtgttggtcgagtctaagagacggctagattgataacaaggcatggctaacgtttttgagtaaaattcaatcatatcgcatcttagaactaccaacttggacattgattttattggctctatcatatgctttggttctgagtctccgccttcaaacctctccttcaactatgtcttcttatttacttgagggcaagcaaagacaaagtttaggggagttgatatgtctataatgtgcatgttttcagtgtccattcatcaccgttttgagtccagtttttcgtatcattcatcactgttttatatcatttctcatcattcttgcatactttgcatgattaggatagctttgcatacatattgcatttctgagttgttttcaggtgatttggagctgtctgcgagcaaattggaagaaacgagccagaaccagaagatatactcgaccaccaggtcgtgtgcatacagtgcaatactcgaccccctggccgagtgactttggagtcattcttcccatctactcgacccccaagtcgagtatcctcagctcatgccactcgatgacgccactcgaccccctggttgagtatcactttgccacaccacctgaccacactcggacgttctcatatcttcatagtctactcaaatccgcactcaaccagacaagctgagcacaaggaagagaagaggagaagacgaagtgtttggaagcggcctggacctccatcggatcacgaagcccatctcggcccattatcattctatgggccgggcgattaggttattgacccgtctactatcattttattttgttttgtataaatagatgtcttagggttctgtcttgagacatctagtcgacattgagtttttgcttcagttttattttctgttttactctactgcgccgcttttgcttctacaatctgtaattcgagattttttccaagttattcagattccacatttgatttcatttgtcatcttgtttctctactctttatctctttacttatgcaatattatcatttatctgcgtttatgtctttgagcatgttgtctgagtagtgacttagaattcttaaggatgggatagagtagttgtggaatccgtagtctgtagaatggttaagttttagaattgattgaatcccttcaggactagttgcgtttactgcttatttctttctgatcaactggaattcgatcccaagcattctcgcacccagaaggtgttcgatggaatgcttgatccaatagttcctgagatattcatctctatcccaagggattggccgtttagagcgtttattgactttatcagtctgttcttattgcctgcatagttagattccgttaatgggaattagtctaggctagctttgcttgaggatttctatcacgggagtgaattgatctgttgttgaacctgttgtctagggatagcttgattgcgcttgttaaccattcgaatatgctaggataccactctactcgattaccccatccttaagaatttctcgtctatattatttctctgttttatcgttatcgcttaatcgttctcattgcctgtttcttagtttttgcaattactcgaccaacttactcgaccacacccag

SEQ ID NO: 164196 - DNA, 408 bp, Arabidopsis thaliana landsberg
atatcatctctcttttaacttcaactagtattctcgaaaaaatatacatttcttgatattacaataatgtcagaagaatttcaagaatccgacattatattttccgaccaatccaaaatatcaacttctagccgatatactaaactctataactcaagaaacgacgagaagaagggtacaagacggcatgagacggcggagaaaacatctccggtgagaattccgacgaataatttccgatgtttggaatgggacacgacggaggaggaggatgataagactcctccacatgtaataatcgaacgacgaatgaaagagcaaattgcgttttccgcttgtactttaaaaggaagagacttgagccgtcaccggaactccgttcttaggatgaccggttttttagaagct

SEQ ID NO: 164197 - DNA, 423 bp, Arabidopsis thaliana landsberg
tgtattacatatatatttgatgggaaaaatgttgaattgcgttttcggcgggaaaatgttgaatcgcgttttttggcggaaaaatgttgaattgcgtttttggcgggaaaaatgtcaaatccttttcttggcgggaaaatgttgaatgtcgtttttggcgggaaaatgttaaattgcgtttttagcgggaaaaatgaaatccttttcttggccggaaatgttgaatcgcgtttttggcggaaaaatgttaaattgcgtttttggcgggaaaatgttaaattgtcgtttttggcgggaaaatgttgaattgcgttttggcggaaaaatgttgaatgtcgtttttggcgggaaaatgttgaattgcgtttttggcgggaaaatgttgattgtcgtttttggctgaaaaatattgaatgtcttttt

SEQ ID NO: 164198 - DNA, 673 bp, Arabidopsis thaliana landsberg
gatgaagatttatgtggcgaatgtgccgtttgatatgccggcggataagttagtgaatcagtttttggcttatggagatgttgaggaaggtcctttgggttttgataaggttactggtaaatctagaggctttgcattgtttgtctacaagacagcggaaggtgcgcaggctgctcttgctgatccggtgaaggtgattgatggaaaacatttgaattgtaagttggctgttgatggtaagaaaggagggaagcctggaatgccacaagctcaagatggtggttctggtcatggacacgttcatggtgagggaatgggaatggtgcgtcctgcaggaccttatggtgcagctggtggtatcagtgcttatggtgggtactctggaggaccaccagcgcatcacatgaattccacacactcctcaatgggtgttggttctgctgggtatggtggacactatggtggatatggaggtccaggtggtactggcgtctacggtggacttggcggtgggtatggtgggcctggtactggaagtgggcagtatagaatgccaccaagttcgatgcctggtggtggtggttatcccgagagtgggcattacggtctttcatcatctgctgggtatcctggacagcatcatcaggctgttggaacgtcccctgtgccaaga

SEQ ID NO: 164199 - DNA, 420 bp, Arabidopsis thaliana landsberg
atgggcaagaacaacaagcgcaacgagagccgactcctccatcagaggacttcggtgactcggagtactcagaggaggagttctcctctgagtccgaggggtctccggctctcatccctctgcgtgagtcgtttgacgattcagacgactctcaggggcttgcggcggaggtctggacctatatccgggccatcgagcacgctgggctcgcgggctcggatgagtcggagtactcctcggactcgtccgaggagggcggcggtgacggcgatggcgaggacgacgatgacggaggcaatggcgacggcggcgatgatagcggcgaagcgacggctcgggcggcacaatgggtagctacaagggcagcaacaaggccagtggctaggcgccactggttttaaatgtgagtatagattagta

SEQ ID NO: 164200 - DNA, 373 bp, Arabidopsis thaliana landsberg
attggtcaactgattttagtaaatgaagagaaaacaacccaagaaggagtgcatataaatccatgtttatagttaggaggcgtgggcattcgggtatccgtttgggttcggttctttttttccggatatcgggtctattcgggtaggagattgagaatcattcgggtattctaaaaatttggttcggtttcggttcgagttcggatcggttcggttattttagtaaaaatataaaaacaaccaaaaatatccaaaatattttcaggtttgggttaggttcgggttttttctcatatatacccaaatctatccgaaatacccgattacccgtaaatatattggttacttttatccaaatataaccaaatgtaac

SEQ ID NO: 164201 - DNA, 1317 bp, Arabidopsis thaliana landsberg
gtgaagagatcgaatgaagcttgtgagaatgacaatggtgatgagaactcgagtgatgttgaactcgcggaagaagagaagacggtggtggctttggtgaagaagtgagctgcggcggtcgagtgatggtcttggggtagaggtcgagttgttcttttggagagagggggcaagcggtgatgatggagaggtgaagagagttgtggccgagcgatgaggcgatgaagaagatgatgataaggaatcgagtgacgttgttgatgttggggaatgacgaattcgagtgaacgaaatgaatgagaggtggtgaggaggagatgacgaggtcgagtaaagaagaaaagggagcgttgatttaagaaggatggggtcgagtggttgagagaagagagatgagagtttggtttgttggtggtgatgaatgaagagggatggggtcgagtttattgggttatggaggagaaaacgaggtcgagtgaaggagaagaagtcgagtgggtaaggtgaagatggggtttcgtggagatcgagtgaagggatggggtgtgaagagattcaatgtctcttggtctgctgcatggaggacatgggcgtcagttgtgggtcacactgtgtcttcttgtctttcttctatgctctctgttcactgtaaaatcccaaggaaatcctgcaatcttctgtaaacttgataaactctttagataagattctgtaccttctgttggtcgagtaaaatgatgatttaaaaatttttgggttttaaacatcacacatactcgaccaatgtactcgagtgcacggtctccaggtgcaacagaagattttcaaaattttgtattccaacgggctatacactcgatctccaggtcttctgtagagtaaaagttttgaatttttactctatctccacgttgttcctttgttcctgagaaccacaaacacaactaagacaaatcagaaataacaagaaaataaaaatttatttacagagatagtcgtgggacttcctcccaagtgagcttgtttaaagtcattagcttgactcctttactcctttaatcatcaagaagttcctggagatgaaccgatgtcacctttggaaggatttgatctgctaagtatttcttgagtttttgaccatttactgtgaagtctccactcttaccagctagagtgactgctccataaggacggaccttagtgatacagaaggggccagaccatctggatttaagttttcctggaaagattttcaaacgagagttgaatagcagcacctgatcaccaacctgaaaatccttggtgatgatctttttg

SEQ ID NO: 164202 - DNA, 1240 bp, Arabidopsis thaliana landsberg
atgagaggacggatcgttagatcgtacactaggtcaaaagtgccgcattggcgttggacagatgatcttaatctcctttttattcaagttgttgaattacttggtggcgaaagaagtaagcgatttttttccatattgcaaaactaaaacaaagacgattcctttaaacaaattgagagaaaaacaaatcgccattaaaatcaacaatctcctatttttcctttaagatacctcatctctcttattttttattattatatattacacatgataatatttttgttgatatcatcttttagattcactataatcaatatcaataatctccttaaatttgcaggggcaactcctaaggttattttggaatttatggatgtgaaaaacctcacaatatcacatgtgaaaagccatcttcaggtctttatagttttttttttggacaacaacaggtctttatagtttttacccataatcagttagctatataagatacgtctatatatatatatataacatgtatatgcattgatgtataatatcatatttatatttaagattgtatgtaatgaattaaatatttttttttttacttttattagatgtataggaacaagaagaaagaagaaactagaaaaggtataagtaactatcttccatttaaattaacatttaataattatgtttgtagtgtaacgttgcatatggtaatatgttgatgttcaacataatgcatagtgactttatatccttttcattcataattatacacgctcaatcctttggcagaaaggagaatgatgcgagaaatgagcaggaggcaatctcaacaatacattcagatctacgaaagtgctcgagatgttacccaatttatgttcatgtataaacttaggtttttgtataatcgacttttgatttggtcactaaaacaattttttttttcaattgttttgtagggtacaattggatattagtgagaagataactccagttttgggatcaagtaacaagtctctctatcaatcttcaagtgtattttttcttcttcttctttttttttcttacattagtatcatgaatgatcatcaacatgtagatttgaggcatatgaaactagataaatatatactttttgtaggtgagacttaataaaaacagagataatgatgttgttgttgcttgtggtggtgcaattggcgaagaagaattgtcccttgaactcactcttgggcgcaagtac

SEQ ID NO: 164203 - DNA, 438 bp, Arabidopsis thaliana landsberg
catctaatcggtgaatttgattgcaagctcgacgcgaaaggccgcttaatggtttcttccggtttaaagaagcaattgcctttagcggagaccgacggcttggtgattcatcggggtttcgagaaacatttaactatttataccaaagccgagtgggacaagattaccgctcagttggccgctttaaactccttcgaaaagaaaaccagagaatttatcaggtattttaccagaggcgcaaccgttttaacattggatgcctcgggaagggttctgttgccaaaagccttgcttgaatatgccggcattaacaccgaagtggtactttcatgccagtttgataaaattgaggtttgggcaaaagaaacttacgatgcccaaatggatgacgaaccggaaaactttgccaatttggccgaggaagtgatgggcaacaaa

SEQ ID NO: 164204 - DNA, 303 bp, Arabidopsis thaliana landsberg
atggggagtccccctaggatagttgggtcataggttataaatatcacaggttatcgatgttttattgatggttcatggaaatagagtgataatttctcgggtttaggattggtatgtaccctatctaatgatgaggagccaataatgggcgcatgcaaccttcggcgaagcctaacatgtttatatacagaagtggaagcacttgtgtagggtatgagatatatgattggccaagacaaacgagaagtgagttttctcaaagacggctcagacttggcgaagatggtgtttttccagatagag

SEQ ID NO: 164205 - DNA, 309 bp, Arabidopsis thaliana landsberg
atggagagaataagagatttgtcgtcgaagaaagcggcggtgatattcacaaagagctcatgttgtatgtgccatagcatcaagacgctattctacgaactaggcgctagtccggcgatccatgagctcgacaaagaccctgaaggccgtgaaatggaacgggccctacgtgccctcggctcatcgaacccggcggttccagctgttttcgttggaggaaggtacatcggatcagccaaagacatcatctcattccacgtggacgggtcactcaagcagatgcttaaagacgctaaggccatttggtta

SEQ ID NO: 164206 - DNA, 492 bp, Arabidopsis thaliana landsberg
ccctccgtcctcggaacctccatccccgacgcggtgaacacggcggcgcgtttggtaaacagagcgagaagagcaaaactgtcgaaagaatttctacaagcgcacaacgatgcacgtgtttcttcaggcgtgccaacgctcggatgggacagagacctggcccgattcgctgataaatgggctaaacaacgtaagtccgattgcagtatgatacattcaggtgggccttacggtgagaacattttctggcaccggcgtaagaagacgtggtcgccggagaaagtggtgacgagatggtttgaggaaaggtttaactacgacgtgaaaacaaacacgtgcgcaccgggaaagatgtgcggccattacacgcagatggtgtggagagagaccacagccgttggatgcgcacgtgtgaaatgcaataacggtcgtggctatcttgtggtgtgtgaatatgatccacgcgggaattacgaaggtgaaagaccattt

SEQ ID NO: 164207 - DNA, 429 bp, Arabidopsis thaliana landsberg
atcggaaaatgtagcaagatccgacacattgtgaagctaaggcaaatgcttcggcaatggcgtaacaaggcgcgaatgtcgtctgtcagacgatctgtgccgtcagatgtaccgtcaggacacgtggcggtttacgttgggagaagttgcaggagattcgtggtgcttgcgacgtatctgaaccaccccattcttatgaatctcttggttaaggctgaagaggagttcggttttgctaaccagggaccgttggttatcccgtgtgaagaatcggttttcgaggaatcgattcggtttataactcggtcaagtcggtttacttgtaccgatgatttaaagaagaatcgccacggtggtattaggagcaagctggatctattgatggaatctcggccgttgcttcacggcgtctccgagaaggctatcatc

SEQ ID NO: 164208 - DNA, 579 bp, Arabidopsis thaliana landsberg
  unsure (1)..(579): unsure at all n locations
atgaaaagcattaaaatcgaaggtcagtcaaggaccgattttggtaaaaaagcaacccgcaccctgcgcgcggaaggcaacatcccctgcgtgatctatggtggtacggaaaccgtatccttcagcgcaccggcgcctgcattccgtcacctggtgtacacacctgatttccagctggcagagatctctgtaggcggaaaaaactatcgttgcatcctgaaagaactgcaatttgacgtcgtaacagacaccctgacgcatatcgatttcctggagctggttgaagacaaaaaagtagtagccaacctgcctttgaaattcgttggccagcccgaaggtgtaaaagccggtggtcgcctggagatcaaaannnnnnnnnnnnnnnnnnnnnnnnnnnnnnnnnnnnnnnnnnnnnnnnnnnnnnnnnnnnnnnnnnnnnngaaactgaacgagaacatgcgtgttcaggacattccttcagaaaatatggaactgatgaactctccgagtatcccgatcgcgtctatcgtaatgacccgtgcgctgaaacaagccgagaacgcagaagcaaaagaaacc

SEQ ID NO: 164209 - DNA, 756 bp, Arabidopsis thaliana landsberg
atggcaaagctaaaaaacaaaaacaaaagtgcgaatcaacaacacagtaattatctacaaattctctgtttttgaagcaacgacttactcctatttctttttcccaggccattacatcgtctgtgataacagtttcttccattggtttcttcttgtgagaaaattaaaccagcaaataggactttatatagttaccggggtgagagatgatataacttttatgtcaaaaaaatgaaccttcttggtgttatcttatctacgtatgtatgatgagactcttatgtctgatttgttgtgtaggaaatcacatggcaacaacttgattatcttcggacaacaagtgatgcagatatatgtctcaaatcgtacatggtttgcaccttttgtgttgtgagtaatattttttatatatcatccacatataaattgggcaatttccattatttgtgcataacaatataatttatcaaatagaaatttatcttatttcattgtttctcgaatcttgatactatttatctatagtacggtaagactctaatgttattactacagcactcggacccagattttgattttgaccttgagctgctgccacttcaccaagatcatgatcttgaactgctgctcccggattctgagtttgactttgaactgctgccacttcaccaaagttatgaccttgagctgctgcttccggattctgagtttgaccttgatctgctgtgcttggtgatctttttggtaataaatttt

SEQ ID NO: 164210 - DNA, 381 bp, Arabidopsis thaliana landsberg
atggaaaaagtttctattgtttgcttcttcttctttcttttatttggttcgggttatgggggcctcccaccgttatggcgcgctacggttgtcacgatgacaaacttgattggcggtccacctctaccatacattgcaaatccaacaaacgatctaggaattcacgtggtgcctttcaagcaagagtaccacttcaagtttcaaccaaatctttggaaatcaacattgttcttttgcagtttccaatgggacagtcaattcaagtcgtttgatatatatgatgctcagagagatcaaggtatatgtgatgactgtcaataggaaataaaacctgatggtccatgcaggctcggtaaaaaggcgaaatgttttccttaaagt

SEQ ID NO: 164211 - DNA, 458 bp, Arabidopsis thaliana landsberg
atggcggtggtggttccggcgacggcggcgatggtgattccggcgacggcggcggtagtgattccggcggtggtgattccggtagaggtggttgtccggcgatggtggttatggtggtagttccggcggcggcggttatccggcgacggcgacggtggttgtccagcgatggtgacggtggttgtccggcaacggcggcggtggttgtccggcgatggtgacggtggttgtccggcggtggcggcggcggttttccggcaacggcggtggttgccggcggttttccggcaacggcggtggttgccggcgatggtcgttatggtggtgattccggcggcgtcggttttccggcgacggtggttgtggttgtccggcggcggaggtggttgtccggcggtggaggtggttggccggcggcggaggtggttggccggcggcggtggttgtagttgtggtta

SEQ ID NO: 164212 - DNA, 557 bp, Arabidopsis thaliana landsberg
cggccacaacttctacatcgaatcactctaccaacaggtcgagtatcaccatcatcattcactcgacctatcactctaccaacaggtcgagtatcaccatcatcattcactcgaccaatcactctaccaacatggccgagtatcaccatcatcattcacttcaatcactctaccaacatggccgagtatcaccatcatcattcactcgaccaatcactctaccaccaagtcgagtactacaaccaccatccactcgaccaatcactctaccacatggtcgagtcccttatcatcattcactcgacgtccttactcgactgccagcttcagagtcttctccattccgcactcaaccagacactcgagcacaagcaagagaagaagactccagcttatcactcgaccattcactcgaccacctaggtcgagtttagttcttaatccgtcccaatactgtgtcggtttgagtgttagggtttcgaaatattttgctataagtagcacgtactttacattttcgataatcaaagttttattccgcagacactgtgttcttg

SEQ ID NO: 164213 - DNA, 471 bp, Arabidopsis thaliana landsberg
cttcttcatcgatcttctatgaagagtgagaacgttaacaaacgtgatgagtatcaacgagtctttagctgctttgacaagagccaccaaggcaaggtatctgtttctacaatcgaaagatgcgtcgacgctattaagtctggcaaacgtgcagtagttgatcaagaagatactacaaatccaaatccagaggagtcgactgatgataaatcgttggagctcgaggacttcgtgaagttggtggaagaaggagaggaggcagacaaggagaaggatttgaaggaagctttcaagttgtatgaagagagtgaaggcatcacaccaaaaagtttgaagaggatgcttagtttgttgggtgagtccaaaagtctcaaggactgcgaggttatgatttcccaattcgatattaatagggatgggattatcaactttgatgagtttagggccatgatgcaataacatattcattag

SEQ ID NO: 164214 - DNA, 588 bp, Arabidopsis thaliana landsberg
ataaacacagtccgagccaatcgtgagaacgctgcgaaaaacaactatatcgcctcacgagacagccaactgagcttaatggacagtcatcaagcgcgccccgaaccggtacataccgtttgcctgaagccacctctcaaacgaccaccgagccgtgaaaagagccgaggcaaagacttgtaaaaaccattcattctcaaaggatcatttccggtaaaataggatcttttatgggactttcggaaatgataaagtagaatctttgaagataatgtcgaatcaggaaatcttcccaaagcctctgaagaataaggaaaatatctttaggacgatgatcctctagaaccgacttaaagataaatggaaatcttccaagaatatcgctagagatgcggtttaaggatcctatataaagcgcctcaaggacttctcaaaggagacaattaaatactcaaaaagacacaattttatacccaaagagaactacgaatggcttgatcccttcacagggtacgtaggcaatccatcacggatgcaactataccttctaataccctaattctttctctgttcttgagcaaaacccta

SEQ ID NO: 164215 - DNA, 436 bp, Arabidopsis thaliana landsberg
cacgtcgtctggcacctcgtgacgtcgcgcggggacatcgacatcgagcttcggccggatgtcgcaccgtgggccgtcgccaccattgcttcgctcacgcagcgcggcttctacaacaacatcgagtttcaccgcgtcgtcccgaacttcgtcgtccagggcggcgatccgacgcagtcgggttggggagggccgggcttcacggggccggccgaaccggcgagcggtctcgatggaccggggttcgtgcaggtcggtgtgggcatgagccgacgccgggcgagatagcgccggctcacagtggttcatcatgcactcgcgcgcgcctcacctcgacggtcgttacacgtgggtcgggagcgtgatctcgggccagaacgtcgcggatagcttgcagattggcgaccgcgtcgtgaccgcgaaagtaacgatcgaa

SEQ ID NO: 164216 - DNA, 579 bp, Arabidopsis thaliana landsberg
cgagggtttagatcctccatggaaggcggcggagttgctgacgtggctgtccccggtacgaggaagagagacagaccttacaaaggaattaggatgaggaagtggggaaagtgggtggcggagattcgtgagcctaacaagcgctctaggttatggcttggctcttactctactcccgaggcggcggcgcgagcttacgacacggcggttttctatcttagaggacctacggcgaggcttaacttccctgagcttctacctggggagaaattctccgacgaggatatgtcggctgcgaccatcaggaagaaagccacggaggtcggtgctcaggttgatgctttgggcacggcggtgcaaaataaccgccaccgtgtttttggtcagaatcgagatagtgatgaggataataagaattttcatcggaattatcaaaacggtgaacgagaagaagaagaagaagatgaggatgacaagagattgaggagtggcggccggttattggatcgggttcacttgaacaaattacccgacccggaaagctacaatgaaaaatgggaaagcaaacattaaaaatat

SEQ ID NO: 164217 - DNA, 372 bp, Arabidopsis thaliana landsberg
atgaagaacaagttcataaaatcgtgcgaaaacaaattcagaatcatgaagagcaaatccatagttctaccttgttgtacatcttcatgcgagagttgctgcgacaaggtttcttggggattcaagaaggaaaatgaagcaatacctaaagatgttccgagaggacatttggtagtgtatgttggtgatgattacaagaggtttgtgataaagatgagtttgcttactcatccaatctttaaagcattgcttgatcaagcgcaagatgcttataattcatcaagactatggattccatgtgatgagaacacttttctcgatgttgttcgttgcagtggcgctcctcagcatcagagaaactgcattggcatg

SEQ ID NO: 164218 - DNA, 252 bp, Arabidopsis thaliana landsberg
gttttcataagcaaaaaggcaatggaagagtcacgatcctacagaaaggagaggaagcagacaaagaagaaaacgggtcgtgggtcaggatccaggtcgatccatataaagatgaggaagcttcgagtgcttataccgggtggacgaagattgaaccaaccggatctgcttctatcaaagactgctgattatattatgcatttggagttgaggattaggtttctcaaagccatctccgatatctactcactc

SEQ ID NO: 164219 - DNA, 384 bp, Arabidopsis thaliana landsberg
cttctcatcactcttttaatctcctatcagcattctttctccgaatggttctcgctcaagtaccagctacatgtgcttccagactgctttccttagctccatgtggtccattcgttcaaggctttgcccaacttccggctcagccatgttgtgacagcttaaaccagatctatagccaagaagcaacctgtctctgtctcttcctcaacaacacctctactttgtcccctgcttttccaattaatcaaactcttgctctacaattgcctccgctttgcaacattccagccaattcatccacttgctcctcctcctcccctggtacgtaaacaacacttctactttgtcctctcctctgtgagatcaaattggtttcttggaact

SEQ ID NO: 164220 - DNA, 314 bp, Arabidopsis thaliana landsberg
atgaaatcaattttctacacccggtttccaaaatcacatcagtgtctgccgatcagaattctcttacttgtcagatcgattgctctggggtaaacgcagcctccttaagttgtattggatggattcttgttggctctgatagtcattcatccaatcttggactaaagtgtcttcgtcagtgtgtatttcctcttcatactgagtttgaggctcttctgtgggtaatgtgttctcttgcatctttatccattttttatattgcttttgatacatattacaaggagttagaggattttaatgttttaaagcttagg

SEQ ID NO: 164221 - DNA, 751 bp, Arabidopsis thaliana landsberg
  unsure (1)..(751): unsure at all n locations
gtcaataaccaaacgcaaaatctctggagttctgatcttttcgattgcatgaatgacagtgaaaatggttagataacttttaattaaaatacaatcaattacgcaattgtacacacaagcataacattctatgattatttcttaattttgttgttgttgttgtgcattggttcaaccgtgatcacatgtttagctccatgcgtcacgttgggacagattgctgagatcgttcacgaaggcgctactcgtaactccttaatttatacaaacacatacattttacaaaaaaatagaaagaagaagaagcgtagattttcatttgtgtaaacatactaacatatgtgtacatgtatcacgcagcttgtgcgacaggtgggttgttgtatggaatgatatttttcatcggagtgccgtttgtctactcatgcatgttccgggccaaaatgcgaaacannnnnnnnnnnnnnnnngctccggctcccgattggatcactcacttattctgtgagcattgcgctctttgtcaagagtatcgtgagctcaaacaccgtggttttgaccccaatattggtaattttattattatgaatccattctctcattaattaaattcctttgcttatctgtttgataattgttatataaccaatgcttgtattgaatatcaccaactatgaattatgttgatgcaatagggtgggctgggaatgtgcaagcacagcagccagtaatgtctccttcgacaggtcaa

SEQ ID NO: 164222 - DNA, 520 bp, Arabidopsis thaliana landsberg
atgatagctcgagttgaaatgagacagcatagacaaaatcatgtacttatgagggtgggtgggttgttcagaaaataatttgaagacgcattggaggcaaacaaccccgaagcacattacttggaagggctaaggtacgcgtgttgggaaaaagatttagacatggcaaaaaaaaaaaaaaaaaaaaaaagatttagacatggctaaaaaacacattttcaaagcgattaacaaagtagatgaggtactgtttgttatggctatgtcgacaatttgtggtggagaaaaagagctaggtgaatttttcactgaacaactgtttgccctaccttgggccgaagtattagctatgggtgattctttattttcagctcttgaacgaatggctgtgcgccatggtacagcttacaggcttacatggaatggggcccatcctccatgtgtatcaatccacaacatatataatagatgcgaagagtgctacattttcttttgttcaaaagaattctgtcggcgatgt

SEQ ID NO: 164223 - DNA, 533 bp, Arabidopsis thaliana landsberg
agtggaggctgcaattcaggaatgatttcgaatgctgaagctggaggtttcaagagccgtgggtttcctgttaagtgtaaatgtgggctcgacgtcgtcatgtttacatcgagcacggctaagaaccctggaaggcctttctttcggtgcaaaagctgtgaagatgtaagtagatttgatatgagaatgtgatgttttttgtgtttggtcgataaaagcttgagatggaattgcaggatcatttgttcaaatgggtggaggattgtatgtatgaagaggttatagatgctctacccaaaatctccagcattgataacgagataatcaatgcaaaagttgaggttgctgttgaaattgcaaacttaaaggagctaatgatagagttgaaagaagatggaatgtggagcaaaagagaaattcagagatggaaaaagatgacgaaagtatgcttggtgtgcctttgttttagtgtgattgcaattgtaatatcaatgttctataagaaaaaaacccagaaatttgttcttggttat

SEQ ID NO: 164224 - DNA, 790 bp, Arabidopsis thaliana landsberg
gccttgaagacagattggtcgagtgaaaaagatgtgggcgatttcaaaaaggagtggtggagattgagtttgagattctctctccatcttatcttcagggagaaagcgcgtggtccacactctgttgacttgtctttgaaacttcaggaaatcttctgtaacctgacaaaatccctgcaagtcttcgtagctcctgttggtcgagtataatcatgatttaaaactttttttttttttttgggttttaaacatcacatgtactcgactgaagtactcgactgatgtactcgactgatgtactcgaattcaactccattgggctatacactcgatctccaggccttctttagggtaaaagttttgaatttttactctatctccacgttgttcttttgttcctgagaaccaaaaacacaattaaaacaaatcaaaaataacaagaaaggaaaaatttatttacagggataatcatgggacttcttcctatgtgagcttatttaaaatcattggcttgactcctttactcctttaatcatcaagaagctcctagagatgaaccgatgtcacctcttgaaggatttgatctgctaagtatttcttgagcctttgaccatttactgtgaaatctccactcttaccagctagagtgactgctccataaggacgaacctcagtgatacagaaggggccagaccatctggatttaagttttcctggaaagagtttcaagcgagagtttaatagcagcacctgatcaccaacttggaaatccttggtgatgatctttttg

SEQ ID NO: 164225 - DNA, 1038 bp, Arabidopsis thaliana landsberg
cagagggttccggctaaatatttggcacgattgcgatcaacatcgaaacaatggaacgctctatcgaattctgggagttttgctaagaagcactctgctaatgcaacaaaggagcctctgattatcatgttgaaggattctagggtttacttagcaagtgtcaatctccatggagttcacaacaacgttgctcaatcttttgagttaggatctcgattgtaccttaaagatccgcacatttctaacgtctttcactgtgatggcttgttattgctctgctccattaaggagaatacactcgaggtttggaatccatgttcaggagaagccaagttaattaaacctagacacagctactacaaggaatcagacttttatgctcttggttatgacaacaaatcctcctgcaagaaatacaaagtcttgagggtgattagtcaagtccatgttcaaggtgacttcaagattgagtacgaaatctatgacttcaccaatgattcttggagggttcatggtgcgactaccgaactgtctataagacaaaagcatcccgtgtctgtgaaaggaagtacttattgggttgttcgtaataggtattttccatataaatacttcctaagttttgatttttcaaccgagagatttcaaagtctgtctcttcctcagccgttttcttatctggttacggatttatcagtggttagagaagagcaactctgtctgtttggttattataattggtcaacaacttcagaagacttaaatgtatgggtgacaactagtctcggatcagtcgtgtcatggagcaagttcttaacaatacaaatcattaagccgagagtggatatgtttgattatgggatgagtttcttggtcgacgagcaaaacaaatctttagtgtgttggatctcccaaaaagtcttacacattgtgggagaaatttatcacatacaagatttggatgatcatggtagagattctgcgttaagatcatcatgctcagttcttatgaattatgttccaagtttagcccaaatc

SEQ ID NO: 164226 - DNA, 355 bp, Arabidopsis thaliana landsberg
ttcgatatatattttttgattatctcttaatcattagtttgcgatgtttatagtgcgggaattgagtttgagatcgactcaaaaattataattggttttctcaaaacatggattagacgactcatatattcattgtctttcctaacatgattatagtatggctctatcgtgaaggactggatagtctgtattttatatatctatagaaaaactaacagttttataaatgagttagcaaaatatacttttttttgttgctttaaaactttttttttctaattctatcccatattatattaattcgattttgttgaatgattctagaggatcgatatacccgaaacatgtttaaaat

SEQ ID NO: 164227 - DNA, 622 bp, Arabidopsis thaliana landsberg
atggaaatccgcacgccaaaccgcctgcctttccatcgctgggcggttttcccggtactgctggctcaattcgtcgtactgctgctggcaacgttggtgttgtggcagtggaaaggggcggtcagtggatattcaggcctttgcggaggtttgattgcctggctacccaatgtgtatttcgcctggaaggcctttcgcttcagcggggcccgggcggcacaagccatcgtcaagtcgttctacgctggcgaggaaggcaagatgattttgacggcagtgctttttgcactgaccttcgcaggagtgaagccactggcgcctgtagcagtaatcggcgtactcgtgttgacccttttggtcagctggttcgcgcccccgcatcatgaatgaaaggctttctagaccttagggcgtttaagtcaaccatgtcagcatcacccggtttgggctatatccagcaccacttgcaaaacctaacatacggtcaaataccatacggcagttgggtcttcgcccattcggctgcagaagccaagaaagagatcttaaaagcgttccacctgaacaccctgggttggtccgtcgcgctgggtctgatcttcctgttcatctcgttattacg

SEQ ID NO: 164228 - DNA, 487 bp, Arabidopsis thaliana landsberg
catgagcaaaggaacaagctcactgggagaagatgtgccaagtgagagagagattaaccggctcgcagctcgaactgaggaagagttttggatgtttgaacaaatggacgaggaaagacgtaaaaaggagaactacaagacacgtctcatggaagagaaggaagttcccgagtgggcttacacttcagagactcaagaagacaagactaacgcgaaaaaccattttggtagcctcacgggtaaacggaaacgaaaagaagcagtgtatagcgactctttaagcgatttgcagtggatgaaagcgatggagagtgaagacgaagatgcttccaaagtctctcagaaacgaaagagaacggacacaaagacaagaatgagtaatgggtcaaaggcagaggctgtgttgagtgaaagcgatgaggaaaaagaagaagaagaagaagaaaggaaggaggagagtgggaaagagagtgaagaagaaaatgag

SEQ ID NO: 164229 - DNA, 342 bp, Arabidopsis thaliana landsberg
tccccatcactcatcatagcctttggctatgccggcaacggcatcatccgtttttcccgctacgcccgcaacgggcgtatacacttgctggcaaccatactagtgtgccttgccggttggtactggaaaatatcgggtatggaatggtgtgcggtattgctctgctcagcgctggtaacctcgctcgagatggtgaaccatgccctcgaaaacctatgtgatatggcacatcccgagtggcatcctgttatcaaggctgtcaaagacgtatcggcgggtgcagtgctggttgtttcggtggtgagcgtggcggttggcctggttatttttattcccgaacta

SEQ ID NO: 164230 - DNA, 333 bp, Arabidopsis thaliana landsberg
gatgcacaagtgtctcctgatcaggctgatcacgatcccgcgcaccggcggcgggggcgggagctggagtcggcgatccaccgcgccgtcctcgaggagctggccgacgtcggcttcggcggcctgaccatgcagggggtggcgcgccgggcggggacgggccgggcgcccctctaccggcgctggagctcgaccgaggaactggccgtggaggcgctggtcagctccctcccgccggtggagccggccccggacaccggcgatctcagggagaataagctcatcctcctgcgccggcggcgggacgcgatcgccggggcgctgggcccggcc

SEQ ID NO: 164231 - DNA, 331 bp, Arabidopsis thaliana landsberg
atgctggcgcccccgtttccgccacgcacgcccatgcagaccttcgtttacgccagccaccgcaagcccgacacctacgtgtggctgcgcgatcaggaccgcttcgacgtgctgccggccgaactgtccgcgcgcctgggcgagctgcgtttcgtgctggccgtcgaactgacccccgaacgccaattgccgcgtgcggatgtcgccacggtcctggccgacctgcaacgccagggctggcacctgcaactgccgccggccgacgccaccatcggctgattccggcaaacaccgtgatttaacggccagttaccgcgatgcccggtttgcc

SEQ ID NO: 164232 - DNA, 402 bp, Arabidopsis thaliana landsberg
atggcaagtgaagtagtaaacccgaccaagccacggtttgatctaagcatgtcgaaaagaactcgaaaaccatggtctagtctcatcagcgatatgcatcaccatgcaatatgcacccaaagctcacaaccaaaaccagacaaagaacaagagcaaatcgaagacaaagagattgatcgtaagagtttgaacaatctgatgagatgcgatgagaaattgaatggagaagctgatgttaacaacaagagctctctagatcaacatttcgaggatggcgaggggatcaagccgacgatgcaattggtggtgaagaaagagaagcaaggtggtttgaaattcaaaggtatggtgggtcgatatgttaaggtctggagcggtttgataaaggccaaacgtgaccac

SEQ ID NO: 164233 - DNA, 522 bp, Arabidopsis thaliana landsberg
aatcacatatctcccacaatctctttctcgctctctcgatcatcagattcttcaatctctttcaccaagcttaaccaaatcgttaccatgaaggatatctctaaatctccggcgagaagaagcgacggattccaccgctacttaaaaccaggagcgcttgctcagatccgaaactcaagaatcaacgctagatctactacatctctcgtatctcgctcctccctctcgcaactagtagatccgatttcaccatctgagaactctgttgatgaagcagcagcggcttcgcggaatctgacgatagatcaggtaccacatcttctaagaaagatctatggtccttacagttatcagaggaagaaattagccgctgctagatctgtctcgtcgatgatgatgatgaatatcaatcctcctataaattcagttcttgttgaacccagtagtgatgttattgctcattgagttaaactagtttctaccaaatctgtaatctgatgatacaattcgggtaaaaagttt

SEQ ID NO: 164234 - DNA, 303 bp, Arabidopsis thaliana landsberg
atggtgaaatcaaatgggtgtctcatctccatacttctcatcatggcttcgctctcttccccttcacacggcctaatttccctccctgggatcgacatatataacccgtgtcataattgagggtgtcgtgtattgttcacatgtcggagaccctagagaccctgctatctcgaatgccactgtttacttaacatgtgccggctcaaccactagcctctctaagcagtactgaccaatcccgccggtgcatttaccatggtgctcagcatcttagataatgctttgttggaccctagtttctgc

SEQ ID NO: 164235 - DNA, 555 bp, Arabidopsis thaliana landsberg
gttgtgttcttgtcggaaacgttctcgttttcccgatcggtggtaccggagctgacgcagcaattacccatgagagagaagagacgacgtcgtttgatcggagattagagagtagtactccttggttttgttgtgttgtgtggtgacagcagaggatgattgtgaagtgagagtatttattgttaatattttgggacagttgataatatgagtaaaaagaataattatacaacaactaccccaaagtagctttaatttataatgatttcagcagtaattatgtctgtgattaaaccccatgcaatttccccattttctccaaattatgctttaagtaaagttcccatagctctttagtcaacgggatttgatatcactgcttaaaatcatggtagtggccataattagcaatatcactcagtagtcttagtaagaggggacagggttaagtattcacccggtgtgagctatcgccctgaaaaagaatcctgaaacgcggtcggagtaaaggatcgccatcaacggcgttctagtgcgtggtatattctgatccaa

SEQ ID NO: 164236 - DNA, 932 bp, Arabidopsis thaliana landsberg
atgaagcaatcttctttttcttcttcttcttcgtcacgtaattcaactagtttaacaaacagactcaaaaccatcttcaaaaaagctgaagagctttcgattctctgtgctattgacgtttgcgtcatctattacggaccagacggtgaactgagaacatggcctaaggagagaaatacagtgaaagacatggctctcaggtatagtcaattcttcgcagccttgagaaggaagaaaagtgttactctttatgacttcctgaacaagaagaaggacaagacgaatttggagaagaaagcaaagatatcggacaatgatgacttgaagacttgtctgaagaacgtgaatattttaaagtatccactcgctgatcattactctcccgaccaagtttctcaactgattcagtccttagaacctcatgtctctaaagtccgagaaaggattcgttttgttgagtcgcagaaacacaaggagacaaaaccggatcatcagagtttagcatcatcctctctgaatcatcagacccaatctttgaaccctagacagttttcgctgtttatgtataaccatggagacaatactctgtctcagatcccagtctctgcatcaaatttcaatcaggattatttctcagcgttacttgaacaatctgagttgaagagtcagataatgaagcaggatctttgtggttatgagcagaacatgtgcatgagtaaccatggagatgctacgctctctcaaatcccactctctgcatcaaatctcaatcaagatttctcagccttactacaagacgaatctggcttgatgcaacaggagctttgtggttatgatcagaacatgtttatgaacaacaacaactttcaacattcttttgtctcaaacacacaagatcactctgctcctgcggtacaagaatctgtgaacaa

SEQ ID NO: 164237 - DNA, 561 bp, Arabidopsis thaliana landsberg
atgatcgattcggattgtgaggatgattgtgtgatcacgggagtgaggacggtggagcaggagctggctccgaagggacatgagatcgtgatggtccatgactatgtgagtgtttcctcgaaaagttctgcctcgccatcctttgcacttagcctatattcaccaatatcctatgagtcagatccgaaggaggatcaggatccaccgatttctccatacgtcccggaggctgttgatccaccgatttctccatacatcccggaggctgttgatccaccgatttctccatacgtcccggaggctgttgatcactctcccgatagcccttttgcactgttatgggagggcacgtcccccatactctgtttcaaggctgatatgagggctgacgctattccgacctttgatgggggcttcacatcgggtatcaagatactgttctgcttcatctgtggcgaggatggtcattacccgcaagactgtcagttctacacgcagtacatcccatggccattgcttgtctctactgtggagagtatgagcattatgcggctacctgta

SEQ ID NO: 164238 - DNA, 328 bp, Arabidopsis thaliana landsberg
  unsure (1)..(328): unsure at all n locations
ctggcacaattacgtgcagcagcacagaaacccgaaggcctgggcacccaggcggctccggcactcagccaggtgcagaaacctgctacagccagtcccaccagccaggtcagcttcagtgacgcactgaaagcgtcactggaccaggtcaacaatatgcaattgcagtcagaaaaaatgggcaaggatttcgccatgggcaatgacaatgtcagcctgtcggacgtcatgattaccggccagaaggcaaacattgcctttcaggccaccctgcaggtccgctcctagcggtcgagtnncaantcaggnngtgatgaaaatgcaggtc

SEQ ID NO: 164239 - DNA, 210 bp, Arabidopsis thaliana landsberg
cttgaatatttaaatatgatatttaattacatttgtaccttcggcttgacagaaggcaaaaatccaagtgttgcacgtgagcgattacaggatagcgtgaacagtacgggggtactgtttatctatttataggcacaggatgcagcccgtacgaaattacattaatgccctttacacttgataataatcctatagtaatctgtcgaggtc

SEQ ID NO: 164240 - DNA, 288 bp, Arabidopsis thaliana landsberg
caccagcacagctacatcgccaacaacaccaaggcggactacctcaagcggctgcgccgcatcgagggccaggcccgcggcctacagcggatggtcgaggacgagaagtactgcatcgacatcctcacccagatcttggcgatgactaaggcgctcgaagcagtcgccctcggcctcctcgacgagcacatggcccactgcgtcgtcgacgcggtggccgccggcggcgaggaggcgcagatcaagctcaaggaagcctccgacgcgatcgcccgccttgttcgcagt

SEQ ID NO: 164241 - DNA, 480 bp, Arabidopsis thaliana landsberg
atgaagcagcatttttttgcgacgaaagcattttagcatttcaaaatgaactaaaacctggaagtattctcaaagtcaattgtacatctaaaagcgacaaaacggaaattcgagatgtggcgttcatgaaaattacggaatggagatttaacgaaaatccgtttgatagaacaatatggaagtgtctcttaagacaaggtcctaacatgcaaaatcatcatatcttatggagagcatacagaggagggtctacttgacgatgtggtcagatacgtagatggattgctaaaattgatggaatttacttagaaggtaatttggtaccacgaaagcgcatgtttgattggtttaaagtctaatttgttttttggtaaaagtattgtcatcacatacagatatacatgaacaaacataagtcatgttacatcataaccatcctactttgatgtttcgatcattaaaatccggcgttaaccagta

SEQ ID NO: 164242 - DNA, 266 bp, Arabidopsis thaliana landsberg
gtttctgaatctgttgaaatgttgtctgttaagggaccagatatggtgccagtcttaggaagcaaatcaagaagatggaagtgagtcagcacagcaaatacttctgctagttctgtggcaagtatgctgttaaacggaaggctgttggaatttggggatgtaaggactgtgggaaagttaaggctggaggtgcctacacgatgaatactgctagtgctgtaactgttaggagtacaaacaaaaggctcagagaacaaactgagagc

SEQ ID NO: 164243 - DNA, 267 bp, Arabidopsis thaliana landsberg
aaataattattaaatgggaacaatcttgacataacaaaaacattcactctatgttatgtgtttcaaaacacgatccacttgattttgaaagagaggaacaatagaaggcatagagacgagccatcaccaagcgagagagtgataagaatcatcgataagaacattaataatcaattaagtacaatacaatatggagatgagcggaagtatgaagtaggtttacgagattggtttgcatcaaaggcacacaatgaaagataatttctt

SEQ ID NO: 164244 - DNA, 301 bp, Arabidopsis thaliana landsberg
atggatatgataacgaagatggtgatggagagaccggtggtgatttacagcaagagctcttgctgtatgtctcacacgatcaagtctttgctctgcgatttcggagcaaatccagcggtttacgagctggatgagatatctagagggagggagatcgagcaggcgttgttgcggctcgggtgtagcccgcagttccgggcgttttcattggtggagagttggtcggtggagcaacgaggtcatgagtctacacttaacggatccttgattccatgcttagcggtctggtgcattgtgggtt

SEQ ID NO: 164245 - DNA, 781 bp, Arabidopsis thaliana landsberg
tgatttttgcggttttggcgggaaaacatgattttgaggttttgacgggaaatcgttattttgcggttttggggggaaaacatgattttacggttttggcggaaaaacattattttacggttttggcgggaaaacgtgatttttgcggttttggcgggaaaacatgattttgaggttttgacgggaaatcgttattttacggttttgacgggaaacatgattttatggttttggcgggaaaacatgattttgcggttttggcgggaaacatgattttacggtttgggcgggaaaaacatgattttacggtttgggcgggaaaaacatgattttgcggttttggcgggaaacatgattttacggttttgcgaaaaacatgattttacggttttgacgggaaacatgattttatggttttggcgggaaaaacatgattttgcggttttggcgggaaacatgattttacggttttgcgaaaaacatgattttacggttttggcgggaaacatgattttatggttttggcgggaaaaacatgattttgcggttttggcgggaaacatgattttacggttttgcgaaaaacatgattttacggttttggcgggaaacatgattttatggttttggcgggaaaaacatgattttgcgtttttggcgtaaaaataagatttttgcggttttggcgggaaaacatgattttgcgggaaaaatgattttgcaattttggcaggaaaacatgattttgtagttttggcgggaaaacattatattgtcattt

SEQ ID NO: 164246 - DNA, 306 bp, Arabidopsis thaliana landsberg
atgaacacagcccgagccaatcgtgaaaacggtgcgggaaacatatatatcggctttggagacagccaactgagcttaatggacagtcatcaagcgcgccccgaaccggtacataccgtttgctcgaagccacctctcaaacgaccaccgagccgtgaagaacacctgaggcaaagacttgtaaaaaccattcattctcaaaggatcatttccggtaaaataggatcttttatgggactttcggaaatgatacaggagaatctttgaagataatgtcgaattaggaaatatttccaaagcatccga

SEQ ID NO: 164247 - DNA, 249 bp, Arabidopsis thaliana landsberg
tgtactggaagcacaggatatcgcaattttgttggaattattaccagcaatgaaatctgggacattcatagcaacactataccttcattattcataggatgataaccattcatgcgtagctaatgatggtaggaggggttcatcagccatcgatcaatcgagtgcagtacagagagccgatatgactatgcatttattatatgtcgcagggatcctaagaacaagtcttttgaattaagctgatgttta

SEQ ID NO: 164248 - DNA, 283 bp, Arabidopsis thaliana landsberg
agttcctatattttgtgattcaacagcggctatacacatagttagcaacgctgtcttccatgagcgcacgaagcatatggaaaacgactgtcacattacaagagataggattgagcaaggtatgttaatgactatgcatgtggatacaacaaaccagattgcagatgttttgacaaagcctctatttccttctatgtttaattctctcattggcaagatgagtcttctctccatatgcggctcatcttgagggaggataatagactatatgattgatgaaatt

SEQ ID NO: 164249 - DNA, 374 bp, Arabidopsis thaliana landsberg
aagatgcccgtggttgtacaattcttcataatctctcttctcctcacatcttcattttatgtactttcaagcgctgattcatgtaagtgtatacttaatctagttagttattttttaggttatttatcattttgaaactagttgtctgaaattctaagatttgatttgtgatggtgataaatgaattagcagcatgcggtggaaagtgcagtgtgagatgctcaaaggcagatcgaacacatgaggagtgccttgaggactgcgatatatgttgccagaagtgtaattgtgttccttcggggacttatggaaacaaagatgaatgtccttgctaccgtgatatgaaaaactccaaaggcggatccaagtgtcct

SEQ ID NO: 164250 - DNA, 1316 bp, Arabidopsis thaliana landsberg
tgtattacatatatatttgatgggaaaaatgtgaaattgcgtttttggtggaaaaatgttgaatgtcgtttttggcgggaaaatgttaaattgcgtttttggcgggaaaatgttaaattattttcggcgggaaaatgttaaattgtgtttttggcggaaaaatgtgatttgcgttttggcggaaaatattgaatgtcgtttttggcgggaaaatgttgaattgcgttttggcggaaaatgttgaatgtcgtttttggcgggaaaatgttgaattgcgttttggcgggaaaatgttgattgtcgtttttggcggaaaaatgttgaatgtcttttttggcgggaaaattttgaattttttttttggtggtaaaatgttgaattgcgttttaggagaaaaaaaatgtgaaatcttttttgacaagaaaatgttgattcacttgaaaaaggatttaaaaaaaaaccgtaggtacccataacccaatgaggtaaacccatatgggttttatttatttgggtatccagtacattttaaacccgtgttttttttctagaaaaagtagatctataggcttaaaattttatgtgggtagccagtcggttttaacccatcattaacatctctaatcaccgaaaaagaaggtaacatttatgtcaagttcagatcagaaaacatatgttgaccaataatgatgaagaagtgttagagaagaaaatttatgattttgtcgaaaactgttttttttttaaaatagttaaaattcgttctaaaaagtttagaatatgttttctaatttttgtctaaattctaaatattttagatcatgtatttttatacattgaacatgttctactcattttaaaattgacatgttctaaaagttgattaattataaaacatattttgacaaaatcataattattcagaacataaatcaaagttgatttagtgggtaaaggccaaaaaaaaaactgattgttccgagactacccgtgggtaccgaacttagtttttgtcattttcttaaagtttattttaactgctaatatactattatatgtatgttgtatctataatttgcttagaaatatattttaaattgtatttattttctatattacatatttatttgatggaaaaaaagttgaattgtgtttttggcggaaaaatgttgaatatcatttttggcgggaaaatgttaaattgcgtttttgaccggaaaatgtgaaatcctttttggcgggaaaatgttgaatgtcgtttttggcgggaaaatgttaaattgcgtttttggcgggaaaatgttgaattgcgtttt

SEQ ID NO: 164251 - DNA, 351 bp, Arabidopsis thaliana landsberg
  unsure (1)..(351): unsure at all n locations
atggtgatcggttctcgtgctttgattggtctaacaatgatccttgtgatctcaggaacactaccagttccagggcaaggaacgtgccaaggagannnnnnnnnnnnnnnnnaagaatgcgccgtctacgtgcagcgtccaggcccaaaggtaaacccgtccgaagcgtgctgcagagtggttaagagatcagacatcccttgcgcatgtggccgtatcacagcttcggtgcaacaaatgatagacatggataaggttgttcatgtcactgccttttgtgggaagcctctcgctcatggtaccaagtgtggaagtaagtctatatatatattaagaagttttcttctttta

SEQ ID NO: 164252 - DNA, 412 bp, Arabidopsis thaliana landsberg
ttgatccacctcatattttacgttagtattgccattcatttttcgttcaatgaagcttgcaacacaccaaatgttgtagaaattcataaccaactcggctccgggtaacctcctcaagcatcattgtcgtggtagtattaacgagcaagataaaggtgtccaatatttaaaagtcaatcaaaattttaccattgtgttttcggatgtttccaacagaagagaaaggacagtgtggacatgtatgttgaaccatggggataaaatggagtttcattttaatcttcaagtatacagagcagctgcaactgaacgatgtaatcagtatcgctcatggactgctaagcctgatggaatttggtttagaagagatcgtaataaaccgtcgggacatgtacgtaactggatgagataa

SEQ ID NO: 164253 - DNA, 298 bp, Arabidopsis thaliana landsberg
atgaatcccaacaaagctgatattagtcgcctagaggcacttcctcaagatatacttgaagaaatatttgctaaagttggagcaacatcagccaaagattttcacaattgcatttttgtatgcaaaaaactaggtgcatcagcaactgacaaacaagtgctcaaaactcttaatcttgttccgttggtgaagtaaccgttatcggcatgcaaaccttcttactatgaagaaatgttttgacaacaacaacccaaatgctcactacataaaacgtataatacgctactttgtctttgat

SEQ ID NO: 164254 - DNA, 306 bp, Arabidopsis thaliana landsberg
atggaaagcgttagaagtttagttgaagacaaaccagtggtgatattcagcaaaagctcttgctgcatgagccactcaattcaaacactgatctcagggtttggggcaaagatgacggtctacgagctagaccaattctcaaacggtcaggagatcgagaaggcattggtacagatggggtgtaaacccagtgtaccagctgtgttcatagggcaacaattcatcggtggtgctaaccaagtaatgactcttcaggtcaagaaccagctagccgcaatgctaagaagagccggagccatatgggtg

SEQ ID NO: 164255 - DNA, 874 bp, Arabidopsis thaliana landsberg
catgttgagacaattttatcgagttataaacacattcacagcaaatcaaagacagacttgtccattaatgattgtccaagcagtctagtacatatggtcatctaataagtcatatggtagtttcatactaatacataagtttatacatgaacaataaacatcaatccaaagtacattatccatgtttctttaaccatttatccacatgtatatagacatgttgatacaattttatcgagctataaacacattcacagcaaatcaaagacatacttgtccattaatgattgtccaagcagtccagtccatgatcatctaaagactcacatgatagtttcatactaatacataagtttatacatgaacaataaacgtcaatccaaagtatattattcatgtttctttgaccatttatccacatgtgtatagacagtcagttacgtaaacctcagtcagttaaggaacttctccaaatctgccaacatctctacatattttaatgtagacgtaataggttggtttgaggatatgaggacaccgtcaacaatgaggagataagcaagccgaagtctatggtaagaagataagttcttgtgattaacatttttgaaatatcacctaacgtagcattcatgtcttcacctattagctcttcacaatgttggatattataaataaaattagcacacgattgaataattggagcaaataaaatgattggagaagattaataccttacatttgaggaccgagtagaagttactagcacacgccggatacgacgaatcgattgagagacaagaaaatgaagacgatgacgggagaacaactgttgacgacgacgacgggagaggacgaattaatgtcagccgat

SEQ ID NO: 164256 - DNA, 225 bp, Arabidopsis thaliana landsberg
accagaaacctatcgcccctctcttttcaaaacaaacaacgcggagcgccttgtgaagtgaaaagatgagctatgatgacttggcttcctttcttcttttccttgtgcaagtcaactgttccctggcacaccttcagttcagctgtgacatcttgcacttgtaagatcacttgcttgcctttatgcttgagtttccgcattcctttactccagtcaactgtcatt

SEQ ID NO: 164257 - DNA, 634 bp, Arabidopsis thaliana landsberg
caactaaactaatttcctaagcctattaatttccatttataagcattgttgttaacttaaaaaatttaaacaaccacttttgacttcacattcacaaagctatggatctttgcaaaagtagagcaacaaccaccattactctctcatgtctcatcttctttgtttcttcattctacacaatctccaccgctaaatctgtcacgaatccgctctatcaactccttctgttcatcggcttcttcctcgctgcagccttgtcgcttgttttactggtggcagcagcacgagccaccatggttgcgtggataacggtcctcgtcttactggccttttcgggtacacgtcgccgtgttttagcgcggagggggaagacgatcacggcggacgtggcgatgagcttgttcagggttctgattagagaagcaaatcctcgtggttagtctcatgaagattgtttgttgttagagagtatttacatatcacttgtgtatataacaaaaatatatgtatttttgtgaatgatttttccccttttgtgtatttatttattcgaattttaattttaatatatacataatgtatgtgcgctttaaatgtttattcaatacttctatagttacaattttctatagaa

SEQ ID NO: 164258 - DNA, 506 bp, Arabidopsis thaliana landsberg
ataaagctcgtactcgagggagtcgactcagttgagacattaacaatggtgggaaccttcaactatatattgatccatattatgttggtaagttagaacttaatctttagcttattatatgtataagtatttgtgttaatttaatcatttttaaaataaaattaaaaatatatattttcaaaatatatttgtaggttttaagagtgtcaaaaaaggcagatgtatatgctttcggcgtgattctaatggagttgatcacatgaagaaagtgaatgatgagactttgagtgttgatgaacaaaatctggtcatgtggttacgtccgaagattaaaatttcaacattcttgaacttggttgatggtactcatattaacggacaaagaaaccattaagagaatcaagaagattgcaaaattggctaaatattgcacttctcaagaagttgaaagtagaccattaagagcatcaagaacaaaatctggtaatgaagttacgtccgaagat

SEQ ID NO: 164259 - DNA, 2201 bp, Arabidopsis thaliana landsberg
  unsure (1)..(2201): unsure at all n locations
aaaatgatgagtaatctgaaacttggcgttgaagtcataagcgcaaggctcaaacctagagaggtctatggcggtgttttcgcttacgtcgagctacgatttgacgatcagaaagtcataactatgactaagatcgatgactctagtccggtgtggaacgagaagttcttcttcaacatctctgatacagaggatttatcaaatcaatttcttgacgcttacgtttacaataaaaccagcagcataacaaaatcttgtctaggtaagattcgaatattgggaactgcgtttctcccgtactcagaagctgttggattgccttatcctctagagaaagagaaatggagcatgttctcttccgctgccgccaatggaggtgagctcgctctcaaagttttcctcactgataacccctctcccaaggtaccgaatctaatccctacaaagaagattccttctaaatcaaggcacaaatttcacaacatccccacaaatgagagtaaccatagcccacgagggaatcagcaatcgtttctaccgcaaccgcctccgcctcaatcgcaaacgcctcaaccgccaccgatgatggagtcttttctctatcaagcaccgaggtttggtactccgatacctacaactatggggtttaatccgaatccaccggattattctatcaaagagacgaaaccgattctcggaggaggcaaacgagcaagatcaagtgatcatgatctctcgagccaatggagtttctcttcatcaaaatcgtgaaagctagaaatcttccatccatggacttaaccggaagtctagatccatacatcgaagtcaaactcggaaactataccggcaaaaccaaacattttgagaagaatcaaaacccggtttggaacgaagtcttcgctttctccaaatccaatcaacaatcaaatgttcttgaagtcatcgtcatggacanagacatggtcaaagacgatttcgtcggtttaatccggttcgatctcaatcagattccgacacgtgtcgcaccagacagtcctttagctccagaatggtacagagtcaacaacgagaaaggaggcgagattatgttggctgtttggttcggtactcaagccgacgaagcgttctcagacgcgacatactcagacgctttaaacgctgttaacaaatcgagtttgcgttctaaagtctatcattctccaaggctttggtacctccgggttaatgtcatcgaggcacaagacttagttattgtaccagaccggactcgattgccaaatccatatgtaaaaatccggttgaataaccaagtggttcgaaccaaaccgagtcactcgctgaatccaagatggaacgaagagttcactctcgtcgcggctgaaccgtttgaagatctgatcatctcgattgaagaccgagtcgcacctaaccgagaggaaacgctgggagaggtacatataccgattggtacaattgataaacggattgacgataaccggacagtgcctaaccgttggtttagtcttaaaactgagaaccagagaagagtcagattcgcgacgacgagacttcatctaaacgtttgtctagaaggaggctaccacgttcttgatgaatctacttactacagcagcgatttcagaccgtcgatgaaagagttgttgagtcataaacaaccgtcttttggtgttcttgaattaggaatcttgagaattgaaggtttgaatttgagccaagaagggaagaaggagacggtggatgcttattgtgtggctaagtatggaaccaaatgggtcaggactcgaaccgttacgaactgtttaaacccgcggttcaatgagcagtacacatgggaggtttatgagccagcaactgtaataacaatcggtgttttcgataacaatcagatcaatagtggtaatggtaacaaaggagatgggaaaattgggaaaatcagagttagaatctcgactctcgaagccggaaggatctacagtcactcgtatccgcttcttgttcttcgaccttcaggtttaaagaaaatgggggagttgcatttagcgattaggttttcctgctcatcgatgtttcagatgctaatgcagtactggaaaccgcttcttcccaagatgcattacgcaagaccgttgaaagtagtgcagcaggagattcttaggcagcatgcggttaactagtgg

SEQ ID NO: 164260 - DNA, 300 bp, Arabidopsis thaliana landsberg
atggatcccaacaaagctgataatagtcgcctagaggcacttcctcaagatctacttggagaaatagttgttaaagttggagcaacatcagctgaagattttcaaaattgcattcttatatgaaaagaactaggtgcatacacaaatgacaaacgcgtgctcaaaactcttaatcttactccgttggtgaataaagcgttatcggcacgcaaacaccttcttactatgaagaaatgtcttgacaacaacaacccaaatgcttactacataaaaggtataatacgctactttgtccttaat

SEQ ID NO: 164261 - DNA, 243 bp, Arabidopsis thaliana landsberg
attcttaaagctggaacatctgttatccgtataaactgtgcacatggagatccaagtatttggggtgagatcatcaaaagagtaagaagaacttctcagatgttagagatgccatgtcgcgttcatatggatttagcaggaccaaaactcagaactggtaccttaaaacctggtccgcgtgtgatgaaaatttcaccaaagaaagatgcttatggaaatgttgtttctcctgctttggtatgg

SEQ ID NO: 164262 - DNA, 397 bp, Arabidopsis thaliana landsberg
tacaaaaataaaattaaatgacagacagatgcagcttctgtgttgcatgaagcgatgggttacatcaaattcttacaagatcagattcaagtcctttgctctccttatctaatcaaccattctcttgtaagtagaagtctctctctttctctcttaattattttttattaatgaaatggtgcttctgacatgtcggcgacgtttattaggacggtggagttgtcaccggagatgtaatggcggcgatgaaagcgaaagacttgagaagcagaggattatgtctagtacctgtctcatccaccgtacacgtggaaaattccaacggtgctgatttctggtcacctgctactatgggtcacactacgtcaccgtcgttacctcaaggattttaattaaa

SEQ ID NO: 164263 - DNA, 499 bp, Arabidopsis thaliana landsberg
  unsure (1)..(499): unsure at all n locations
atgttcaactaccatcttctcaacgagctctcccctctcatcaccggttggactgtacgagtcattgtcttgaaaaagtacaaaattttccaaaggggcgattcattcgaattaagagttatcatagatgatgaaacggtgataaaaaatttttttttttttttttgcatgttcctgatactaacaatttttgagtttctgaatagaggatgaggatggacgttacaatccaccgaagcttttcttccttctacttcgacaagttgaaaataagtggatcgggttaactaacttcaaggttatacctaattctgatccagtcaagactacgacggctaaatatgggatttacnnnnnnnnnnnnnnnnnnnnnnnnnnnnnnnnnnnnnnnnnnnnnnncagttcaacaatttcacttccttcgacaacatatgggaggggactttcgatattgacctgttagtcggtaggtctatgttcatttaccttatcaattaat

SEQ ID NO: 164264 - DNA, 482 bp, Arabidopsis thaliana landsberg
taaaggacgctacaaaactatttacggggttaatttaaatttcatacattttaatcagtatatacaattcgcttttactaactaattgaatgctaccgtggcttgttggtaatgcgcaacttcaacacccaatcccagatattgaaaacacaggtttgaatcccactaatcccagtaaaatatccattccaacttcagagattttcattcttccccttgaccttcactctcagctcctccctatagctacgacgacaggcggcgtagacgatgattcttggtggcgagacaaagctgggaactaacgcgatcacattataacgcacatgtttcttgcggggagtatcatctacggcggctagagttagagaaacgggaaaaaaaacatgagtttgtttggtttcgaactagggttcactcgctaactgaagtctagcgttaccaacaaaccacaacataattattgtcagtttgtaaaatcg

SEQ ID NO: 164265 - DNA, 270 bp, Arabidopsis thaliana landsberg
atggcttttgtgagaagtctattgggagcaaagaagattctaagccgctccaccacagcagcctcggcggcaccaaaagggtttcttgcagtgtacgtaggtgagagccagaagaagcagagatacttagtgccagtcttatacttgagccagccattgtttcaagatctcctcagtaaatccaaggaagagttcggatttgatcatccgatggggggcttgacgatcccttgtcctgaagataccttcctcactgtaacttctcggatc

SEQ ID NO: 164266 - DNA, 219 bp, Arabidopsis thaliana landsberg
atgatcgaggtggttctcaacgatcgtttagggaaaaaagttagggtgaagtgtaacgatgatgacacgatcggtgatctgaagaagcttgtcgcggcacaaaccggaacacgagccgagaagatcagaattcagaagtggtacaacatctacaaggatcacatcactctcaaggactatgagatccatgacggcatgggtcttgagctctactacaac

SEQ ID NO: 164267 - DNA, 458 bp, Arabidopsis thaliana landsberg
gtaagggctatggctggacttgtcggagaatttgaggtgaagctggacggaaaaggaagatttcttttcccggctggtttgcgcaaacaactcgctccggaagctcaggaacaattcatgttgaataaaggctttgaagaatgtttgacgctttaccccatgaacgaatgggagaaattgtcggtaaaactgtcgaagctgaatttgtttaaaccacagaaccgaatgttctaccgtttgttccatcagggagcaaaacaaatcgcgctggataatgcgggccggattttgattccggtgatgcacatggagcgcgttggtttggataaagatgtgatgctgatcgcatacaacgaccgaattgagatctgggacaagtccaagtattttcagctgattgatggaaacatggctgattttgctgatttggcagatgagtaatgggtgattggggaatg

SEQ ID NO: 164268 - DNA, 524 bp, Arabidopsis thaliana landsberg
tcccgccagccggtccgtatcaagcagctcgtcagctcacccgtctcaagcagctcgtcagctctcccctccgaagtatcccgccagccggtccgtctcaaacagctcgtcagctcacccgtctgaagcatctcgtcagccggtccgtctcaagtagcttatcagctcgcccgtctcaagcagctcgccagctcacccgtccgaagtatctcgccagccggcccgtctcaagtagcttatcagctcgcccgtctcaagcagctcgtcagctcactcgtccgaagtatctcgtcagctcacccgtctcaagcagatcgtcagctcgccagtctcaagcagctcgtcagctctcccctccgaagtatcccgccagccggtccgtctcaagcagctcgtcagctcacccgtctcaatcagctcgtcagctctcccctccgaagtatcccgccagccggtccgtctcaaacagctcgtcagctcacccgtccgaagtatcccgccagccggttcgtctcaagcagctc

SEQ ID NO: 164269 - DNA, 461 bp, Arabidopsis thaliana landsberg
atggttcagaaagtcctcgagctgctgcatgcgaagaaggtgttgggtacctcttcgatggggagagagctctgttccggatccttgacaggagcgtacgcctgtttgtcattgagaaagagagactcaaaggttaagagatccagtgatgaagaaaatagatagattttgttgatttttttatagaaagaggaagtgcaagagaaagagatagagagagatataagaattcgagattgctttggtatgggaggtggagagatgaggttgtagtgttcgggaattacaatggggggaccaaaaattattatgaggggacaagaagacaaggaggaatcatggaattcaatggaggcgggtcacgaggcgtcggaatccacaaggtggtctctttggtttcttcactcaatcagacggtggagagtgcttcgctattaatcactcgatcgaacggaccataa

SEQ ID NO: 164270 - DNA, 475 bp, Arabidopsis thaliana landsberg
atgccgagcaactgtgagattctgtgcgagatcattatcgcgatccttcttcctcctctcggagtttgcttcaggaaaggatgctgcactgtaagttctctctctctctctttcgaattcctcaattttgaagaatcctggaacttcttatagagactgtaattttggattgattataatgtaatttggtatgagtaatgaagggagtgcttaatctatgatatgaatcgcagaaattctctggattggatcaatttatgtttgattcattgattcctgaaagcttggataatcatttgaagaaagttgaattttttttatgtgtggtttgttttggcaggtggagtttttgatatgcctggtgttgacgatcttaggctatgtcccggggataatatatgcgatttacgtgattgtgtttcagcaccgtgaagagtactttgatgaatacagacgccccatctactctgcttga

SEQ ID NO: 164271 - DNA, 447 bp, Arabidopsis thaliana landsberg
atgaagtgcccgttctgcagccaccctgattccgccgtggtggaaacacgtgtgaccgaggaaggggccttcatccgccgccgccgccagtgcatgagctgcggcaagcgcttcaccacctacgaacgccccgacgtgagctttcccaccgtggtgaagaaggacggccggcgcatcgactacaaccgcgacaagctgcaggcctcgtttgccctggccttgcgcaagcggccggtggcctccgcccaggtggatgcggccatcgagcacgtggaagagcagttgctgaccgccggcgtgcgcgaagtgccctccagccgcatcggcgagctggtgatgcacgagctgcgcaagctggacaaggtggcctacatccgctttgccagcgtctacggcagcttcgaggacattgacgacttcaagctgctggtggacgaagtgcgcacc

SEQ ID NO: 164272 - DNA, 404 bp, Arabidopsis thaliana landsberg
ttgcatgcatgttgcatatttgtgttgttttcacgtgattcggagctgttgacgagctaattggaagaaccggacctgatcatgcaaaaccactcgacccccaggtcaagtagaaacttcacaaccttagtagaccacttgaccccctggtcgagtagaggacatcaccacttcacctcactactcgaccccgaggtcgagtgtcttcatccccatcacttgatcacatcactctaccaagaagtcgagtatcaccatcaccaccactcgactacatactcgatggcaagcttcagagttttcttcattctgcactcaaccagacactcgagcacaaggaagaaaagaagactccaactatccactcgacctcccactcgaccacctgggtcgagtacagttct

SEQ ID NO: 164273 - DNA, 452 bp, Arabidopsis thaliana landsberg
atggtagatcgacttggaggtatcccgattttctgcccatgtggtgaggaagtagtgatgaaacaatcagctactccaaggaacccttgtcgtttgttttatgcatgtcccttgggatcttccgtaagtaaatctactaattatctgataatttatactacttgctatccgaaataactatcgataatatagaaaaatcggaaccatttgttcaaatggatggatacatgtatcgttgaagagatccgagagttgatagaaaaaatggataacatcgagggttctacactaaaattgcaaaaagggctaaatttttgtgattccatgattacctctttgccacagggcctagattccgttctttgggaagacattgaagacctgagatcgcagcttagatctatgaaaaatattctcgttttatttttgctctttattttatttttgtatgt

SEQ ID NO: 164274 - DNA, 511 bp, Arabidopsis thaliana landsberg
ttttacggagtttacgtttttggcgggaaaatcatagatttatgtttttggcagaaaaattacagatttacgtttttgtcgggaaaatcacgagtttacttttttggcgggaaaattacgggtttacgtttttagcaggaaaatcacgggtttaagtgttttggccggtaaattacgggtttacgtttttggcgggaaaattacgggtttacgttttttgcgagaaaatcacaggtttatgttttttgcgagaaaattaggggtttacgtttttggcgggaaaatcacgggtttacttttttgcgggaaaattacgggtttacgttttttggcgggaaaatctcgggtttacatttttggcgagaaaattacgagtttacgtttttttggcgggaaaatcacgggtttatgttttaacggaaaattgcaagtttacgtttttgacaagaaaattacgggttactttttctcaatttcatcgcttgtatatttaagaaatttggaaaaatat

SEQ ID NO: 164275 - DNA, 373 bp, Arabidopsis thaliana landsberg
ccctcacgcgatttcaaacgtaccgaccgctttggcttcgagctgcgccgcgaggtcggatggctggtgcacgccgcggtgcgcgatcacgcgctgccgtcggtgagcgtgtccgatgtggaaatcacccgcgacatggactgggcgacggtgtggatcaccgcgctgcaggccgagcaggcgcccgaggcactgaaggcgctgaaggatctcaccggcgaattccgccgttcgctcgcccgcggcatgcggctgcgccgggtgcccgagctgcgtttcaagtacgacgattcggtggacaagggcgagcgcatcgaaaccctgctgcgccaggatccaccgcccgcagccgtcgtcgacccgaccgaccaag

SEQ ID NO: 164276 - DNA, 1734 bp, Arabidopsis thaliana landsberg
atgcactgcttgattcacgttccagaactaatgaatgttaaagggattggtagatttgaaaacatgtgtaggtcgagtataagagacggattgattgataacaaggcatggctaacgtttttgagtaaaattcaatcatatcacatcttaaaactaccaactttgacattgattttattagctctatcatatgctttggttctgagtccccgccttcaaacctctctttcaactatgtcttcttatttgcttgagggcaagcaaagactaagtttgggggagttgatatgtctataatttgcatgttttcagtgtccattcatcatcgttttgagtccagtttcgtatcattcatcactgttttatataatttctcatcattcttgtatattttgcatgattaggatagttttgcatacatattgcatttctgagttgttttcaggtgatttggagctgtttgcgagcaaattggaagaaacgagccagaaccagaagacatactcgaccaccaggtcgtgtgcatccagcaccatactcgaccccctggtcgagtgacattggagtcattcttcccatctactcgaccccgtggtcgagtaacctcagctcaggccactcgatgacgccactcgaccccctggtcgagtatcacttcgccataccacctgaccacactcggctattcactccaccatattactcgaccccctggtcgagtatcatcactcaccaccaataccatcactcgaccaagcactcgatcacatctttggagtctactcaaattcgcactcaaccagacaagctgagcacaaggaagagaagaggagaacaataagtgtttggaagcggcctggagctccatcggatcacgaagcccatctcggcctattatcactctatgggttgggcgattaggttattgggcgattaggttattgggcgtcttagggttctgtcctgaaacatccagtcgacattgagtttttgcttcagttttattttcttttttactctagctgcgccgcttttgcttctacaacctgtaattcgagatttttccaagttattcagattccgcatttgatttcacctttcatctactttttatctcttcacttatgcaatattatcatttacctgcatttatgtctttgaggcatgttgtctgagtagtgacttagaattcttaaggatgggatagagtagttgtggaatccgtagtctatagaatggttaagttttagaattgattgaatcccttcaggactagttatgtttactacttatttctttcttaccaactggaattcgatccaaaccattcctgcacccaaaaggtgttcgatggaatgcttgatccactagttcctgagatattcgtctttatcccaagggattggccgtttggagcgtttattgactttatcagtctgttcttattgcctgcatagtaagattccgttaatgggaattagtctgggctagctttgcttgaggatctctatcacgggagtgaattgatctgttggtaaacctgttatctaggaatagcttgattgtgcttgttaaccatctgaataggttaggataccaccccatttgattgccccatccttagaaatttcttgtctatttgatttctctgttttatcgttatcgcttaatcgttctcattgcttgtttcttagtttttgcaattactcgaccaacttactcgaccacacccag

SEQ ID NO: 164277 - DNA, 438 bp, Arabidopsis thaliana landsberg
caaaacaatcgaaccaaaaccaaaccgaaaaaccgtaccccattcctaagagttatgggtgtatgtatctataagagatgttgatgtggtgaacagatcctagcaaagatatacaaattcgacaacattccttatcgccgatacttttgtttcgcttatgattgttttatgttgattttgattctcattgttgtgggtcattcattttgtatcttgtggatgaaaaccattgttgaatgagatagagacattggcttccaaaattgcaagacttgagcaagagatgaaagagattacaatacatagtatggagtttgagaaggtgcaaatgaagctcgagaaagagatatttgagagggtggaagatgtgttggtagaagccaaatcctgttagttattggatgtatgatcatagttgggagcattaaactactaagt

SEQ ID NO: 164278 - DNA, 558 bp, Arabidopsis thaliana landsberg
gatccgatgaaccatagcaccgggcatcaactacagcagaagtaccgtcagtacaatccttaccaacaagtcaatcttccgtaccgtaagctctacgaactcccaacttctcctgagtttctcttcgaagaagaagctacgaaaaaacgcttaacatggggagagaacctcaccttcttcaccggttggggttattgcactggatctgttctcggagccttcaagggtacaattgcggggatgcgagccgccgaacgaggcgaatccctaaagatccgaactaatcggattttgaactccggtggactcgttgcaagacgcggcgggaattgcttaggatccgtagggttgatgtttgctgctatggagagcggtgttacgtatatgagagacggagacgacggttcgttgacaactgtgatcgctggtttagccactggtgtgctttacagagctgcttctggacctagatccgctgtggttgccggagctgtcggaggagttgcggctttggctgcagttgctggaagacgcatcgtcaagcgattcgttccaatc

SEQ ID NO: 164279 - DNA, 471 bp, Arabidopsis thaliana landsberg
atgaagagagtcagaggtttcaaaattggacacagatttgtcaaaatcttcaaatggataccaagaaacagatgcccgacccgaatcactaacccggttaccggaatccggtcattagcacggtgtttaagccgtggagctaagagattgtgcggtggaagcaagaagaatccgggtcagaatcagatccggttgggtaaggatccgaaaaagtcgaaccgggttgttcctcgaggacatttggtggttcatgtcggcgaatcagacgatgacacgcggcgagttgtggtgccggtgatttactttaatcatccattgtttggagaattgttggagcaagcggagcgggttcatgggtttgatcaaccgggtcggatcactattccttgtcgggtttcggattttgaaaaagttcagatgagaatcgccgcatgggatcactgccgacgaaagagcacttttaagattctc

SEQ ID NO: 164280 - DNA, 335 bp, Arabidopsis thaliana landsberg
atggagtacgctgctcggagaaatcagaaaggcgctttcgaaggcttttacaaacttatcatgcgccgtaattccgtctacgtcactttcatcatcgccggcgcatttttcggtgaacgggtaagagatcagagcctttttggttgtgttatagcttattagggttcgtattgtaccggatctggtttttgtgtgtatggtttgattggaacgaaattggggattttggtgttgtcaaatgataatcttagtgaagaaatttcgttggagaggttaatcaatctacaatagagagctggagattatagtttttgtgagaagaatctggtgataag

SEQ ID NO: 164281 - DNA, 616 bp, Arabidopsis thaliana landsberg
cgcggccaatttggagagctataaatttaccccttttatctctcaattttcttctcactatatatctctcctctcttttttcttataatttccagcgtcttgtcgaataaaacaaccaacagagacaaaggagtaaaaaaatggcagactcccttttgcaaaaggccacctctgctcttggtgaagcaaaacaaactgttatgccctctgcagaaaccgccaagaccaatgtcgtcaaggatgcagttgacaatgtggtgtcaagaggcatagatggagccaaaaccctgttgcacggattagaggagaagaaagatgaagtctcttccaaaatcatgggagctgttacacactttactggtagcgctgactcagcagccacaaccgcaaaccgtgacttacccgtatccactgacaatcaggttccaatcgaaacaccaaaagaaaacttcatattcttatatctcttgtgccaaaattagataggagacaagacagagtctaatactcttattcaacatgattgcagccactcctagcagcaggtgatcgcgaggccgagacgccatggtggaagaactgttgtggaattcttgatcttctcaaggcatcatca

SEQ ID NO: 164282 - DNA, 482 bp, Arabidopsis thaliana landsberg
cggaccctcataagtatagatcataaaccggatatgtttttaccattggggaactacaatctcgtagcgtcctcaaaagcagactttaatggccacttcatcaaagcacacagaaattatgctcttcatgaagcgtgtagagaatgtgtttggtttagatccatgactaaccatattcaagaagcaagtggattaatcatcaaaaatgagccaacaaaattatatgaagataatgatgcttgtgttgctcgaatcaaagaaggttatatcaagagcgatagaacgaagcatatccctccaagatttttctcctacactctagaacttaagaaaaataaagaagttgatatctagtatacccgctcaagtgacaacacagctgatctgttcacaaaggcgcttcctacatcgacattcagaaagcatattcaccgtatcggaatgcgctatctacgagatctctgaagataagaatagatgat

SEQ ID NO: 164283 - DNA, 291 bp, Arabidopsis thaliana landsberg
aagggttcttgcacaaaaccagtgtttttcacttgtacaatccttctcattttaattgttgcccaagaaaacagagtcgctgcagtagatccatgtaatcctgcgcagctgagtccatgcttggagaccataatgaaagggtctgagccatcggatctgtgttgcatcaaggtgaaggagcaacagcattgtatctgccagtacttgaagaaccctaacttcaaatctttccttaactccccaaacgccaaaataatcgccactgaatgtcattgtccgtatccgaaatgc

SEQ ID NO: 164284 - DNA, 207 bp, Arabidopsis thaliana landsberg
gaagagatgcatgattgggctgcaccgttgatagcttcggctttgttcgcgtttctgtcgccagggttgatactgcagtttccggggaaagaatctccggtgggtttcatgaacatgaagacgacggtagcttctattttcgttcacactgttctctatggtctctttcttatcctctttctcgttgttctcaacgtccatgtctat

SEQ ID NO: 164285 - DNA, 410 bp, Arabidopsis thaliana landsberg
tatcacaagccgaccataaaaacgacattccagttcccaacgattcatcatcaacaaattctgtgtttcctagctcgaaaagaaccgtggaaatcaataatgatctcggtaatcagctaacgttactgtatcattgtaaatcaaaagacgatgatttaggtaaccggagtctgcaaccaggtgagtcgtggtcttttagtttcgggcgtcaattctttggaaggacgttgtatttttgtagttttagttggccaaatgaatcgcattcgttcgatatatataaagaccatcgagatagcggcggtgataacaagtgcgagagcgacaggtgtgtgtggaagataagaagaaacggaccttgtaggtttaacgatgaaacgaagaagtttgatctttgttatccttggaat

SEQ ID NO: 164286 - DNA, 516 bp, Arabidopsis thaliana landsberg
gtgagatcagaacatcaagtgttggtacttggtgttggagcttcatggagaaacactaaaagccaccacactcctcatcgtccttttcatccatactcacgagggatgactattgatggtgttttgtattatagtgctcggactgatgcaaatagatgtgtccttatgagttttgacttaagttctgaagagttcaatttgattgaattaccctttgagaactggtcacgcaccattcacatgaactaccaaggaaaagttgctacttgtcaatatatgcgtcttgcaagtgatggctttgtggatgtttgtgtccttgaagatgccgacaagagtcagtggtcgaacaagaagacttttgttttgcctatttctcagatgaatttcgtccatggagaccggttggtggtgggtgcctctagagacagtggtaaggttttgatgagaaaggcaaatctcttacggaatcaacacgcacgctttttcctttatgatatggagaggaatgaaatagca

SEQ ID NO: 164287 - DNA, 557 bp, Arabidopsis thaliana landsberg
atgacttccccactttacaacaccactcgaccccctggtcgagtagctgccttcaccatcatcattcactcgacctatcactctaccaacaggtcgagtatcaccatcatcattcactcgaccaatcactctaccaacatggccgagtatcaccatcatcattcacttcaatcactctaccaacatggccgagtatcaccatcatcattcactcgaccaatcactctaccaccaagtcgagtactacaaccaccatccactcgaccaatcactctaccacatggtcgagtcccttatcatcattcactcgacgtccttactcgactgccagcttcagagtcttctccattccgcactcaaccagacactcgagcacaagcaagagaagaagactccagcttatcactcgaccattcactcgaccacctgggtcgagtaccgttcttaatccgtcccaatactgcgtcgatttaagtattagggtttcggaatattttgctataagtgttggtgtcggatcccgcaccatgggctcgggaccggccaaagattgctac

SEQ ID NO: 164288 - DNA, 216 bp, Arabidopsis thaliana landsberg
aagatcaaaggcaaaggaaaagcatcaagaggatcatcatctttttcttcttcttcctcctctgcatcatcaaagtacaaggtcttcaaggattggaccaactggtcattacagaaagccaaagtcgctactcactatggtttcatccctctgatcatcatcattggcatgaactcagatcctaaacctcatctttttcacctcctctctcccgtt

SEQ ID NO: 164289 - DNA, 357 bp, Arabidopsis thaliana landsberg
ggttcttcaagtaataatagctccagaggtctacggctaatcaaagccatacaagttctcagaagtaagcttctggtgaaaattcaggagataaagaaagatctccccaagaaactgttctttctcttggtgggattctactctgcaactgctttctctacattcataggacaaacaggagactgggatgttctatctgctggattggctgtgcttgtagttgaatgcattggagctttaatgtacagagcttctattccattaatcaacaagatgcggagcacgatcaccatgtttaactattggaagactggactcgccctgggactgttcctagactcattcaagtatgaagtt

SEQ ID NO: 164290 - DNA, 4466 bp, Arabidopsis thaliana landsberg
gatgcatcgtctgcatcaaaggcggattcttctcaaacagaaacagtgaaagtttcaccctattttttatctagtttcgacaatcctggcgctatgatctcgtccgtttacttacgcggtgacgattacaatgcttgggcaacaaagatggtgaacgcactccaagccaagtgtaaaacagggttcatcgatggttcaattccaaaaccacaatctactgatccaaactttgaaaattggaaaacagtcaactcaatgattgttggttggatttgaacttccattgaaccgaaagtcaagtctacggtgacgttcatctccgatgctcaccagttgtggacagacttagagcaacgtttctctgtggggaaacaaggttcggattcatcaattgattggtcaacttgctgcgtgtaaacaagatggtcaatcggttcttgagttttatggtcgtttgtgtaatctttgggaggaatatcaactctacaagccagtcacagtgtgttcttgtgggttgtgtgtttgtggtgctactagcaaaccggcaaaagaaagagaagaggagaagattcaccagtttgttttgggcctcgaagactctcgatttggtggtttaagcacaacacttattgcaatggatccgttacctactcttggtgacatagactctcgccttatcagggaagaacaacgccttgcttcagtcagagttcatgagcagagacaagaagtggttggctttgcaacacatggagatcaaagtggttctgaatctttgcgacaagagacacagagtggaggacgatcagaatcctctatcattaagcctcggtctataatgtgttcccattgtggtcgttcgggtcacgagaaaaaggattgttggcaaattgttggttttcccgagtggtggactgaacgtaatggtggaggtcgtggttctaacactcgtggcagaggaggtcgcagttctggtcatggaagaggacacgcggtcacagctcacacaaagagctctaatccctcttctttaccagaattttcgcaagaccaattacaagttctcgcatagatgatcaaggaacaaacgagcaatccaaatattgataaattgtccggtaagacaaacttttgcaatgttattctcgataccggggcatcccatcacatgacagggaagctctctcttttgactaacattgtccctataccaccctactcggtgggatttgctgacggtagcaaaagctttgctttgaatatgggagtgttccctctttcaaacaaagtagccctaactaatgctctttatgtccccaagttcacttgtactttgatctccgtctcgaaaattgtcaaacaaacgaagtgcattgccactttcactgatacaatttgcattttgcaggaccgtttttcgaggactttgattggaagcggtgaagagcgtgatggggtttattatcttacggatgtggctacagcaaagattcatacatcgaacgtctcttctgatcaagatctatggcataagcgtttaggacatcctattttttccagtgctttcttctttacaggtgttttctagttcttctctttcagttggttcgcgttcttgtgacgtgtgttttagagctaaacaaacaagggaagtttttcccgttagtactaataaatcaatcgagtgtttctctttgattcattgtgatgtttggggaccatatcgtgtcccgtcatcttgtggtgcagtctatttcttgacaatagtagatgatttttctcgagccgtttggacgtatctacttcttgcaaaatctgaagttcgcactgtactcactaatttcttggcatatactgaaaaacagtttggtaagtctgtcaaagtagtacgtagtgacaatgggacagagtttatgtgtcttgcctcttactttcgggaacatgggattgttcaccaaacttcgtgtgtcgggactccgcaacaaaatggtcgtgtagagcgtaaacaccggcatatccttaatgtcgcaagggccttgttgtttcaagcaagtctcccaattaaattttggggtgaagcagtcttaacagctgcttatttgattaatcgcactcccacttctcttcacaataaccgttcaccttatgaagttctttatggggccaaaccatgttatgatcaattacgagtgtttgtatctgcttgctacacacaccgtgttgcacgagataaagacaaatttggagaacgtagtcgtttgtgcatctttgtcggatacccatttggccaaaaaggatggaaagttttcgatattgagcaagataggtttttcatatctcgtgatgtcatttttcgggaagatgtttttccttttgctgagaagcctacttcagctccgtcgctagctgtcccgatagtctctgattctgattggtgtatgcctccagtagacagggggagtttctcgatcactccaattctgcctgttgacgatgacattgatgtttctcgggtaggttcgattactccttcaatggaagcaacctctccgactccaccttctgatgaaaatgtagctgctactcctaacacggaatgtgttatttctccggtggctactccgtctgttcctgttattactaagagtatagttcccaacgtacccgaacctgttgctgctccgactccaagcgttgtcacccctccgcctcgtcaaggcaagcgttcggttcagttaccggctcgcctcaatgattacgtcttatacaatgcaacaagtgaagttttaacccatcacgctctcttgtcctctaatcgtaagtcttcgtcatcggcccaaggtaactcattgtattcgttaacaaattttatctctgatgataagttctctccaggtcatcgtgcgtacttagccgcgattactagtaatgttgagcctaagtctttcaaggatgcggtgcgtgtgaaagtatggaacgatgctatgtttaaagaggtcgatgctctcgaaattaataagacatgggatatcgttgatttgccaccaagaaagttagctattggaagtcaatgggtgtataagacgaaatataatgctgatggttccattgaacgttacaaagctcgtcttgttatccaaggaaacaaacaagttgaaggtgaagactacaatgaaacttttgcaccaattgtgaaaatgactacggtccgtactcttcttcgtcttgttgccgctaactaatgggaagtttatcaaatggatgttcataatgcatttctgcatggtgatcttgatgaagaggtttacatgaagcttcctcctggatttcgtcattctcaccccgacaaagtttgtcgtcttcggaagtcattgtatggtttaaaacaagctcctcggtgttggtttaagaagttgtctgatgctcttttacgttttgggtttgtacaaggccatgaagattactctttcttttcctatacacgtaaaggaatggaacttcgtgtgttagtttatgttgacgatctcttgatttgcggcaacgatgagtatatggtccagaagttcatggagtacttagggcgttgtttctccatgaaagatttgggaaagttaaaatattttcttggtattgaggttagtcgcggctctgacggtattttttttatcacagcgaaagtatgcacttgacattatatccgacagtgggaacctgggatgtcgcccggctttcaccccattagaacaaaaccatcatttggcctctgatgacggtccgctactttccgacgccaagccgtaccggaggctggttagtcgtttgctttatcttcttcatactcgacccgaattgagttactccgttcatgttttatctcagttcatgcaagctcctcgtgaggctcatttagctgcagccatgagaattgttcgtttcttgaaaggttaccaggtcaagggattttgttaaaagcagatctggatttacagctagaagtttattgtgactcagattttcagacatgtcctaagacccgacgatctcttagtgcttatattgtgttactcgatggttcccccatctctttgaaaacaaagaagcaggacactgtctcacactcttccgcagaagccgaatatagagctatatctgttgctcttcgtgaaatcaagtggctacgaaagttgttaaaagaattgggtatcgaacactctactcctgtccgcttgttttgcgataataaagctgcttttcacattgctaagaatccggttttccatgagcatacaaaacacattgagtctgattgtcattccgttcgtgatacggttcgtgatggcatcataacaacacatcatgttcgaacaaatgaacagttagcggacatatttaccaaggcacttggtcgttcccagtttctttacctcatttccaagttaggtgttcaggatcttcacactccaacg

SEQ ID NO: 164291 - DNA, 1079 bp, Arabidopsis thaliana landsberg
atggctgatgagttgtgggatgagattcagaatttagaattaggacaggaggatccagccctgttcattccccatgaggcttatgtgatggtagaagctactaatagactgagtctgatagctaggcctctgaatccaaaagttcaaaaccttaactctgttgtggtagccttaccaagatcttggagattgacgactcaggttcatggaagagttcttgatgcaacttacgttcagtttctttttgtgaatgaaattgatctaatgagggtgcaaagaagagaactgtggctttttaacaattggtttgttgcagctactcgctgggaggtggctctggctcacaactttgtcactaccattgatctctgggtgcagattcgtggtattcctctgccttatatttctgaagagacggttctggagatagctcaagatctaggagagatcatttctctggactttcatgaagcgacctctcctcagattgcttatattagagttagagtttgttttggtattacggatagactgaagtttttcagagagtcatctttgattctggtgaaactgcaaccatcagattccaatatgaacgtctcaggaggctttgtagcagttgtttcaggtttactcacaatatagcctactgtccttaccgtcagcgtcctctcagcatcgcaagagaaagagccctttctatgatagtgttcaaagatcaacaatgaattctcagtctcagatgaccgagagttcatttccagtgcccatgactccacctccaagagtggatcctccacaagtgaatcaaaatgaatttgaagttgcttatccgcaacttgcaactgctacaaatgcgaataacacgtatgttggagagtctagcatttccagataggacttgtcatcgggttcaaacaactttcaacctaggagaactacacacttcacagaccatagaaggtgctttgaagttggtcaatcttcaagacgaaatcaagacagggaatcaagaagagatacagatagggtgaggactcatcctcactttgatcatgttcaaaggtttggagggattc

SEQ ID NO: 164292 - DNA, 138 bp, Arabidopsis thaliana landsberg
atgcagatttttgtgtttagtgaaaataagaaagtgttttctcggtctccgatgactccaaaagagattaatagccataagaagtggattattgagtttgatgatgagtatgaagtaagtagaaaagtgaaaagcatg

SEQ ID NO: 164293 - DNA, 1948 bp, Arabidopsis thaliana landsberg
  unsure (1)..(1948): unsure at all n locations
tgatctcatcgacgatctcacgctggcaaatctccggcgttgcgattctcggataatctccggattgttacctttctcttcacgaaatagattgatatccatcatctttcctgctcattctctgtgaatcaaaagcagacgcagaaatttggattcgaagaaaacgaagtcggcgnnnnnnnnnnnnnnnnnnnnnnnnnnnnnnnnnnnnnnnnttttgaccatacgacgtcggttctttaaacgggcttataactattgatatgggccgggtaagcccaacttaatttaatacggcccaaatccactctcaccgtctcttctctgagattctcgagaaagaccgaaccagtttcgcggcggctccaaaatccaaatgctgattcgttgcgttgcggttgcgaagacgaggttcaacaccaccggcgtagtatcaaggctcgtgtcttcacttgcagatggttcggacacgtcatcagtcgcaaatcggaatagcttgaaggagatactgagaaagaacggtccacgacgcagcgttacctctctgcttcaggaacggatcgattcgggtcatgccgtctctttatcggagctccgattgatttccaagcgtctcattagatcaaatcgttacgatctcgctctccaggtttgaaatttttcccttaattaaaactgagaactaagcttttgattttgattttgccagtaatgtgtgtatatacagatgatggagtggatggagaatcaaaaagatattgaatttagtgtttatgacattgctcttagattggatttgatcatcaaaactcatggcttgaaacaaggagaggagtattttgagaagctgttacatagttctgtgtctatgagagtagcgaaatcggcttatcttccgcttcttcgtgcttatgtgaagaataaaatggttaaagaagcggaagctctaatggagaagttgaatggattagggtttcttgttactccacacccgtttaacgaaatgatgaagctttatgaagctagtggtcagtatgagaaagtagttatggttgtttcgatgatgaaagggaataagataccgagaaacgttctttcgtataatctttggatgaatgcatgttgtgaagtgtctggagttgcggctgtggaaacggtttataaggaaatggttggtgataagagtgttgaagttgggtggagttcgttgtgtactttagctaatgtttatattaagagtggttttgatgagaaggctaggttggtgcttgaggatgcggaaaagatgttgaatagaagtaataggcttggatatttctttcttatcacgctttatgcgtctttagggaataaggaaggagttgttcgtttgtgggaagtttctaaatcggtttgtggtaggattagttgtgtgaactacatatgtgtattgtcgtctttggtgaaaactggtgatcttgaagaggctgaaagggtgtttagtgagtgggaggctcaatgttttaactatgatgttagggtctccaatgttcttttgggtgcttatgtgcgtaatggagaaatccggaaagccgagtcattgcatggttgtgtgttggagagaggaggtactccaaactacaagacctgggaaatcttaatggagggatgggtgaaatgtgagaatatggagaaagccattgatgctatgcaccaagtgtttgtactaatgaggcggtgtcattggaggccatcccataacatcgtcatggcgattgccgagtactttgagaaagaggagaaaattgaagaagcaactgcatatgttagagatttgcatcgtcttggtcttgcaagcttaccattatacagattgttacttagaatgcatgaacatgccaaaagaccagcttttgatatctatgaaatgatgaagttggacaaactatgaatatacgaggaaataatg

SEQ ID NO: 164294 - DNA, 847 bp, Arabidopsis thaliana landsberg
atggaaggaaggctcatgaaacgcagcgtttctggtccctacatggtgtgcacctatgggcaacaaacaaaagacctcatgaagagcatgcatgagggacaatgtggtatcaactgcagtggatgtaccctcaccctaagaatcaagaagctaggctactcataagtgtgtattttgcatgttttgagcatccatttgtcatcactttagcatcagatcatcactgttttataccatttctcatcatttgtcatcactttgcatgtttaggatagttttgcatgcatgttgcatatttgtgttttttcaggtgatttggagctgttggcgagctaactggaagaagcggacatgatcatgtcaaaccactcgaccctgtggtcgagtagatgcttcacgacttcaccaaaccactcgaccccttggtcgagtagaatacctcaacacttcacgtcaccactcgaccccctggtcgagtatcatcacctccaccacttcaccttcactcgatcaccgtactctaccacaatgtcgagtacattcatcacattcactcgatcactcgactacatactcgactgcctgcttcagagtcttcttcattccgcactcaggaagaaaagaagtctccagcttatcactcgacctctcactcgaccacctgggtcgtgtacagttcttaatccgtcccaatattgcgtcattttgagtattaggatttcagaatattttgctataagtagcatgtactttacattttcgagaacaagttttaatctaagttttattctgtagacactgtgttcttgaccttttgtaatccggatttctctttatctattcaata

SEQ ID NO: 164295 - DNA, 738 bp, Arabidopsis thaliana landsberg
  unsure (1)..(738): unsure at all n locations
tggtcgaacggttgctcgcccaaaggatggataagggcgagcagttacgggcggagagattcaacttttcggaaaggtgcaaggaacggatgtgatgcttcgggaagcatcccatcgtaccctatataagggagggcgtccaagacctttggaatcaccacaacacacagaaaacaccaaaactcaccattaaactctcgccctcttgggagaataaatcgtcgaaggaatcggtagccggactatggccggcgaaggagaagaagggctcggcataactgaaaatcgtgaaggaaggtaaggaatcctagactttgagagtaaggattctaggatgcgatataggagtcgggatccttgaaaggatcgactagagggcttggtagtattcgggtcatgtgcaacctacnnnnnnnnnnnnnnnnnnnnnnnntcggctgaggcggggatgcggctcggcggaggattggcgggtcttagagatcattgcaatcttccccactctgattcctctctgcggatcgagtagtgtaaggattagagagcattgcatggacttgcatattactaagtgaacgagagtacttatggctctatgactttcaggaactaacggtgattgtgggaaggacttggcttagccgcgagagactcaaggccgggataatgggtggtgatagttcggatagtttagggatcgattatatgacttgtaatagcttatatgcaaactcatag

SEQ ID NO: 164296 - DNA, 3537 bp, Arabidopsis thaliana landsberg
taacttttcaaaaatcaaaaccgtcgactactctcaactctcttctcttctctctcaaccggcgaacttcaaaaatccaaaaccgtcgactttctcttctctccgttcagttcaccgtcgccggcgacatcacttgttatctccgtcgccgattgtgtgggtcgtgttcgatttcgcatagtcgttcatcccgtttagccgccgttgcaattccgccgtgaccggtgttgttcctaaccgtcgtcgttccaaaccgccggcgttccaaattgtaagtgtcgaatagggctttaagtatagaaattggaacggtttttgatttgaaacattagaataggttttcgttgtgttgatttgaacggtttccttgattgttgagtgattttgcaaggtaatcatgggtcgtgtaaggttagtcactcctagttcgagtgaaagtgaagacgagagggtcacgatcatccgtgaagcggatatgaaccgtgaagaagtggcagaggaaaacaaatttgaagacgaaaactgtgaacaagagcctccggaaaaccttaacgaaccggaagacgaaaatatttctgaggtatatacaaatttatgaaaattttgtgtgaatattgatatagtgtttagggacaactagaaaacaatgagtacaagttaatagtattggtctgtgtaattgatgcatggatatacgtgattaatcatacattgggttgcattagaaaattgaattctgagaaaagttgataatgttgttctgagataactagtacaagtagtacagcaaaatattaattttatggttgtgtatgaattttcaggaaattaatgatgagaagccaattcaacctcagggtatggaagaaagccctgaagaagaggaataaagaaggggaacaagaaaaatctgaggtaacattaatttctgaaaactgtgtttgaaagtagtgtatatggacaactagaaatcaattagtacaagttaatagtataggtttatttgattggtgcatggatttatacgttaacgtgatcaatcatacattggtttgcattacaaaattgaattctgagaaaagttaataatgttgttttgagataactagtacaagtagtacaacgaaatattaattttatggttgtgtatgaatttccaggaaattgataacgaggaacaaatgcagcctcaagggatggaagaaaaccctgaagaacaggataaaaaagggtaaaaagaaaaatctgaggtaacattaatttctgaagattgtgttcgaaaattaaaagtagtgtatatggacaactagaaaacacttaggacaacttaatagtatagtttcaacttatgtgattggtgcatggatttatacgttaacgtgatcatacattggtttgtttgattggtgcatgaatttaattgtatgattggtgcatgaatttaatacgtatagtttcagttctgagaaaagttgataatgttgttatgagataactagtacaagtagtacaacaaaatattaattgtatgtttgtgtatgaaatttcaggaacttgatgatgaggaacaaccaatgcagccagagaggatgttctttagtacaagcgaatacgtgaagacgtgtaagataggaacgagatgcactgtgcagcagacagtgaagtatttggaggagtttaaagaagatttgccatggttcaaggcgcatccacagtttaggcatgtattccacatgcctgaggagaaaaaccacatgacccaaggcttgtggatgcttttgcttcgcacagcacagacaaagatggatagggagtgctggtttgtggttaatggagtgcctattaggtactccattaaagagcatgtgttgttatgtggtttcgattgtcatgattacccgaaggagtttcgattggatgcagaattgaagtttgccaaaaagatcttttaaaaggtatttgggattaagatcattgatgttgagaaaaagctggatgaaatgaagaattgtggagaaaagaagaagacggataggaagaagttggttatctttttttttttgtgcaaggtgatcgcgaccaagtcaaaggctgatggaaacattgacaaattctttctaaagattgttgatgatgtgcgtgcatgtgagacatccccatggggtcgtttcacatttgatggatgtatggaaggtattaagtcggtaatgaaatccatgaaagggaaagcaaaactgcagacttgtttctccggatttattcttccattagaggtaacaatttagagtaatatccattataagatgcattagtagacttaaaaataatactaatgtgacttttactttgaatgtgtagattttgccttttgaggctattccacatttgggacaaaagtttagagaccctgtaaggttcgagaatgagtgtccgagaatgtgtaaggccaaattctctagtagtctcatgaaagggttctcgttggaagagataaacgaggagcttggaagtgtaaaggtacgagttgtcccagttatctctagagttgtcccagttatctatgagctagaatatgattatttttgatgtgtgaatttgtataggttatctctagcgttttggaaccggattacgaggagaaagatttgttgaggcggattgtagatggtgatcatgttgatgatgggatagggtttgttgatccggttgtcgatagctggagaaaccgtttgatcaaagagaggaagagaatcttctggaaggatatgtttgaagcggatgtccgggcccgaagcggcggcgagcaaatggaggaagagaatgttcagagacatgttccggatgttccgggcagcagtagctcttgctctttgaaggaagctattgatgaaggctttaagagagtgatggcgatgttggcggaacacaatgaaaggcttgtgaccattgaaaggagacaagccggtgagagtgtgcctccatttgagcccgaggctagtgttgagcccgaggctaatgttgagcccgaggctaatgagacccatgatgttgagcccgaggctgttgagaccgatggtgttgagaccggtggtgtggagactcatgatgttgagaccgatggtgttgagcctgagggttttgtgcccgagtttgttgagcctgagggttttgtgcccgagattgttgagcccgatgatccgagttctgccatggttctttatgttccgcatgttccaatcggtatggtttgttttgtcaatctttgatctttttaatatatgatgtttgttggttatgaatggttgtcttttcttttgaaggtgatgttcaagttgaaagggaaactgaagcggataaaggcgatgatgagacgccgaagaaggaaacgaagaagaaagggaggaagggaaagggaaagtggaacgacaagaagaatgagaagaagaaaagagaagaggatcctgagcccgaggatgaaggtgtcaaaaagaaacgttagataaatccatcgagattccaaaagccaccttatccgcg

SEQ ID NO: 164297 - DNA, 141 bp, Arabidopsis thaliana landsberg
tacttggtcgggtacacgataaacaaacctacaaaagaagccctttcggatatgggctttgggccttggaatttgggctttgggtgtatgtttacttgtgaaatagtagtaatcttctttacggtaagttacaagtctcgt

SEQ ID NO: 164298 - DNA, 472 bp, Arabidopsis thaliana landsberg
gcccaataacagaaggccttaaagtggcatacttagggtttagtgaaaaagcaatcgtcatccttgactcaggggtcaggtcaaatccagaagaagaagaggtaatcattctacacagatagaaacatttattttttgtttaatttaaagtttacattttgttgtgacatttctcgtgttttcttaatatagatggcaagactgataatcgtgccagaatccgtcttattaatcaagacaagaacaaatacaacactccaaagtatcggtttgttgttagatttgtatccttttaattagttcatcacattcccagttgttagtggtgtctgtttacattcttcctatcgagttttgtttggccttgaatgtgaggaaagataacttgattgaccgtattcgtacacttcactcagctgctgaagccatatcaatgaagttgacgacgagtgaaaacgtttcttctctttaa

SEQ ID NO: 164299 - DNA, 1364 bp, Arabidopsis thaliana landsberg
aaaaataaaaaaaatatagatgcatgtgttttgtggtcattataattccatatagcaggaatcagagaccatatctaaagaaatacgtgaaaccatcaagagtgtgttcctccaacgttggtacaatccccaaattaagattgtcagtaagctcaagttcacaaagaccgattgttcctcttttaggtacattattatgtaatcgaatattgaatcttgtttttaaaactcctcacaaatgaaaacttatccctcaaatatgtatatagcaaatacgcatgtggactttgcatcatccaaccagctctttggtctgccaccattggctcctctccgttcgagaagaaatgagagaccaagaaatcctgcgactgtgacagcatattacggagataagaacttttcaagattcaatataccaaaaaccgaagagagacctgaatggttttggatgatcatggcttgtgtaccttatttgatatccctaaaaatgagtgaattcggtttctacatgaaaccttttcttgaccaacacggcggtgccattggagaaacgatcataaacatgatcccaggagcagctaacaactaacaaaagttattcatggggtattgcgtcctagggtttacgttgggtggtgaagaacagaaacttgcctcattactttaggtatataatatgattatgggaatgcttttagaaacagcaatgcagatcatctggcgtacgagcgaattcttaccgtatctgagatttgagaaaccaaaaaaaacactattatacaaatttggcagattatggatttcactattagtttttcattagcaaaaaccggcctaatttgtgatatttgggcttttatgaataaaggcccaataaggtggagtactttcactaaaaccgacctaaataaaatatagccacctcgtcaaaatcaggtagcttcatatttcttgcacgtaaagttttctctgtctcaccgattttgtttttttctttgtttttttttgattttttaatatcgaaaccctaaagcctcgaaggttctctcgccggagaagaaattatgcagggtttggcggcgaccaccaccaaccgtggctctctcaccttcctcgctcccaggtaacataatcgactcatgatttcgtttctccttttcgatctctctctctctgcttttttcgttctccttcttcgattctggagttcgttcgttattttgatgatttgtgtcgcatcggttgattcttactagtcttcgatttgctatgatatgttttaatctttcgctctgtactgtttgaatcgtcaatttcaatgaaactcgaatcaatttgcctacaatttctgaaattggggg

SEQ ID NO: 164300 - DNA, 1546 bp, Arabidopsis thaliana landsberg
aaagaagtagtttatgttctgctacttgttcttcttgtttcggtttcagatgcaaatgaaacgaaaccaaatattgaaaacttcctccgatgccttcgtaatcggaccaatccgaagaatccgatcgccgaagccatctatactcatgagaactccaccttcgcgtcttcttacgtgtcctacacgaataacaaacggtgtttaaaccctaacgacacaaaactaatcgccattgttgctgcaaaacatgaatctcatgttcaagcaactgtggtttgcgcaaagtcaaacggaatccagatccgtatccgaagcggcggtcacgactacgagggactttctttcacctcctccgttccgtttgttatccttgacatgcacgatctccggtctataaccattgacgtgttcagaaagcaagcttgggttgatgctggtgcgaccatgggagagctctacaccaagatcgcagcggctagcaaaaccctagcatttgcgggtggcgtttgccctacattaggagctggaggacacatcagtggcggaggatacggaaatctgataagaaagtacggaatctcggtcgatcatgtggttgatgctcgaatagttgatgtcaacggcaatatcttgacaggagctaccttgggacgtgatctattgtgggctattcgaggcggtgggggcgctagctttggcgttatcctctcgtggaaaatcaacctcgtcgatgttccaaagaccgtgactgtttttaaggttaacaaaacattggagcaaggagttactgatgttctctacaaatggcagcttgtgtcgagcaaattgccaaaagaccttttcttgagagcaatgcctaaacttttaaactggtgtggtacctagcgagaaaaccatcgcggttgtgttctacgctcagtttttaggctcagcaaggaggctcatggcaattatgaacaagaatttgcctgaattagggctaaaacgtgaagattgctacgaaatgagctggattaatacgacaacgttttggcagaactatcctgtgggaacatcgacaagcgttttattggatagaccatcgggtcccgcaggagcattctacaagagtaaatcggattacgtcaagaaaccgatcccaaaggaagaaatggagaagatctggaaagcaatgttgaagttcaacaatatgtggatgcaatggaacccttacggtggagtgatggacaagattcctgctgatgccaccgcgtttcctcatcgaaaaggaaacttgttcaagattcagtactttgcgttatggacagacgcaaacgccacagacgctaatcttggtctaatgagagatatataccatgagatggagccgtacgtgtcaagtaaccctagagaggcgttcttgaattacagagatatcgatgtcggaagcaatccgagtggtgagaccaatcttgaagaagctaagatctatggatcgaagtatttcttggggaattttaagagattgatggaagttaaagcaaagtatgatcctgagaatttttta

SEQ ID NO: 164301 - DNA, 163 bp, Arabidopsis thaliana landsberg
ttgcagaaaattgtgttaaagctggatttgcatgacgatagggcaaaacaaaaggcccttaaaacggtttctactgtcccaggtaatcatttttccatgctcctgttatatacaaagttggtcatcagaaacaagtcgcagatctcttgcttagatctcactt

SEQ ID NO: 164302 - DNA, 3497 bp, Arabidopsis thaliana landsberg
tgtcacaaaacttacagctggcaactacctgatgtggagccttcaggtccatgcacttctagatggctatgatctcgccggtcatcttgatggctcactgcctacaccaccacccaccattgaaatcactggtgtcgttacaccaaattcagctttcaccaaatggaaacgccaggataagattatctactcgtggcctcattggtgcaatctctcttccggtccagtaaaccgtctccagagcactcaccgctaatgaaatctggaaaacacatgccaacatctatgccaagccgagctggggtcacatccaacaactgcgcatccaattaaagcagcataccaaagatacaaacacagtcgatgaatatatgcaaggtctcatcactaagtttgatcaactagcacttctcgccaaacctctaccacatgaagagcaagttgaacacattctcctaggattgcgtgaagactataaaagcgtcatagagcagattgaaggacgtgactcccctccctccattccagagattcatgagaagttgctcaacaaggaaaacaagctgctgtccacagctacgtccttctccccggtgattcccgtttctgctgacaccgccaacactcgtcctgcaaacagaataaccggtccggacaaccatggcaatcacaaaccaacaatcagcagtttcagaggtatcaccaataacaacaactctcgattcagcaaaggctatcaaggaaaatgtcatctgcgtggtgtacagggacatagtgcaaaacgttgtctacagacttcaacaacatcaacaaaacaattcacggaatgtgacttatccgtcttggcagcccagagctcaacctaacgcttgcatccccgcacccagcaaatgcttggcttattgatagtggcgcaacccatcacctcaccagtgatctcaacaacctcgcgatgcatcaaccttaccctggcgatgactcagtcctaattggtgatggctcgggtctacaaataacgcatactggttcactttccttaccttcatcctctcgtaaccttaccttacagaatgttttatgtgttccccacattgctaaaaacctaatctctgtttatcgcaatgtggaattctttctcacgctgggatgccaaagacgttttggagctatgcatttaccactgcaacatacttgatcaatcgccttccgtctccgacaatagccatggaaactccatatcagaagctctttggcagttcaccaaactacggaaagcttcgcacattcggatgtctttattttccatggttacggccatacaccgccaacaagctagaagagagatccactccgtgtgtcttcatcggttatgcaccaactcaaagcgcatatctatgtctccaaacatgcaggatttatgtttctcgacatgtgaaatttgatgagcaagtgttccccttcactcactcaactcctccatccgataaatcacttccaacaagctcaaattccccattcattcccgtctcccagattccagtcaccgtgccactcgcttcgatgcctctgggacccacgagcttcgatcttcaccaatcaccacgttcgccggcaacttctacagagactgcgttagcagatacatcctcctcagccgaaatccaaccttcatcctcaagcctaaatccggcccatactgaaaacccagaaactcaaaactcaaattcaacccaagcccaattactaccaccacaaataaccaacaatccaaaacccaacccacgacacaaaccaatacttcaacgtcctcctcgcagccaaacgttccacctcgctcagtcgacaacgctcaccctatgaaaactcgtcgcaaaaaccacattaccaaaccaaacactaaatacaacctttctgttgccctctccacccacattaaaccagaaccacgaactgtgaaccaggcgttaaatgatccgcattggcgtggagctttgtcagatgaaattgatgcttttgctaggaatcaaacctttgatttggtccctcggcaacctcagatgaatgttattggctgtaagtggatttttaaaaacaagtttcactttaatggctctcttaacaggtgcaaagcacgtcttgtagcaaaggggtacaatcaacaatttggtcgggattacacagatactttcagccctgtcatcaaagctacaacactccgcttagtccttgatgttgctgtcactcgatcttggtcacttcaacaattggacgtcaataacgctttcttacaagggacattgaatgaagaagtttacatggagcagccaccgggatttgtagatgctgacaatccatcaaacgtctgccgtctccgcaaagccatctatggactgaaacaagcccctcgagcttggtacatggagctgaaaaactatctcctcagtcttggattttggaactcactcgctgatacatccttgtttgttctccaatgtggtacgcaatttgtttatctcatagtctacgttaatgacattattatcatcggtatcagtgacaatggcatcaaacgagtcttacaattgttggcagatagattctctgtcaaagatcccgaagaactacattattttctaggccttgaagcacaccgcacaccacaagggcttcatctatcccaacaaaaatacattttggatcttcttcatcgccacgacatgatcaatgcaaaaccggtttccacacccatggcgtcctcaccaaaactgaccatcaactcaggtacaacactctccgatccgactacatatcgacagcttgttggaagcttacaatacctagcatttacaagactagatatctcctatgcggtgaatcgtttgcctcaatttatgcatagaccaacagaagatcacttccaagcagcaaaaagagtactccggtatctggtaggaaccacaacacacggtattttctttgctgctaagaatactctcactctccatacattctctgatgcggactgtgccggcgatacagaggactacgcctctgcgaatgcatatatagtatatctcggcagccacccaatctcatggtcggctaagaaacagagaggagtagctcgatcttctacagaagcggagtatagagctgttgccaatgcatcatcggaaatcagttggatatgcactcttctaagtgagctaggcattacgctatctgcacctccagtgatatattgcgataatgttggagcaacgtttctttgtgccaaccccgtctttcattctagaatgaaacacattgccattgattatcactttatccgtggacaaattcaaaccggtgctctccgagtccctcgcgtcaataaaaaggatcaactggcggatgctttaacaaaaccactacaacgagcaaatttcttgaattacgagacaagattggtgttgctaaagcacctccatcttgagggtgcgtgtcaaggatactaa

SEQ ID NO: 164303 - DNA, 507 bp, Arabidopsis thaliana landsberg
agccctacctctcctagttacagccctacctctcctagttacaggcctaactcttctagtgacagccctgactctcatagttacaggtctaactctcctagttacagccctacctctcctagtcacagccatacctctcctccttacagccctaactctccttacaggcctacctctcctagttacatccctactttttctggttaccgccataactctcctgcttaaagtcctacctctcctagttacagccctacttctcctactttcagccctgtctctcctgatcacagccttgtctctcctcaatactcccctacctctactcaccacagccctatcttgagctctcctcctgaagattatggttatggtcctgacgacattgaagctggaaaaatgaaaactgatcaactcaaggaaattggggatggaagtagccatgtggatggtagaaattaccacaaggctgagaccactcgcacaattcatgtcccatgtccaaag

SEQ ID NO: 164304 - DNA, 1857 bp, Arabidopsis thaliana landsberg
gttcacaagcaaaaccgacaaccatcacttgcatcaagcggtgaacaaaagcaatgtaagtcttctaatcttttaaaattcaggggagtcacttgttataactgtcgtaagaaaggacatttagttgcaacttgccctgaaaaatttgagctaactaatacttcattagaatcgaaactgagctcaccaaattcaagtagtgaagtagttagtcaaggattagaaaattctagttcttgtgtcatgcacttgttcttgtcaaaggatgttgattcaggtcagactatggagcatgagaatgacaaaactgaaggaagcacaaaagaggagaatcatcatttggtgtcaaccacttcacaagcttgtcgagctgactatgtttcaaaaatcaccatcttgaacatgaaaggaccgccatatgtatcccaaccagttctaaaccgagagttacctaaacaagaaccacgtgaattacgaggattcactcaagttgaggctatcattgtccacaaacaatcacctagagctgaatgcaatatagccctcacggatcaaccaccagatgctacaccaccatttaaaactcgaggttgtacactgttgaggccaatcaagaagactaatgatcgtgagataagcactcatcatatgagtcaatcaagagatcctcgtgaagattatcaaaatcaacttcggctaaagcacatggaagaatgcataaaggagcctaaaatggatatttcttcatttagtactttccatacctatcagtggcgaccaggagagttgttagatagctctagagaggaagagttggtcaccaacaatgccttgatccaaaaagaacccccggatccaacgccacttccatttgtcatgatgataccaagcaccgaacacactgtgaaccttactcaagtaagtaactctttagctcgatttgtttctcatgtttcaagaactgttactatgggtttatcatatttaggaaacattgagaaagagttagatttatttaaagaatatttggaatcaaactcttgtcttaggataaaagtaaaacatgaacatttcaagaatgatgcattgattaaaattgagcaatgtttacttgtttatagtgatttcatgactatgataacgcacttgctttttgccaaaggtgttgacaacattgcaggtataaaagaggagccaccagacttagaatttctatcgtccaatctttttgagaggactggaattggagttgttttgatgccacagatcgattacccgttcaaccgaacaagaaaaaaaagcgacaatgcttatgaacttgagttgcaaggtaagtataatgtgagttccaatttcaatgattcttacttggttgttttcattgtaggtgaattggatttgaggtcaaatccttttcaagtgggagaggatgatgtgatcatggaaagcacaaagaacatggaatttgatcaagagcttgtagccgcggaagagcttgaagcagaggagcagcttgaacctgaggagcattttgaagcataaaataaacttataacggagaaagagtatgggaaagatgttatcttaacctcattggttttgatacatgatcatcaaatgggcatgtgtctcatttgtactctttttcccttgtcaagttttgtcccaatgggttttcttgacaaggtttttaatgaggcaaatgattcacattcaaatcacccatttgatgatccaaaccatggtataacattcagaagttggcccaatggaatatatatgaagtccagccaattttatgaccatcacaagcccaagaagagcccaaaccaagtgggtaatttgctggtcaagaga

SEQ ID NO: 164305 - DNA, 1374 bp, Arabidopsis thaliana landsberg
gttcatgaaatgctttttctctttggtctcttaggtatgttatttcccatattcttttatgcttatgagttatggtcggaatatgtaaataaaatcaacaataaaagtgacgtatcatatatttccaacagagtatacatgttctttatttttatttttttattttttgaacaacagaatacatgttctttatattacttaacatttatacccaaaataaagaagttcataacgctaatattgattctggcttttgttttcaggcaacattgtgtcttttggggtgttcttgtcaccagtgtaagtttctaactcgaaatgctatatattaaaatagtttatataaagtatttgattaattatacatattttaggccaacgttttatgggatatacaagaaccaatcatcaaaagggtttcagtcgataccgtgcgtatgggcactatcaagagcaactcttcttctctactacggaatcatgaagacacatgcttatctgatcattagtattaacacctttggatgtttcattgaaatctcctacttgtttctctatatcctttatgcaccaagagaggccaaggttcctataattatatatttctatttatagtatggttgatatttttagtatgtacacctctagtttcaaaaatcttgattgtgatgaaactctatatctacaactaattaatctggtggtacacttggcagatatccacgttgaagttgatagtgatatgcaacatcggcggacttggtctcttaattcttctagataatcttttggttccaaaaaaacaccgcgtttcgaaccgtggatgggtttgtgctgcctacagtctcgcagactttgcttctcccttaagcgtcatggtgatgatccatctatcagctttttttcaaacatctgccgttttttgtagtgaattggaaattaatatacaatgtgtaatgttgcagaggaaggttataaagacaaagagtgtggaatacatgccgtttcttctctccttgtctctcactcttaacgccgtcatgtggttcttttatggacttcttatcaaagacaagttcattgctgtaatattaattgacattttcacattcatctttcaatattctaaccagtttttggttactaataagtctctctatgtcgctttgtattcagatgccaaacattctcggttttctattcggtgtagctcagatgatactatacatgatgtatcaaggttccacgaaaacggatttgccaacagagaaccaactagcaaataaaaccgatgttaacgaagtcccgatcgtggccgttgaattgcctgatgtgggatcagacaatgttgaaggatcggtgaggccaatgaag

SEQ ID NO: 164306 - DNA, 2620 bp, Arabidopsis thaliana landsberg
atgaaccacgtgtttggcgagcacattggtcgaacggtcaaggcttacgtcgatgacatcgtagtcaagacgaggaaagcctccgacctcctttccgaccttgaaatgacattccggtgtctcaaggcgaaaggcgtgaaactcaatcccgagaagtgtgtcttcggagtcccccgaggcatgctcttggggttcatcgtctccgagcggggcatcgaggccaacccggagaaaattgcggctatcaccaacatggggcccatcaaggacttgaaaggcgtacagagggtcatgggatgccttgcggctctgagcccgttcatctcgcgcctcggcgaaagaggcctacctctgtaccgcctcttaagaaagaccgagcgcttcacttggacccctgaggccgaggaagccctcgggaacctgaaggcgctcctcacgaacgtgcccatcttggtgccccccgctgccagagaagccctcttcatctacgagctcgcaaccactcaggtggtcagcgtcgcgatcgtagtcgagagtcgagaagaagggcatgcactgctcgtctagaggccagtctacttcatcagcgaggtgctatccgagaccaagatccgctacccacaaatcccagaagctactgtacgcaataattttgacacggtgataattgcgacactacttcgagtttcatccggtgactgtggtgtcatcctttccccctatggggagttcatccagtgtcgagaggcctcgggtaggataccaacagtggcacgtggagctcatgggcgaaacactctcattcgtccctcggaaggccataaaatcccatgtcttggcggaatgggtcgacacccaattgccaacggctctgatctaaccggaactttggaccatgtacttcgatgggtcgctgatgaaaacaggagcaggtgctggcctgctcttcatctcacccctcaggaaacatctccgctacgtctgcgcctccattttccggcgtcaaacaacgtggccgagtatgaggctctggttaacgggttgcacatcaccatcgagctaggggtttggtgcctcgacgctcatggcgactcgcagcttgtcatcgaccaagtcatgaagaactcccactgccgcgaccggaagatggatgcctactgcgacgaagtctcgatcgcctggaagacaagttctacgggtagagctcaaccacatcgctcgacggtacaacaagactacggatgagctggctaaaataacctcagggcggacatacggttccccctgacgttttctctaggcgacatacatcaaccctccgtcaagatcgatgacaagctcgagcccgaggaggcctcggcccagcccgaggtatcctcggccgccgagggtgaggccttgcgcatcgagggagagcggaatggggttgcgccaaaccgaaactggcagaccccgtacctggaatatctcctccgaggagagctacccctcgacaaggccgaagctcggtgactggctcggcgcgccaagttgttcgtcttactgggtgatgaaaaggagctctaccaccgcagcccctcaggcatcctccaacgatgcatatccgtcgccgaagggcaggaactattgcaagagatacactcgggggcttgcggtcaccatgcagcacctcgagccctcgtcgggaacgccttccgacaaggcttctactggccgaccgtggtgccgacgccactaggattgtacgctcctgccaagggtgtcaattctacgtgagacagacgcacctgcccgctcagaccctgcagacaatacccatcacctggttgtttgttgtgtggggtctagacctcgtcagtcccttgcagaaggcacccggggcttctcgcacctgctggtcgccatcgacaaattctccaagtggatcgaggtccgacccctaaccagcatcaggtccgagcaggcggtggcgttcttcaccaacatcatccatcgctttggggtcctgaactccatcatcaccgacaatggaacccagttcactgggaagaagttcctggacttctgcgaggaccaccacatccgtgtggactgggccccgtggttaccccatgacgaatgggcaagtagagcgtccaacggcatgattctgcaaggactcatgccacggatctacaatgacctcaacaagttcggcaagcgatggatgaaggagctcccctcggtggtctggagtctgaggacgacgccgagccgagccacgggcttcacaccgttctttctagtctatgaggccgaggccatcttgcccacagacttagaatacggttccccgagggcgagggcctatgacgaccaaagcaatcgaacaaaccgagaagactcactggaccggctggaagaggctcgggacatggccatactacactcggcgcggtatcagcagtctctgcgacgctaccacgcccgaggggttcggtcccgggatctccaggtgggcgacttggtgctttgtctgcgacaagacgcccgagggcggtacaacgtcacgcctccttgggaagggtcgttcgtcatcgccaaggttctgaagcccgggacatacaagctggccaacagt

SEQ ID NO: 164307 - DNA, 2754 bp, Arabidopsis thaliana landsberg
atgagaggcgagagagatgaaacaagcaatggaagagaggaagaagtgattaaggtggtggtggtgtgtatggtgtaggtcgtagtaatatttgtgttggtggttgcagtggtcgtgtgtcaattgcggcggcaataatggtgatggtggtagagatgacagcgtaatggtagtttttatggtggtgacgattgcagtggtgatggtgatgatggtatgacatttgtggaaataatggtggatgcgatgatgatgacggttgcaagggtaatggttgtaatagcatagaagagatggtgattgtgtagataagggtactttagtatatattatagtttatatacaaaatatcatctctgttttttttgttggttagtttcttaattatagttattttgttaatcaattttgcaaatttccctatttattttgttgtaaagtaaatggagtcctttcacaattgtttcaaaggatttgggccaaaagagttcctaaattttttaaaaccttcttgagaaaagttttgtggtaaatttggaaatttgttatagactatggtatatgtaattaatttcttgataaatggtgaatgaaaaaggttcaaaataattatctccaatattgttatcatctctatttatgaaaaaaaatattttgatgtccacatttgctatacatgaattggccaccaagatcaagggtaggtctaaagctgaccattaatcaagtgtaggtcttagataatgtaagcaatgaatttctcttacatatatgatatatttttacaaaaattagcaaattatttagatgactaagtttcacaaattaacaccattgatttaatagcttatgagagtgtttttgcatccttagaattaattaataccattgacatttaattttatcagtttttagatgaaagtgttacaccttagatttttcttttatttttttgtaaactttccaactctgattatgtccaatggccaaaaactagaaatgcagggttcaaatgttcaatttttcaaaataaattattggtctatttatacacaaaaaggtattataggtctaaaaaagaatttaggaaagactagtgatttttattgcaaataaaagaaaataaaaaaataaactcgggttggttgctcccccagccggagaataatcgtcgactggtgaagaagaagatgtacgaatcggcgaacgtctccgacgacgcagatcgtacggctttccggcgagcagagaaaaaatacaaactttactatgaacaggattctaagttctctagaaagtaagccaattttttatcttctctccacttgcgtttgtttgaatccttccacttataatcaatcacttggaactcgcaggaagaagctaccaaaaccaattgatttgtctgagttacttgatttcaatttgatttcacaaaatttcaacaatgacggtgttgtgccagacggaattagggtttcgaaagttgattcttctcctgtgttctgcatcgataatcgccctggtaagttaaaatccccaactttcaatcatctgtgttaaattagaatccaagagctcagcttttgaactattattatacaggtttttactttatacctgatgcattgagtttaaaggagcaatgtaaatggattaaagagagcttgacgagttttccgcagcctccgaatagaacaaaccacaatgcaatttacggtcctattgatgatttgtttgattcagctaaagaaaacaaggtattggttcaggatgatcttaccaacaacaagtggaagttctatgaagaagtagatattgaaaaagcaacacgaagtagttgcaaatcagtttcagcttcagttcttttgaggaagcttcgatggagcactctcggtttacagttcgattggtccaaggttgaatctttaacatcttttgatgagttttagtaacctattgcaatgaatctataatgagtgctgattctttcggctttttttcagcgtaactatgatgtttctctccctcataacaacatccctgacgcactctgtcaactagctaagacacatgccgccattgcaatgcctgacggagaggaatttcgtccagagggggctattgtaaactattttggcataggtagagtttaccttaaattttgtattttcttgctttggaaagccttaagatgttgaactctgaaagccttttaactcattctataggtgatacccttggaggccaccttgatgatatggaagctgactggagtaaacccatagtaagcatgaggtatatctcgttgccttctgtttttgctaaacgtaagaccgtatgatgatgtacaatagagtaactgtatgtcctcttacgtagcttgggatgtaaagctattttcctcttaggcggaaaatcaaaagacgatcctcctcatgctatgtatctcagaagtggagatgttgtactaatggctggagaagccagagaatgctttcacggtaatctgcttcactttcaattggatggttactctttcgaagtctctaattgactaattgagacagctaattaacagattggtttgctataatatctgttgttgttgcaggtataccccgtatctttacgggtgaagaaaatgcggatattggtgcacttgaatcagaattgtcccatgagagtggacattttttcgcagagtatatcaaaacttcgaggatcaacataaacatcaggcaagttttctga

SEQ ID NO: 164308 - DNA, 2712 bp, Arabidopsis thaliana landsberg
caatattcaggcgagacagttgagatgagtttgggagatacttatgttagtttaagttgtcatattaacttggcgtatgtactctttatatgattgttttttatttagacttgttttttttcctttcagggtactctaattcatgcaacactttagaaggcacaagctataaagtttcaaagagacattgttgctgtacgatggattgttattgagaattttaccatgactaaggcaatgggaaaattcagagctacaaaacatccttatcgtatgtctcttatgtacaactctgttgtcaatccttgtgcttctgtttccgatgacatctacttggatttggtcgattttaatgatgtggtcaatgaagacggtttgaatgagaatatttaggttggtaagaaatcaaaatctacttgcttttaattacgaaatattcatatgttcttcttatagatattttaactatttacaaaaaccaacacatggtatgttcttttcacaaatattcttggtcaagttgtgaacattggcgagctaataactcatgatgttaataacaagactaccaagaaactggaatttgaactgagagatacgaggttaagattcttttttgtttactgtttatcaacaaatttttgtatgtgttatatattcattaatgtattgtagagatgtgaggttggcgtgtactttgtgggggagatttgctgaaacactaattgctgcttgcgaaaacattgggaccaaaagggttatatgtttgcttcgtttcgcaaagatcgatgaatttaaaggtaacatataattctttatgaacccgttttcagtatggaatataaattatggtctaaattttttttacaggtcatagatctgtttctagtgcatttgatatgtcgttgttggaaatcgatctggatcatcctcaactttaagagtttgttctcgagtgagttgtatactttaatcctctaatgattatattaatgaaaatctaatttactaactcttttattttgttccgaatagtgtgtagtttaccaaaagatgaattgtctttgacactccaagtacatgttcttaagcatgttaaacatgctgaaaacaaggctgaaatgtataacacactgccaatctgtaccattggagatctggtccaaacaaatgaggttttctatcttatggttttgtacttggtttcgtatctacctttgtactgaaattgatttcacaattttggtttctaggttgggaagtacaaagtaatgtgcactatttttaacattgacaaagacttttcgtggtattacttcatctgctcaaagtgtaagaatacagcgtatttagttccaaaggttgaaaacgaggttctcaataaggcaagtaaaccacttttctggtgtggtacatgtaaggaaactacaaacagagcaatcccaaggtatgtataaactgtcagaatttgtgatcgttatgaagtgttttgaaattttgataaccttatgtaattgtaaattaggtacaagctcattgtcgatatcatggattcaagtggctccactaaattaatgctatttgaatcagatgcaaagcagattgtctctttctctgcttacgaccttcttaacggagaatttgatgaggtaacttgtattcaacgttttataatttcttatagtattatatgctgttttacaatcatgtatggaacctatggaatgcaaataaaggatccaactattctaccacaacccttggtgaatttgattggagaaacattccagtttgtcgtgtcaattgaaaaggacaacatcaacgatggtaatgacacatagaaagttgcatatgcttgggttggtcttgagcctttacaagctgacacaattggtgattctgatgttcatgatgatcttcagactattatttcagttgatcaggttatatgttatataaatgttattatatagtggacatttcgttatagttttatggttattaatattaatatgttttcttaggacatcatgctattaagtaatagtagtgagaaagccgaatctttgggaactcattcgacaactctgtcatccaagtgtaaggacgaaggcaatgatcttcacgagaatcagtcatcatcctccaaaaagttttgcattccgagcattcgtgatgatattgacaaagaaaatgggaatatcgtggaagatgagcttgcaccaaaataatctacttggtttttctagaaagatgatgatcttctaagtttaatgcttttgttttttaaaagagtttagatttcagttatttgttttgagcttgatcatttcaaacctttcattattaaatttctaataaagttaatcgctaaatttattatccacttcttcatatacatttatcaggcaggtcaaaatgatcaaattcaatgtctttttatattggttagaaatatcatatacaaaaaacgcttaatcgaattactaatcatgtgtctttaggctatcattataatttattgaacaaaacgaaaacacaccaaaaatactgtgaaattttatggttgatatacttgcttggaatattatgatcatattttaaaagctggatgtgatatatcagaaatttatttacaatattaagattggtaaatacaccaatgcaatgaattttgaaaacatcaaaagaagctgtcatctttcaaaacag

SEQ ID NO: 164309 - DNA, 1192 bp, Arabidopsis thaliana landsberg
aagtcctaacttctcctgtcatggacaccttacctcatcatctcctcgacgagtgtctattcagaatagaccacagatctctggccatgatacaatgcacaaatagatctcttcaatctcatatatccaaaaaccctaactttgcatccgaatacttttctcggatcagatccagtttgctgtacatagcaacccatggctgccctttgatctgctaccacctctacggtgattctaggtcaccgcgacagtagaaaccttgacgcagtgtcacattttaggctattgctctggccttcttctactcttccttaataaaaatctctgcgtcgtaaatcctctcacaaagaagtttcaatttttgaatcactctaggtcaaagtttttccctacgggttttacacttcgaagaggtcgtcaacaagtcatcgggttcgccgttgatcagactgatcgaaccaccccgagtttcaaaatcgtcaacataaaagaggtgagaaatgccactgaaacaacatatgagtttgagattaacgcaggagattcatggaaactattgaaaacgacgttaacttgctgtacaagtaatcttgatgaccgtatgaaaaaacctgtttatatgaagggagctcttcactggctaagaaatgacggatctatcgtagctttcaacctaaaaacagagaaagcacgactaattccgattagattccccaaagaactttgtttaaaaacgttgttcacagccgtagaaaataatttaaccttgatatcggcgacggaagaagtcatttacgtttatgccttccataacatttttagtgatcccaagtgggtcctcgtgaagcaaattcggaacggggtctgggacgagaagaggctatatagttggtacgtggaggcttacgatggaaagtctttagtgttaagggagacaatattgaagaaggactattataacaagcatctgaagcaagtactttatgggtacgacgtgagagctaataagtgggaagtcataggttcgattccagagtggtccccttcaggtctagacttttatcagtttacaccttcgccttctttggtgataggacttgatgacaaggagagggaagagatattggcttgtgatgataaacgtataccctctctaaacgccattatgagactgatacatggaatctcatga

SEQ ID NO: 164310 - DNA, 2489 bp, Arabidopsis thaliana landsberg
ccgatgaaagactttacagatacaatatcggagtcggagtgcgacgatgagataagtatagttccacaagtggaactaacggtgcccaaaaccgacgatccaacttcaccgacggttacgtttaggatgtgggttcttggcataaccgcttgtgttctcttgtcatttcttaaccagtttttctggtacagaaccaatcctttgaccatctcctctgtttcggctcagattgctgttgttcccattggtcatctcatggctaaagttcttcccacaaggagattcttcgaagggacgaggtggtctttcacgatgaatcctggtccctttagcaccaaggaacatgttcttataactgtgtttgcaaactcaggctctggggctgtttacgctactcatattcttagtgctgttaagctttattacaagagaaggcttgatttcttacccgctttgctcgttatgatcaccactcaggtaaaaattgatagctttgcaattcgtaatttgtaggtttagggctatgtgaactgagagttttattttccctgtttcttgtgctgcaaggtattgggatttggttgggctggtttgtataggaaacatttagttgagccaggtgaaatgtggtggccaagcaatctcgttcaagtgtctctcttcaggtaacggttctttctaatgattctcttatatgttttgattaagcatttctaaaagtatctgattttgattatacacagagcattgcatgagaaagagaacaaatcgaaatggggaattagtcgaaatcagttctttgtcatcactctcatcattagcttctcctattatctcctacctggttatctcttcacggtcttaaccaccgtctcttggttatgttggattagccctaaatcgattctagtaaaccagcttggttcagggtcagcaggtcttggtatcggttcctttggtctggactggtcaaccatcgcgtcataccttggaagtccactcgctagcccattctttgcctctgcaaatattgcggccgggttctttcttgtgatgtacgtaatcacacctctctgttactatcttgatttgtacaacgccaaaaccttcccaatctactccggtaaactctttgtagccagtgggaaagaatacaaagtaacgagcatcatcgatgccaatttccgcctggatcgtcaggcttacgcagagaccggaccagtccacatgagcactttctttgccgtgacctatggactaggtttcgcgaccttgtctgctagtattgtccatgtcctgcttttcaacggcaaagatctctggactcaaaccagaggagcgtttggaaaaaacaagaaaatggatatacatacaaagatcatgaagaggaattataaagaagttcctctctggtggttcctttcgattttcgcggtgaatcttgcagttattgtcttcatatgtatttactataagacacagattcagcttccatggtggggagctttcttggcttgtttgatagctatcttcttcactcctctcgttggtgtgatcatggccactactaaccaggttagaagagagattcacatgcttataacttggcttcaaaaaccggctatgattaacaaaaccatgattctgttctttgttttgttaggctccgggtctgaacattatcacggagtacataattggatatgcatatccagagagaccagttgctaacatatgcttcaagacttacggatacatcagcatgtctcaatcaatgactttcctctctgatttaaagcttggaacttacatgaagatcccaccaagaaccatgttcatggcacaggcaagtctaaatagtttatgtgtgtcacataaatatctctaaaacatttgtcaaaattgttgttgttttcacaggttgtgggcactttagttgcagttatcgcttacgcaggcacggcttggtggctaatggctgaaatcccaaatctctgcgacactaatctgcttccaccgggaagtcaatggacttgtccatcggatcgagtcttcttcgacgcatcagtgatttggggactagtaggaccaagaagaatgtttggtgatcttggagaatactcgaacataaactggttcttcgtaggaggtgcaatagctccagcattggtatacttagcctcaagactcttcccaaacaagaaatggatctcagacattcacatccctgttctgattggagccacagctataatgccaccagcttctgcggtgaacttcacgagctggctcgttatggcgtttgtgtttggacatttcgtgtttaagtacagaagagaatggtggcagcgatataactatgttctgtctggaggaatggatgcaggaactggattcatgtcagtgcttttgattcttgcgtagcaacgtagtgagattgctattgattggttgagaaattattttataaggtttattttttgattata

SEQ ID NO: 164311 - DNA, 1973 bp, Arabidopsis thaliana landsberg
caatgagcatgacgcctttcacttgcgtcaacatgttgttatttgacctcaagatagttcacactgatttcgggcaaatagctcagtcagcgggaatggtaacagatttgcttgcctttttcttgactgtatcggcttacgttagccgtgatgaaactcaaggagtgaaaatgggattagcttttatggcattctttatttttgtgtaccttgtgcgacaatttatgctttgggttataagacatacgccagaaggagccccggtgaagaacgtctatctctacattggtctcttgcttgcttacttatcttatctttattggagccgcttcttattcttcggaccgctaggggcatttgctcttggtttggctgtccctaacgggccgccattaggatcagtatttatacaaaaattcgatagcttcaacgagggcatttttttacccctctttggatcacttagcatgatcaaactagattggtcatttctacgaaaggagtttggaaatggaaggcatctccatggacatatgtacgagtgtttttccttccttcccatcgtatacatagcgaaattcgctacttcgtttttagccgccttagctacaaagatacctttgagagactcaattatcctaggtgtcattatgggcaccaagagtagtttcgagttgggttacgtacttacagccttcgaaaaagacgtaagaatattttagctatactcatataacggatatgatgatcatcttaatttgtatatatatttctgttttaatgtttctcatttttaacagaggattagtctggaggtcttgtcgctcctgggcgtatacattctcgtaaactctttgttacccccaatggctatacatttcctgtatgaccggtctaagagatttgtgtgttacggaagaagaaacttgaaagagaagccagaaatgcaaacgctggtgtgcatcaacaagcctgacaacataatttcgtttattagccttcttagagcaacttccccatctaaagactctccaatggaatgttgtgttcttcacctaatagagttattgggtcaagctactcccacgtttatctcccaccagcttcaaaaaccaaagcctggaagtcggtcttattccgaaaatgtcataagctctttccaactgtttcaagaggtttattgggactccgcttccataaacatgttcacgtctttaacttccgctaaagagatgcatgaacaaatatgttggtttgctcttagtcaaggttccaatcttattctcctctcgtttcaccgcacttgggagcctaacggaaatgtcattatctcagacgatcaaaccctaagaagtcttaatcttaatgttctgaaacgcgccccttgttctgtcggaatctttgtttatcgcaaaccaatttggcaaaccaaagccctagaatctccgtgccgtgtaagtaactacattcttttttttttgtttttttttgtttattctaaatgatgttgaatattttttattttcatacattaaatgcaggtgtgcttgatttacgtgggtgggaatgacgacaaagaggccctggcattagctgaccacatgagaggtaaccaacaagtgattttaacggtcttgcgtctgatccctacgtctcatgccgatgagagtagcttgaggattcatagccaaatggtagacatgaaccgtcatgaagaccaaaggcctggagataagtcaaccatcattgactggacggtgggagatggcacagagacatccaaaattttgcactccgtgtcttacgactatgatctattcatagtcggtcgaagaagtggggttggtactacagtcaccagaggactcggggattggatggaattcgaagaacttggagtcattggagatttgttagcatctgaatattttccttctagagcctccgtgttagtcgtccaacaacaagagtga

SEQ ID NO: 164312 - DNA, 427 bp, Arabidopsis thaliana landsberg
catttgcgagagaaaaaatcgaagacgagcaaatatggcagctgcggctcaactcgttacgctgggctatttatatcaattatagtatcctgcttgtcagcctggttgctgttggcgatacggtgcacgtcctggaactgaatttatgggtacccttattattttttattgtacgtttcaggtggcttatctacaggcttaaccgcccggcaaacgaaacggctgggttatgaagaacacgatacgaattgagcgggccataaaaaacattacgcaggccgaacttgcagcagccgttaacgtgtcccgccaaacaattaatactattgagagtaataaatacgtgccctcgactatcctggcgttaaaaatagcgcgggtgtttgcaaaccgcttgagaaatatcatactggaagaggggataaaa

SEQ ID NO: 164313 - DNA, 1359 bp, Arabidopsis thaliana landsberg
gatgccttgggcgtcctcccttatatagggggcgaatggatgcttcccgaagcatcacatccgttccttgcacccctccgaaaggtcacatccgttccttgcatcctttcgaaaggtcacatctgttccttgcatcctttgggcgatgcaaccgtttgttggtacccgctcgaccttacaccttttggccgagacacctcttcacccgtgagctacgaaagtccaccagctcgagtgtcagctgaccggaccacccagctaggtcagtacttgatcagctcaccgagctcagtcgagctgtcggtcagctgacctagctgagctagctagtcttccagctggtttagctcacatagcttacctagctagttcatacagcttgtccagctcacctagctggtttggcttatactttctcgttcttcctacttagtattttggtccgttcctcgaccatgatctagttttctcctaaaacaaacctgcctctttatgaacgcgggacgcggtcgttacacgtgcctcctccgattccaaagcataatggttgcttccgaagagccgaaggtagacaccacccatgtgagcattaccagcacatatgtaaagaattgcgcatgtaaaggttgcagcggcgttccttggggcaattcgctctaagtgtaggatagctccctgaatgtcagactcatgtgtaacgagacgcagtccttcatggtaaatagtcgtggggttaccagcttgtaagcaccgtttgaagaagggtctatagtgaccttcggagttgatgtcatttggatcgtggcctgccgcgttttagtcatcgggatcgtcgcacatgctgaaaatgtttgcatctttgaggacatccggacggtagacaatgtctcttccacgaggaccggatttcaacataggtccgaggtaccaccaacatttgtcagccattttcttggctatcttcgcaagcaaatcatcatcaggaatatttgggtttgtcatatttaggtgtaaggtggttcaacaaaatgaaattccaacacttaaataagcatcattgaagatatggttgggtaagttatggttgtatttattgcaaaggtattaagtgatgatgtgtattcatattgtcaaatcaacgtaatagtattccatatataatttgttattgttgttatgagcaacctctttttaataacagcttaaaactagacgtgtacgtcttagtgtacgttttagtgtacgtccacatttacatttctacatttgcccaacaaacagtgtacgttttagtgtacgtccacatttatatttctacatttacccaacaaacagtgaaagctgtagtgtactatcagt

SEQ ID NO: 164314 - DNA, 6286 bp, Arabidopsis thaliana landsberg
atgcaacaagctatgaccgatatgacgcaaaagtttgcaagcgtggaaaaaaccgtcgaaacattgcaaacaaaccaggtatcactcagccagaatgttagtaccattcagtctcgtgtccgttctttaaatgcagggaattctagagtttggagaaccatcttcggatccccaaattatcttccgcgaaatgcaacaagagaccaaacgaccccggatggtacaaacgcggagaatcaaccagaagatggagaaacgcatcctgaagatgataaccagttcggtgaccaacacgatcaggaaaacttcgaccaactcgaaaccatgaaggaagtaagtcgggagttgaaagaaatgaggtcgaaattcctccaagctacaagctcggaaccggatatcaaccgggttatcgagaaagctaggcgaacaccattcactctgcaaattacaagtttgagaatcagagattctcgaaaactcaacttagaatcatacaatggtttggaagatccgaaaggttatctcgcagcctttctgatagccgctgggtgagttgacctaaacgaggccgatgaagacgtagggtattgcaaacttttctccgaaaatctgtgtgggcaagccctgatgtggttcactcagttggcactagggtgattcagcaatttcacgagcctttcgtcagtatttttgaaacaatactcaattcttatggataaaagcatttcggataccgacctttggaatttatctcaagggccgaacgaaacacttcagactttcatcactaaattcaagaacgtactctcgaagctcccaaggatctcgcaacagtcggctttatcagctttgcgaaaaggattatgacatgattcgagattcaaagaagatttgatactacccaaacttgatactattcaagatgcggtattccgagtgcacaattggatggaagtcgaagatgacaaaagaaagttttgcgaagagaaataagcaagcaaaaccagcagtcattttccacccaagaagttcgaacctcgggagaatcaaggaccaaggaagtttggttcacaaccattcaacaataacgtcgggaaacaattacaaggaaaaggaaggtcaaatacttggattcgagatgaaagcttgtattgtgatatacatagagtcgccgggcatctgaccaaagactgcagtgtactcaaaaggcatctcgcggaactatgggcaagcggagacctttccaaattcaacatagatgatttcgtgaagaaatatcacgaagcaagggataattccgaagctcaaaattctaaaaggccaaggttgactaacgaagaggaaccaagaagttcgaagggatagatcaacgtgattcttggaggttccaaactctatcgtgattccgttagcgcaattaaaaagcataggcggaaagttctacttaaatcaagtttgagtgaagaggtggattaccaaggcgcttcaatatcatttgatgagaaggaaacgcaccacctcgaaagacctcacgatgatgctttagtcattacgttcgacgtgactaacttcgaagtatcaagaatactcgtcgaaccaggtagttcggttgatttgatctttctaggcactttggaaagaatggaaatcaacagggcggatgtagtaggacctctgtcccctttgatagctttcacgagcgagtcagcaatgtccctcggaataatcaagttaccagttttagggggaaagacgtcgaagattgtggattttgttgttttgacaagccaacggcttacaacatcatcctcgaaactccttggatctaccagatgaaaacggttccctctacgtatcatcaatgcctcaaatttccaaccccaaacggagtggaaacaattcggggagaccaagaagcttcgagaacatgttatttagctagccaccgtttgaagatccaatagcaattaacgaagccaaaggggtaattccaagatttcctagtgggcagaaggtggatgatgtcgtgatcgaagtaattttaaaagaaaacaaaccagatcggaaagttcgaattggagctactttgtccgacgagataaaagaagctttgattgaactattaaggaagaacaaagcatcgtttgcgtggtcggcagcagacatgcccggcatagacccaagcataatctaccacgagctgaacgtggatccaagcttcaaacctgtgaaacaaaaaagaaggaaactcggagtggaacgagcaaaagaggtaaacgacgaagtgaataagctttaaaagatacgatctataagggaggtgcagtacccggattgggtggcaaacaccgttgtggtaaaaaaaagaatggaaaagatagggtgtgcatcgatttcactgatctcaacaaagcttgtccgaaggacagtttcccacttccacatataaatcatctcgtggagtcaaccgccggaaacgagttgctaacttttatggatgctttttcgagatataatcaaataatgatgaatcctgaagatcaagagaaaacgtcattcatcacggaaaagggtatctattgttataaggtaatgccttttggcttaaaaaacgcaggagcaacttatcaacgactggttaataaaatgttcaatgaacacctagaatgacgatggaagtatatatcgatgatatgttggtaaaatcattgaaaaaggaagacgatgtcaaacatctcgaggaatgcttcgtgatttcttaatcaataccaaatgaaactgaacccggcgaagtgtacgtttggagtcccatccggggagttccttggttatatcgtcacaaagagaggaattgaagcaaatccaaaccaaattaatgcctttctctcaatatgccgtctccaacaaacttcaaggaggtgcagggattgaccggccagattgcggcgttgaatcgtttcaagatcgacggataaatcattacctttttatcaaattttaaagggaaacaaagagtttctttgggacgagaagtgtgaggagggattcgaacagctcaaagcatatctaaccacaccgcctctattatccaaacttgaagcagatgagaagctttacttgtacgtttctgtatctagtcatgcagttagcggagtcttggtccgggaagaccgcagagagcaaaaaccgatttactatataagcaaaaccatgacgtatcccgaaatcaggtatatgatgatggagaaacttgcactcgcagtagtaacttccgctcggaaattacgtccgtatttccaatctcatctagtttaggtactaacgaatgagccacttcgaacaattcttcatagtgaattaagtgagtatgatatagaatacaagtgtcgagttgccatgaaagcccaagttttagcagattttttaactgaattaccagtattgggcacacaagagcaaccagagaatcaaatttggaagttacatgtagatggatcttcgtcgaaacaaggatccggagtggggatcaaattggagtcacccacctcggaggtctttgagcagtcattccctttattattcactgcttctaacaatgaagcagaatacgaggccttaattgtagggctcaggttggcacaaggagttggagctcacaaagtggttgcttattgtgattcgcagctggttgttatcagttcaatggagattatgaaggtaaagattcaaggatgcaagcatatcttgaagtagttaaagatttggctaagaatatcaaaaaattctaattcattcgcatgcaaagaggagagaatacttttgcgggtgcacttgcagccctagcatcaacatcagatcctgaagtaaaaagagtatttttggtagaatgcatttcagagcgagcattaaggaggaaaaagaaaccttcgtcaatacaaggtctcgagctgcggcacgggctcgtggtgaacccgagatcgaactgctacctgttaagagaagaaaatcaaagaaggtagaagtacataaacccgctacgccaaaagaaagtaacatcgaagaacccgccaatacaatagaagacacggttccagaaaagattatagaagctgaaactgacccgttggtccaagtggatatccttgaaccaaacgagcaccccgaaccggaaacacggatatttcatgaaaccacgaaattcctgctaaagattggggggctgattggagggagccaatacagcattacatcgtgacaggcgagctcccaaagaataaatggcaagctaggaaaatgagaatcgttagcgcgaaatcccatctatccaaggatgctttgtatagacaaggtgtcagcgatccttatctactatgcatttgtggacccgaagtcgagatcgccttgagcgaagtatacgaaggtttgtgtggcagtcattctttaggaagggtcatggctttcaagattaaaagaatgggatattattggcccactatgatcacggattgtgttaagtatgcccagcggtgtaaacgttgccaattccatgcacctcttatccatcagccttcagagttattctcttccatctctgccccatacccgtttatgaggtggtcgatggatatcgttggaccattgcacagctcagcccaaggcgtacattatcttttggttttaatagattacttttcgaagtggattgaagccgaagcatacatgagcatcaaggactcggcggtaaaaacttttatttggaacaacatcatatgttgacacggcatcccgtacgagatagttacggacaacagaccacagttcattttgcacgaactcgaagctttctactcagattggagaatcaaagttagttattcaccccacggtacccacaaggaaatggccaagccgaaggtgcaaacaagacaatccttagcaatctaaaaaagcgcttaagtcatttgaaggggggggatggtatgatgagcttcaacccattttgtgggctcaccgtacgactcttagatggtccacgggtaaaacaccattttctttggtatacggcatgtaggcagtggttccggccaaactcaacgttccccgattctgtcaagccgaaactcctttaaacgaagcagaaaactcattaatgctcgacgattcgctagataccatcaatgaacggcaggattaagctttgatacgaatccataattatcagcaagcggcagcccgatattgcaataccaagattgaaagtagacctttctttgtaggagattatgtcttgaaacgagtcttcgacaatacaagggaacaaggggcgggcaagcttagagttaattgggaaggaccctatatcgttaccaaagtggtccgcaatggtgtttatacgctaaaggacttagaatacagaccagttcaacggccttggaacgtggtcaatttgaagaaaaaatttgtataataacacgcattttttgttgtacatgaactacggtattgcttgatcccggaatgggtacgtaggcagcttgaaaacgagtccagctactagtaaaattttttctatttataaacgagttcgactgtgcaacgtataaagtaaagaggagtttgacttttcgaacgtgctaagtcgaaaaacaaaacaataattattcaatgaaaaacaaggaaggcgaagtcatgatacactttggattaggatatccttgatatccttctcaatgagcagaacacttcaaccccaaatccagctaagtcaaaaactggtatcatgcaccccgagatatccacgaattcagcaataccaagggtgtgaagatcacttgagatctttgtaatcctacgccccatctgatgaaccttcctccgaagtttccttctctcaagcgagagcctctagtatcaaaccacaagctccttgatgaacaccatcacaatctcttggtccttttcgggaagatcttttatcaaggcgcatggagtccggagctgagagcccgggaggaggtgaaggtcgcttgtctggaacatttgggccatctctgtccatcatcccaactgatgagtactccggcatggtttccttgcacgtaaggttgaattccatatatgcaaggaagagatggggaatggaacaaggttaaggcataatttatagaacatattatcccctgaaatccgtccattattccaaaaagagtgattggcagagaaattcacgtcgtccgactgatccttcatttaaacacatttcccaaaatctatcgaatcaaggaaa

SEQ ID NO: 164315 - DNA, 1623 bp, Arabidopsis thaliana landsberg
actctatactctatagtttctcgtttagtttagatatataaatacaaagacttgagcgactttctaatactccggcaacgatgattaataccgacgataacttattgatgatcgaagctctcttgacctccgatccgtcgccaccattacttccggcgaatctcagcctcgagacaactctcccgaagcgtttacatgctgtgttgaatggaacccacgagccctggagttacgccattttctggaaaccgtcgtacgatgacttttccggtgaagcagttctcaaatggggcgacggagtttacactggtggcaacgaggaaaagacacgagggaggttgaggaggaagaagacgattctgtcgtctccggaggagaaagagcgtcggagtaatgttattcgggagcttaacttgatgatctccggcgaagcgtttccggtggttgaagacgacgtcagtgatgacgatgacgtccaacgtgacggatatggagtggttcttcttgaataacatgacgtggagttttggtaacggatccgggttagcgggtaaggcgtttgctagctataacccggttttggttaccggttcggatctgatttacgggtcgggttgtgatcgggctaaacaaggaggggatgtagggttacagaccatcttgtgtattccttcacataacggagtgttggagcttgcatccacggaggagatccgaccaaattcggatctttgtaataggatccggttcttttttaattttgaaggatccaaagattttaccggagccccgaattcaaactcggagcttttcccatttcagttagagagcagttgttcaagtactgtaaccggtaacccgaatcctagtccggtttatctacagaaccggtataatttgaacttctcgacgtcatcttccacattggcgagagctccatgcggcgatgtactgagttttggcgagaatgttaaacagagttttgaaaatcggaaccctaatacttattctgatcagattcaaaacgtcgtccctcacgcgacggtgatgctggagaagaagaagggaaaaaagcgcgggagaaaaccggcgcatggtagagacaagccgttgaaccacgtggaagcagagaggatgagacgtgagaagctaaaccacagattctacgcgttacgagcggttgtaccaaacgtatcgaaaatggacaaaacgtcgttgctcgaagacgcggtttgttacataaacgagctgaaatcaaaagctgaaaacgttgaattggagaaacatgcgattgagattcagttcaatgaactccaggagattgcaggacaacgaaacgcaattcctagcgtttgtaaatacgaggaaaaggcatcagagatgatgaagatcgaagtgaagattatgggaagtgatgatgcaatggttagagttgaatcaaggaaggatcatcatccaggagcgagattgatgaatgctttgatggatttggagttagaagtgaatcatgcgagcatttctgtgatgaacgatcttatgatacaacaagcgaacgtgaagatggggttgagaatctacaagcaggaagagcttagggatttgttgatgtcgaaaattagctaa

SEQ ID NO: 164316 - DNA, 1487 bp, Arabidopsis thaliana landsberg
atgagcatcccattctctcattagttcacaagtcatgccttcactagcagaagagatatgtattggtaacttaggcagtctccaaacactccccgagtcgttcacctggaaactcacagccgccgactcccttctgcgtccctcctccgccgtctcattcgacgcagtggaagagtccattcctgtgatcgacctctctaatcctgacgttaccaccctcattggagatgcctccaaaacatggggagcgtttcagatagccaaccacgggatttctcagaagcttctcgatgatatcgagtctctgtccaaaaccctattcgacatgccgtcagagaggaagcttgaagcggcttcctccgataaaggagttagtggctacggagaacctcgaatctccccctttttcgagaagaaaatgtggtctgaagggtttactattgccgatgactcctaccgcaaccatttcaatactctttggcctcatgatcacaccaagtactggtaacgtctattacacacacatatatatattttttgcttatttcgcaaaagtgtggcaaaggaaattgcacactttttttttgcactaagacttagttattattaaaagtgtttaaatgtttttttctgttcataaaaaagtgtttatatgttccgagtaattgatgtttatgattagtgataactgataacacatagagtgtagccttcaaagtttctaattaaatagtttgagcaacatccttatattttatgaagtagtacttcttattgcatattacagcaaattaaagtaccaaagtctctatgaaatgtgataatttggctaatgtcgaggtcttaacattagattaccaaaaaccttaattactgtaaattgtatttgcttttcatttttggtattgtgcagcggtataatccaagaatacgtggacgaaatggaaaaattagcaagcagacttctgtattgcacattaggctcacttggtgtcaccgtggaagacattgaatgggctcacaagctagagaaatctggatcaaaagtgggcagaggcgccatacgactaaaccactacccggtttgtcctgaaccagaacgagccatgggtctagccgctcatacagactccactatcctaaccattctgcaccagagcaacacgggagggctacaagtgttcagggaagagtccggttgggtcacggttgagccggctcctggtgtcctcgtggtcaacatgggtgatctctttcacatcttatcgaacgggaaaatcccaagcgtggttcatcgagccaaagttaaccatactcggtcaagaatttcgattgcgtacttatggggtggtccagctggtgatgtgcaaatcgcacctatctctaagttaaccggtccggctgaaccgtctctttaccggtcaattacatggaaagagtatctccaaatagagtatgagggtttcgacaaggccatggacgcaatt

SEQ ID NO: 164317 - DNA, 2103 bp, Arabidopsis thaliana landsberg
atatttattcatcacttatcagcgatttgacgagaagagccttttggtttctgcgaatcatccaaaatccgccatggaagcaactacaagaatcttgagtacttcttctgctctcaatcgtcttcttcttctcagtaagctcaatctaaaatcagatccccgtaatatcaattccacaaatcagctactacacaatgccgttacccgaaaatcctctatctccgccgctcgtatacggtgctcttcgctccctgcgaatgcgaatctcttcagatcactcttcttcctaacgtcaacgtttcgtctcgagaacaccgccgttcacgctaatccattccgatccgaacctaacgacggcgtcgccgtctggaacagagctccacggatcgtgaacggaggtggaaacgcggcgatattcggcgggaacgaggggaaagagacgacggtggttctccttggttggctaggagcgaaagctaaacatctaaggagatacgttgagtggtacaactccaggggaattaacgccgttactttcactgttgacgttagggatttgctccggttagatcttggtcggcggcttgaacgaaggatagctgaatttgggaatgaattggttaattgggtatcggagaaagaagatgatggtagagagaaatgcttggtgtttcacagtttcagtaacactggttggcttgtgtaggttgatgaaaccaaaatccttcaaaatcctacattgtgattgcgattgtgatttagtgttgatttgaattagatgatgaattttaagcatggtgggcttttttacttttggtagatatggtgccttgctagagagcttcattggtagacaagatttagtagaaaggattaagggttgtatcattgactcgggaggagcagatcctcttgatactaaggtttgttctctctttcatgtaaccaagagttttaaatgctattcaatggtttctccactgcttcaagatcttgtattggaagtggaaatgtcaatattgttgtgaagtgaaaaattctatttgagctatgttgtcctctttttcaatcatgattcatttcatgctagtgtgaaagctttgctagtttgagttctatgttgaagaactttgtatcgattacaagcatttgcagaaccatggctaggggacttttgattttgatatctaagcaattagctttgtagatagataactcagtacttagaaaagactatatagctatgagttaaaaccgctgatttcttttggttacgtagccatcactcacaggtttatagtacatcggcctatatatcttgtgaatgtgatcttgttctcttgcaagatatgatgtcttaggcatgtgaacaagataaaatgagcttcatagtatgtgcctgagtttgttctgaagccccttttgttgaaaattgcttaatcattgcgtagtcctaataagccatcataatcattcatcttgcataagattagcaatgcgtacacctgtgcagattttatagatcaacaattgaattctgttcttttgcagatttgggcagcggggtttaccgcggctatactgaagaagcgtagctccaccataaccacagaaccaaacagtcccataaaagaagaggatgcttcaacaccacaaaagaaggaacctttaggaatcgaaaacataatgctatcatctctggagaaactcttccccatcttcttaaaccacccagacgtcaatacgtaagcttcacaccacacagtagacaacccatctgcttcttctttgtatattaggttgattaatctgagttattgtttgtatcgcaggaggctaacaaaaatcattcaaaaactatatgagaaccatcctccatgtcctcagctctatctttacagctccggggacaaagttgttccatctcattccgttgagctccgcatccgagaacaacagaagattggaagaaagatacattctttcaatttcaagtcctctcctcacgtggatcattaccggaactttcctgacttgtattcctcacagcttcaaaacttcttgcaagaatgcttcacaccaacaaaacaacaagctctgtga

SEQ ID NO: 164318 - DNA, 2041 bp, Arabidopsis thaliana landsberg
cagtgcagagcatctcggcattcacagtatctcaagctattcaggatctccgatcaaccactcagagttcggcaggatcgtgatttcgaccgctatggtggcggatggaacagggttttggtgttaatctatttgcccttgtggcgtggatggactggagggtttctgcgctgcaaggcgtaggaattatcggatatgtcatattcatggtttgggttgtgagaccggccatgttttgggtgatcaaacggacaccacaagagagaccggtgaaggaatgcttcatctacatcatactcattttagccttcggtggttactactttttgaaggaaattcacatgtttccggctgttggacccttccttttgggtttgtgtgtgcctcacggtcctcctctagggtctcaactggtagaaaagtttgaaagctttaacactggaatccttttgccacttttcttgttcttctcaatgctgcaaatcgatggaccttggttagctaaccagatcggtcaactaaggcattttgacggtcagttgtatgaagccttgaccatcatcatcgttgtctttgtcgccaagattatcttctcaatgattcctgcattgctagccaaaatgcctctgaccgactctttcgttatggcactcatcctcagcaacaaaggaattgttgagctgtgttattttctgtatggagttgaaagcaatgtgagttcccatatttaactttatattcaagacaattcaactctccaacacttgatgtttttttttttctttctgtcttataagattattttgttgtgttacaggttcttcatgtgaagtccttcacgattatggcaacgatgattttagtgagctctacgatatcaccagtgttgatacattacctatatgattcgtcaaaacgattcattagtttccagaagcggaatctaatgagcttgaagcttggatcagagctgaagtttctagtgtgcattcacaaagcagaccacatctcagggatgatcaaccttctagcacagtcttttcctctacatgaatccacaataagttgctacgtgattcacctcgtcgagcttgtgggtttagacaatccagtctttatctcccaccaaatgcaaaaagccgaacctggaaaccggtcttattcaaacaacgtcctaatcgcttttgataacttcaaacattactggaaatcgatatcgctggaattgttcacatgcatctcaaaccctaggtacatgcatcaagagatttactcgctcgctctcgacaaacaagcttctttcctcatgctccctttccacattatatggtcccttgaccagacaacggtggtctcagacgatgtcatgcgtaggaacgctaacttaaatgtcttgagacaagcaccttgctccgtggggatctttgtccatcgtcaaaagcttttatctgcgcaaaagagcagtccgtcttttgaggtaacacatatttgaaggtttgattgttccatacgctaatcattagtttccgtgcttgaatttgtgtttacgtgtgaaacttgatttgtctaaaaccaggtctgcgcaattttcgtgggcgggaaagacgacagagaagccttggcattgggaaggcaaatgatgaggaatccgaatgtgaacctgacagtgttgaagctaatcccagcgaaaatggatgggatgactacagggtgggatcagatgctggactcggcagaggttaaggaggttctgaggaacaataacaatactgttggacaacatagttttgtggaatacgtagaggagacagttaacgacggttccgacacatcaacactccttctctcgattgctaattcttttgatttattcgtggtggggaggagcgccggagtagggaccgacgtggtgagtgcattgagtgagtggacggagtttgatgagttaggtgtgattggagatctgttggtgtctcaagattttccccgtagagggtcggtgttggtggtgcaacaacaacagaatgtagcttgtagatga

SEQ ID NO: 164319 - DNA, 1427 bp, Arabidopsis thaliana landsberg
  unsure (1)..(1427): unsure at all n locations
acaatggaagagcaatatgaaaagaagataacgtggacgattaagaatttctcctctttgccatcaaggaaattatttatattcaagttgggctcaaggtgaactgtttatgtttgtcattagtagtaattgtgtgcatggttgttaacgcaggtttgctatccagaatggtaggattaataaagttgtctctgtgtggatgtgctgattctgaatcttttttgggggnncccccntngatggatggaaaagacacataaaatatcgcctaactgttgttaatcaaaaatcggaaaaactctccaaacagaaaggtgattctttctatatttgcttgactatgtttccaaggcggacaaaggttaaatgcttgtgttgtagtgagattctatgtacgtcttgtgcaatgcttgctttgactaaagcagttagtatgttgattatgacattatagtagggcaaccctggtttgctcagaagcttcccagcttgggtttacaatcaatgcttccccttaacgaacttcttgacgtaaatggtgggtttatggtgaatggagaagtcaagattgttgccgaggtttgtgttcttgaagttgttggcaaatcagatgtgttagtggaaactttattagttcatgaaagcattgatatcaatgggtttcaagttcttccttcacaggtaagaaaagtactttttaatacatattacatctcactataaaacctgcataaatgttttgtgggtatgttttcggatctccaaaaactgctatctaatgaggttttactacttatacgttcatttttcacttgcaggtagaacctttgaacaatctctttaaaaagcatccagacattgcatcaaacttccaagtggagaacacacatctaagaacaacatacttgaatagcctactctgcttgaatgagattctgagccagtcccctgagaaactctccaatgttgatctcgccaatgcacattctacactatcttatctgacaaaagccggttttaagttggattggtaggagacgaaactgaaagagcttggtaagactcgggtgcaacaacttgaacaaaatttgaaggacttcaaggaaaagtttatgttggatcctgactatgaggatgacttgagtctattttagtcctgaagagtttggatctaactggttgtgttctggtctgtttgtttttcgatttagttttgagaactttgtcctcttagtcttggtgtaggagatcacgagacttgttgtcactgatccatatgtatcttttattgcactatgatccttaatggaaaatgaataaaaagttaaaaactgtgttatccttaaaatctgaactgtgacaactattcaatttaacaactattcaaaaagaaaaaaaatttgaactttgacaggcaaacgaatgta

SEQ ID NO: 164320 - DNA, 761 bp, Arabidopsis thaliana landsberg
ggggaaaatccaattttgcccgtgccagcctctttccctcaaccttttggttcatttttaaacctacaagtaatgtttactcaaaaaatttctcaatccaattgaggcactcatttttatagactgaaattgatccaaaaattgcgaaatttagttttgaattggtatatagcctccaaaatttagtgttaacgttggtactcattttctctcagcctcctccgttccctgatttccacatgcttgatcacgtagcagctaaaatagtcatcttagtttctgaggttgtgtagatatgttaaaggcttggattcaatcaggaccagatggaaaaaccgctgttgctgcaagtgcaattctttcttccgttgcgtagctgtgtccccttttttattcatatggctcatgaatcgtctaattatcacatgttttacaccaaatgcctagccttcaaaaatccctatgccctatatcttcaaagtttagtgttggcgtttcatatgtgtgagctccaggaaacaattgctattttggatggtattaaagacgttttcccacatgctggtctactttacgtcatgctccatagttgcgctggatcaatcccgtggtaattttatactcagtacatgcgaaggtactataaatttagtgaagtcgacttattcgcagataagctaatgttccatatcaacgaggttggtccacgtcgccaagggacatacaaaaattcctgggagtttgaggattacggtgagtgt

SEQ ID NO: 164321 - DNA, 170 bp, Arabidopsis thaliana landsberg
atgcctgctaaatccgaacgcgccgacatcgacgacgtggaaccgctggccgacagcaccgcgcgccaggcccgccgagtggtggccgcctacgccgaggacgccgacgaatgccgggtgttcctgtccatgctggggatcgggcccgcgaacgccgagaagcacggggc

SEQ ID NO: 164322 - DNA, 306 bp, Arabidopsis thaliana landsberg
acaaggtattgagaattgtcatcggagaaaggattcgtgatcttcaccaaaagttcatgttgtctctgctacgccgtgcaaatccttttccgtgatcttagggttcaaccaacaatccacgagatcgacaacgatcctgactgccgtgagatcgagaaggccttagttcgtcttggctgcgccaacgcggttcctgctgtctttgtaagtggcaagctcgtgggttcgaccaacgatgtcatgtcgcttcacctaagtggctccctcgttcccttgatcaagccgtatcagtcatttcataactag

SEQ ID NO: 164323 - DNA, 516 bp, Arabidopsis thaliana landsberg
  unsure (1)..(516): unsure at all n locations
gctgatgacccagatgcagccacgtggcctactgcgcgtgacgtaagtcagcgggcggactgtacgtaaggccccgggttacgcggcccctgcatttattgcggataaggcgcgccgcgtacccactccgctgacaggcgatgtgccgcctcggcatttagtgagccctgtccattccgcaggcggcgtgcctgtccattccnnnnnnnnnnnnnnnnnnntctccgcatttaatgagacctgtccattccactggcaggcagcgacctgtcagtcccataggcggcatgcctgtccgtaccactggcagactgcacgaccatactgccgcgtgtgctacgccatcattactcgtaccttaccaaggaagctgccaccgcatgtcaacgctgccgtgctgcagacaacatgggcctgaagattaccagacaacactgcattagttgctacaagtattacatccgttatgtccctgggcccgcatgtcggggctcagcacccttgtatgtgcccccc

SEQ ID NO: 164324 - DNA, 379 bp, Arabidopsis thaliana landsberg
atgcgcctttttagcaaaatccgtacaggtatgccagcgaatccggtcacgaaaaaggccgcattaggcggcctgatccagtgcaactttcaaaacggctgtggtgagaagccaagccatcgatggccgttcaggcggccccggacttgtgattcacgtttgccgaatccccgaacgcggcagcgaccagggaaggtcgcgcattatctttggcgagccttgaagcgcggattgctcttgcagatcacgaacactttgccgcgacggcgcacgactttgcagtcgcggtggcgctgtttggcggacttgaaggaggaaagcaccttcacggcaggctcctgagggtcaatacggtcaaaacaaagcgggaaagtgtagc

SEQ ID NO: 164325 - DNA, 350 bp, Arabidopsis thaliana landsberg
atggatatgatgaagaagcgtaagctcgatgagaacggtaacggactcaataccaacggtggcggaaccattggtccaactcgattgtcgccgcaagacgcgaggaagattatcgagcgattcaccactgatcagctgctcgacttattgccaaaggctatcgtacgccatcccgacgtgcttggatctgtcccgattaaccgcccgactctgatatctcgcagcggaagctattcatccgtggtctcgcggcggatactactcggaagggtccggttgccttttttccagttcgggagatctgaagtagatattgtgatccttgacaaggtcactgggaaatcgaaagg

SEQ ID NO: 164326 - DNA, 302 bp, Arabidopsis thaliana landsberg
aaggccttgggcgtcctcccttatatagggggcgaatggatgcttctcaaagcatcacatcccttcctggcacccttccgaaaggtcacatccgttccttgcattctttcaaaaggtcacatccgttccttgtatcctttggtgatgcaaccgttcgttggtacccgctcgaccttacaccttttggccgagacacctcttcacccgtgagctaccaaagtcaaccaactcgagtgtcagatgaccggaccacccagctgggtcagtacttgatcagctcaccgagctcagtcgagctgttg

SEQ ID NO: 164327 - DNA, 3508 bp, Arabidopsis thaliana landsberg
tagacaagccataccagattcaacatgatgcagcaagctcctgtaacttcatgacaagaaccactagtgaagcattaatcctaatcaccaatgctttaactggtcattcaacgcaggaattgacaaagaacgaagaatttgagccgagaaagctaccaagagcaaagagactcatgtttcggcaatttctgctcctatcctagcccaccctccaccctcatcagaaaccagaatggagtccatgttctctctccacagatctccataccaaatatgattttctctccacagatctccataccaaatatgattctctctccacaaatctcattagcaagtttgacaatctacgctctcaattctctaatctctcacctacatcagcttctatcaatgcagttacactacgcagcggaaagcagctcaacccaatacttcagcgtgaacaatcggctcagcattcatcttctccaattgcagaaaatgaaacagtgttgatcgatacaccagggtgtcgatcgacaccaattactcttgacgactctgtattttcctttgtcgagtggaatcgacaattttaaggaggaggaggaaactattcttgatggtgtcgatcgacacccagcttctgtcgatcaacacctagttcgatcagacaatgtgcaaattccagctgcaaccaagtcagcaaatcgacgaattcccttctccaagagtcctaataagtcaagacaagccttagatgatgtcagatgcaaagttatgattgataaactgattgttgagatggctctagttgaagctattcatctatctcccacaatcagaaggtatgttaagccaatggtcactaagaatttgacgaaagaatgcagtgctatgatgatttcagagcagggcagcgacatcattcaggaacgaatcccaagaaagctacgtgatcctggaacttttgtacttagtgtcaccatcaatcacgatcctttccaagaactttatgtgatctcggttctagtgtgaatctgatgcctcgttcagttgctacctttatcactcttgtgttggtagatcgttctacccggattccagatggaattcttattgatgttcccgggatgattggaaagagcatgattcctatagacttcgtagtcttgccttatgagaaggaacctaaggatccattaatctttgggagatccttcttgcacactgctggagcaatcatagatgttcgacaagggaggatagggctgaatgttggcgttcttactatgcaattcgatatgaacattttggtcaagaaaccgattatagaagggaaaaccttcttgataaattctttcacttcatcagcttcagatagtatttcagagatggaattagaagacccactagaacgagttttggtctcttccatagaggatagtgcagatttggacattgaaacttctacatatactaagctgctagatgagaccgaacatgtgatgcaacttcagttgaagaagcttttccatctgtgactccaacgccgactactaattcagattgggatccagcaaaaggctcctaaaatcgaattgaaaccacttccagcagggctaaggtacgcttttcttggtgaaaattctacttatcctgttattgtgaatgcttctcttaatcccgcagagctcaccttattgctaagcaagctgcgaaatcatcgcaaagctcttggctattctcttgatgatattgcaggtatatctccagatgtatgcatgcatacgatccaccttgaggatgagtctaagtcttcagttgaacatcagagaaggctgaatccgaatatgaaagaagtggttaagaaagagattatgaaactgttggaagcagggattatctatccgatttcagatagcagttgggttagtccagttcatgtggttcctaagaagggaggtgttacagtagtcaagaatgagaaagaggagttgattcttactcggacaatcacaggacatcggatgtgcatctattacagaaagctgaatgctgctaccaggaaagaccatttcccaaaaccatttatcgatcagatgttggagaggttagcaaatcataagtactattgcttccttgatggatactcaagattctttcagatcccgaatcatccaaatgaccaggagaaaacgactttcacctgcccctatggtacatttgcttacagagaatgcctttcggtctttgtaatgctcctgcgacatttcagagaggtatgatgtctatcttcacagacattattgaggacttcatggtggtctttatggacaatttttcagtttatggatcattgtttgagggttgttaagagaatctctacaaagtgttggcaagatgtgaagagaaacatctagttttgaattgggagaaatgtcacttcatggtgcaagatggaatagttcttggtcacaggatttcaacacatggcatagaggttgacagagctaagattaaggttatgacaagccttcagccacctgataacgtcaaagccatgagaaatttccttggtcatgctggtttctaaaggagatttatcaaggatttcagaaaaatcgccagaccgttgacagctttgctctacaaggatgtcaagtttgagtttacagtagagtgtcatgatgcataccgtcagatataacaagccttgataagcgcaccaatagttcaacaataccttttaaagtaatgtgtgatgctagtgactttgcagttgcgacagttctagggcagacaaaggataagaaacttcatgctatctatcttgctagtaagacacttgatgatgcgcagagaaattatgcaacaacagagaaggagctgttagctgttgttatcgcttttgaaaaattcagatcttatcttgttggatctaaggtgattttgcatacaaatcatgtagccatgaattatttgatgcaaaagaaggatgctcagccaaggctactaagatggatttagcttcttcaggaatttggcatcgaggtgcgagataagaaaagagttgagaatggtgttgcagatcatttgtcacgaattaggattgaagatgatgttcccatcaatgacttcttgcttgaagaaaatatatacatgattgatacaactaagaaagacgactacaaaattgttgagttgatgaatcaagctgcattgtcgatagataaaaaacattcaaagtgtcaatcgacacctccgttacagttgagaatgagattcgaccatgctcgagggtgtcgaccgataccattcaaagggtcgatcgacacctgactaatcagacgaacgactggattttcacaaagaactgcgctgccacagtagttgaaaacgattatccatggtatgctgacgtagttaactaccttgttgcagatgcaccaaggcctataatgacaggaagatcatctctcgatccctcgacctaatgaccaggtacttctttataattcttgac

SEQ ID NO: 164328 - DNA, 2286 bp, Arabidopsis thaliana landsberg
cttaaaattgaagttttggatttctaattagatttgagattaagcaaattgtgtttggatatgcacattagaagtttatgtataactctctccatgttagaaggtaggatatgtacgaagcttggattagatgcaagtaaggttaaattggaaatgaagtacaatgcagtgatgttggcaccaactaaagaggtttatattagtgatgaggatgtcggtgtctatatatcttcaggtgaaaattaccgtagattttttttgaatgtggacgtcatcactgcaccagaattgtctgagcaactgtcgagagtggagctcctcaatacaagttctgttggtaagaactatgctgaattggattcaaatgaggatgaaatgaaagataatgctgacatcgtgacgggtgaataggaggaacaaggaacataacccaatggggcaatcgtggagattaatgatactctagatcatgagtttagatcacgtgatgattgtcatgataggggtgatgaatatgttgagcctccaactgttgtagaatctagtcagtttaaaaaaagaattgggaagacggtattggtttgactttacgacaagaatttccaagcatggcagcattgcaggaagtggtggacaaaggtgcatttgctaacagtttcagttatgttatcaaaaagtctgataaggagcggtatgttttggcttgttttaaagaacactgtggttgacgtatacgagcttcaaatattcagaatgcaagtatttactctattagaaagtacaacaatatgcatacttgtttccggattagtaagagtattacaaggatgaggaagaggaaatatacccctgaattagtagcagctcttcttcatgatatttttcctggtcttttagaaactccacctcctaaggttatcatggagcttattcagacgaaattagatgtgaagatatcatactccacctgagagggaaaaggcaagccgtttgtgatttaaaaggtagcgcggaagatagctacaaggacatcaattgctatttgtacatgttgaagagggcgaatgaaggtacaataacatatctgaaattggatgagagggggaaattccagtacctatccatagctttgggagctagcattgaaggctttcaagtgatgaaaaaagtgataattgtggatgcaacacatttgaagaacggatttggggtgttctagtatttgcctcagctcaagatccaaatcatcatcattatatcatagcggttggtgtactcgacggtgagaatgatgttagttggggatggttcttcgagaagctgctaaatgttgtacctgatactcctgaattggtatttatgagtgacaaaaattcaagcctcatcaaacgcatacgtaatgtgtattctgcggctcatcacgggtattgtgtttgacatttatcccaaaatgtcaaaggtcatgccactaacatcaacaaagacgtactcgcttggaaattcatggagttaagtcggatttataccatggcagaattttggagggagtatagaacttttaaggtgagatatcctactgcggcctattatttggaggatacaaccgtgacaaaaaaatgggctaggtgttgtttcccaggggaacgatacaatttggacaccaggaactgttggaatcgttaattctgtttttctcaatgcaaggaagtattctttaatacccatgctagatgcgaacatggccaaaatttctttttggttcaatgaacatcgcaaagatgccgcttcaggatctgttgataataagtttgtgcctttagtggagaactacttgcatgatttatgggtggatgctgagaaactaaaagtgacagagctaaacactttccggctcgagtacaatgtccggggagttgaagggaacgaatatttggtcaacttgcacttcaaaacttgcagttgcaaaggtgtttgatatacaaaaatatccatgtattcacgcgttagccgctttcattgcattcgatagcgatacaacaagacctcgaggtatggaattacatgaattggtttctaagtattattgggcggaattgtgggcattggcgtattataggactattatttagtcccggatagatcacagtgggatatcccggatgatatcaaagcgttgaaggtattacctctgcctcggaaaaagaagaagggtagaacaaaagtgcttaggattccatccaccggagaaagacgtccaaaacgtcaaaggactcacttaagcacggg

SEQ ID NO: 164329 - DNA, 169 bp, Arabidopsis thaliana landsberg
tatatttggcagtcaagttatgattctgactttgtattatgcaatcattgtttgtgtgtgtagccgtgtgtgcgggaactcgcacgggctgatcaggaagtatggtttgaactgctgcagacagtgtttccgtagcaacgctaaggagattggattcattaaggtaaat

SEQ ID NO: 164330 - DNA, 1135 bp, Arabidopsis thaliana landsberg
  unsure (1)..(1135): unsure at all n locations
gtcttttatcaaatattaaacccattctgcatgagatctcaatcacttcttataggtacagtactatcagattcccatggaatcttaacgtctgccaaacacttgtcgtgatgaaactccaagacaaggttcttgtggatgtttctttcccggtttgtttccggtccttgaaaagtttgcacctcacacgcgtgaaatactcttgccgagaatctttcaccacacttttatcagcttgtcctgttcttgaagatttagatctcttcattggcagagttcactatgactgtcttaactcgtttactatatgggtgccgtccttacagagattatctatatgtgacgagtcataccgctttcgtagcacgacgtttgaaataagtgttccttctttgaaatacttaaaaatcgcgtgtcaggacagttgctttaagtttgttgaggacatgcctaacttagttgaggcacatgttgaagctaatcaacatgaaactaagaacctcttgagatttctcacctcagttgaacgtcttaaggttcactctctttaatggtatactcttagtttttatctttctttcctaatcatttagttattctgtggctctgtttgatgatggtttttcnnnnnnnnnnnnnnnnnnnnnnnnnnnnnnngatagaatcttccaccagcttctttatcttgagctgcatttgcacaaaagactcaatggggatcgaattctgagtttgctcaaacattctcctaatctacaaactctcaagctcaacgaggtaaatcaaaatgtcgcggttttttatattagcttaaatagctctcttttgtattttctttacctaactcagatgccttatgtttccagacaaacctttacgttctatcaaggatcaaccgaatatatctgttcgtaaaccgaattctgttcctgagtgcttaaccttccatcttgaaactcttgagtggcaatgatatgcaggaagaccggaagatagagaaatcgctgtttacattgtgggaaaagctcttagtatcaacacggctacgatatctcgatatttcagctccagcctgctccgtcaccaccagaagacggatctaaaaattgtggaggagttaaaatctataactaag

SEQ ID NO: 164331 - DNA, 1255 bp, Arabidopsis thaliana landsberg
atatcattccatttccgaactttgtccaatgatcactgaatgaagtatacgcgcttttgtggtcacggtgtttaagaaatgcgtgggagtaaatgagttcgacctcgcactcatcttgaccgataatcgagtactatttcgcaaatgtgtttataacgtttttactttcacataccttacatgtaactaatcatcatgatatggtgcagggttgccgttcccgcatagaggctaccattaatcgtcgcattgcttcattttactttgaccgtatccgagaaaatgagtggatagttatcaatactttctcggttcgaaaccacgacgaggggatacacacaacgtcccatgactaccggatctgttttatggatcagaccattgttaccaaaccttcgggattggctgcaatactgtattacgattttactccttttgactacatcatcgagaagacagtttctactggagtgttagtcggttagtatatttgactgtctattcatttttgtaaatatgtacgtacacgtaatgcttttatctttcattacgtacaccagatgtgattggtgcgctcattgagattggcaacttgaccgaagactaccgtgggcggaagcttccttttaagataatggataaacagtaagttattttttaaaatgttttctcctagatgtttgttatatcctccgtataatatatattctctgtagcaaggaagttcttcaatgtgaagcacaaaatgatcaagctttcgaatttaaagatgaatgttttacgtacactactaattatgtatctgatgaattatgtaaagatgaatgttttacgtacacgaatacatatagacatggtagatgtgaaatgaattgtaatggtgtgcaatttagtattggaagattggtgcgctcattgagattggcaacttgaccgaagactaccgtgggcggaagcttccttttaagataatggataaacagtaagttgttttttaaaatgttttctcctagatgtttgttatatcctccgtataatatatattctctgtagcaaggaagttcttcaatgtgaagcacaaaatgatcaagctttcgaatttaaagatgaatgttttacgtacactactaattatgtatctgatgaattatgtaaagatgaatgttttacgtacacgaatacatatagacatggtagatgtgaaatgaattgtaatggtgtgcaatttagtattggaagatcggttttacatgaa

SEQ ID NO: 164332 - DNA, 198 bp, Arabidopsis thaliana landsberg
cgcgaactacattggaccgacaccctggagattggaattcaactgcaggagatgttccccgacaccgacccctactccgtccgcttcaccgacctccataagtgggtcacccagctccccggcttcgtcggcgatccatcgaagtccaacgaaggaatactcgaggccatccagaccgcgtggcatgcagagtaccag

SEQ ID NO: 164333 - DNA, 213 bp, Arabidopsis thaliana landsberg
gtaatgaagacggagatggtggcggaaatggaggacgcgatggtggttacgagagatatagcagaggttacagatctggtggaggttgtgctggaaaaggatacggtggtggtggtcgtgagggaggtggctaaggaggaggtgaaactggaagttacggaggaagcggagtggaggttggtaatcaaagatagtcttgtttattgtcaccgt

SEQ ID NO: 164334 - DNA, 151 bp, Arabidopsis thaliana landsberg
agttgattgggcgtcctcccttatatagggggcgaatggatgcttcccgaaaggtcacatccgttccttgcaccttccgaaaggtcacatccgttccttgcacccttccgaaatgtcacatccgttccttaacctctccgggaagaagatc

SEQ ID NO: 164335 - DNA, 712 bp, Arabidopsis thaliana landsberg
gagtctatgcaacatctttctgatttagatgttcggtatattaactagagggcttatgttaagatacaagctttgtaccaccataatccaacccttaacgatgatgaaatgactatgctactggttgaggaatatgtgcgtttataccctaatgttatacatagttttctgtctcaaaattagtctgtatatttctgtaaaatcgagtgacaatctaaagttttttttttagggcacctatatcgatacaaaaattccagaaggctcatacctccacaagttttgggaagcactgagagtcagtttgtggcactacatgtttaactttcaagtgattttgtcttaaagtgaagtcaaatacgccctcagatctatttaaatcaagtgtatgttacaaagaaaaatgtggcctattcctcctaggtcaggtagaaacttctttgactttgtggctcctgatgaagtgaaatatccttcagatgaccaactgaactgcgtgacaaggaactatcctgatctggttttctaatatctttacataattttataaatggatattcagtttctactattaattttcatatctttgatcgttagacgctatttgtgtgatttccaaagtgtatactattcggaggttcccatttatatgtcgtcaaggcgagacagactacgattcaagatatgtcgctttcaagatagaaacaatatg

SEQ ID NO: 164336 - DNA, 119 bp, Arabidopsis thaliana landsberg
atggcttagtggttaagagcactgactgctcttctgaaggtcctgagttcaaattccagcaactacatggtgggtcacaaccatgcataatgagatctgacactctcttttggtgcatc

SEQ ID NO: 164337 - DNA, 417 bp, Arabidopsis thaliana landsberg
gcggcgcgccgctgggcagcggcatatttcacggtcgctatattttggctcggcttgctgatcggagttgcgtttcttgcaactcccgtcaaattcatggcgccaagtctgtcgcttcctgtcgcgcttgatgttggcagatatacgttttacatcttcaataaagttgaatgggttttggcggcagtcctgatcgttgcgccgccaggtggcggaacggcgtggcccaggcttctcgccatcgctgccggcctactggtaatcgtcgaaacagtctggatgctgccgggtcctggaccatcgtgtcgccttaatcatagccggccagacgccgccggcgcccgacctgcacaatctctacattgcgatggaagtggcataagtcctggtgctggcctcgatagcgttcgatggggt

SEQ ID NO: 164338 - DNA, 150 bp, Arabidopsis thaliana landsberg
agaatttgcgagaggagaagcaagacatggacagggttttgtggcaacactcgtggctgtgacagtcagtgtaagagatgggaacgtgcttcacacggggcttgtcacgctcagttcccgggtttcgcatgtttctgctacttcaattgc

SEQ ID NO: 164339 - DNA, 162 bp, Arabidopsis thaliana landsberg
aggaacacgtaaattatactcttagaaaatctcttcaaaccatgtcagccctatccgcaacctcaaaacagtgttttgagcaacctgcggctagctttctagtttgctctttgatttttattgagtattagaggtttgcttagaaactcttctattgatttc

SEQ ID NO: 164340 - DNA, 123 bp, Arabidopsis thaliana landsberg
ttcaacggcaagaaacaggggagatgtgcttttacgagaaagtgtgcaagattggttaaagaacagagagctcgtttctacatcatgcgtcgatgcgtaatcatgcttatttgctggagagat

SEQ ID NO: 164341 - DNA, 503 bp, Arabidopsis thaliana landsberg
  unsure (1)..(503): unsure at all n locations
atcattaatctttataattttgatgttattattggggaaaaatctttgacatgtgttgcaagtagatatacttgtgatttgtttgtgcatttatggagggatcttggactaggtctgtgttacaaatggacttttgggatgaatccaataacatatgtgcttcaattttggaagatttctgatcatgaaggtaaatattagcactcttatcattgtctatttaatttatcgagctaatacaatggtttacaaacataatgattttaggtcgtcaatgtctaatctcacataatggtgcttcaagaattgtattcaatcaaaattacccagagattaacatgactcacatctcgtaagaacgtttctatttttacaatttatttactgataagtgtattatatcaaattgtaaactaataatatttttattttcttgcccacctttacaggaccaattcctnnnnnnnnnnnnnnnnnnnnnnnnnggtgaagttgttgatgag

SEQ ID NO: 164342 - DNA, 1756 bp, Arabidopsis thaliana landsberg
atgttcctacacgcaacgttagtacaacttcaacaatcaataattaaactacataccttatctttgaccaagcaacgtgtatgaaacaagttttccctttgcgcttgttcctcggccttagttagaacactcaacgatcttctcgcaacaagcaactctcctctagcgggggattccacatcttcttccattgagtcttcttccgcacgctcatcttcagattctacttcgccattgtctccaaggaccatgatccttttgttggaacattcgctcgcataatgcccaagtccttgacacttaaagcatcagatatctctagccctggtgattacttccttaccctttccttttggatctagatcgaccggttttggcttgacgaacggcttgtaatccttttgataagcaaacttctcttccttttgataacttggctttcccgggctgtagttggtcttggtgtgacttgatcgggcgttctttctcttgatttgatgtttgaacatgaccgctttgtgaagcatctcctcaagctccacatagtgttgagtttctagacggtcttggatttctcggttaagacctcccatgaatcgggacatgaccgcttctccatcttcttgaagatcagctcttaacataagggtttccatttcctgaaagtattcttcaacggttttgcttccttgaaccaaatttctcaaccgctgatgtagttcacgatgatagtaactcggcacaaatctctttcgcatgacgaatttcagctggttccatgtttcgatcggatagtctcgggtacgtcttcggctagtaacaagttgatcccaccaacttaaggcatagtcgtaaaactcagtagccgcaattttaaccttgttggactgaagacattcttgacaaagaaagactaactcaattttcttctcctattccaagtaagtatccggattgttggttccatggaatgcgggaattttgagttttaggcctcccaagggatctctaagtggtggtctctctcgtcgatgcctacgttggctactgtgagaggaggtgtgactatagtaatttcttgcctcttcatcttcccttgcgtcttcttgtcttagacgtgcatttgcgtccgggttgatttgatgtaagtttagagcaccaagcttttcatcgattaatgttgctatagctgatgtgactgttttcaaaatcctcctttctaagctagaggcagatgacgcttcatcttcttcacttgtcaccattgtacatgaaaaattaaaaatttaacaagtaaaacagttcaaaaacaagcaaataaaaacgcgatctgaaaaattatcaaaacgactcaaaacattccgaaattaatttctaaaaatactagactcgtaaacggttcgaatgcaattggtttcttaatttttgaacgagccaaatactttataaaattcacgcaagattgaacagagatctgaaagaagaaaaacagaattttaggattggaacttcaaaacctgataacaaagtggctctgataccacatgatacattcttggacgtggatgtatgctccaaggactcactttgttggttttgaattgaaaattatgtacttgatggtgaataatggatggattcggaacaaagcggtggaaagacgataaaccgggatgaagacaagatcgggtggatacagcggaatgaaaggggaacgaattgtacttccaagagtgatgaaagacttttaaactac

SEQ ID NO: 164343 - DNA, 128 bp, Arabidopsis thaliana landsberg
  unsure (1)..(128): unsure at all n locations
nnnnggcctgtcgctcaacgcattatagcccgtgccctcggtccacggtgacgttggttattatccctcgtggcccacaataggcccaaaaggaagggccctttcccgctggtggggtagaattatca

SEQ ID NO: 164344 - DNA, 154 bp, Arabidopsis thaliana landsberg
aaggccttgggcgtcctcccttatataaggggcgaatggatgcttcccgaagcatcacatccgttccttgcacccttccgaaagatcacatccgttccttgcatccttccaaaaggtcacatccgttccttgcatctaataggcgatgcaaccg

SEQ ID NO: 164345 - DNA, 192 bp, Arabidopsis thaliana landsberg
gctaatgttcagaagatcggaaaggctgtttataaaggaccaagcgtagttaaagagatcatatatggaataacgctcggccttgcggttggagggctgtggaaaatgcatcattggaacaaccaaagacgaacgaaggagttctatgatttactcgagaagggagaaattagtgttgtcgtcgaagatgag

SEQ ID NO: 164346 - DNA, 310 bp, Arabidopsis thaliana landsberg
atttcgaaattctcccattggcactggatcttctccggctgctgcttcattcgccggatttcgtattccgtctaaaccagctgcttctcctcttccccgattctccttctccaggtctgcttcatatgtttagtgtttaattccatgtatctgcttcactttggccatttctttgatctcattttgatgaatttgtgtgattacattataggtgtccgtcggagcttggttgtgttcagtctctgttaccgctacacagcacggtggcggctgcgcggttgacgtcatgcttaagcacaacttccagaag

SEQ ID NO: 164347 - DNA, 271 bp, Arabidopsis thaliana landsberg
aaaaaaatgggtagcttccttgaggttctttgagcaatcttcatacctactgttggtgtgttcctcatatatggactgggggtaaatttttttcattcataaatcataaaaatatatgacacatttgacattaatggttaaagtaagatcaaatctcttgttgttttgttactttgtatatgtgatagcagtaggagttttgggtctgtttgcttctaacgttattcgctttatcccaggactgatatatgccttgtacgttgtcaccgag

SEQ ID NO: 164348 - DNA, 161 bp, Arabidopsis thaliana landsberg
atggagtctaaacgggggaaaaagatgtctacgattagtaggaggaaaatcattgttctaccaagctcccctcggatacagcattggagacggttgacccaacggggggatccaaaaattccggacttgttgtttactccaactgcgctcgcaaacctttc

SEQ ID NO: 164349 - DNA, 718 bp, Arabidopsis thaliana landsberg
atgtttaggataagtttgcatgattctgcatatttgtgtagatttcaggtgatttggagctgttaaccagctaactggaagaagcagacctgatcatgacaaaccactcgcctagaggtcgagtaggagcttcaagatctcaagagaccactcgacccccaggccgagtagaagacaccaccactcaatcacatcactcgacccccaggtcgagtgacttcatctccatcttctgaccaccactcgatcacatcactcgacccccaggtcgagtgacttcatctccatcttctgaccaccactcgatcacgtcactcgaccacgcggtcgagtgtcttcatcccattgccagaccactactcgacctcatcactctacccggaagtcgagtatcaccatcacaccactcgactgcatactcgatgacaagcttcagagccttcttcattccgcactcaaccagacactcgagcacagggaagaaaagaagactccaactattcattcgacctctcactcgaccacatgggtcgagtacagttcttaatccgtcccaatacttcgtcgttttaagtattagggtttcagaatatttggctataagtagcatgtacttcacattttcgcagacaagaagtttttatctagttttatttccgcagaccttgtgttctagaccttttataatccggatttctctttatatattcagtactca

SEQ ID NO: 164350 - DNA, 122 bp, Arabidopsis thaliana landsberg
agaatggcacgtgtgagccgtgcaagacttttgggcaaaagtgcagccatgtcgtgaagaaacaaagagccaagttttacattcttcgccgttgtatcgccatgttagtttgctggcacgac

SEQ ID NO: 164351 - DNA, 156 bp, Arabidopsis thaliana landsberg
atgtcccaggacaacatgttcaagcttgagtgcaccgtctgcaagacggcgaactaccgctcgctgaagaacaaaaagaagctcaaggaccgcctcgagatcagcaagcactgcccggtctgcggcaagcacaccaagcataaggaaacgaagtag

SEQ ID NO: 164352 - DNA, 1404 bp, Arabidopsis thaliana landsberg
taacgtcaccgtcttggacaatcctgctccgtttgtgaatccattccaggtcgagatttcttacgaatgcttgacctctctcaaagacggtaccttttactttccctgatcctctatctttcgaaaaattgatactatgttgattaattttcgattttgttataatattcatcggaaccgattgaagaatgaagaacctgtgattggatatgtgaataatgctacaaaagattcaatttttggggttttaaagtatgatttgtagctaattgacttcactgtgttagggttttcttgcatttgtatcagctcacacacgatctgtctcgagcttagtgtactctctttggcttagaagttggttatatgtctgcaattgttcgtattcaacattgtagatgtggtatttaggagccttgtctttgctctaaaaggaaagattttctgtgaatggttattttgtatggcttatctttcgaatgtgttggctctcaattgagatttgacctctggctcagtggctatgtactgtaatttcacacattactagttgcaagttatcggttcttgatcatggcagagaattattgttctagatatcattatgtgtgtgttgcttatccttctgcaataaaagcgtaaaaccgttttgcctataccaactggttaagtttctgtgctttgtaaattttcgtgatttctagtcatgatcacattctggtaagcctgatgtgtgagataacgtttctttggttttgctacagatttggaatggaagcttatatacgtagggtcagctgaagacgaaacgtatgatcaagttttggaaagtgttcttgttggtcctgttaacgttgggaactatcgatttgtgttgcaggtagtgtatgattagttttattcttctctctttgtttctggtggtttaggtacataatcttagtctaaactttttgtttgattaaatgataggctgactctccagatccgttaaagattcgtgaggaagatattattggtgttactgtgttattgttgacttgctcatacatggatcaagagtttataagagttggctattatgtgaacaatgactatgatgatgaacagctcagggaagagcctcctaccaaggttttgattgataaggtccaaaggaacatactcacagacaaacctagagtaactaagttccctatcaactttcatcctgagaatgagcagactcttggtgatgggcctgcacctactgaaccatttgctgattctgttgtaaatggagaagctccggtgtttcttgagcagccacaaaagcttcaggagatagaacaatttgatgattctgatgtaaatggagaagctatagcgttgcttgatcagccacaaaatctccaggagacatga

SEQ ID NO: 164353 - DNA, 123 bp, Arabidopsis thaliana landsberg
gcagagagatcaaaggagaagaagagatcaataagtagaagattggggaagtatatgaaggaacaaaagggaaggatttacatcatcagaagatgtgtggtcatgctcctttgttcgcatgat

SEQ ID NO: 164354 - DNA, 176 bp, Arabidopsis thaliana landsberg
aagcataaggacgttgatggagccttagggcttctccgtcttagctattgccactggctctcatattccattgccttgcggagcggcgttgctgcttttaccgtttgggacctgccatgagatctatattcctttcttattctcaaaagttctctgttcttttggttttcaatttt

SEQ ID NO: 164355 - DNA, 382 bp, Arabidopsis thaliana landsberg
ggcaactacgaaatctcgtaaaaagacaaagaaactggttgtttatggaatagtccatattcgggggggttttaagaatacactcgccacgattactgataaccaaggtaacaccttaggttggtctagtgccgctagctgtggttatcgtggctcaagaaagtctaccccttatgcagcaggcgaagccgccggttaagtggcccaaggcgtggtagaaaattatggtatgaaaaatgtccaagtgcgcgttaatggcccgggacctggtagagaatccgcaattcgttctttacataccgctgggttaaaaataatgtcgatcaccgatgccacaggtattccattcaatggttgccgtgatcccaaaaagcgtcgcgta

SEQ ID NO: 164356 - DNA, 850 bp, Arabidopsis thaliana landsberg
tcaacaagaaacctccatcaatgttgctgatacaagacttggtgaatctgacgcccctgtcttcggtacatgatgatgtgaagcagcattgcatggtgaaaccacaaacacaaatcgcacaccaagaacaaggaccaagtagtcatctaaagacgatgttctactaatctttgtgtggctaaataaaaagcaaggatgttgttattggtaatgagcaacgagcaaatgtattcaggaaacacattgcgtagtacattgcagcaagtccctttgttggtactctcaacaatagaccagcaagtcattgtaagtaaaggtggtccaagatcaacaaatttacatgttgtgggatcccatgcaggtgaaacatctcggatggcgagtggaatgaatgagaatgatttgatgaggttagctcatgaaatttacgagagtgattacaatggagcattgttggagggagttaaggcatgatcagaagtaatgcgcctctcttccaaccaaagagacattacttagcaaaagaagaaaggttaatggtgctcctcgtgtagctgttccaaggattacacatgtagttgaagcttcctaagctcgtccaccgggtgtgaaggctgctaagggtaaagacaaaggagcatggctggagtttcagcaaatgtggaagaagaaggaaagaggctagaaaggatggagagtatgtgggaaaataaagcaacaagatttagcttttaaagaaacgttgagcgacaagaaactgctagacagtttagttgcaagattctacacgcttactaaagtggaaacagaactaaagaataaactaatcaaaaacatgtattttacttga

SEQ ID NO: 164357 - DNA, 156 bp, Arabidopsis thaliana landsberg
atgaagacatgtgatttcggtatagttatgatttcgggttcggttttcttaaaaagggtgaaagacagcggtacaaatagtaaaattgaattaacggtaaaacagaagaggaaagggtaaaaacgtaatcaggaggggaaaatatgccagctggca

SEQ ID NO: 164358 - DNA, 153 bp, Arabidopsis thaliana landsberg
gatgccttgggcgtcctcccttatataggaggcgaatggatgcttcccgaagcatcacatccattccttgcacccttcctaaaggtcacatccgttccttgcatccttccgaaaggtcatatccgttccttgcatcctttggcgatgcaaccg

SEQ ID NO: 164359 - DNA, 202 bp, Arabidopsis thaliana landsberg
tctagacactaatccataattccatatcatttgacgaaaataattgacaaaagtaataaaatattgagttgaaaagtgaatttcacttccgtcactgcacagtggtgcctctagaagcttccttcttcgaataaccaacaaacaagttcacatacaattgcgatggtcatacgaattcaattacctcgttgattatggcttc

SEQ ID NO: 164360 - DNA, 125 bp, Arabidopsis thaliana landsberg
gttcctctagacagaaacaggggaaatacggtttcacgaggaagtgtgggagattggtgaaagaacaaagagctcgcttttacatcatgaggagatgcgtcgttatgcttatttgctggactgat

SEQ ID NO: 164361 - DNA, 401 bp, Arabidopsis thaliana landsberg
  unsure (1)..(401): unsure at all n locations
atggatcaaggaggtcgaggtgtcggtgccgagcatggaaagtaccggggagttcggagacgaccttggggaaaatatgcagcagagatacgagattcgaggaagcacggtgaacgtgtgtggcttggaacgttcgatacggcagaggaagcggctagagcctatgaccaagctgcttactccatgagaggccaagcagcaatccttaacttccctcatgagtataacatggggagtggtgtctcttcttccaccgccatggctggatcttcctccgcctccgcctccgcttcttcttcttctaggcaagtttttgaatttgagtacttggatgatagtgttttggaggagctcctngaggaaggagatgaacctaacangggcaagaagaaatgagcgag

SEQ ID NO: 164362 - DNA, 152 bp, Arabidopsis thaliana landsberg
aaggccttgggcgtcgtcccttatatagggggcgaatagatgcttcccgaagcatcacatccgttccttgcacccttccgaaaggtcacatccgttccttgcacccttcggaaagggcgcatccgttccttgcatcctttgggcgatgcaat

SEQ ID NO: 164363 - DNA, 129 bp, Arabidopsis thaliana landsberg
gcggtgaagaggattttgcaggaggttaaggagatgcaagctaatccgtctgatgattttatgtctcttcctcttgaggtaacatctccgattctagctttttagatcgggaattttgattcgaatcta

SEQ ID NO: 164364 - DNA, 123 bp, Arabidopsis thaliana landsberg
tcgagtgtaggaggaacaaagaggaagatgtggagccgtggagtgggaggagtggttagagagcaaaaggctaagctttacatcataaggaggtgtgttgtcatgcttctttgttggcatgac

SEQ ID NO: 164365 - DNA, 138 bp, Arabidopsis thaliana landsberg
acgccgatactacgcagatctcagatgtcagggcgcaagaagattgctccagtagcgaacatttgtggctccaagtgctacatctgttatgttcctgggcccacatgtcgggactcagtacctttgtgtatgccctcc

SEQ ID NO: 164366 - DNA, 129 bp, Arabidopsis thaliana landsberg
acgccgagactatgcagatctcgggtgtcagggcgcaagaagattgccccagcggaagatattagtagttacatccgttatgttcctgtgcccgcatgtcggggctcagtactcttgtacatgtccccc

SEQ ID NO: 164367 - DNA, 759 bp, Arabidopsis thaliana landsberg
ccaccttcaaaatcttcccatgtatctctccttgctctttcaaattcatggcttcccttttcattgttatatacaaatacttatatacatatatgtatatatatgtgtgttcctaaatacaacatgctcagtatgtcacttatttgtatatttttatgtacaacgagctagcatgatctccttcactgcgtagatggtcttgaataatctgtttgagaacgccatcgagtcctgctgaatgaagcctacactctttgtcccagggacacactgctgacttggctttagtctcttgtcttcagcttgtccttggctggtacagacatagcaaatatgcacccagcctgattttttgcaggtgtatccaagggagctactgttggctatgtccccctcaaaagcccaaggagggaaacaggtgaatgggaagtctttttggttttaaagatttatgtatttatttatttatgagtacactgtagctgtcttcagacactccagacgagggcatcagatttttgttacagatggttgtgagctgccatgtgggtgctgggaattgaactcaggtcctcttgaagagtagtcagtgctcttacccggcaagccatctcaccagcccaaaaaactaactagcgtaccacaatggttccactggggcacgataatttttgtttttgttttggttttggttttggttttggttttttcgagacagggtttctctgtgtagccctggctgtcctggaatttgctctg

SEQ ID NO: 164368 - DNA, 127 bp, Arabidopsis thaliana landsberg
atggctcaacaggtaagagcacccgactgctcttctgaaggtcctgagttcaaatcccggcaaccacatggtggctcacaaccatccgtaacgagatctgagatctgactccctcttctggtgtgtc

SEQ ID NO: 164369 - DNA, 176 bp, Arabidopsis thaliana landsberg
  unsure (1)..(176): unsure at all n locations
gacgtacgtcccatttttttatanagttaagattagtctattgtaacttaatgtcttctgttaggtgttatgctcgtcttcatggaagggctgtgaactgttaattgtganctgcaaagaagaagaagaagaagtgtggtcatcgcaaccatgattttttagaagccaaagaagat

SEQ ID NO: 164370 - DNA, 373 bp, Arabidopsis thaliana landsberg
ataatgaccaaatccggttctatcattaccgtcctcttcatcgtcttcatagttatctctagtaagttaacttactttgccttgcttgaatgtatttggtaatagctttatgttattgcaagcagaaaattcatgatatgcgtttctatatattttgtgtttataacagaacaaatagaaagatagtgattgcttgaaagaatatggaggtaaggtaatatatgttggttcccctggccttttgtgcaattttgatatttctgtcatactgttatataaagtgtcacaaagacaagggggctgatggcggaagatgccaagtgggacaggaagaaggtcatactaagttgacgtgcttatgcgactattgtga

SEQ ID NO: 164371 - DNA, 412 bp, Arabidopsis thaliana landsberg
  unsure (1)..(412): unsure at all n locations
catgcatatcggtgcatacagcatcagcaccgatccctcgaaaatggatatcgccgttattcacgggtacctctccacagaatnnnnnnnnnnnnnnnnnnnnnnnnnnnnnnnnnnnnnnnnnnnnnnnnnnnnnnctttctgcttcggattattccaccagggaaaacaggttgggtttgcgcgactggttaccgacaaagccacgtttgcttacctggccgatgtgttcatactgcccgaacacggcggcaaaggattatccaaatggnnnnnnnnnnnnnnnnnnnnnnnnnnnnnnnnnnnnnnnnnnnnnnnnnnnnnnnnnnnnnnnnnnnnnnnnnnnnnnnnnnnnnnnnnnnnnnnnnnnnnnncattgcccgaagaaatagtaccccgcttcatgcagaaa

SEQ ID NO: 164372 - DNA, 1268 bp, Arabidopsis thaliana landsberg
ctacaaatggctcaaggaatccgtactcacaccgcggtgcaacagaggaaaggaccaccggaaacatcaacaacaacaacaacaggaacgatttgcagagggatttcgagcttgtcaatttgcttaccggatgcttagacgcgatcagatcaagaaacatagcagcgattaaccatttcattgcaagaaccggtgatcttgcttctcctagaggaagaacaccaatgactcgcctcatagcgtactacattgaagctttggctctaagagtggcgcgtatgtggcctcacatcttccacatcgcaccccctcgtgaattcgatagaactgtcgaagatgaatcaggaaatgcattgaggttcttgaatcaagtgaccccaattccaaagttcattcatttcacagccaacgagatgttactcagagcatttgaagggaaagagagagttcacattattgacttcgacatcaagcaaggtttacagtggcctagcttcttccaaagcttagcttcgagaataaatccaccacaccatgtacgaatcactgggatcggagaatcgaaacttgagctaaacgaaaccggagatcgcctccacggatttgcagaggcgatgaatcttcaattcgagtttcatcctgtagttgatagactcgaagacgttagactatggatgcttcacgtcaaagaaggtgaatcagtagctgtaaactgtgtcatgcagatgcacaagacactctacgatggaaccggagcagcaattagggattttttgggtttaatcagaagcacaaacccaatagctctcgttcttgcggagcaagaagcagaacacaactcagagcaacttgagacacgagtttgtaactcgctaaagtactattcagctatgtttgatgcaattcacacgaatcttgctacagatagcttaatgagagtcaaagttgaggagatgttgtttgggagagagatcaggaacattgttgcgtgtgaaggaagtcatagacaagataggctcgtgggttttcgtcattggaggaggatgttggagcagttagggtttcggagtcttggagtctcggagagagaggttttgcagagtaagatgttgcttaggatgtacggatctgataatgaagggtttttcaatgtggagaggagcgatgaagacaacggcggtgaaggcggacgcggcggtggagttactttacggtggtcggagcagccactttatacgatctcggcttggactaccggagggaattaa

SEQ ID NO: 164373 - DNA, 2125 bp, Arabidopsis thaliana landsberg
atgtccactctatgtggttgttgccctcttttagaatgtgtttactgtctatgttgtgcacgttggggttataaacgttgtctttatactgctggtcacgacagtgaagattggggacttgcaacaactgatgaattcgaaccggttcctcggttttgtcgttatattttagctgtttacgaggatgatattcgaaatcctttgtgggagcctccagaaggatatgggattaaccctgattggttgcttctaaagaagacttatgaagacactcagggtcgtgctccagcttatatactgtatcttgatcatgttcatcaagatatagttgttgcaatccgggggttgaatttggctaaggagagtgattatgcaatgcttttggataataagcttggtgaaaggaagtttgatggtggttatgtgcacaacgggcttgtgaagtctgctggttatgtgttagatgaggaatgtaaagttttgaaagagttggtgaaaaagtatccgagttatactctgacttttgctggacattcacttgggtctggtgtagctacaatgttggctttgttagtggttcgacatccggaaagattggggaatattgatagaaagagagttaggtgtttcgctattgcgcctgcgaggtgtatgtcgttgaatttggctgttagatatgcagatgtgattaactctgtcatacttcaggtgtgtctaactttatgatacaagtttttggctattgtatatgtggaatctaaagtatttgtttatttctgtttgctttaggatgatttcttgcctaggacagctacacctctagaagacatattcaagtctgtattctggtaaagctatctcactaatcactgtgacacatgtctcaaagaatcatctgtgtttttggacagttatactatccagagggttcagagtatgttattttcaaaactttcagcaataacacacgacattctccggtctactaagtatagtatagtagaaaaaaatcgaaacatctgtcctttatatgttttgaatgctcttatggcacatttcacagctgttagtatacatagctttggttagttcactttgttttgtagaacaccttccataactctgcttatttgtaatgggttttgtttttttgtctgtggacagtttgccatgtttgctatgcataaggtgcatgaaggatacatgtgttccagagcaaaagatgctcaaagatcctagacggctttatgctcctggtcgcatgtatcacatcgtcgaaagaaagccttgcaggtacataacacacaaatctatagatttacacatattacttaagggaccatggttctaaagcaacccacaatctcacttagttgcaatatcaaatgtcttatgtgccattacattgaagacaaatcatagttttgctctgtgatcatcgtgtgatagagctaaatctgttgtgaagatgacgttttggtaattggttcttgcagattaggaagatatcctccggttgtgaagacagcagtgccggtagatgggagatttgagcagattgttctctcctgtaatgcaacagcggatcatgccatcatctggattgaaagggaatcacagagagctctcgatgtgagtattcaccaacctcactagacgctaaatccttaccggtaaactattacactaatttgcttctgcggatctctacagctaatgatggagaatgagaagaaaatggagatcccggagaagcaaaggatggagaggcaagaatcattagccagagagcacaacttggagtacagagcagcgttaagacgagcagtaacgttagatgtacctcacgcagagtcaatggcctctgagtacggaacattcgacaaaactcaagaagacgaaaccgaagaagaagaagtagaaacagaggaagaagaagaagacacagactcgattgcaccaatggtgggtgaatcatcatcatcatcttctgttaaaccaacttacaggataagacgaaaccgtagagttagttgggacgaactaatcgaacatctctttgaacgagacgagtctggtaacttgacattcgagaaatcagatttacctcaatgatcaagattca

SEQ ID NO: 164374 - DNA, 635 bp, Arabidopsis thaliana landsberg
tgtacatgatgattgcaaacatttttactcatattattaataatttttctcatatcttaataacactatctccttcttggttacaattttcagtttttgttaatggaaagttctgcaaggatccaaagctggtcacagcagacgacttctttttcccagggcttcaaactgcaagacccataacaagtcctgttgggtcgaccgtgacagccgtcaatgttaacaaccttcttgggttaaacactcttggaatctcccttgtccgtattgattatgcggttgacggacagaacccacctcacacccacccacgtgccacggagatcttggttgtcgaactaggaacacttctcgtagggtttgttacatcaaaccccgataatcgcctattcactaaagttctcaacgagggtgatgtatttgtgtttccagagggactcatccattttcaagcaaacattggcaaggcaccagcggttgcattcgccgctttaagcagccaaaaccctggtgtcatcactattgcaccaaccgtgtttggggctaacccagccatcaacccaaatattcttgcaaaggcgttccaggttgacccaagggttgtcatggatctacagaccaagttcaagaaataa

SEQ ID NO: 164375 - DNA, 683 bp, Arabidopsis thaliana landsberg
aataaaattgcgaattgataaatttttgggtttttcctataatagaatgaccaagcatcaatcatagaaggtaccattagctatctgaagaagctagaacaacgtcttcaatctctcgaagcccaattaaaagctactaaactcaatcaatcaccaaatatattttccgacttcttcatgttccctcaatactccactgccactgccaccgccaccgccttctcatcctcctcgagccaacaccatcacaagcgactagaggtggttgctgacgtggaggttacaatggtagaaagacatgccaacattaaagtgttaacgaagacacagccaagattgctcttcaagattatcaatgagttttactctttaggtttaagtactcttcatctcaacctcacaacttccaaagacatgtctctcttcacttttagcgtcaaggtaatctattctcttcctctcttgttttaggggaaaaagataatatatatgattatagaagttgtttagttaacgtaaatgtatatgaaatcattcaaataaggcttattgtttaaaaagtcaactatatgtatgctcaaaatgattggtttctggattaggtagaggcagattgtcaattgacgccttctggtaaagagaaaagcaaatgcggtgcatgaagtctttagaagagttcacga

SEQ ID NO: 164376 - DNA, 2165 bp, Arabidopsis thaliana landsberg
atggcgagaagcgatgttttgatttttgtttctactcttcttctgtttctgtctctgcttacggtaagcgctcgaaatagttctatcttttttctctgaaagtctcaagtcgaatggaactgggaaataaaaatcggatctttaatcattttaagtgacaccagattaaaagcgttttgggtttctacttcttggtcgagatctctctctgattttcgagattgggacaccagattttgccaaatttgagtgcttttcatattttggatatatattgcttgtagagattgaatccttagatgttggttggagttggatatactttaatgaactaacttttgggtactgatttatgtatttctatgctcaaatgccaaatcatctaaattcgtatttaaacctgcttagggacttgacaattctcatagcacaaactgttttttttatgaatgtgggttggtttcaggtagctgatgcggaattggtgaaatctgacaagtttccggtagtggtgagtacttggcctttccttgaagctgttagagctgcttggagagcagttgataatgggagctctgcagtggaagctgttgttgaaggttgttctgcttgtgaagaacttcgttgtgacggtacaggtcggctttttggtccgataatttgaatttacttctttaatgttactacttctgaaagtgagagttttctttgttggtattgatagttgggcctggaggaagtccggatgagaatggtgagaccatgattgatgctttagtcatggatggggtaacaaatcatcagtaccctccgttttataaagccccatttgcattaagatcttgaagaatgactcttcatttgggttattctaaggacattcttaggtgactatggaggttggagctgttgctgcaatgcggtatgttaaacccggtataagagctgcacatctagtgatgaaatactctcaacacacgttgcttgccggagaaggagcatcagcatttgcaatctccatgggtctccccggacccatgaacctaagctcccctgaatctgtaaagaagtggtcggactggaaagagaatcagtgtcaacccaatttcaggaagaatgtagtccccgcaaatgactgtggaccttacaagccaatcaatagtgctatgaatgtttttgtagacaaaagcactgaatcttgcgagatgggggcgattgagtataaacctcctcttgttggtcctcacaatcacgatacgatatcgatggctgtcattgacagagtaagatgggtttagttatattctctatacatttttgttgcaaggacgagagaaactgagtgtgctctttcaatagatggggcatatagctgttgggacatcgaccaatggagccacatataaaattcctggaaggtaatgccattaaaaccgagcattatctctgacctaaaccgaacctatttatctcacatgcctcctgaatcctgattgttcaaaatgtgcaaggaatatgctcaaaatggatttccatgtgttatcaatatagattacttaatccatattcatttaaagatttaaaaaactttcaaaccttgattgttaaaaacagggttggtgatgggcctatcgtcggttcatcagcctacgctgatgatgaagtaggtggatgtggtgcaactggagatggtgacaccatgatgcgcttcctcccttggtaattacccaatctccttgaacaattttgtgttctgtttctatctcaatgcattctaccgacctagacaggtctttctcagtggtcaccaatgaatcttgccttatttttgcggcgctaaaattgaatattgagcatgtaaaagtgaaagggttattatgttttatcatgtgttaaagcaaactgcttcttcttggttggggttttagttaccaagttgtggagagcatgagacaaggaatgaaaccagaagaagctgctaaagatgcaatctcgagaatcgcaaggaagtttccagattttgtgggagcagttgtggctgttgacaagaacggatctcacgcaggagcttgctatggctggacgtttcagtactcagtccaaaaccctgacatgaacgatgttcaagtctttacagttcttccatgaaacaggtaaattatatc

SEQ ID NO: 164377 - DNA, 805 bp, Arabidopsis thaliana landsberg
agaaccagcttttacgaaattcagttgatcattttccttttcattttgagatttttggtgtgagctttattttatcaatgtggaaagatttgtcgctttagaagctaaaaatataaatcatagttcttagatgtgattaatgtaggagttcatggggaagaatcttcttgcaatgaatgtcatgtggaagtacagagaacaggtaagagaatcctttgctgtatacttgatcacagaagcctaatgatatgatagttcaattgattttagtgtacttgtttggactttagataattatgatcttcgttttccatatcattcagatttggtatgagaatctttgccacatagaaagatgaagtgtatatccatattttgttggtatagttcttgcttttgcaagtcaatccttgtaagctaattcacctttatatatttcttgcttcttcttcaacgcctagaggtcttttcctctaaccgaagaagaatatatacttagacttgacgatgtagccaacatgttgaaatgctggggagcagtctcacatatccgtagcagcctagcaaagtcgaaggagcgacctcggatagggaaggtgagatcaacctaaaacagtaaccttaaaattcagacatatattagctagatcacctaggtcgattagagaccactttgatactttaacatcgttttttctagtttaaaaatcgacatggatggtttctcctcttcatgcaggctgtcagcattttcatagacatggattcgacagggggaagagcaaatgaatggatttacaagtaa

SEQ ID NO: 164378 - DNA, 328 bp, Arabidopsis thaliana landsberg
tcgtcctgtccctgggaattccgtcttcgccgctccagtatctggctgatgtcggcccgcgcaccttccaggtcgccctcggcatctcgctcctgacgtacgccgtaaatctcttcatcttcgccatggggcggctgacggatcgggcgccgcccgtgctcggggccggcgccgaggtggtctccgtcgacgatccggtgccccaggccctggtcctcaccgccctggtgatcggcatatcgtgaccgcgctcttcctcgtcgtcctgctggctgcccgcggcatcaccggcagcgaccacgtggatggtcgcgagccctcccaggcc

SEQ ID NO: 164379 - DNA, 4097 bp, Arabidopsis thaliana landsberg
atgaagcctccttctctggaagattgtcgattggacgaaagttactttgctggaggagatcacataaaggccatggtgattattgaagattcgattttgaaacaagggaagggcaatgacctcctgggtttacttcatttccagcaaggttccatctttagggcacaagcgagaagaacagagaacagttacgtcaagttcacgtttttgttaggttctgtagaatgttttgcggaaagtgaagggttctcatcgtttactgctctttcactgtttgaaatgggtcaacatcttggatcgtctatgtattacaagaaatctgttgagaaagcaaaagagtacttatctgttttggctgagttagatgaattgggtccgaaagaggtgaagagtcaaaaggatgtcgaaagaataatcgaagatgcagagtcaagaatcgctggaggtaagagtctagttgcttctcctattgtaagaagcgaaccaaaagctaaggagtcgaagaaaaatccagactcgaaattgaggtcgttttggagaggtttggatgatgagttcaaaaggaacttcctgaaaatggagattacaaagcttataagtttcgtcgaggcaatgtatgggaaagagggacgagatgctttggatcaaggttctcacttttgccagggaaaacagaaaatggagattctggatgtgtcgaacttgttcaaagaacttcttccagtcctgaggagtgtaagaatcatcttggacaagaacatgctgcagaatttaaaccgtcttcgacaaaggatatgccccagacggtaagtaaagtctggggtcgtaagatatccgttggaggttgggatccagtggatgctgcagctgccgttgagatgattaagaatcggctccaagatgtgaaagcgtttgcatatgagaatggatggtccaaagactggcctttagctatagatgaagagcgcagtaagttactcaaggaaatcaagttgctccttgtgtctctttgggaccttaaaattctttcttgtagcattcgagactggatgatgtattttccggttaagcatcttgaaaaacttgaagtctctgcacagagtcttgtcgattctcgcttagtggaaacacctcatagtatctgttttttggaatgtcaggaactcactcaaatccttgagtttctaaaccacatctaatgtaaaaggaatgatggtacagatcttgtttgcagagcagtggtcagtgtcttgggtcgtactcgagttaaagaaaagatcgactttgaccctcagttttcatttctgcttctggatagaagactgcttaaaagcaataatgctccaatcaatgatgaaggaacaatcaatgtttttgatcccagtgtctaccccaaggcaccagctcagggagatgatatcatatcctggttaactgactacaattcagtagataagacttttcccagacctatcagggaacacaatcttgatatctggttggctgttctgaaagctgttaagttcacctgtaggactgctgggaaaaaaatatgcaaagaaatatctggtcttagattatgatgcagctcttactgtcgttgagaacttgtgtatgagtgaagatgaaaggagaaagaatcttctggaagatcagtggaataaatatgcatctcttctatgcgatagctgtgaagagagagtctccgaaaattccatcactgcaaattttttcttgtgggcagtacgagatgttctccaaggagcatcgcatccgacatttgatttcctcgattcagaagattgcatgaatcttatacgtcagcgtaaaagtctcggcgatgatatagcgttgaagtccattcaccacctgaaatcagtggtcacccacaaggtttgtttgatgttaatattcattacaacataataacatagaatagcccatctaaaaatatctatatgactcgcaggttctactaatcgattctaagattttgctgattgataattcaaggattactttgctaaccaacctcaccaggctttctgcttttgacaaccgcacttatatccttcgactgctgaaacctttcttactggttggtctgaaacttcggttatatatagagagcttttgtttaccatctgatttggcctttgaattgtttcttatatgttagtatgtatcttattatctagaatgaaattgtgaatatggaatccaacgccaagtcagatatagcagcagcttatcttttactcgaggaggagaagaagtcacggtcaaagaagaaaaaaaacaataaggtctttcaacttctaaattctctatttgcttctctaactttttcggataatcggttgtaagaatgaatggtcttcatggcgtaacagaggaattcaacgagcttgtctactccccttgataagactgttgaacagtaagtacctcaatggccagtttcgcatgttataaattgttttcgcgttttctctgaccaaaacgttttcttacatgtacagtaaaccttctgtcaaccttaaaccggagagtacatcttcatcactaagaacgatcgaagaaggttctatggaaccagaagatgctcttgcaagtgagacgggtcaattgaaaatttcatccaaaactgaaattcaagtggaagctactaaagatgaccctggtagttaaaagcttctcgatttgagcaataatttgaattatattcttgtgaggttcataacttcttatttctttcattgaccattttaaagatatgcgaaacatgcctggagaagattcactgtcggaacatttggagtcagtagctggagaagctacaaccagatacaattcagcatttgacatgacgctgaaggtaaagattcaatacctaaactctcgtcttctgattagttcattccatatctctttacttcctcattctctttgattaactcacaaaaacatgttatatcgcaggccctcttgagtattaagattttcaaagaagatttgatgcagaatagtcaacaaattcaagaccagcggcaagaacaagttcctactgcactacaaaatttatttactgctgttgtttcagaagcgattcaagatgagggagtctacagttgcctcttgagtgactttctgacttcccaagaagaatttctttccatggtttgtgtgaagaaatatgcttctaagcattatattattaattgtttctgtcataagcttaattgttaatctaaaggtattctaattcttactctttgcagtcgagtgatgctgctaaggtgagttgagccatccctaagttttggtgttgctggaaaaatccagaaggagaaagcttggtaactcgactttttacgttggcggaaaatgaaagaatgagttgcagaaaatgcagatggattacaaattatccagagaaaagttcttatgccattgttatgcctgcagattcaatcagacaacttaaggtatgtttcattgatttctctctttattgttccttcagaaactggtacctcctcttataaacttgtcttacgtttaaatatatacagtgtgcttttgagagtatgaagtttgtggacattctaaaagtgatccgcatggaatatcaaaagtcatgcgacattaaaacaggaggctgtggagagtcaaactttgttcatcactttataagtagatgcccgcctgccttcacaattggtaagttttgaccaccatgattcggttcttatgtacacatttcacttataatgcttataataaaactttgtttgtgttttgtgggtttacaacattagtcttggaatgggagaagagtgaaactgagaaagaaatatctgaaacaacaaaggctttggactgggagatagatatcagcaggctatacgtaggcttagaaccaaacactaactaccgactagtttcaatggtaaaatcttaatcaggatcccaaatttttgtcctattgttcttctgtatctctctgttacagtctcaacatatgtgatgcaggttggttgtggtgaagaagaagaacacatttgtttagcttatgaaaacaaccggtgggtcaa

SEQ ID NO: 164380 - DNA, 596 bp, Arabidopsis thaliana landsberg
atggctcttctagccaatgatctcgatatgtttgggcatggatcggcgggccaagtattgggccggaccgatgtggatcgggttgagtatgtgcggatcgggctctgataccatattagagtgtgggcttccaacctaaaaccaattggcaataggtgaagaggctcatatcttatatataccacttaagatcctattcatcttccgatgtgggatattgtccctaatacgccccctcgagatgatggcgcttctagccattgatctcgatatgtttgggcatggatcggcgagccaagtattgggccggatcgatgtggatcgggttgagtatgtacggatcgagctctgatatcatatcagactgtggggcttcaacctaaaaccaattggcaattggtggagaggcccatatcttatatataccacttaagatcctactcaacttccgatgtgggacattgtccctaatacgccccctcgagatgatggctcttctagccattgatctcgatatgtttgggcatggatcggcgggccaagtattgggtcggaccgatgtggatcgtgttgagtatgtgcggatcgggctctga

SEQ ID NO: 164381 - DNA, 2148 bp, Arabidopsis thaliana landsberg
gaaatctggaagacctcaggagagaacacattgctaaaagattccgatgtctcatatctaaggatgggtgcttggtcttccaatatacatgtcctttattctttgtagcttggttggcagtgctttacagtaaagttattgaaaaggagaaacataaatctatttgcaggcacattaagggctgctgacagaaaaagatggaagaaatagggaaactaatgcccttactagaatttcaggacaatgctctggtaaccaatctaagctggactaaacagagtttactagactttattgataaacctttcaacttgacaagggaacaatcatctcttctgtgctgtgttatgatcagagtttaaaagatgaagcagagaaatccacggaacagctccaggaggttgaagctgaaataaagtctcttcggacaatgatacatagaacgattttgagtcaagaagaaatggtttgcttacaatctaaactagaattttgtgcattgacggtttaactccaccttctttgtttcatttaactatatgattgaccaaccttgcaggaggaagttgttctaaagagatgctggcttgctcgctactgggaattagctgttcaacatggtaagagaatttttctctcgtaaagatacaattgttttatcctctgttgggtattgacctgcaatgatggatatgatgaagtaacctgttcttctcatgatgatgccaagggttcaaatggttttgaagatctcataaattggtcctattatgattaaaacatgattagagcatatgcatgtttcccattcacgcagtgtacttgtccactaaaatgtatactgacatggagaacaactatgtgatccccgctagctgatcatttgcccttatttggaaatgtttacttatgcatttcattgggtcactcttaggaatatgtgaagatatatccacatcaagatatgaacattggtcagctttagctcctcttccctctgaagttgtcctttccgctgcccaaaagtctgaagattcctggcagacaggtttgatcttcaactatcctgccaatatttcccacataatcatttagtttgagtatataaaactaattggtaaaatcacatctcgcaggtggtagcgatcgcacttggagcaaagtcatcagtaatttcagtgatttgaatggagaagggaacattgagagtatgcttgctgttgaaacgggattacgagagatagcatccttgaaggtttatgcacacattttgatctgtttattactaaaaaaaactgtttcccagaaaatacacatctcattcatatcatttcttgcacctcataggttgaggatgctgtaatgcttgcactttcccggtatagacagacaaatgtggctcgacaagccgtcactggtaaaactatatctaaaactgattggcacatataaatactgatgtgatgttatacaacagacactcatctcatcttaatatccagatcccagggtgcaaggggaacctaagttctccgaaacatttggtgagtcacatccttaaactgttttcgttactatctagacagagtatcatataagtaaacaaaacctgttttcttgttcttcttcatctatattgtatttgaatcttatgactaagcaggaagggtttattctgaattttgaatgcagagttgagtcatgatgagcaacaagatattctctttaaagaggtaagttacatctttaccgggagagtttagcttttacttagcaggatcatatacattaactcaaaaaacatatatacatggtgtgtataggcatggctgctgtatttctggaaaagagctaaaattcatggcgtggaaagtgatattgcggaagagcgtcttcagttctggatcaaccgactcgggcaacattcatcttcacatgatgcaattgatggtatatttattacttgaagctaaatcagttaaagtaaagaatctgattccttttgtgtttgctgggacagtggaaagaggaatgagggagctaaggaagcttggaatagaacaacaattgtgggaaacatctcgtaaagaactcatcgactcctcttttcttccttcttattccgtttctgactacaatgacgagtga

SEQ ID NO: 164382 - DNA, 2369 bp, Arabidopsis thaliana landsberg
  unsure (1)..(2369): unsure at all n locations
tcattcactctaccatgctctttaggtccattggctttcagcagatgcctatgtgatttaggagcatcagtcagtctcatgccgctctctgtcgccaaaagattggggttcactcaatacaaagcctgcaatatatcctttagccttgctaataggtcagtaaggatccctcatggtctactcgaaaacctaccaatcaggattggagccgtagagataccaactgactttgtagtcttggaaatggatgaggagcctaaggaccctttgattgtggggagacctttcttagcaactgcaggagctatgatcgacgtcaagagagggaagcctgatgtaaaccttggcaaagactttagaatgacctttgatgtcaaagacgcgatgaagaagcctacaatagaaggcaactcttttggatcaaagaaatggatatgttggctgacgaaatgctagaagagctagnnnnnnnnnnnnnnnnnnnnnnnnntctaacaaaggatagcaaagaaggagatttacatttggagactttggtgtaccagaagcttttagatgaacacaaagcagttgagaatccaggagaatatgaagatttgggtgaaaaggcaaggggggaatatatacttgaccacatcactcgaccaacaacccatgatgtatactcgaccgaactactcgatcacaacccctcctctgaagccaacttagtatccgatgactggtttgaactcaaggcacccaaggtaaatttgaaaccgctaccaaaagggctaaggtacgtttttcttggactaaatgatacttatcctgtcatagtgaatgatgagctaactactgaacaagtaaaccagttgttaaaagagcttagaaagtatatgaaagaaattgggtattcattagctgatattaaaggaatttcacctagtttatgcactcataggatccatcttgaaaatgaatcatatactattgttgaaccatagaggagattaaatctgaatttgaaagatgtggttaaaaaggaaattcttaaattacttgacgctaacatcatctacccaatctttgatagtacttgtgtctctcatgtgcactgtgtacctaagaaagggggtatgactgtagttaaaaatgatttagatgaagtcattcccactagagctataactggacacagaatgtgctttaattagagaaaactaaatgctccaactagaaattatcatattcctttaccattcattgatcaaatgttagaaaggctagcttatcatgtttattactactgttttcttgatggctatagtggtttctttcaaattgcaatcaccctaatgatcaagaaaaaagtcactttcatctgtccctatggaacttttgcctataagagaatgccttttggtttatgtaatgctcctgggactttccagagaagcatgacttcaatattctcggattttattgaggagataatggagtattcatgatctcagtctatggatcatctttctcctcatgtttgttaaatttgtgcagggttctagaaaggtgtgagaaaaccaatttggtactcaaaggggagaagtgtcacctcatggttcatgaaggaattgtgctagggcataagatttatggtaaaggaattgaggtcgacaaggcaaaaatcgatgtcatgattcagctgcaaacccctaaaatagttaaggatatcaaaagctttctaggccacgaagggttctacaggagattcataaaagatttttcaaagattgctcgacccctcactagattgctgtgcaaggaaactgagttcaactttgatgaagattgtcttaaagctttccatttgataaaggaagcactggtgtctgcccctatcagtcaagcacccaactgggaccacccatttgaaatcatgtgtgatgcatctgattatgcagttggggctgtcttgggccaaaggattgatggcaaacttcatgttatctactatgccagcagaacaatggacgaagctcaaacaagatatgcaaccatagaaaaggagttgttagttgtggtttttatttttgagaaatttagaagctacctagtgggttctaaggtgaaggtctacatagaccatgcatcactaaggcatataaatgccgaagaagaataccaaacctaggctgttgagatggatcttattgctccaagaatttgacatggagatagttgataagaagggaattgaaaacggtgtagctgatcatctgtctaggatgagaattgaacacgaggtccctattgacgactccatgccagaagaacagctannnnnnnnnnnnnnnnnnnnnnnnnnnnnnnnnnnnnnnnnnnnnnna

SEQ ID NO: 164383 - DNA, 2408 bp, Arabidopsis thaliana landsberg
  unsure (1)..(2408): unsure at all n locations
atggcgggaatgtacagcaacgctcgcgactgccttagctggaggatgcagccaccggccacactaccgcgcggacctttctctcccccgtcggcgaacgaaaaagctccgcggaaaagagatgagtccacaagtcccagtggggggcaatccccaaatacccttcgcacaccgctacgaagatggtgggttgcgagatggagttggggctgaggttgtgcaactccaccccatagtggtgcaggatcgcccgcataaaacggcttgccggcactccgaacccccgctcgtgaaaggagacaaagctcacgacataccccgacggcggggacggggcggtccgctcgggggggccatccaatctggctgcgggtcaccggagagagggcgaannnnnnnnnnnnnnnnnnnnnnnnnnnnnnnnnnnnnnntgactgtggagaagggccacgggtcgcacggtggaacaatggtcacccggtcggccatcaccaagcagaggaggtggcggcggaaaggactgggtgggcagtttccttttctctggctattccctcaggttgcgaaaacctaagaaggaggcaaggagcggagcaaagaaccatcaccaggccctcccccgagtatataaagaccaaggcgagacccgttcaacgcgtcgcccgaacccgccgcgggattcaaagactcaaagcgaaacgaccgttcctcgaacggctcgcgcacgcgcaacggccgcctcgcgaaccgctcgccccatcgcattaactccgcggcaggacaggcggcgtctcaggcgggaggagcgcgcgacgcttcgctttcgccataataaccgcgtcagaaaaggtacgccacgtcgtccgatttcgtatccttttccgttttcctctttctctatctcttgcaacagggaccgggaaagggggataccccgaaagggatccttccccgcgaaggaaccgggctccgagccccccactactgatcaggggttcgaaggctggccccccgaagggttcaacagccgcctcagatcgcgtgggcccgacacccactactggtcaggggttcgaaggccagccccccgaagggttccatggccgcctcaggctactcgggctccgcgcccattactgatcaggggttcgaaggctggcctccgaagggttcacagtcgccccagacaccgagcgagggatgaccaggggtacgttcgatacataaccaaggctcgggttgcgctcccgaggtaccctaggacatttccgagaccagcgggaacgatcttgtaacggaatcccatcggagggaggcatcgagccctcggaccccgtcgccaggggaccgggtccggcaaatcacccgcaggtacttttgggcgtgctctgggcccctagccgacccccaacgaacggggcacggacgtccactcggattacccgcttgcagctcaccgaagacaccatgttcggtgcccatcgagggtaacatggcgctctcccccctcctccttgcggaaaggcgacgtaggggcgtatgtaaaaaagccgagtctgtccctgatcgccctctcaccctgtgcagaggctcgggggctgctctcgcaaacccggctccggccgaaccgttgacagcgtcaacataccagcccgagagcttgggccccgaccgtgcacccaggctacagccagttcgcatgagggaacgaccagaccagccgaagcattacgcgaggtattaagacctcgaaggagtgtaaccactcctccgaggcctcgggggctacacccggcgggtgcgctcgcgcgcacccaccggaacaaaatgcaaccgagaaaggctggtccccttgcaaaaaagtgcgacgaaagcctccaagctagtgctaacactcccttcgaggctcgggggctactgtcggggaccataattaggggtaccctcaagacgcctaattctcagctggtaacccccatcagcataaagctgcaaaggcctgatgggtacgattaagtcagggatcagtccacacgagtgactcgatcacgcttcacctgagcccagcctcgggcaggaacagtagacccaggtggattcacgcctcgcccgagggcctccccaagcatcgggcgcaccttcgactcacccgaggcccagctcgggcaggcttcgtggagaagcatccttggccagatcgccacgccaaccgaccgtatcacaggagcattcaatgcaaggatcgcctgacaccttatcctgacgcgcgctcctcagtcgacagggccgaagtgaccgcagtcatttcaccccttcactgactgacctgacaagaaaacagcgccgcctgcactgctccgactgctgtgccacccgccagggtgaggctgaaagcagccacgccccgc

SEQ ID NO: 164384 - DNA, 5320 bp, Arabidopsis thaliana landsberg
  unsure (1)..(5320): unsure at all n locations
gagaggagtgttacaaaaatgatcgtgaaggatacaccagttccaacggtcttgtatgaccgagatgccccaccatatttcgacgatccaggagaagaaggtaaagaaaaaatatattaacaatatgataataattgttttagatcgatactttatattttagatatatctgatataaatcatgttagcaacgtagcgacaatatcaaaatattaaagtaattactacattgtatcttaatatcttcatcagttgctttgttctctggttaccggatgctctctaacgagccttgaaagatgctgattacgaaggggatgaaatttacataggacaagtttttaaaaacaaagaggattgtgcaacaaaactagccattcatgcgattcgccggaagttctatttcatttacgtgaaatccggtcctaacattgtggcggctgtctgcattagccatacatgtccgtggagggcttacgcaactaagctgcccgatagcgataggttcgaggttaggaccacaacttcaacccacatatgtagcgtggatgcgagaggggacttccacaagcaagcgtcaacggctgtgattggaaagttgatacgaacgaaatacataggagtatgccggggacctcgacctaatgagcttagacggatgttgcgccaggaattcagcctcaacgtctcgtactggaaagcatggcgagcaagagaaatagcaatggacaatgcaatggggtttgctatggggagttacgctctaatccaaccgtacttcaagctacttttagaaacgaatccaaactcgcttgtggcaatggagactgaaaaagatacgtcaggtgtcgagagattcaagtacttgttctttgcgctccatgtgtgtgttttgggttaccctttcatgacgaaagtcatagttatagacggaacaaacctaaggaggcgatatggggcatgcttaattgtagctagtgcacaagacgcaaatttccaagtgttttccattacatttgggatagtaatcagcgagaacaatgaggcgtggacttggttcatgactaagctgacaaaagctataccagatgatcccgaattggtgtttgtgtctaataggcattcctcaatttatgccagtatctgcaaggtattgggttatcataaatcttatcagttacgttttacattagatgtatgcgtttttttgttagactaagccttttataactcttgcaggtttacccaatgtcatctcatgctgcttgcatcgtccacctaaaaagaaacattgaagcttactttaaatcttatcaattaggcgccttggtatcgagtgcagttacggcttatcggctaatcgacttcaacaagatttttgctgaaattaaggctaaacatgggtcgtgcactgattacttggctagtattgggttcgaacattggacgaggtctcatttcgtgggcaataggtacaacgtcatgacaaataatattgttgagtctctaaataatgtgttaactgcagcacgcgattatccggtaatctcgatattagagtcgattcgaacaactctcataccatggtttgcgtttcggaggcaagctgcccagtttgaagacaatatcttgcagccaaaggtacacgacatggtaatcaaaaattaaaagaggggagcaggatgtgctgtgataaagattggggatgggatctatgaggttagagaaacgagaggcgcgtcgtttgcggttaatctatgggagagaacatgtacatgcagggagtttcagctgctaacgatcccttgctctcaccccatagcttgcaacaatacagaaaggtctacgggtggacacaatggttgagatccatcacacaacccctcaactccgtttgtcttaccaagcactaattatgccggtgccggacacggagatgcttactccatcaccaaacaatgtaggtgggggaaactggctccaccgtatgttcggagaccgccgggaataccaaggaagcgaagattgttctctagaggagagttcaaggtaacaacgatttaaattagttaacactaaaaaatctctcattatctacacctcttgatgtgataaatttctattacattcatagagaacgtcaaggaaaagatgttcaaggtgcaagtcgttaggtcataacagggcaacctgcaatagaccaataacgataaaaaatatcgtaacaattactttatcggatatgtaacagggcaacctgcaatgtaccgtgttaacaaatacgttatcggatgtaatgccgctgttaatactttaggaaccatagaggacagggagaaacacgttttttggcgctgagagttgtgggatggatgttgccaagattaacannnnnnnnnnnnnnnnnntgaaataaataaggcaccaaaaggaaacaaagaaattttcattgtatatacgtacgacatctgttcccaaatgtaaaattatcggaacccatccaacttttatgaagaaatgttagatataatggcgatgtgttgaggatatttttttttgtgtaactagaagttaatctattacttctagctggtaaggctaatatcacgatgtcaaaaatatcggcacacaatgaaacacaaccttttgctaactcgcgatattaacgttagcagatagacacgagttgtctaccccatttaatcagaaaacaaatatgcttcgttggtaaatttgtcgctaactaatagcggataacagacgttcccaattacagctttgtcacgttatctgattgtcctcaaatcgagtaacataaacaagtgaatcgctttagtaagatgaaacgggataatcatacatttgataacgcgatatctgattgtcttaaaatatcgtgatatgagcctaactgataccattaatatcgcgatgtcgtgatatttgattgtcctcaaaccggggttccttcatttatggacataaacccgaagcagataatgaacccgtccacctctaccaaataaaccaatactgttttacaaaaaatccgaccaatgtcgctaatatcccaaagaagtaatcctctaaaacccccaaattgaaaactaaagaaccctaaaatcggatccaacgatcttcgatcttcgcattaaggatgagcaatcaatcaacaagttcgtttggatctacgggacctcggggtagagggaaagttgttggggtgccaaaaagatgttggtgcggggaaggagtcgtggcactcatttcaaaatcggatttgaatccttgccggagatactatcgttgtggtttcgctgcaaaacatagggtaatgttactcatcaagttcatctatatcttcgattttttcaatcttcatgtttagcttgttcttaattatgaagattaatgttcatatgtagctaaggaacgatgaacacacttttaaatgggttgatgaagctttgctcaatgagatagacactacaagaaatatccacattgatagcatgtgaggattgttcattttctataactgctatgaaaaataatatttttttatttttaatattatagcactgaaaaaatgctataaaaaagaattgtctaattgaaagctaaaatcacttattccgccaatacttagtgaaatttttactaaagcgccataaatttcagatctaaaattttaagcttcacattcgagaaatcatctcataactccccttatgcaatcaacaagtctctcaactccccttattgtctctatatccctttctcttttaatgagatgtgtagagactaaattacccctcctccttctttttaaaatatctattataaaactaaataatttttaaaaaaaaatatattaaaaaaaaaaaaaaacagaaaacgatactctctctcctctcctctctctctcctctcctctcctctctctctctcgagctcactcatcgctctcttgctcactcatcgctctctcgctcaccattgttgccatatccttatcttcggcgagcttcgtcgtcatagaaagaaaaggtaagtttctcgagctgaatgaagcttacaattgaagattagaactaagagattttgtcaattagatttgagattaagcaaattgtgtttgggtatgcacattagaagtttatgcatactttctgggttgaatagatttttaaatgggtaagaaatggtttccaacaactgaatcatagtgaatttcagttttgaacccgaatccattcgatttgagctcttgtcaggaaatacatctggtagaactgcgtagaactgcacatgattcaattgaaaaatatgtgtagtatgacttagttgcactagtattaaccatttacatgtagtatttatttgggtttagtagtattacccattttcatgtagtatttagttggtacaagagttttacccattttcatgtagtattattagttatacctgtattatacaataggtgtagtatgactagttatacttgtgttacccagaattgtagtataactagtatatctgacagagtttttgtattgttgttgtaggatacaatggtggagaaggtgatcatatattttagatggaaagatcgagcgtacagcttgatgatgaatgggaaaataactctctccatgttagaaagtaggatttgctcgaagcttggattagatgaaagtaaggttaagttgcaaatgaagtacaatgcagtgattgatatgtttataatttgcatgttttacacaaacttttatcaccattttgagtctactttcatccatctttcatagcattcaccatcatttttgtacattttgcatctttagtcgagtctaggactagtcttgcatacattctgcattttggagttgtttcaggtgttttggagctattggtgctcagaaagagggaaaacagaacagaaagtcacacttccaccaaacatactcgatcaccagtagtagagagggaagcagtcagctcagcagtccatctagacacttctactcgatcatagacgagaccaggcagtccattctgccagatatactcgaccatagaggagaggaggcagtccattctgcaattctactctatcgtagaggcgaccaggcagtccactttgccagtccaccagttatactcgatcgcagaggagaagaaccagtacatcctgacagttgacacacttactcgatcacagaggccaagaagcagcccagatcattctgtcaaccaatctactcgaccaccacctcgaccctctaatcaatccgcactcaaccagacaacctga

SEQ ID NO: 164385 - DNA, 1231 bp, Arabidopsis thaliana landsberg
  unsure (1)..(1231): unsure at all n locations
caatctatttctttttctaatttagaaaaaagtattatcaaaggttcaaaccggttttggttaagaacacaaaaggaatgatgataaacttaaattttcctaattacatcaaagtagctgatttgggatgtgctactggagaaaacacgttcttgacgatggctgagatnnnnnnnnnnnnnnnnnnnnnnnnnnnnnnntgtaaccaaaagccaccagaaattgattgctgtctgaatgatcttccggataacgatttcaacacgacattcaagttcgtacctttcttcaaaagattgtgcttcgtgtctggagtccccggttcattctactcgaggctctttcctcgcaaaagtctccattttgtacattcatcttatagcctccattggctctctaaggtctcacctacttacttgcctagtacttgcttaaatatgtagaaagcaaattaaaggttatatataatatataatggaactgtgagatttgtaggttcccaaaggactggagaagaattcctcgtctgtgtacataacgacttcaagtcctccaaatgcatacaaggcttatttaaatcaattccaaagtgactttaagtcatttctagaaatgcgttctgaggagatggtttctaatggacgcatggttctcactttcatcggtagaaagactctcgatgatccattgcatagagattgttgtcacttttggacactattatctacatctctacgcgacctagtctatgaggtaacatataaaagtaccaaatttcgacatttaaaaatttatcggctttaaagattcaaactttttttttggtcaaacaagaaaagattcaaactttttatgatccacaatatagggtcttgtgagtgcgtcaaaggtggactctttcaacataccgttttatgatccgagcaaagaagaagtgatggagatgattcgaaacgaaggctcattcgagatcaatgacttggagattcatggatttgagcttggcctaagcaaccatgacgaggactacatgttacattcacaaatatctaaagcagggcagagggaagccaactgtataagagcggtcagcgaatcaatgcttgtagctgacttcggagtagacattatggacacattgtttaagaaatttgcataccatgtgtcacaacatgctagaagcacgaacaaaacgactgttactctagtcgtttctttgatacgaaagtaa

SEQ ID NO: 164386 - DNA, 1537 bp, Arabidopsis thaliana landsberg
atggcgccgaagaaagcttcagcgactgggactgcaactctgcaaccgctggaccacaatcaggagacagtctcccttcgggaggcccgaagccagaaaaggaaggttgtcagcccgacaccaccagaggacgagatagatcaagaaatcagagacatggagatacttcatcaacaggtgcagaggaagaaggaaaagatggtctggctagctgacttacaaaggcagatagacgaagcctctgaagaagttcgtcatcttacgcaagatgagcagaaccggagccccagtatagagagcttcaccaagagggcttcgtcaacgaggatgactggtatgaggatttccatcatggaaattttgcttttgatgatgcttctcctctgtcagcagaactgcaggctacaccttggcccccgtcttacaaaccaccccagctcccaatgtatgacggacacttagatccgaagcaatttctgatgaactacgaagcaaccatatcttcatatggtggcaatactgcagtcatggcaaagtcctttgtcatggccgtcaagagtgttgctcaaacctggtactcctctcttcggccagggacaatcacctcatggcagaaactgaaggatatgttgatacccagcttccaagggtttcagacgaagcacgttactgctcaagcagatattccagtgtactcaggacgacgaagagtacctttaggcgtatgtccgaatgtttctgcgtctgagggcacaggcgccaacagtgcccaatgaaattgtcattgaggccatgattaagggacttcggccgggaccttcagcgcaatactttgccaggaagccaccacaaactttggagaagctgctccagaagatggactagtatatccgagctaacaatgacttccgccaaagaagggaggaggcattcaggttctctgaaatgaccaggggcttcggaggaagatttcatccgaggcacgtcaggtcaattcacaactccacccaaagtgatgatagagggagccaacagtaaaggccacaatactcttcgcaagcttcggggcagcagcaaagctcttttcggccgccagcgccaaggggcagaggcgccaggggcttcgggggaagatttggggatcaaccaagaaaaatttactgtctattctatggtgaagacaagggccataccaccaggatgtgtcatgttaccatccagaagcaaaaggagatagcagaagctgcagcacaacagagtcagccgaagcaggtcatgcattctgcttcgtaccattcgccttacattccagaatatgtaggcaatcactctgcagcttctgttgcttcagcaagccaaccccaagcatcttggcaacaacctccaccgccaccaccaacacaacgaggtcagcagccagaagggagtcaacacactcaccttcagcgggactttagagaggagtccgaagctcgcacagtcaatagcactgtgccagagtcaaagcacatttactgacaaatatcctacttcctaa

SEQ ID NO: 164387 - DNA, 1990 bp, Arabidopsis thaliana landsberg
atggccgcagcaaggcacctcgcccgcaaggaagggagaaatgcgaatacaaccatctacggactctgctctgtgtattacttgatagatagttggtcattggcctattaccggacgttgtatgtagtcccacatgagtcggtttgggttcttcctgcccatattaaagagttagttgcctttccgccggaatacacaccaaaaggaccaggacgaaatcaagagaagcggtttccatcagctggtgaagcgcgaaagaggagaaaatcgcaacctggaataaacttggaagcttggctgcagcctgaggaagattaagtctgatgcagaaagggttcaaccggaacaacctggccaactgcagaaaggattcaaccaatacaactgtgttcatttgtatttgtattatattatttgtaagtgtgatgtactattttaaatttcgacaactgttttatgttttcgtatttgtattgaatatgtgcaagtttattgaattctttgcaagtttattgaattctttgcaagtttaatgtattcttttaagttcaactgagacaactgatatatgtatctgtattttagggttaacaaaatgataaaataattctcaatattttcagctattatcaacatctaaacattgaataaatccaaaatatgatattacaacattgttattactaaacttgatcataaactggtttcctaataaatcacctatgtataacaaggaacatatagttcatgattgtccaatgtacatacgttatgtatgaaaacagatatttactaaatatgattctatcaaaacttattaaaatccattaatatgttaaaatttatgggaccaactaaaaaaatgagttggtttttcatattcagcttcaaaaacacaaaatttagaatagttcaactgtttgtgagtccggccaactgtacatatacatacaactatgtatattctgaatattctaataaataatattttttaaaaatagaccccatgacttgcgttcacactacgattattgcgttcacactacgattattgcgttcacactacatagtttctccctatttattcgggatctcatctctctttctctctctctcttctatttcactcttctctcactttcttcctttctctctctctctctcgttcttctctctttctcaacatcgccgacgacaacaactgaaattagggttcccagccgccgccgatgacaacaactaacaaggtatgatatagggtttctatagggtttctcgccaccgtaacttcaaagtagatctagggtttccttccgtcgtaatttcaaagtagatctagggtttctagccgccgtaatttcaaagtagatctggagtttctagacgtcgtaatttcggtgtaacatatgtctatctttctctattctgtagatgccctatagttactctcaaccatccacatccaaagctagttggaatagtggagaggcgaatgccgatgcaaattggggtgttccagtcaaatgtttttgtggtaagcctgcaaaacttgaagtgtgcaaaactggttacaggcaaggcgacagagtgtacaaatgctcaatgcttaaaataagttattgtgtttcatttcattggaacaacaaagtacaagtgcctatatttatgaagtcttctctctttcgcaggatgaagagtacgagtcccgaaaccaccttattcagtggtgggatcaggcggtaactgaggagcttgagaaggtaaatcactcacattgttccgcactaagacatggacaactagcatgtaatcatgctttggagtccgtccgggaaattgttcgtcttatgcaaggcgaaattcatacccttacagaaaggttactcgccaaagaagtcgagattgataggcttagagcattactttctacatggtaatcatatgatgtgatttatgttattgaggatgatctatggcattatgttatgtt

SEQ ID NO: 164388 - DNA, 2408 bp, Arabidopsis thaliana landsberg
acaccagtaccatcagtgttgtatgacaaggacgccccaccatatttcgacgatccgggagaagaaggtaaaacatgttaggatctaattcaaagtttagaaactaaattttagtgtagcatgtgtttttctggtatacttatggatatattattgttatgaatcttgtagctatcatgtagctactattctatttcgctagtaaaaggttaacatgtaacaaaaactttatctaacaaatggtacacctattgcagattacttgcagcgagccctgaaagatgccgactacgaaggagatgatctattcattggcagattgttaaaaaataaagaagattgtgcgactaaactgacaatccatgcaatacggagaaagtttcatttcatttacgccaaatcttgcccaaatattctcctggccgtgtgcgtcagccatactttcccatggcgtgtttatgcaccaaaactggagaacagtgagcgttttgaggcaaaatgtgcaacccaacaacacacttgtagtgtagacgccaagggagactttcacaagcaggcgtctatagctgtgattgggaaattaaggagaacaaagtacttgggagttggtaggggccaaggccaaatgagttgaggaagataatccgtaatgaattcagccttaacgtgttgtactggaaggcatggagggctcgtgagatagcaatggataacgctatgggatcggcgatgggaagctacgcattgattcatccgtatttcaaactcctactagaaaccaatcctaactcattagtcgccctagacacggagaaggacaacaagggtgtggagcgttttaagtatctattttcgctctagctgctgcagtccagggatatgcctatatgcgaaaggtcataatcattgatgggactcatttgagaggccgatacggaggctgtctaatagctgtgagcgctcaagatgccaattttcaagtgttccccattgcttttgggatagtgaacagcgagaatgatgatgtgtggacatggtttatggagaggctaacagacacaatatcagatgatccggatttggtcttcgtttcggacaggcacttgtcaatatatgcaagcatacgcaaggtaacttatttactgataacggataatattaatattacagcgatatgaatatagttatttttataggaatctataaccccactattatgcagtatttatcaatcgttaacaatagggttaaatgatatataaattttactgttacctgttaactaaggagttatccatacttaaaagtctgtggaatttccctagtcatattgatagtgtgatcttacaggataacttatattttattttgacaacggttgtaaatagtgtcgttaaaataacgcagcagtgttagctgagacgttttctattagttgctaacagaatattcgaacgtcagtttctttatagtttgtgttttatccatggagtatgttttatcaataacactgatacattggctctaatttctaggtttatccgatgtcatcgcacgcggcatgcgtggtgcatctaaaaagaaacattgtctcgatattcaagtcggaagggttgagctttctcgtggctagtgcggcccgagcttaccgtccaagcgacttcaatcgcatcttcgtcgaggtaagggctatgcacccagcttgtgctgattacctcgaaggcattggttttgagcattggacgcggtcgcattttgtgggagataggtatttttttcatgacaagcaacatagctgagtcgctaaacaatgtcttaaccatggcaagggattatccggtaatctctctcttagagaccctgcgaaccacactggttacgtggtttgccctacggcaagaagctgcacaacacgagggaaatcttttgccccccaaggtcaatgagatggtcattgaaaatttggaaaaaggggcagggtttgttgtgcttaaaataggagatgcattttatgaggtgcgagacaaggaagattcggcgttcgcggttaacctttgggaaaggtcatgcacatgcagggaattccaactactaactattccttgttcccatgccatagcagcgacaataaaagaagggatccgtgtcgaaacaatggtcggcgtccaccacaccatcccatatctgaaattagcgtacaaggggatgatcatgcccgtcccggacatggatacactggcaccttccctagtgatgtcggaggcggaaagttgcgccaccttacgttcgtaggccaccgggaaggccgcgtaagaggagactattctctaggggagagtttaaggtaacattgttagtaacggatatataaacagatagatatatcgctaatgtgtgtgttatttatc

SEQ ID NO: 164389 - DNA, 4484 bp, Arabidopsis thaliana landsberg
acacaatgcaggacttctcgtccatgttaccgatgaaagtttttggatacctaagagaatatcaggtccccttgggggtggtcaaattgcttccgtatcctggggaccatggcacaccgctttgataacgtcaactggacagctttttacttttggagaatgggacgttttggtgttttagggcatggtgacaaggaaactgtattttacccgagagaagttgaatctttatctggtttgaggaccattgctgttgcatgcggtgtatggcatgctgctgcaatagtagaagtcattgtcactcactcaagttcaagtgtttcatcaggaaagctgctcacatggggtgatggtgacaagagccgtcttggtcatggagataaagagcctcggcttaaaccaacatgtgtatcagctctaattgaccatacttttcacagagttgcatgtggacatagtttaacagttggtttgacaacatcgggaaaagtttacacaatgggtagtacagtatatggtcaactagggaatcccaatgctgatgggaaacttccttgcttagtagaggataaactaacaaaggattgtgttgaagaaatagcatgtggagcttatcatgtagcagttttaacatctcgaaatgaagtgtttacatggggcaagggtgccaatgggagattaggtcatggagatgttgaggaccgtaaggcaccaactcttgttgatgctttgaaagagagacatgtaaaaaatattgcatgcggttcaaacttcacagcagcaatatgtcttcataaatgggtttctggtacggagcaatctcaatgttcagcttgtagacaggctttcggattcacacgaaaaagacacaattgttacaactgtggacttgtccactgccattcatgcagttcaaagaaatcactgaaagctgctttggcccctaatccaggcaagccttaccgtgtctgcgattcatgtcactctaaactaagtaaagtgtcagaagctaatattgatagcaggaagaatgttatgccacgactttccggtgagaacaaggacagattggataaaactgagataagattggctaaatcaggaataccgtcaaatatagatttgatcaagcagttggataacagggcagctagacaaggaaagaaggcagacacattctctcttgtccgtacttcccaaacacctttaacacaacttaaagatgctttgactaatgtggctgacttacgccgtgggccaccaaaaccagcagtaactccgtctagctccagacctgtgtcacctttctcaaggagatctagtcctcctcgttcagtcactcccattcctttaaacgttggtcttggtttttcaacaagtatagctgagagtttgaagaagacaaatgagcttctgaatcaggaagtagtcagattgcgcgcccaggtaaactcggcggttactctaacgtttcctcaattcattcatctgaatttgtttccacacattctcgtggtttgttttctaaaatgaatctgtgatattgtgttcaggccgagagtctgaggcaccgatgcgaggtccaagaattcgaagtccagaaatctgtgaaaaaagtacaagaagcaatgagcctggcagcagaggaatctaccaaatcagaagccgcaaaagaagttataaaatctctaacagcacaggtttagacttgattctcttatatatctctcctaagcaccctgttgtattcgacagagacaagtctcggtgtgatctatccattcttgaaatatgattccctcttaagttttcttatttcttccctaaatatttctatttggtctttccaggtcaaggatatagctgcgctgctaccaccgggtgcttacgaagctgagaccacacggacagcgaatttattgaacgggtttgagcaaaacggatttcactttacgaatgcaaatggacaacgtcaatcaagatctgattcaataagcgacacctcacttgcttctcctttggctatgcccgctcgttcaatgaacggactttggcggaattcgcagtcgccaagaaacacagatgcaagcatgggcgaacttctaagtgagggggtccgaatcagtaatggtttctcagaagatggacgaaactcaagaagctcagcagcatcagcttcaaatgcttctcaagtggaggcagagtggattgaacaatatgaacctggtgtttatataacacttttggctctaggcgatggaactagagatctcaaacgtgtgcgctttaggtaacgttgtcgaatctatctacttcttatccttttacattctagacatgtaaactaatacaaacgtttggttgtttttgtagccggcgacgattcagggagcaacaagcagaaacatggtggtcagagaatcgcgaaagagtatacgagaagtacaacattcgcggtaccgatagatcaagtgtggcaacatcacctatatctcaatcacaattctagacatgaaccgaaaacaacgacgaaagcaaaaagcataggaagcagttagccttattttgatgaatgtagagcttcattctccggcattgcactgtatatagcgaatctctcgccttatttgcaaatagtttgtcatgaatttcatgattgtttaaactaattgatttaaatctgatgataactattttaatatgaaaatggttagccaacttcatgccgtttagtttttttttctttactacactgcggtcagcttctgtttctctgagtatcatcatttcctctacgatcgatctctgaaccgaaccgaaccaaattattggtttggtatattcggtaacctttccccttaatcaaaattacccgaagaaccgactaccccgacctgaaccgaacactgcggttcaaagtcccaggcaataaataaccgagcggtcaaaagtaaaaagctaaacggcaagttttatattcacttcggttaaccataaccgaatcaaaccgagattataaaccgaagacccagggcttgcaattgcatggttctctgtcatcaacttcatgccgtttagctttttacttactacactgcgaataacgagttttgttctccgtcttcaacttcatgccgtttagtattttccttactacactgcgccatgttctttttttttaagtatcagtctgtcatcatctttatgtttggttctccttcctcaagcttccacccaaatcaaccatggaagctagactctccgaaactcttggcctcccatctccaaatcttaatcactgccattttcccaacgagttcaattctctcttcactcatttctccgatctcacctccgtccaaagccctatcgtcagaaaccctaaactcaaaaccaaatcctctcaaaaacccccaaaattttcagcaaatttcagaagatccgacccaccatttgcatcaacatcaatctcggatccaacccacgaaaaacccggacccgaattcctgaaatggatcaaacccgcatcacgaagcagtccaagaattcaaacactcatcaaacaactctccgtctgggaacgtgccatcatcggtgcaggagccggtggactcgccggagctttcacatacgttactcttctcccacttgacgcaatcaaaaccaagcttcaaaccaaaggcgcttctcaggtttatagtaacacatttgatgctatagtgaaaacctttcaagctaaaggtatattaggtttctatagtggtgtctccgccgtgattgttggctctacgttttcctccgccgtgtatttcggtacttgtgagtttggtaagtctctgctctctaagttccctgattttccgacggttttaatcccgcctactgctggtgctatgggaaacataatctcttcagctataatggttcctaaagagctcattacacagagaatgcaagctggagctagtgggagatcttatcaagttttacttaagatacttgagaaagatggaatcttggggctttacgccggttattcggctacattgttgaggaatttacccgctggtgtactcagttattcgtcgtttgagtatctgaaagccgcggttttggagaaaacgaagcagagccatcttgagcctttgcagagtgtttgttgcggtgcgttggctggtgcgatatcggcttcgataactacgccgttagatgttgtgaagactaggctgatgacacagattcatgtggaggctgtggataaactcggtggtgctatgtatactggtgttgctgggacagtgaagcagatattgacagaggaaggttgggttggttttacccgcggcatgggacctcgagttgttcacagcgcttgtttctctgcgatcggttattttgcctttgagactgctaggcttacaatcttgaatgaatatttgaaaaggaaagaagagtctgaagctaacgttgctgctgattcttga

SEQ ID NO: 164390 - DNA, 1684 bp, Arabidopsis thaliana landsberg
cctcttatgtctcttgtcattcctgtgttactctcttttcttcataaaacctaaagattcacgagatggccgtgaccttcctccgagccctccttcgcttccaatcatcggtcatcttcacctaattcttctgtctactttaacccacaagtcttttcagagactctcatcaaagtatggacctcttctccatctccgcatcttccacgtacctatagtcctcgcctcctcggcctcagtggcctacgatatcttcagggaccaagacgtgaatgtatcatttcggcattcgcctccgattgaggagtctctctttttggggtcgtatagcttcattagcgctccatatggagattactggaaattcatgaggaagctcatggttaccaagattcttggaccgcaggcactcgagcggtcacgaagattccgtgaagatgagcttgataggttttataaaactctgctcgacaaggcgatgaagaaggagagtgttgagattgttgaggaagcagcgaagctcaataacaacaccatctgcaagatgatcatggggaggagttgttctgaggagaccggtgaggcggagagaatcagaggcttggtgactgaatcaatggctttgacaaagaaaattttcttggcgaccatctttcacaaaccgcttaagaagctcgggatctcacttttcaaaaaggagataatgagtgtttcccgcaagttcgatgagctactagagaagattcttgtggaacacgaagagaaaatggaggagcatcatcaaggtactgatatgatggatgtgttgttggaagcttatcgagacgaaaacgctgagtataaaatcacaagaaaccatatcaagtccttgttcgtggaaacgcccttactaagaaacatatgtgttgtgaaatcgtggaataaaccttaagacgtaaacctttgtattaagcgtgttagtaatacaaaggcccgaaaacctccgatactctttagatatggaaaatactctaataacagtttgctactacaggaacttctcgttgcaggcactgacacctcggcgctagcaacacagtggacaatggcggagctcattaataaccctaccattcttgagagattgcgagaagaaatcgaatcggttgtagggaatacaaggttaattcaagaaactgatctatcaaacctcccttacttgcaatcggtagtcaaagaagggctaagattgcatccgccggcgtctatctcggtaaggatgtcccaagaaaggtgtgaactcggagggttctacataccggagaagacattacttgttgttaatacttatgctataatgagagatcctaatttctgggaagatcccgaggagtttaaacctgagaggtttataacatcttcaagatcagagcaagaggacgagataagagaggaagtcctaaaatacattcctttctcagccggaaggagaggctgtcctggatcgaatctagcttatgtctctctaggaaccgcgattggagtgatggcgcaatgctttgattggagaatcaaaggagagaaagtaaacatgaacgaggctgctggaacattggtgttgactatggctcagcctcttatgtgcactcctggtcctcgaaccctaaaccctttaccttcaagtctgcatgtacccatttcttga

SEQ ID NO: 164391 - DNA, 4248 bp, Arabidopsis thaliana landsberg
gcttgatggatacgaccttgctggttacatcgacggatttgtcacagcaccctctgaaacaatcaccactgccggtgttctcactgccaattccgcttacaagttttggaagcgccaagacaagctgatttacagtgccattcttggcacaatcacgatcaccattcaacctcttctgtcacgatccaacactgccgctgagatctgggagaaactcaaggccacttatgctacaccaagctggggtcacatccagcaagtgcgccaacacatcaaacaatggagcaagggcaccaaaaccatcaccgagtacttccaaggccacaccactcgttttgatgaactcgctcttctcggaaagcctcttgaacatgaagagcaaatcgagttcctccttggtggtctcacggaagactacaaatctgtggtcgatcaaacagagaatcgtgacaagcctccaaccctcaccgaacttcttgagaagcttctcaaccgtgaagccaagttgatgtgtgctgctgccacaacgtcttcacttccggtcactgctaatgctgcaaactacaaagggaacaacaacaacaacaaccaatacaacaacaacaacaacaatcgcaacaacaaaactcaaggccgtaacaacaacaactggcaacaaaaccaatctcaacagaggcagaaccaatacacacagaagccgtatcaaggacgttgccaaatctgtagcatccacggccacagtgcacgtcgttgccctcagcttcaaggcggctcctacaactcgcagcaatcaacaccagtctcaccatttacgccgtggcagccacgagcaaatgctgttatggcgtcgccatacaatgctaacaattggttactcgatagtggtgcgactcatcacatcacttctgatttaaccaatctatctctccatcaaccttacacgggaggtgaagatgtcactattgctgacggttcgggtttgtcaatttctcatactggttcagctttactttcaacaccattacgctctcttgccttgactgatgttttatatgtgcctaatatccacaaaaaccttatctcggtttaccgcatgtgtaacgctaacaaggtgtccgtggaattctttcctgctcattttcaggtgaaggatctcaaaacaggggtccagttactccaagcaaacttaagaatgagctatatgagtggccggttaatcatcacgccatcaccgctttctcggcatcaccatcaccaaaaacagacctctcatcttggcattatagacttgggcatcctactttatctactctcaaaaccattgtttctcagttttctttacctctttcaaattcgtttcacaaacaattgtcatgttccgattgtttgatcaataagagtcacaaattgccttttcacttaaacacaatcacttccactcaacctcttgaatatctctacataaacgtgtggacgtctccggttacgtctattgatcatttcaaatattatttggtgattgttgatcatttcacgagatatacatggttgtatccattgaaacaaaaatctcaagtcaaagaggtgtttatagcgttcaaggcacttgtggaaaaccggttccagacccgcgtgcgcatcttatactctgacaatggtggcgaatttattgcattgcggtcttatttggcggtacatggcatctctcatctcaccacaccaccacatacaccggaacataatggtattgctgagaggaagcatcgtcatatcgttgagacgggactcactctccttactcatgcctctgtaccaaagtcatattggccatatgcgttcgctactgcggtgtatttaatcaatcgaatgccaaccgaggtcataaccggggtgtctccttatgtcaaactatttaagcaatctccaaattacttgaagcttcgggtttttggatgtgtatgttttccatggctgcgaccgtaccgggctaacaagttgcaagagcgatccacgccgtgtgtgttcgtcgggtattcactaacgcaaagtgcctacttgtgcttggaaatacagagtggtcggctctacacttctagacatgtgcaatttattgaaacgagttttccttttagctcgccggtgttgccgtcatccaccgttgttgctgaatcgccaatctcgcctggtcaacctccggtgacattcgtgcccactcaaatagctcattcttctctgcctccgtgctcggttcttcaccctccgtcgccagctcaaccatcatcagtgtcacccaataacgcatcaccgtcgttgtcgccaatcactccgtcgtcatcaccacacagctcgtcgtcgacgtctccacctgcgccacaattctcatctcctccaaattcagaacgggcctcattcaacaagggcccaacaacatcaactccaagcccaaacaaaagcccaagtcaaccttcctctacaaaccaaagcccaatccacacaagcccaaatccaaatatcacaccaactcaaacacgttcctcctcacacaacgacacgtcctcatcacaaactacaacctccggtgaatcacctcctccaccaatcattccaaacttacctccaccattacaaaatgaccatcccatgagaacaagagctaaaaaccaaatcacaaaacccaaaaccaaattgagtctaattgccacaactaaaccaatcattccaaccactgtggcgcaggcaatgaaggatccgcgatggcgaaatgcaatggctgaggaaataaatgcccaaatccaaaatcacacatgggatttagttccaccggctgctactcaaaacattattacatgtaagtggatttttacagtaaaatatcgtcctgatggttcaattgaaaggtacaaggctagactcgtcgctcgcggattcaaccaacaatatggtctagattactcggagacgtttagcccagttatcaaatccacaacagttcgtatggttctggaagtagcggttaagaaaaactggaatattcatcaagtcgacatcaacaatgcttttttacaaggcacactaacggatgaggtttatgtttcacaacctccgggatttgtagatcgtgatcgtcctcatcatgtgtgtagactgcggaaagagttatatgggttgaaacaggcacctcgggcgtggtatcaggaacttcgtaatttccttgttcaatccggatttcagaattctcttgctgatacatcgttgtttatatacaagagcgctaatgcatttctttatgtgttagtctacgttgatgatatcataatcaccggtgatgcgtccttgataaagggattcaatgcttctcttgcagctcggttctctctcaaagaccttggcgaattgagttatttcctcggtatcgaagcaacacgcacaaagagagggttacacttgatgcaacgcaaatatatcatggatcttctcgccaagacgcacatgctcgatgctaagccaatttccacaccaatggctgcgacacccaagctttctctattctccgggacggctcttccggatgctaaagaatacagaatggtcattggcagtcttcagtatttatcttttactcggccggatattgcatttgcggtgaatcgtttgtctcaattcatgcacaaaccaacagatgaacattggcgcgctgctaagagagtattgcgatatcttcttggcacaacatcacatggtatctttcttcgggccgatgttccacttactgttcatgctttttcggatgcggattgggccggtgacataggtgattgcttatcgacgaatgcctatattgtttactttggtggcagcccgatatcttggacatccaaaaagcagaagagtgtttctcgttcctcaacagaagcagagtaccgtgcggttgctaacacggcctcggagttgaaatggatctgctcattgttgtccgaaatgggtattacgttatcacgggcacccgttatttactgcgataacatgggcgctacatatctctgtgccaacccggtattccactcgcgaatgaaacatgttgctctagactatcacttcgttcggggtcacatacagtccggcgcactttgggttacacatgtctctaccaatgatcagttagcagatgctctcacaaaaccacttcatcgtccaaggtttcaagaaatcaattccaagattggagtcaaggaactgcctccatcttga

SEQ ID NO: 164392 - DNA, 319 bp, Arabidopsis thaliana landsberg
ggatttgatttgcaagagaaggctatttttctctatatatcatgtttttataacatgaagcaggttgattatgtcagaaaacttctggatctttgtggctatgctgctgaaatcggaataacgatacttaccgagaagtctttgatagttgaatcaaatggatgcgtaaagatacatgattcgcttgaacagatgggtagagagcttgctcgtcaacaagcagttaacaacccagcccaacgggtactattatgggatcctgaagacatatgtgatttgctggcagaaaattctgtaagttagagtgcatgtgcttcta

SEQ ID NO: 164393 - DNA, 5158 bp, Arabidopsis thaliana landsberg
  unsure (1)..(5158): unsure at all n locations
agagcatttgtggccatcttagagccaataagaggagaaacacatattctaggtgccaagaaggttttaagagttttgaagctaaaagtatcaaaaggtgatcattccggccgagttcttccccatcacggcaacgagatattttggtatgcactgaaagctagaagagtcaagattcacgttgaaattgaatcgaagcaatccgtgaagctgtttggaagatatgacccgaagattgaagacatgttaagaaccggctatttggaaataataagttcaaaacacattcggccgaggagacttgaacccaagcagcnnnnnnnnnnnnnnnnnnnnnnnnnnnnncacgcccaagtctttccctttttgcgccaccaccattaggctccttccctgaagcctactacacggcccgatctcttaattatccagcagaatgacgttcttactcctaaacctaattcttgggcctcaagtataaatacttgtccttagccctaaccctaggtgtgccttcatcaccagagaaccctagccgtcgccaagagctgcctcctagccgtcgcacctcttgaagcttgaagagcaccatctctctctctttttctcgtttttgtgtaagactctttaaggtggagctttgcctcttgtattctacatttaaagaagtaatctctaaaccctttttaagttttattcatattttagttatggtttactcaaccaaacttttgattagctcctttgccatgatcgagtagatctctagtttggtttgttggggtttcaaaggggaattcatggggactagtagatcgaaagtctaggttggcggtttctatggttttgtttgatcgtttaaactattctttctagttgagttgaatcttaatgcttgtatgtctggaacatcacctagtacttgaccttaggtatttccatctttagcaaaatctcggttgaatgcttgacctaactcaactgaataaagaactataaccgttgcacacccaccgagtgatagggccttatgggctagaatcgaacttgaacttaatgctttgatcttgtattttgaaaccatgatggcacatactaacggatagggcaactgagtacacaagatattagtgataatagccggctttcacctactaacctttagggttagctagtcttgatagagttttgtatgtccaaaaatttggaagtaaacaaacctaaccatgttatcacctagattgagatctataccttatttattgaaccatgacatccggagaaaccctcgaagacctaccgcttttctcttattgcttaccgtttagtttagttacttgtcttttattttggttactgtgggttctgaaatccacactagagatttgtcaatagatttatgagaaaggagggctagatcttcacaagaactttgagacttatattgctaagaacgaatggacttttgcattgataacagtaaagcttttacaatgtaaaatgagattacaagtgtaaaagtataagtgtaagtgtcaagctgaatgaatgtgtcttccaagtcatccttgcttccttatataggtctacgcacgtggtagcttcgtctgagatctagggagattctcatagatatccggcaggtcagttccgagatattaggtccgcttcgcaaatatctcgtagttagttcctagggtgttattcgcttatctcccttcatcaggtaactaggcttatcaggcccaaatacctaatctgttcatgggctccagagctgcgcaggtcctctacttggtgggcttagtgggctggcatggtatttttgcaggtggattcctggagagaaatccagctctaacatttgccatccagcccattgagtaagtaggcgaactcaatgagcggacacctaagccaagtaagattgcgaaaatattgtagataaggtagtagatacgataagatcaatcggttctgaggataaactcaatgaaaacggtataatcttagattcttaaaccgaaagatatcgagtagatacgcgaggtaaatcgcgggtgacgtggacggtcgagatgacgcgtctcttcagcgcaccgcatctaacggctcagatcaggcgcggggaagagatctctacaatctcaaaaatcgtggtgatgatggcttctttaaataacttcccacctctccacttgacgtcacgtcaactcacacgactctcaatgtaacttctctccatcttaattatttactgcgtttcgtttttagagattgaatttttttatctttcttctgctatctccatcgtttctctgctactcccttctttctcgatctaccctctttgctttttccttcatctctctcgtctttctccatcgaaatcaagagatgagcgacctagaggattcctagaacaagagcaaccacagttacgacgatgacgagagttcgtcagagactaggtcggcggcgtctccgccacaagtacaaaggcgctttgtaaccctaggcggaatgggtctaatccgtccgccgtcgaccagagccgaaaagccgaagaagaagaaagcttccaagcaaaaggtcggcacgccgatgacgaacagcaacctggtcgacctccagaggagatgccagattccagtgggggttactatgatactcccaagaccgctgttgcatcctgagaacgtgccagccggatggtgctgcgcttacgccaatttctttgagaaatatggcttatttttcccgattccgacgtgaattctcgagatgctctactgtctcagcctcgccttttctttgatgtgtccgaacttcgtccgccatgtgttggcgttattcacccgggctcgggaagtaaacagagaattcagctgtcatgacctgcttcagctctgccaggtcaagaccaatgctaggagtgaccaaggcacgtactacatcagtgcacgtcccggatctctggtcctcggcggtttgaaagcctgtcgagacaccaattgccgatccaagtatttctttttcagagtagatcgtcattcagttggcaattttgatcccgcgaggataataaggacctggtctacctacctgggtcagatggagacctgagcctcttgatttttttttgttgtttgggtcgaatccttgactgcttttgctaatcgttagtactgaaactaattgcttctttttgttgaattgcagcaaggaccaaggaagttactctctcggagaccaatcttgagctgttaacccttctctgaggtggtcagactgactggtccattttcagcataaatcacatcgtagttgctcttgtcgtagctccagcagttccagtagttccagcagttcccacattcgttcctccaggagctctgttagatccgattgaagaggtcccgcagattgtaccgaaccccgaggcagatctgcctataggtacgagttttttccctttttttttgtgcacgagtcattgtgctagctatgcacgatcaagctgttagataagaaatatcgtgctttgtttgttcaattcctcctgactccagctccacttcagaactcccgctcatttccagaagaagaataaggcgaccaagtactgcggggaacctgctcgtgctggtgatctgttggccgcggtgaccgcggctcaaaacagtctagctatctccagcgcatctgcctcagcannnnnnnnnnnnnnnnnnnnnatcaataccgggacctctgctgcagcaggtcaggcagataacaatcaggtcgctcaggtatctgggtcatctgcgactgttcgttctgaaggtgcaccgtcttctccgaagagagctcggacccagccggaggtgcacccggcgtgagttggtcgtgagcgatcagggggtcgcctctcctagagaggagagggtggaacatgcggctgctaacctggaggcagctatgtccgcggataggcggtcctcgggtaggtcccaaggcggaggacgaggatcctgaggtgggggcaagtctccgaaccggtcttaggaagtgaggcagacgtccaactctgatggagggtctgcaagaagcaggcctttccactggtcttacactcacgaccgtgatcatctgatcgttgaggataaggctgggttggcgaacctgcttcgccacatcaaagggaggaactcctagattctcggagtgaagaacatggccgaggcggcggcttatgctgacatgatggcgaaggagggccaggtaataatcgataactgtctccttctaattctattcttatgctagttataatttctgttttgcctttggcaggcgatagctgcaatgaacaagctggttgctctctatgagcaacgtctgagcaaggttccctcggcgaacgagctcgaagaagggaagaccctcatccaggagctgacagcgagtgtgaaggctagtcaggagcgcgaggtttcgttccaggtatgcctcggttatgacttgtttgtatatattttatcgatgatacgatgattctgacctgattgtgatttcaggcggagatcgagaggttggaaatgaagctgtccacttcgaaagacctcgagaaaggttatgctgagaagatcgggctcatggagatggaggtcgggggattgcaagctgacaagcagacgtcgagaaaccagattcatcgcttggagcagaggagggaagagctctccaaaagggtgatggaccttacttcgactgcacaaggagcaaagaaggcggttcacgatgctaaggttgagctggccaccgcgtattcgaagttgctggctgggatcaaggaaaaatgggtcgccaaaaaggagtacacagtgctggaaagtcaagcggtcgaggtggagtcgaacttggctttgatcgacctgatcacaaaggctcctattgatctgactgtggagaaacctcgattggaagcggggctcgatgtcctggaggcgaagtccaaatcgaaggaggtatccgactttactttgagtaagttggatatcccgcaggtttcggagatgtcggtggtacgtgcgatggacatcgacgagcatggaatgctgatcggcttggatgagttcgggagtaacaaagactcgttccgagaggtctcacg

SEQ ID NO: 164394 - DNA, 2764 bp, Arabidopsis thaliana landsberg
agaaaatttgtcagcagaatatgtcgttggagtggaggaattcttgacatttgctaatagccagccaatagtacaaagttgtcgaggtaaattccactgtccttgtgctgtgtgcaagaatgaaaaacatatcgtctcgggtagaaaagttagtagtcatttgtttagtcaaggatttatgcctgattattatgtttggtataagcatggagaagatttcaacatgaatgtacgaacgagtaattatgttgatagaacgtatgtaagagagaattctgaaagtgtgggtaatgttgtagaagatccatatgtagatgtgggtaatgttgtagaagatccatatgtggatatggtgaacgatgcatttcgttataacgtggggtttgatgatacctatcatcaagacggtacttatcagaaaatggaggaaccggtacgtaaccattctaagaaattctatgactgttagaaggttctcaaaatccattgtacgatggttgtcgtgaagaccggtcacagtaatcgttagcagctcgagtcatgcagaacaaggcggatcataatatgagtgaaaagtgtgtggattcggtatgtcaaatgttgacagattttttaccagaaggaaaccaagctactgattcacattacaagacagaaaaattgatgcgtaatttaggccttccttattatacaattgatgtttgtattaacaattgtatgcttttctggaaagaagacgaaaaggaagatcaatgtcgattttgtggtcctcaaagatgaaagcctatagatgactattgtcgaagaaccaaagtgccatatagtcgtatgtggtatctacctattggtgaccgattgatgagaatgtatcagagccacaagactacaactgcaatgtgttggcatgccgagcaccaatcaaaagagggagaaatgaatcatccttcaaatgcggcgaagtagagatatttccaagagctacatcccatgtttgccgaagaaccccgtaacgtttatctcggattatgtaccgatggattcaatccatttggcatgtcgcgaaatcattctttgtggcatgtgatcctgactccatataatttaccaccgggtatgtgcatgaatacatagtacttgtttcttacaattctgaattctgggccaaatcacctacgaggtagtctcgatgtcttcctccaacctcttattgaggagctaaaagagttatggtctactggaatcgatgcatatgatgtgtctttgaatcaaaattttaatctaaaagtagtgttgcttggacgataagcaactttccgtcgtacaacatgttatcaggatggacaacccacggtaaactatcttgtccaatttgcatggaaagtactaactctttttatctacctaatggaaggaagacgtgctggtttgattgtcaccaaagatttctttctcatggtcatccattatggaagaacaaaaaagacttccgaaaaggaaaagacgcttctaccgagtatccacctgagtctttaaccggtgagcaaatttattacgagcggttgtctggtgtaaatccaccaagaaccaaggatgttggtggcaacggtcacgaaaagaagatgccaggctatgggaaggaacataactggcacaaggaaagcatattatgggagcttccatattggaaggatctgaatctccgacattgtatcgatgtgatgcatacagagaagaattttttggataacataatgaatactcttatgagcgtgaagggtaaatcaaaggacaacataatggcaagaatggatatagaacgattttgttctcggcctgacttacatattgatagtaagggaaaagctccatttccagcttatacattgacaaatgaagccaaaatgagtttattgcaatgtgttaaacatgcaatcaaattccctgatggttattcgtctgatttgagtagttgtgttgatatggagaatgggaagttatcaggtatgaagagtcatgattgccatgtttttatggagcggttatttccatttatctttgcagaactcctcgaccggaacgttcaccttgcattatcaggtaaaataagaagataatttactctttatatcatatatgcacttgagatgatgcaatttttttttttccaggggttggcgcattttttagggacttatgttcgagaactttgcagaaactcgcgttcaaattcttaagcagaaaatttttttgatcatatacaacttagaatagatcttcccaccatcatttttgatgttatggagcacctgcctatacatctcccctacgaagctgaattgggcagtcctgtccaatataggtggatatatccttttgagaggtttttcaaaaagttgaaaggaaaagcaaaaaataaaagatatgcggtcggatcatttgttgagtcatatatcaatgacgagattgcatattttccagagcattactttgccgatcatatacaaacaaaatcaaggtaaatataactatttattttacgattcgcaatctatacttcagaattaaaatcaattacatgaatcaggttaacaagattcgatgaaggagaagttcatgtatatcatgtccctggagtacctaacatatttatgcacgtcggccgtccaagtggtgaaatgcacgtagaatggcttacagagaaagactaccaaagcgcacatgcatatgttttaagaaattgtgactattttcaaccacttgagag

SEQ ID NO: 164395 - DNA, 443 bp, Arabidopsis thaliana landsberg
cgcgtccagcgcgaggatttcgacgcggtcgccgagaccgggctgttgactttcggaagcgcggccgccggcgccgccgataccttcaccggcctttgacgcgacgagggcgggcggctttccgggctggaactggagcactatcccggcatgggctaggccgagatcggccgcatatgctccacggcggtggagcgctattagatactcgggatggccgacatacaccgggtcggcacgatcgcaccgggcgggaacatcctctctggagcggctccctcgtcccgaaccgccacgccgccttggaaggcgcgtgcttcgttatggactacctcaagaccttcgaccccttctggaagaaggagcacttcgtcgacggtccccactgcggctgggtctacaccaaggacagcgactaccgggcgcgggagaagaggtcttag

SEQ ID NO: 164396 - DNA, 200 bp, Arabidopsis thaliana landsberg
atgacgaagatgaaaacgatagaggaggaggaggaggaggctcgcacgtcggagaagggacttggtcgtgaagcgacactgattcatatattgccacgtgtatctctattatttcccacgttttctgcactctttcattctccccattttcgagccagcagcgtcacttttttttttttttttttctttgtttagtatag

SEQ ID NO: 164397 - DNA, 1285 bp, Arabidopsis thaliana landsberg
atgccgccgaagaaggcttcaacaacaggagctggcacactgcagtcgctggatcccaatcaggatgttatttctcttagagaagcccgaagccagaaaaggaaggctgtcagtccaacacctccggatgatgatcttgatcaggaaattcaaaatttggagatccttcagcagcaggtgcaacgcaggaaggagaagatggctcgtctagctgatttttagagacagatagatgaagcttctgaagaggttcgtcatcttgttcaagatgatcaaagccgaaggcctccacatagagagcttcatcaggaaggcttccacaatgaggatgactggtatgaagatttccatcatggaaactttgcttttgatgatgcttctcctctttcaacagaattgcaggctacaccatggccacagtcttacaagccaccccagctccccatgtatgacggtcacacagacccgaagcaattcctaatgagctatgaagcaacaatatcttcgtatggtggcaacgctgcagtcatggcaaaatcttttgtcatggccgtcaggaatgttgctcagacctggtattcctcccttcggccaggaacaatcacttcatggcagaagctgaaggatatgttactgaccagctttcaaggattacaaacgaagccggttacagctcaagccctcttccagtgtattcaggatcacgaagaataccttcaggcgtatgtccgaaggttcttacgattgagggcgcacgaccaacggtgcccaatgaaatcgttatcgaagccatgatcaagcggttcggctaggactacggcccaatacttcgccagaaaccccctcagaccgtggagaaattgcttcaaaagatggatgaatacatccgcgctgataatgactttcggcaaagaagggaggaagcttacagattatccgagatgaccaggggcttcggagggagagttcatccaaggcatgtcagatcaatccactccgcccagaatgacgacagaggaagtcaacaacaaaggccacaatattcctcgcaggcttcggggcagcaacaaagctatcctcggcccccagctccaaggggcagagtcgctaggggcttcggtggaaggtttggggatcaacccaggaaaatttattgcctattctgtggtgaggacaagggccatactacaaggatgtgccacgtcaccattcagaaatagaaggagataacagaagctgcagcacaacagaaccagcggaagcatgttatgcacactgcatcgta

SEQ ID NO: 164398 - DNA, 980 bp, Arabidopsis thaliana landsberg
ctaataaaataagcatgctgaagttagtatggcgtattctgtcggcacacggttccttatgggtagattgggtgataaaatatctcattcgtggtggttctttatggtctgtcaaagacaacacaactcgtggttcatgcatttggcataaaaatgggtggtctacttccttttgatttgatatgtggagccctatgggatgcctatacgagaagcttggggagagaggtaacttctttagttggaatatcaaaaaccagcacagtaggtgaggtgatggacacacatcgaaggaaaaaacatagataaatcttgtagaggaggaggtgaggaaacaaaagcttatcaggagtcaagactcgggtattatgttgtggaagggaaggaacgatcgatacaacaagaagttcgggacaaaggagacttcacaggttcgggttgctaaaccaactatagaggagtacaaagggatatggttccctcactccacccggaagtactcttttatcacttggctagcaacaaagaatagattggcaacaggagatcgaacgcaaaagtggaaaagaaacgcaaatgtgagttgcgttttttgccagttcccgaaggggaacatagaacatttgatttttttatgcccttacacattcaagatatgggaggaactcatgaaatgtcaaatgagtgcttctggacaagttctcggcagcttggaaagaggttcttaagttgaccaccgataaagctcaggactatactaaagcgtttatcctccggtacgtgtttcaaaacacaattcattccatatggcggaaaggaacaacatgagacatgcatgggaacaaccatcacctgcgggaaagcttgtcaagatgattgacacaaatattcgaaaccggttcagcatgtttaagaatggaggcttatcgaagtacgaaggtggcatcgtactttggtttgaaacaagaaatcaaggatag

SEQ ID NO: 164399 - DNA, 1778 bp, Arabidopsis thaliana landsberg
atggatgagtctcatcccctcccttccattgttgatttcagtagattactgattgccattgctaagctgaataagtatgaagctgtgatctctctcttcgagcatttgaagatgttgggaatttcacatgatctctatagcttcacaactttaatagattgtttctgccgatgcgctcgactctctcttgctctgtcatgtctaggaaagatgatgaagcttggttttgagcccagcatagttacctttggatctctggtcaatggattctgtcacgtaaatagattttatgaagccatgtctctggttgatcaaatcgtgggattgggatatgaacctaatgttgtaatctacaacactatcattgatagtctctgcgaaaagggacaagtgaatactgcgctggatgttttgaaacatatggagaaaatgggaattagaccggatgtagttacctacaactctctcattactcgcctttttcattctggtacatggggcgtctctgctcgaatactgagtgatatgatgaggatgggaatcagcccggatgtaatcactttcagtgctatgatcgatgtgtatgggaaagaggggcagcttttagaggctaagaaacagtacaatgagatgattcaaaggtcagttaatcctactattgtcacttacaattcacagatcaacgggctttgcattcacggtcttctagatgaagccaaaaaagttcttaatgttatggtaagtaaaggtttcttcccaaatgcagtgacttataatactctcataaatggatattgcaaggccaagagggtagatgatgggatgaaaatcttgtgcgtaatgtcccgtgatggagtggatggtgacacattcacttacaatactctttaccaaggttattgtcaagcgggaaaatttagtgctgccgaaaaggttttaggtcggatggtttttgtggcgtgcatcccgatatgtatacctttaacattttgttagacggtctatgtgatcatggaaaaataggaaaagcattggtgagactggaggatttgcaaaagagtaaaacagttgttggtattattacatataatattatcatcaaagggctgtgtaaggctgataaggtggaagatgcttggtatttattttgcagtcttgctctcaaaggagtaagtcctgatgttataacgtacattacaatgatgataggcttgcgtaggaaaagactatggcgtgaagcgcatgagctgtatagaaaaatgcaaaaagaggatgggcttatgccaattaagtagacgtataaaagaggtaaatatgagacaccttagagatagcgagttaagggttctccatcaccacagatgcgtcttaattttaagtttggctgttgtatgatacgaaattggacaaacataaagctaggaggcatgatggatttaatcatattttagatgggaatgagaggatattaaggtaccaaccctcaaggcatattgtagattggtttggtttggacatgtgaagagttttgaagctgaagtgtttggtcactctagcattagatgttgcaggtgtagttttgtacatacatgtaaatgatgtctctttcttacgcacatttgttgacatagagaagctaatatttgcttaagcatgttgtaagctgtaactttagaatttaacctccactgtaacatattacatatgcaatcaggcaaacgaagattcgatcaaacgggtcattgcaaatccagaagtgtgagaagattgaccattag

SEQ ID NO: 164400 - DNA, 487 bp, Arabidopsis thaliana landsberg
  unsure (1)..(487): unsure at all n locations
acaatgnnnnnnnnnnnnnnnnnnnnagccctaatactattcttgatcttccacctcacaccagaaacaactgtagctcgccctctcaacgatgccgatgcgaagccggttgatagagtcgtaaccaccaccaccaacgaagccaacaacctagcctttgtatctgatccgttctccagtttgcagtcatcacctccaacatcacctattcccggttctcctggctttagacttccgtttccattcccgtcatcacctggaggtaatcccggtattcccggttctcctggctttaggcttccgtttccattcccgtcatcacctggaggtaatcccggtattcccggtattcctggtattcctggtcttcccggtattcctggttcccctggctttaggcttccgtttccattcccgtcatcacctggaggaggaagtattcccggtattcccggttcgcctggttttagacttccgtttccattcc

SEQ ID NO: 164401 - DNA, 551 bp, Arabidopsis thaliana landsberg
atgaattccacatgttgctctgcatgcaaggtcatgaaatgtgattgtgctcctaattgtatatttgcaccacatttcccattgaccaatctcgaaactttcgaacgccttcacagaatatttggagcgggtaatgtcttcaagatcctagctaatctggatcctatccaacgtgaaactgctgtaaacgctttgtgttacgaggccgaggctcttgaacgtgaccccatatttggttgtgttggcatctttaaccactacaaaaatcagcttcaaaatttagatgaacaaatcaattctgcaaagaatgagcttgcagccatcattggacttgataacgttccgcaatattcaagtattcctatgccagctgattttttgactaataagttttctttacatccttatattgaaaagatggagggactagatgaggttcaaaagaaggaacttatgcaactaccacctgttgatgcgcaagttatagtgaatgaaatgtttaggaagagaggaaatataaagatatgtggtggtcatggggatgcatgcgc

SEQ ID NO: 164402 - DNA, 93 bp, Arabidopsis thaliana landsberg
atgcctactataactagttatttcggttttctactagcagctttaactataacctcagttctgtttattggtctaagcaaaatacgacttatt

SEQ ID NO: 164403 - DNA, 486 bp, Arabidopsis thaliana landsberg
atgcaaactcgatccaaaggttctgcacacctattaccattcaaagacagaattgacaaaatagctcgtgagttacaagaagccaaaacaaagacaacctgtgatcagaacagaccagctgctatggatcaacagaacagaccagttgatgttcaagacccacctaatgttgatcaaccaagaaacattggtgctggtgatgccccaaggaatcatcaccaaagacaagggatagtgcctccaccagttcagaacaacaactttgagatcaagagtggtctcatctcaatgatcgaaggaaacaagtttcatggattacctatggaagaccccctggaccatcttgacagctttgataggctctgtggccttaccaagatcaatggtgtcactgaggatatgtttaagctcacattatttcccttttctttgggagacaaggcacaccactgggtgaagactttacccccagactccatcacctca

SEQ ID NO: 164404 - DNA, 105 bp, Arabidopsis thaliana landsberg
ttcgaaaatctagccatcaatcttgatatgctcgggcatggattggtgggccaagtattggaatgggccgatgtgaattgggttgagtatgtgcggatcgggctc

SEQ ID NO: 164405 - DNA, 87 bp, Arabidopsis thaliana landsberg
atgcaacgcaaagaggcctttcatttccttgctctccacttctaagaatttattggtttcttgtatactaataaattaatggaaccc

SEQ ID NO: 164406 - DNA, 105 bp, Arabidopsis thaliana landsberg
atggcttttctagctattgatctcgatatgttcgagcatggattggcgggccaagtattgggccaaaccgatgtatattgtgttgaatatgtgtggatcggactc

SEQ ID NO: 164407 - DNA, 1130 bp, Arabidopsis thaliana landsberg
cgagaatcaaaacaagaagcccaaggaggaagaagaaatttattttctctcggtatcttttccaattccaaacgagctgagggaatcttgcgtcgcactcatccggaaacgtgattaccctagtctatcttccgtctcaagttactttttcaatctcatcgcttcgtcaggactctacgaaacgcgttcgcgcctcggtctttccgaaacctttctttacgccaccatcaaattccctgacacaaatcccgcaaactggtacattctccatcgaaacatggtttcttctttacgtctgacggaagtcggttcacttccacctgtgccgtggggatgttctgtcgtcacagtcggtcaagagatgtatgtaattggtggactcctagacataagacgtttacaggtaatgactctcatcgattgcagaactcacaaatgtcgctcgcttccgagtatgaaaagaggtcgttacaaagcagccgccggagttgtcgacggaaagatttacgtaatcggaggtttcaggatgagaaaaccggatgctgaatggattgaagtgtttgatctaaagacacagatttgggaatctttgcctggtccgtaccctaaaactagttcgtgttgcgagttggacgcttatgtggtgatggaagagaagttatacatgttgggttctaaattttgtttggtttacgaaccaaaaagaaacggtgaatgggacgcatccgtcggagcaaccccattaaaagatttgtgggacaagacttgttgtgtggtagatgatatgttgtatacgactgatcctcggcgtactcttggacatccaatagtcgtgtatcatccaaaggacaagacttggagacctgtgaaaggtgaatccttggggagtttgcctagttatttcttttctaagtctgaaaatggcgaattttggtggaaagttggtgattttgggcagaaacaagagctatgttactggtgattgcattggagaaaaaggtatttggtgcgtaatgatcgagttggaaaaacgtgaaggaggtgagatttgggggaaggttgaatcactcgactgtgtgtttggatacatagacattgtgtcggttgggctttgtcgatctctgaccatt

SEQ ID NO: 164408 - DNA, 3935 bp, Arabidopsis thaliana landsberg
ttagaagaaagacaactggagcttggttacgataacctttttactgtagagccagaagggtccagcgggggcttagctcttttctttcagacgatttctccactactatcctttcttttactagtcgtttgattgatgttgagactattattgatggaaataaagtatttttatcttttgtttatggtaatccggtcgttaagtaccgagaaaatgtttgggaacgtcttactcgtataggtgttgatcgctccggtccttggttcttgattggagatttcaatgagttaacagggaatcatgagaaacaaggaggtaaaaaaagatctgtcaactcctttctccctttcaacactatgattcataattgtggccttgtggacttcccctacaagggaaaccctttctcttgggtcggaagaaggcgcaatggtctcataaaatgtatgctcgataaagcttttggtacagaagactggcacaccactttttcccacactaatgtggagtacctacgcctctggggctccgatcatcgcccgttattggcacacgttatctcaaaaaacaaaaaacctatgaggagcttccaatttgataaacgttggcttggcaaagagggccttgaagacgcgattctagcaggttggggtgattcttcaggagatgcatgcgatatcgttaaaaaaatccaattttgtagaaaagccatatccacttggagaaaaagtgagcttgctaactctaactcagctaaactcatagaagctttgactgctgagctagatgaagctcaacttgatgaaaacaaagacccctccgaaattactcaattgaaattcaagctttgcgatgcctttagagaagaggagctgcattggaagcaaaaaagtagagcaaactggttaaaagaaggagatgaaaacaccaagtattttcacgcctcaactaaacaacgacgagctagaaacaggattataggcctggtaaactcgaatggcgattgggtcaaatccgaagaagaaattgagaacgtggcatccaactactttacccatttatttacctctagcctccaatctacggagcatgagatcctctgggaaattcccgagttagttactgaagaaatgaataactgtcttacgagagatgtcaccgaagctgagatcaaaaaagctctcttcgagatgaatcttagcaaggcaccaggcccagacggcatgacaacactcttctaccaaaaattctggcacatagttcgactcgacctggtaagcaccatcaaaagcttcttctctacgggtgtcctagacccgaagctgaatcaaacaaatatatgtttgatccctaagattggaagacccagagaaatgacaggtttcaggccaatcagtttgtgcaatgtaggctataaaatcatctcaaaagttctctgcaacaggctccgaatgattctcccaaaaatcatatcagagacccaatccgcctttgtggcaagacgattaatcaccgataacatcctaattgcacaagaaaacttttatgccctccgcactaatgactcctgcaggaaagatttcatggccatcaagacagatatgagtgaagccttcgatagagtggaatggtcattccttagaactcttatgctaaagctcgggttttcattaaaatgggtagactggatcatgacttgcattgagactgtttcctatcaggtactcatcaacggcgaacctaaaggtagcatttcaccctcccgaggaatcaggcaaggggatcctctttcaccctaccacttcatcatttgcacagaggctctaatagctaggattaagcaagcagagtggtttggcaaaattcaagggcttcatctctcccgagctagccccccggtctctcatcttctctttgcggatgatagtcttttcttttgcaaagctgactgtcaacaaagctcagagattatctccattatccgccagtatggcgaggcttcgggacaacaaatcaacttctccaaatcttcggtcatgttcggaagtaagatccaacctcagatgaagtctgacattaagcggatcctaggaatccaccaagaaggcgagatgggtacatacctaggacttccagaacaaattcacggatctaaagctcaagttttcgcttttgtccaagatcgcttgagaagcaggattaatacctggtcagccaaattcttgtccaaaggaggcaaagaggttcttatcaagtcagtggcccaagcacttccgacatatgttatgtcgtgttttttattgcccaaggctattcgctcaaagttgagtagtgctattgcaaatttctggtggaaaactaatgagaatagtaatggtattcactggattgcttgggataagctgagtttgcctctatctgaaggaggcttaggcttcaagatgttggaagaatttaatttagctcttctcagcaaacagttgtggagactagcacgataccctaactgtgtactcgctcgcagtttaagaggtcggtacttccgctaccagagccccctccacgtcaagccctcatatctaccctcatatggatggcgtagtatgcttgcgactagaccccttctgttgtctggccttcggaagaatatcggctccgggtgggacacaaaagtttggagtgatccttggatcccaacgctaccagcacgcccagcgacaagtaaattggtaacaacgaatcctaatctctatgttaatgagctgattgatcagtcctctaagacttggaacattgccaagctgcaagaactgattgtcccagaagatatcccccacattctagggctacatctgagtttgtcattctcgagagattcttacatgtgggcctttacaaagtctggcaattactctgtcagatccggctactgggcagcgaaggcttccccacgaggagattgcgaccccccttttcagggaccaggtgtttcggcacttcaggcacaagtatggaaaatccaatcctccaaaaaattaaacactttctctggcaaactgccacgggatgtctggcaaactgccacgggatgtctagcaacctcccaacgacttgttgatcgtcatttaggaacagacaaggtctgcccccggtgcgggatgtgtgacgagtctattaaccacgtcctatttgaatgtccccccgcttttcaggtttggtcgctctcccgtatccctcttattcatggtgtcttccatacctcctcgatttttgcaaatcttgatcatctctattggcgagcgaaggagttgggtggaagtgaggactctattagagacttcccatggattatgtggtttatttggaaggcacgtaattcaaaagtttttgggaatatagatacccaccctgcagatacgttacaattcgcctgcagcgaagctgagtccttccatgtggctagagctcgagatgcgtttcttgacacagctcctacctgcctagagccccccgtaagtcagctagactctagccctcctgcttgtcagatcgacggctcttgggtacaaggctcctccctcagcggcattggatggattgttggttcagatcgacgcttctctaatcttgggttaaaaagtattcgacagtgtttatctcctctacatacggagttcgaggctctcctctgggcaatgcgatcccttacatccttatccattacagacattacttttgagacagattgcaaggagttgacgcagcttttggacactcctgatgagtggctcgctttttcttctgagttagaagatttttatgctttaaagcgtagatttcctcgtttttctttatcttttattccacgtttaaacaatgtccgtgctgattgtcttgctaagaaggcaagagcacgaggttctatttttttccat

SEQ ID NO: 164409 - DNA, 1544 bp, Arabidopsis thaliana landsberg
cagagcaacacaggtttgacgaaactcgatgggtcatcaatgtccaaatatctctcgatgcagagctcgaagaacacgatctcgaagaagtcacagtcagcattttcaatgttcctaaagcattaatgtgtagccatccagattcatacacacctcaccgagtttcgatcggaccttatcactgtctaaaaccagagcttcacgaaatggagaggtataaactaatgatcgcgagaaaaattcgaaatcaatataactctttcaggtttcatgatcttgtagagaaattacaatccatggagattaagattcgagcttgttatcataagtatatcgggtttaacggagagactctgttgtggataatggcggtagattcatcgttcttgatcgagtttcttaagatttacagttttagaaaggtggagactttgattaacagagttggtcataacgagattcttagagatataatgatgatcgagaaccaaatcccacttttcgttttgaggaaaacactcgagtttcagcttgaatcgactgaatcagctgatgatctactgctctctgttcttacgggtctatgcaaagatctctctcctctcgttatcaaattcgacgatgatcagattttgaaggctcagtttcaagagtgtaatcatatcttagacttcttgtatcagatgatcgttccgagaatcgaagaagaagagctagaagaagatgacgaagaaaacagagcagacgaaaatggcggaaacagagcaattaggtttatggatgagattaagcatcaattcaaaagggttttcgcgtctcgacctgcggatttaatcttgagattcccgtggagaatcatatcgaatcttcctggattcatggctctgaaactttcagctgattatctcttcacaagacaagaaaacgaagcaacaacaacgagacaagaatcggtttcgattcttgatatcgaaaagcctcctcttgtggaagaacttacaatcccatcagtctccgatctccacaaagccggagttagattcaaaccaacagcacacggtaacatttcaacggtaactttcgattcaaactctggccaattctacctccctgtaataaacctagacatcaacacagaaacagtccttcggaaccttgtcgcttacgaagctacgaacacttcaggaccattagtattcactcgttacacagagctaataaacggaataatagattcggaagaagacgttaggttgcttagagaacaaggcgttcttgtgagccgtctcaagagtgatcaagaagctgcagagatgtggaatggtatgagcaaatctgtgaggttgaccaaagttggttttttggataagactatcgaggatgttaaccgttattataccggacggtggaaagtgaagatcggaagattggttgaggtttatgtttatggttcttggcagattctagcgtttttggcggcggttttgttgttgatgttggtttcgttgcaattgttctctttggtttttagctccttccttcgg

SEQ ID NO: 164410 - DNA, 105 bp, Arabidopsis thaliana landsberg
atggttcttctagccattgatctcgatatgttcgggcatggatcaacgggcctaatattgagcctgaccgatgtggattaggttgagtatgtgcggatcgggctc

SEQ ID NO: 164411 - DNA, 2045 bp, Arabidopsis thaliana landsberg
atgtcgtcaggagagtgtagcaatgtgcagttagatgatcataggaagaataacttagagattgatgaagggagagaatttgaatcaaaagaggaagcttttgagttctacaaagaatatgctaactctgttggttttactaccattattaaagctagtcgtcgttcaagaatgactggtaaatttatcgatgccaagtttgtttgtacgcgatatggaagcaagaaagaagacatagatactggtttaggtactgatggatttaacattcctcaagcaagaaaacgcggtagaattaaccggtcatcgtcgaaaaccgattgtaaagcttgtttacatgttaagagaaggcaagatgggaggtgggttgttcgtagtttggtaaaagaacataaccatgaagtcttcactggtcaagctgattccttaagagaattgagtgggagtagaaaactcgagaaactaaacggtgctattgttaaagaggtgaaaagcaggaagcttgaggatggggatgttgaaagacttttaaacttctttactgatatgcaagttgagaatcctttcttcttttattccattgatctcagtgaggagcagagtttaagaaacatcttttgggttgatgcaaaaggtagatttgattatacttgtttctctgatgttgtatctattgacactacattcatcaagaatgagtataaactgcctcttgttgcttttactggcgtgaaccaccatggacagttcctgttgcttggttttggattattactaacggatgagtctaaatctggatttgtttggcttttccgggcatggttaaaagcggtgcacggatgccgacctagagttatacttactaaacatgaccaaatgctcaaggaagctgtcttggaggtgttcccatcttctagacattgcttttatatgtgggatactcttggtcagatgccagaaaagcttggtcatgttattagacaagagaaaaaatttgtggatgagataaacgatgctatttacgggtcttgcaagagcggggaatttgaaaagaattggtgggaggtagttgataggtttcatatgagagacaacgtgtggaatcagtcgttgtatgaagataggggatattgggttcctgtatatatgatagatgtatctctagcgggaatgtgaacagctcagaggtcggacagtgtgaactctggtttagataaatacattcaaagaataactacatgtaaagcatttcttgggcagtacaagaagatgctacaagagaggtacgaagaggaagagaaatcggagattgagacattgtataaacaacccggacttaagtcaccttcaccttttgggaagcaaatggctgaggtatacactcgtgagatgttcaagaagtttcaggtggaggtgttgggaggagttgcttgtcatccgaagaaagaaagtgaagaagatggggttaacaagaggactttcagggttcaagattatgaacagacccgttctttcgttgtggtctggaactctgaatcatctgaagttgtctgttcttgtcgattgtttgagttcaaaggttttctttgtaggcacgcgatgattgttctgcagatgtcaggggaacttagtattccttctcagtatgtgttgaagcgttggacaaaggatgcaaaaaccagagaagtcatggaatctgatcagattgatgtagaatcaactaaggctcaacggtacacggatctttgtctccgttctttgaaactgagtgaggaagcatctttatctgaggaaagctataacgccgtgattagtgtgctgaatgaagctttaagaaagtgtgagaacacgagtgacttgatccaaaatgttgaagagtcagaatcgggtacacctcaagatcttccaatacatgaagaacagaacaatacatatgagatgaacagagacgataatgtcgctgacacaggacaggttttgtttcttctcagctggtttcatggaacaagagtattaatctcctgagttttatccttaaggccagt

SEQ ID NO: 164412 - DNA, 602 bp, Arabidopsis thaliana landsberg
cagaggagagaggctgaagaaaatctgcaagaacagagacagagagatagcattgagaggcagaggagagaggctgaagaaaatctgcaagaacagagacagagagatagcattgagaggcagaggagagaggctgaagaaaatctgcaagaacagagacagagagatagcattgagaggcagaggagagaggctgaagaaaatctgcaagaacagagacagagagatagcattgagaggcagaggagagaggctcaagagaatctgcaacaacagagacagagagatagcattgagaggcagaggagagaggctcaagagaatctgcaacaacagagattacaggtttaaaaaactgagacaagacctagttatgtgacttctagaagaagagagaacagagtactacagtctgttattttctactgtgacttgtcatttgattttatggttcggatctacttattctcaggacatgccagagaatcacaacgtagatgatcaacagaatctgcaggaacagagacggataagcattgagaaggagagaacagaagctcgtttgagactagaacaggtttttagttgaatcatcaacattt

SEQ ID NO: 164413 - DNA, 582 bp, Arabidopsis thaliana landsberg; identical to SEQ ID NO: 12852

SEQ ID NO: 164414 - DNA, 2003 bp, Arabidopsis thaliana landsberg
agactcattggtctcatccgagactttggtgtagctgttcatttgaacaactatgcttaccaaactaatgagccctaccggaccgccgaggcgaaagatagagtcattggtctcatccgagacttcgttgataaccatcaagaagacatgaagaggatcaactcaacaatgaaggagataagagccgaatttggagagaagtttgatgacctcactattcgactcgagaacatggaggaggcgcttgttgagatcaacaacactctccttaaccactaagatgatatccaagaccaaaacactagaatcgtcaatgtggagtttaccgtcgataccgttgagagccgtctagattggaagggagctagagaagaagctcactgactcaaatgagctatcggaatggagaagcaaccaatcttcccaagaagaagatgattccgaaggcccaagcctgatatgaggaggaaacgaaaaaggaaaccgaattcctcgtggaaaaaggaaaaaccctaatttcctttttcgaaaagggaaattccgacccttagggatttcgaccccttttgtttctcctcaagacaaaatcgagcaagaagaggacttagaagaagaagaagccgccccttttgaagaagactctatggatgaataaaaccctagcgaagaaggttctgaaaccgaaagaaaagaaggttgccttgtgagtcaagaaaaccaaatcgaaaaactttcggatgaagatgacgaactcgccaacatctctagcgaagaggaagaagaaggggaactcaaggaaacccactcttgcatggctacctgcatgcttagtggggaaattcccacaaaccctaatctcggcggaattgggactcaagaaggagctagctctagaggaagcttgggggtccacaacttgaccgatctgttcaagtaggtgaagaccttgatgcagcccaaagagtctaaccaagtcgttttcggaccccctatccgagaagtgccaaagagaggtatccggccaacactaccaaccgcccgtcatgcctatgatatcaacctgagaccgttctcacatgccttggaagcacaagactcatgaagaaagccttgagatcttggtgagccaattcttagatcaacaagctttggatacaagaaagctcaatgcaaggctcgatgacatcgaagttactctcttgagtaaagtcgacggcctctttgtaaaattcaagaaatcagaaaacctacgggttaaagaagctgaagctaacgaagaaaggttcaagaagatcgaagaggagcaggagagacaccttaagagcgcccaagataacaccatcaacactaaggcattgctgaggcaaataacaaattcggataaggactgtgatgcgaagattggagccttatctgacaatagtgtgaacctgggaagccggatatataagcttgaggaccatttgtatgaggaacaaagaagggtcggtgatttaagttaccaacaaaatatgtttcatgagaccttatccgaagggcccattctagcagcgagcaatgacgaactcgaccctggagacaaacatggatggtcatcttgctccgataaaggttttgggtcgattagccaagatgacctaaggagaatccaatctaagaccgaagggatttatgaaagcatatggagactccaatcgggaatcaatcaactagaagataaggacgcgaaagaagatgtagctttaaagggtgtgattaggagacaaggcgaggttgaagagagccaagtcaagaacgttgaagatcaatcacacatccgagcatcaataagaagggtgaccatggaatcctcaaggaagtatgtggagctacttgataggattcttgatttagataagaaagttaaggacttatcaacacgcattggagggaatgaacccatggagagcgaagaagaatactccaaccctcatgtatcttgtgatgtggttacgacctatcaa

SEQ ID NO: 164415 - DNA, 3914 bp, Arabidopsis thaliana landsberg
  unsure (1)..(3914): unsure at all n locations
atggaggaggcctcttcctcttccgaggtaaaagcacttcctttgccgccgcagcatcaagtgtttgtaaatttcagaggagaagagttgcggaacagctttgttagccatctcagaagtgcattggttaggcatggggtcaacatcttcatagacacgaatgaggaaaaaggtaaacctttacatgtgtttttccagaggattgaagagtcgaggatcgctttggccattttttccgttaggtacaccgaatcgaaatggtgcttgaacgagctagtgaagatgaaggaatgcatggacaagggaaagctcctcatcattcccattttctacaaggttaaagcatacgaagttcggtatcagaagggacggtttggttgtgttttcaagaatttgcgcaatgttgatgttcacaagaaaaaccagtggtctgaagctttgagctctgttgcagaccggatcggcttctcctttgatggaaagaggtatcttttttttagtttcctaatagagtttatctagagcacaagtttgagactttgttagagtttgaccttctcaataaggatctgcctggctttttttcttactgatttttgtagcgacgagcacaacttcatcaatggtattgttgaagaggttaaagaagcgctgagcaagattttgttggacaaaaccaaagatgctttcgtctatcattcgaaaaacaattcaatgtccgtaggaagagaaaagcacgagatttatggactcaaacaacggttagaagaattaaaggagaagctagatcttgattgtgaggagactcggattttgggagttgttgggatgcccggtattggtaaaaccactcttgcaagggagatttatgaaactttgcggtgcaagttcttaaggcatggattaatccaagatattcgtagaacatcgaaggagcacgggttggattgcttgcctgcattactcttggaagagttgctcggtgtgacaattccagacatagaatctactcgatgtgcatatgaatcttacaagatggaactacatannnnnnnnnnnnnnnnnnnnnnnnnnnnngtgagtgacaaggaacagatagatgttcttctggggagatgcaactggattaggcagggaagcaggattgtcattgcaacaagcgacaaatcactaatacaagatgtggctgactatacttatgttgtcccacagttgaaccacaaagacggcttaggtcactttgggcgttatgcctttgatcgtcattccaacatacacaacaatgaagtcatcatgaagctatcgaaagagtttgtgcattatggtagaggtcatccactcgttctaaagttgttgggggcagatcttaatgggaaagacgaggaccattggaaaacaaaattggctacactagcagaaaattccagccatagtattcgagatgtgttacaagtaagttatgatgaactgagtcaagtgcataaagatatatttctcgacatagcttgttttagatcggaagatgagagttacattgctagtctactggattcatctgaagctgcaagtgaaataaaagctctcatgaataaattcatgattaatgtttccgaggaccgagtagagatgcatgattagctatatactttcgctagggaactttgccgaagatcatatgctcaagatggaagggggccacataggttgtggcaccaccaagacataactgatgtgctaaagaacatagaggtgagcctaaaccaagaaaacttttcatatattttacaaagttcttcaagacttactgtatataatgaataatagatttgacgaccgtgacttgtctcccaggaaggcgcagaagtcagagggattttcctaaacatgaatgaaatgaagagggagatgagcttagacagttgcactttcaaatcgatgtgtggtctccgatacctcaagatctatagctcacattgtcctcagcaatgtaagcctaacaataagataaacctccctgatgggctaaacttcccactgaaagaggttcgctatctccactggctagagttcccattgaaggaaattccaccagatttcaacccgcaaaatcttgtcgaccttaagcttccccacagcaagattgaacgaatctggagtgatgataagcataaggtgtgcctcctcctatcatttgactgtatgagtaaaactataatgaatagttttttctactggtggctaaaacttgtgttgtcacaggatacaccaaaattaaagtgggtcaatctcagtcattcaagtaacttgtgggacatttcggggttatcaaaggctcaaagtcttgttttcctaaatctaaaagggtgtacaagtctcaagtctcttccggagataaatttagtctctttagaaattctcatcctcagcaactgctcaaaccttaaggaattccgggtgatctcacaaaatctagaaactctatacttggatggcacttcaataaaagaacttcctttgaacttcaatatactccagagacttgttatattgaatatgaaaggatgcgcgaagctgaaggagtttccggattgtctcgatgacttgaaagctcttaaagaactgatactctcagattgttggaagctccaaaattttccggcaatctgtgaaagaatcaaggttttagagatattacgattggatactacaaccataacagagattccgatgatatcgtcgttacaatgtttatgcttaagcaagaatgatcacatcagctcccttccagataacatcagccaactttctcaactaaaatggttggacttgaagtattgtaagagtcttacatctattccaaagcttccaccaaatcttcaacacttagatgcacacggctgttgctcacttaagacagtctcgaatccactggcatgtcttactacggctcaacagatttattctacattcatcctcacgaactgcaacaaactcgaaaggagtgctaaagaagaaatatcttcctttgctcaaaggaaatgtcagctacttttagatgcacaaaagcgctgcaatgtcagttccttgatctccttcagtatatgttgctatatatcaaaaatattcgtgtctatatgcattttcttgtctatatctttgcagaattctgattcggagcctttgttcagtatatgctttcctggaagtgaactaccttcatggttctgtcatgaagctgttggacctgtattagagctcagaatgcctccacattggcatgaaaataggcttgccggtgtagctctatgtgctgttgtcacatttccaaaatctcaagaacaaatcaactgtttttcagtgaaatgcacattcaaactagaagtaaaagaagggtcgtggatcgaattttcattcccagttggaagatggagtaatcagggcaatatagttgcgaatattgcatcagagcatgtctttattgggtatatcagctgttcaaagatctttaaacgtcttgaaaaccagtattttagcagctctaatcctacaagatccacgcaatctagtaaatgtagtcctactaaggcctctcttaattttatggtcatagatggtacgagtgagctaccgagaatcgaagtgctcaagtgtggcttaaggttagttctttaattgaacctatttaaaccgtcttttcttctgattttttaagagttccttcactcttcagagccttcttaggaaattaagaatccattttttatgttgcaggtttttcaaaggtgttgggagcagtggaaattatttaaagaagttggaagtgaaagaagctgaacaaaatctaagtgctgaaaaagtgtcagaagattggacgtatggatcaagtagcagatgcaaccatgctgtcaaaacag

SEQ ID NO: 164416 - DNA, 476 bp, Arabidopsis thaliana landsberg; identical to SEQ ID NO: 69742
  unsure (1)..(476): unsure at all n locations

SEQ ID NO: 164417 - DNA, 215 bp, Arabidopsis thaliana landsberg
atagtaccaaacatgtgcagggttttcaattatggtccgggcatgggtattgtgatttaggaatgggtcctgtgagagcaagaacttttgagtccccaagtaacaagtcccaaggagtttgtctctactcccagagctgtgccacagcttgccctagcgaaggtttttcaggcggtcgatgtagtagtctccgtcgctcctgctccaaagcctgc

SEQ ID NO: 164418 - DNA, 841 bp, Arabidopsis thaliana landsberg
aggaaaatcaaaaccacagacgaaagggttttggtctaattttcttcttctcatggccttctcgagaatcgctcttctttgccaacgattctctagacaacaacaacaacgccaacttcttcacagaccactcactacgaagctagataacaccagattcctccatcccaatcaatccaagcttgcccaaaacctaatcgtgatcttcactagacaacctttttcacctgacgaccctgagctactgatactctctccagagctcaacaccaaggtagtcgaaaccgtcttgaatggattcaaaaggtggggtttggcttatctgttcttcaattgggcttctaaacaggaaggttacagaaacgatatgtatgcttacaatgccatggcttctatcctatcacgtgctcgacaaaatgcctcactgaaagctttggttgtagatgttctgaattctcgttgtttcatgtctcctggagctttcgggtttttcattcggtgtttaggtaatgctgggctagtggatgaagcaagttctgtttttgatcgagttagagagatgggtctttgtgttcctaatgcttatacttataactgtttgttagaagcaatttctaagtcgaattcgagctctgttgagttggttgaggcgaggttgaaggagatgagggattgcggttttcatttcgataaatttactcttacaccagttttgcaggtttattgcaacactggtaagtctgagagagcgttgagtgttttcaatgagattcttaatagaggttggcttgatgaacatatttcaacgattttggttgtttcattttgtaagtggggtcag

SEQ ID NO: 164419 - DNA, 947 bp, Arabidopsis thaliana landsberg
gtggcaccggagcgggttaaaatttttttgtggttgggtgtgaatcaagtgatcatgaccaacatggagaggcaaaggcgtcatttgagtgatagtggcatatgtcaggtttgcaaaggaggtgaggagacaattttacatgttcttcgcaattgcccggcgatgtatggattatggttgaggattattcctaggaggagaaggactacattctttaccatgtcgttgctagagtgggtttatgataatttgagggatcataaaggggtatgggagagtccatggtcgacagtttttttgatggcggtttggtggggttggaaatggagatgtggatatgtgtttggagcgacgggaaggtgcagggacagagtcagcttcataaaggatctagctcgggaagttactaaagcacatgcggtggtaggagtgtctcggagattagtgggcagagaagagagacgaatctcatggagtagaccaagtgaaggttggtgcaagttgaatacagacggagcgtcaagaggtaatcccggattagcggcggcaggaggggtcttacgggagagcaatggggaatggcgaagagggtttgcaattaatatcgggatatgctcagcacctcttgctgagttatggggtgtatactacgggttatacatggcctgggagtgtaaagtatcccgattagagttagaggtggactcggaggttgttgttggttttcttcggacatgtataagtgaatctcacccgctgtccttcctaatacgcatgtgctatagctttatctcaagggactggatagttcggatttctcacaagtatagggaagctaatcgtttagcggataggttagcgaactatgcattttctttacctcttggttttcagttttttgatgtttgtctggatgctgtttattcggttatgtggaagaccgaacg

SEQ ID NO: 164420 - DNA, 114 bp, Arabidopsis thaliana landsberg
atgacacattcaaagcccaacgaacaaagtgctgaataagatcggacgagtcgctatagggggttatgactcattattggacttgctgtgtgatggtcgaattattcgttcagt

SEQ ID NO: 164421 - DNA, 538 bp, Arabidopsis thaliana landsberg
atgaatccttccgaagtcaagaattccgccgattctcgtatgagcaagtcgatcgaagcactcaagacaagcttgtccaaactgcgtacgggacgcgcgcacacgggtattctcgaccacgtgctggtcgactactacggctcgccggttcctgtcagccaagtatcgaacgttaccctgatcgatgcccgcacactcagtgttcaggtatgggaaaagaatatggccgggcctgtcgaaaaggctatccgcgattccgatctgggtctcaacccggtccccatgggcgagaatattcgcgttccgatgccggcgctcactgaagagcgtcgccgcgatctggccaaagtggctcgctctgaaggcgaagacgccaagatcgccgtgcgaaacctgcgccgcgaggccaacgatacgctcaagaagctggtcaaagagaaagaaatttcagaagatgacgagcgccgggcccaggacgagattcaaaagctcaccgacaaatacgtgtccgaagcggacaaacggtggcacagaaaga

SEQ ID NO: 164422 - DNA, 2244 bp, Arabidopsis thaliana landsberg
atgcaggtcacccttagaaagcattatattggcaagtttcagaggtcaataaaggttggtgattgcaagatcattgataccttcactttgagtccttcgactggcaagtacaagatatcgagtttgagctatcgaatgggctttaaccacaacacagatttgattacatgtgatcctgtatcagatagtgttttccttgattttgcagattttgaaggggttaagaccgagagttatgatgagaatgttcaaattggtacgtattttctaaattcccaatcattctttaactcaaacaaaccagagcacacagattttgcataatttaagagagtattttaataatgtaagacatattaggtcaagtggtcagtgtggggaaagtggatgagattgtggctcaaaacaaaccaaacaaaaaactagagtttcaaataagagatggcaggcaagtcttctcaattgttctacatattttgattcataataactatgttttcaaacaagtaatattgatatcgtttgttgctatattgaagcaatgagtgtttgtcttgtactttgtggggtgtgtttgctgagaaagtatttagtgctttaaaaagtgtaaagcatgacgagaagacagtggttctgatacgctatgctaaaatcaataattttaaaggtatccactcttcccttaactatgtctaaatttaacatattggatgtatatgtgcatgtcttagttaacatatattgtataattctgttaactaggtgaaattagtattacaagtgcttttgatgtttcagaagtgataatcaatccagttcatgttcctgaggttgagctgttcgtgaaatcgtatgtgcaaaatatattatgaccttctttgttctgtttaaatttacaaacatgttaactagacaaaagcttatttgcagactaccaagtgatggccttgctctcactattcaggataattatgtgaatcgtgacattattaagttaaatcatataatttttttgtttatcctgccaaaacaattgttgatttacttcatgggagagatgtaagtatattttcactaattcctaaatgatgtcacgtttagtttaagtacctataattgttattgtattgaaaatcaggttgggtaatggagaatacttggttctatttttgccattgataccgattggggatggttctattttggatgtcctaaatgtaacagaaaaactgagctggttaaagaatcaaccagcactgttaagaggatccaagcacctacgaaacctaagttctggtgtgataaatgtcaggagagcatcacaaatgtggaggcaaggtaagaattactcttttattttgtaaaagataaaaacaaattatggtttctagaagtccttgcagcaaataaacaggtttataagtgtatattaatttaatatgtacaatacattttactccacgtacaagcttcatgttcgtgtaatggaccagacagctgaaattaaactcatggtgtttgaaaataatacaaccaaatttattggaaaaacttttgaagagttactggatggacaatacaaagaggtattattttatatactgtcattcaattattagctatatgtctatggtagaatgaagagtactaatgtgagacatgtgtatagattgaagatcctacgatcatacctgatgtcatcaaaaatttgtgtggaaagacattccattttctggtcagtgttgagaaagccaatatttatggtggtaaagatatttacaaagttacaaaggtgcatttgagaacagacatagccaaagtagaatcaggtttgcttgaaaacactcattatgatccatcatcaattgggtttgaggatcaggtatgatcatattctccttaaaacaattcaaactgcttattaagtgtttgtattgataaaaaaactatacttctcaatttttattgtatagggtaaattgatgtagactaatagcagcgagaattgttctgatgctacaaacactgaactgtcttctccttcatctaagcgtggttcagctgagttgtctgatatggctgatcaatcgattaccactaagaagttatgctctagggttaagtcagaaaatggagatgatgagattggaaccaatgtgatactaaaaaatgctgataaggttaaagctatttcagatgatgttggatgtctactgatagaaggagttgttaaagagattgagt

SEQ ID NO: 164423 - DNA, 2352 bp, Arabidopsis thaliana landsberg
tgggatcactgcttcctggaaagctttatacgacatcggtgctaaattatacgagatgggtcgttccgatcgtcggaaagtttacttctccgttaagatggggatggctctcgcactctgttctttcgtcatctaccttaaagaaccactccgtgacgctagcaagtatgctgtttgggcgatccttactgttgtcgtcgtctttgagtatagtataggtactgtgactcacgaattctatagattcagatcgattctggggttgttgttgttcgatcaaatcttccggattttgattaaaaatctaaactttcgtcttcttcgatctaaattctcattagatctgtcttaggattacttgtcttcagagatctaatttggctctaactctgttttttgaaggagcaacattggtcaaaggatttaatagagctataggaacactctctgctggaggacttgctcttggcatagctagactctctgtttcagctggagaatttgaagaactcattatcattatcagtattttcattgcaggttgcactatttctctcaatttttattagaaatgaaccttttttaaataaacatactaactttatttttgatacttgtgaatctgttggtttgtctatcaggtttttctgcaagttatttgaaactatacccggcgatgaagtcgtatgaatatgcattcagggtgtttttgttgacatactgtattgttcttgtgtctggaaacaactctagagatttttttagcactgcttattataggtttttgcttatcctggttggtgctggtatctgtttgggtgtgaacatatttatacttcccatttgggctggagaagacctccataaactagttgttaagaatttcaaaagtgtggccaattcacttgaaggtagagagatacgtcaaatggctgttttctcttgtttcgtttcgggttttggctgtttttttatgtcttgttttgtttgtgctttcctaaaactttcaggatgtgttaatgggtacttgcaatgtgttgaatacgagaggattccttcgaagattctcacttaccaagcttcggatgatccattatacagtggatacaggtctgtagtccaatctacgagccaagaagattctctggtgtgttttccttaggacacttttgttgagcagcaactagataacttgaaaaggatttagatgataagatacgatgacctcttttttcctcagcttgattttgcagtatgggagcctccacatggaccatataagactttccaccatccatgggcaaactacgtcaaacttagtggcgcagtaaggcactgcgctttcatggtcatggcaatgcatggctgcattctttcggaaattcaggtaacttaccatattcttgttaaatacaactttatctatcatagcaaatgaggtgctataatggttattagagactataccaacctgcttcaaatgctactagtacctcttcgtgattaactagactgttactctgagaagtcggatatttgtcatataattgttgagtaggtgcaaagtgggatctcctagtttactgttgttactagtgaatggttttctttgagttcaatgcttgtcgtatgccctataagacttgtgatatcaattggtgtgggatttgcaggcagctccagaaaaaaggcaggcttttcgtcaagaacttcaaagagttggaaacgaaggagccaaagtcttgaggttgtttggagaaaaggtggagaaaatggagaagctaagcccagggaacgttctcaaggatgttcaaagagcagcagaggaactacagatgaaaatagacagtaactccttcctacttgtcaactcagaaagctgggctgctatgaaagagaaagccgaagctgaagaagcgcaacaaaactatcacgaagccaaagacgacgagtctaaagtgattcaatccctcagccagatatgggacaataacaacaaccctcatcatcagaatcaacacgctggtaatgattctcagctatggatatcaacagagagtatgatgcttaggaaccgcgaaaactggccaagcgtctcgttcataggcggttctatgatcaatgagatagaatccaaagtatatgaaagtgcgagttctttgtcgctagctacatttgcgtctcttttgatcgagtttgttgcaaggctccaaaatattgttaacgcgtatgaggaactaagcactaaagccgatttcaaagaacaagttagcgagacacggatatagaaaaagctggactctggaccagactcagtagctgcttcagctccagggatatagttgattttgt

SEQ ID NO: 164424 - DNA, 500 bp, Arabidopsis thaliana landsberg
attgaagccaagaagcagacatttgactcatttgaggatctgcttgtgaactctgataaaccagttctagttgactattatgcaacctggtgagtttgttttggtgtcaaatgataacatgtgttagttgagtggtcatcaaccagttctagttgactattattcatcatgaatgagtatacttggtctatgttgggatccagtgtagtctgtttgcttattatcgagtttatttgttaaacagatgatttggaatcagaatgtactgtttgtttggcaggtgtggtccttgccagttcatggttccaatactcaatgaagtgagtgaaaccctgaaagacaagatacaggtggtgaagattgataccgaaaaataccccagtattgctaataaatacaagattgaggcacttcctactttcatcctattcaaagatggggaaccttgtgatcgctttgtatgatgacttcaatgcctttgaatttcttcattttcgttt

SEQ ID NO: 164425 - DNA, 3326 bp, Arabidopsis thaliana landsberg
ctcaaacaatcgatcaggaacttgaagaaaccctagaaatcgaaccacgaatgcaaacctttccgtcacaacaaaaccggtgttatcggcgagaagcgtcggcaacagtttatcctcacggggttggtcaagtggggagaatcagaacaaaattaagaacgcattgaagtatttttggtaggccagagagtgagataaatgggaagaggatgcgccaggcgacagattagaaacggttcttttcgaatcgcgattgtatttaattcattttccttcactattcatccctcatattttatattttctcaaattttgcccttcagtttctgattctactttagcatcaaatcatacatgattcagttaagtggaatgccatattgttgaataatttttttatttttttttgaaaagaatcagctttatcttttattttgtcaataatccctattaaaaaaattcttcttagataatagaattgagaatttggtacgattgaaacaataaacgaatatgtggtcaaaattggaatgtgagcaataatacatgggccattttgagaaattaaagattctgccttcgttaacgaggcaacgaacgttttgatgattcgatgttccacgtgagtcgtgacttggtaaaaaacgcatctctttaaagagttaaagacgtctttaccacaaaatcacatctcctacacgggcgacgttgaccgttgaccatcgatgaactagctataggaggcaattagtcgtttaaatttatatacgtcaacttttgtggttaaagataagctgtttcagttttattgaacttgaattctctaattcagtgttaattaatgattttacgttttacataatcgttgcacttattaccaaatttatatttcacatttaaatatggctagtttcgtttagcatgccccaatttgttatcactcgtaagaaatggaaagtggaaatcagaatatgttatgtcatttcagctttgtgattcggttcaaaagttatatatagaaatttagttgatttaatcaatttcatgaaaaagcataatttcaacagttttatctgataaaatttgcaagaatcacttgttggttggtcgacctccacatgtaacatcaagacaatggaatcggtgaagggacaaataacgtgtcttcctgatataatgacacagtttcttacaattacaaacctcaaattttcttacaaagattgtcactacttaaaatgtgcatcatataagattttcctaaagcacttccaataatttataatctggtttgacgaagagtgcataatattagatggatattgtagcaatagtattgtctctgctctttatcttctttctcttcttctttttctacaccagcgggaaatcatgtcccggtggagccaagaacccaccgggtccttcaaagctatctctgcttcgtaacatccttcaaactgttgaaaaacctcaccgttcacttgccgatctctcaagaatttacggaagcgttatgagttttaggcttggctgtttgaccacagtggtcatatcttcaccggaaacagcaaaagaagtgctgaaaacacatgatcatgtcttgtcttatcgagtctccagtgacccggttcgagccgctggtcatcacgagctttccttgctctggattcctccgttggctcgttggaggtaaataaattcaagtcggtgcggttcagatttaaatcggttttggttcagttttgagtatagagtataaatgaatgaataatttcatgagtattagaaaactagtgaattattttctttaaaaaggattattgtatagtttactttattcagttaggttaaattttgtattactttggttttggtttgttttgttccatacaatggtagttattacaaacttactgacttagtattaatcagttttttcaaaatgattggtttcgctcgatttcaatataatatgcgtccctaaaccgtattgtttcacattttttgtacactttatcaggtttctacgaaagataacgaggaaccaattattctcaacgcaacgtctagaagcaaccagtgctataaggacgaggaaggtgcaagaactcatgaacttcgttaacaaatgctgcgagagacgagaagctgtgaacatctctcgagcatcattcatcacatcactcaatataatctcgaacgctctgttttccacaaacctcgcaaactttgatgactcaaagacatttcacgatttccaaaacgtggtgattcggatgatggagatctccggaaaacccaacctcgctgatttcttcccttttcttgggtttcttgatctgcaaggagctagaaaagaagcgaggctattgatgcacaaactgtttagggtttttcaaggattcatcgatacaaagagatcatcaacttcgagaaataacaacgatatgttagattctcttttggatattgctcataagaaggagtcagaactcgatgacaataatatcaaacatctgcttctcgtaagtcttaaataagacaaaacaaattggattctatacatgttcttagctaaatccatgtaattgtgtattaggacttgtttctggcaggagtagacacgagttcgagtgcggtggaatgggctatggcggagttacttcgaaaccctaagatgatagtgaaagttcaagaagagataagacaagtgatagggctaaagggcaccgttcaagatcttgatatcgttaaactaccttatttacaagcagttgtgaaagagagtcttcgtttgcatccgcctgctcctttcctcgtccctcgaaaatcagagtctgatgatgtccaaattttcgagttcctcattcctaagaatactcaggtatttactcattcaaactaaatcggttctggtaccggtacggttaattaagtaaacctaaatagctacttcttaatagtaaataatatggcgggttcttgtgttgtgtttgtaattactaatgatttcctattgtgctttgaaataaggttcttgtgaacgtgtgggcgatagggcgagatccgaatgtgtggaagaatccgacgcagttcgagccagagaggtttttgggaagaggaatagatgtgaaaggtaatgattttgagctgattccgttcggagctggacgacggatttgtccaggaatgccactcgcgtttaggataatgcatctagttcttgcgtctcttctctatggctttgactgggagtatcaaaacggcgtagttcctgaaaatgtggatatgaatgagggccttggtgctaccttgcacaaagc

SEQ ID NO: 164426 - DNA, 1486 bp, Arabidopsis thaliana landsberg
attttttacgctctcagatacggttcaacactgttgctgctgcaattgttacattggatgagtcagatggttttgccacggacagtgatcgtcaagacaaggtttctgatgaaccaagtaagcttaagtccataattgaactggaattagtcatcaatccattgttcctactcataatgttagggtatcaactctgttcgattttggttgatttggaaaatgaaggggatcgtgagtggaagcaactgaattcgaaagatcttggactaagcagctcaatgattgcaaaatccacaagaaaagtgcttaatggccttaaaagcaaaggttggtagtttcaaagtccttagatttctctaagtttcgaaaactttgttcaaccatatctcatactgcttctgtaatctgtaggacatgatgtttaccttgtgggaggctgtgtacgagatcttattctgaagcggacaccgaaagacttcgatatacttacctctgcagaacttagagaggttggtcttgttctgtttttttcttttcttactgtcaacataatttcaatctgatttggcattgttaacgtttaggtggttcgaactttcccaagatgtgaaattgttggaagaaggtttcctatatgtcacgtacacattggagatgatttaatagaggtttttttttttttttttaatctagtctttctatttctttcgagtacaatgtatgcataccaataggaaaagcttttgtttttggatttcgatttgtttttgttgtgttttcatagactttcttttatttgagtaggtttcgagttttagtacctctgcacagaattcttcgagaaatacgagaactgaatgcaaagaatcgagtggctcagatggtgatgaggactgtatccgtttgaataactgtttgcagcgtgatttcacaattaacgggtaatcttgttatatacttcagtggtttctttttgaatcagtagtttggagattcttataaattttcctatctcaggttgatgtttgatccatatgccaaagtcgtatatgactatttgggaggaatggaagatattagaaaagctaaagtgtgaatgtattctactctaatttgctttcagatttatctcagatcatttttggttatttacatgtattctaaatgtggttctacaatcacaggttcgaacagtgattcacgctggaacatcttttcaccaggactgtggtaagtttgtcaaaagaaaatcaagaatttttctatgcaacccattaaggctttatataatgaaaacttatcaagcatctataatatttccagctcggattcttcgtgcaataagaattgctgcgcgtttaggtttcagaatgtccaaagaaaccgctcattttattaagaacctttccttactagtaaaaaaacttgacaaggtaggctcacattactgcatctatcctccaaagaaatatatgcttggtatatc

SEQ ID NO: 164427 - DNA, 221 bp, Arabidopsis thaliana landsberg
ttaagggaaagataatcgtttgtctgtgcagagagagagagagagagaaaatgaggttgttcgatccatggccagtgttcttcaagagagaatggaaacgttgttggccattcctcaccggtttcgccgtcaccggcgttctcatcaccaagctaaccgccggactcactggtaaactcgccgtcggatctcaccgattttaaacatctaacttctcccat

SEQ ID NO: 164428 - DNA, 162 bp, Arabidopsis thaliana landsberg
gctttaaagacttgttaccatccctacaaatcactacatgatcttaccccatgctttatcctcactcgcatggttctgacaatcactttccggaaggttacccatcctaaaactactccagccgaagcacgcttaactgtggagttctctcaggacgtttga

SEQ ID NO: 164429 - DNA, 2535 bp, Arabidopsis thaliana landsberg
ctatcattctcaaggtgtttatgcgatctaggtgcttcggtcagtctgatgcctctctcagtagccaacaatcttggttttgataaatatgaaacttgcggcatgtcgctaattccagcgcacagatccatcagaatacctcatggcctgttggaagacttacccgtcaagataggttctatagaagtacccgccgactttgtggtgctggatatggacaaagagcagaaagccccattgattctgggaagaccatttttaactacagcaggagccttcctcgatgtcaagaaaggaaagatcgacctcagcctcgggaaagatcttcggatgactttcgacatcaccaacatgatgaaaaagcccacaatagagggtaaagttttctggacagaagagacagaattcctaactgacgagcttttagaagaactagcagaggacgaccacttacagagcgccctgaccaaagacagtagagaaaaagacttacatgtggaaactttggataccagaagctgatggatatgagcagggaagtcgatgactcagaagactttgaggagttgagaccactcgaccgcacgaataacccactcgatcacgtcactcgatcgcaaggcgagctacatcactcgatcgcttcactcgatcacgattccatctctgatactgaatcaccacctaacgattggtctgagctcaaggcacccaaggttgacctgaaaccgcttccaaaagggctaaggtatgtttttcttggaatcaattccacctatccagtgatagtgaatgatgaaatagatactgaacaagtgaatttgcttataattgaattgaaaaagtatagaaaaaccataggttattcactagatgacatcaaggggatttcacccactttgtgcactcatagaatccatctagaaaatgaatcatattctagcattgaacctcagaggagattaaatccaaacttgaaagaagttgtaaaaaaagagatacttaaactattagatgcaggtgtaatctaccctatatctgatagcacttgggtatctccagttcattgtgttcctaaaaagggaggtgtgacagttattaaaaattcaaaagatgaactactacccactaggaccataacaggacataggatgtgtattgactataggaagcttaatgcagccactaggaaagatcacttccccttacctttcattgaccaaatgctagaaagattagccaatcacccctattactgttttctagatggctatagcggattttttcaaatccctatccacccaaacgaccaagagaaaactacattcacgtgtccctatgggacttttgcttataaacgaatgccttttgggctttgtaatgcacccgccacttttcagcgctgcatgacttctattttgtccgatttgatagaggagatggtcgaggtattcatggatgatttttctgtgtatagctcttctttctcctcctgtttgcttaatctgtgcagggtactcaagagatgcgaagagacaaacctggtactgaactgggaaacatgtcacttcatggtcagagaaggaatcgtcttggggcacaaaatatcagaaaatgggatagaagttgattgggcaaaagttgatgtcatggtgcagttgcaaccaccaaaaactgtgaaagacatcagaagttttctcggacatgctgggttctacaggagattcatcaaggatttctctaagttggctaggccactcaccaggctgctgtgcaaagaggctgagttcacgtttgatgaagaatgtctggctgctttcaaattgatcaaagaagcactgatctctactccaatagtccaagcacctaattgggatcacccttttgaaatcatgtgtgatgcttcggattacgatgtgggagcggttctaagacaaaggattgataagaatttgcacgtcatctactacgctagaagaacgatggatgatgcacaaataaggtatgccactacagagaaagaattattggtcgtggtctttgcattcgaaaagtttagaagctacctggtaggctctaaagtgacagtttacactgatcatgctgctctgaggcacatctatgcaaagaaagataccaagccgaggttgctgagatggattctgctgctccaagaattcgatatggagattgtggataaaaaggggatcaaaaaaagtgtagctgatcacttatcgcgaacgaaaattgaagatgcagtccctattaacgacaccatgcctgaggaacagcttatggccatccgagaagtgaacaaaaaattcaaaagcagccagttttgggatgagatgcttgcaatggaggagaaacttccgtggtacgctgattatgtcaactacttggcatgtggtgaagagcctctgaatttgtcagggtacaaaagaaagaagttcttcaaagacataaatcgcttcaaagaagttcttcaaaagaaagaagcctctacactctctgcaaagataaaatctataggag

SEQ ID NO: 164430 - DNA, 1635 bp, Arabidopsis thaliana landsberg
aatgggaggaagagacaaccaccgcgacaagaaccgcaacaggaactggctctgatgctgctgtgacgacggctccgacgacagctactcctcaagcttcgtctgttgtgagtggattctctaaagatacaatgacgacgacgacgactggaagtgagctagcagttgtggtgtcgaggaatggtaaagatctaatggagattattaaagaagtcgatgaatatttccttaaagctgcagattctggtgcacctctctcttctctccttgaaatctcaacctctatcactgacttttctggtcattccaaatcaggtaacaacaatcaagctcttgtcttctcttctttgattgattttgattagtgttttgtgtttgtttcttcagggaaaatgtacagtagtagtaactacgaatgtaatctgaatccgacgtcgttttggacaaggggatttgctccttctaagttgagtgaatacagaaacgcaggaggagtaattggaggaaattgcattgttggtagccattcatctacagtggacagactctatgcttgggagaagaaactttatcaagaggtcaaggtattcactttttgacttcatttcattcataaagttgcaatctttgaacaaaacaattagtctttgatgtatcttcatatgttaagttttgtggaaagagtttgaaaatgttgtttatattcagtttgaagtttgaatattgaaattgcttgcttagatttcatccaaatatggataaatgttttgtttttgggaatttggttgattcatgtgggcattaaaggcttgtggtgggtccaagcgtgagcagatagtgtaagagacccacgtgtgtacttaattctgatgaataatgtgttatgtacactggcacaaatatcttgccaagtattgagtgagtttttgttgttttttgaatgtgggttttgttgcagtatgcagagagcataaagatggatcatgagaagaaagtggagcaagtgaggaggcttgagatgaagagagctgagtatgtcaagactgagaaggctaagaaagacgtcgagaagttagaatctcagctctcagtatcttcacaagccatccaaagcgcctctaacgagatcatcaagctcagagagaccgagctttaccctcagcttgtcgagcttgttaaagggtttgttttgtgcattcccattgcttcattaacctaaagtatcttatgttggtcaatgtgaacaaggttcttgtatgaatgtaatgtaggctaatgtgtatgtggaggagtatgtacgagagccaccaggttcaaacccatattgtgcagcagcttaagtaccttaacaccatcccctccactgaaccaacatctgagcttcaccgacaatcaactcttcagcttgagctcgaggtccaacaatggcatcactctttctgcaacttggtcaaggcccaacgtgactacatacaatctctcacgggctggctcaggttaagtctgttccagttcagcaagaatccacttgttaggagtagctacgagtcaaagatctacagcttctgcgaggaatggcatataagctattgacaggatccctgataaagtagcatctgaagggatcaaaagcgt

SEQ ID NO: 164431 - DNA, 1897 bp, Arabidopsis thaliana landsberg
tgaagagatcaatccttttgcggtaaagagctctgtttcataatgactgaatactaatgtctgatctttctgtagtctttctccatttgatctcaatttattatgttgtagaatcatacaagtgttcctcctgcgagcaactcttatctcaagccacttccaccggaaccttatgatcgtggtgcaaccgttgatatccctttggattctggcaatgtacgatattttcaataccttctgcattttgcctttcatgtttactcaaaatctggttagatgaaaacggaagttttcattttgctgattctgttcgcaggatcttcgagctaaagagatggaactccaggccaaggagaacgaattgaagcggaaagagcaggtgatttctagtaaccgagtctcttgggcgatattcaaatataatctttagacctactgattcaatgaggactgtatctaacagtcttcttcttctcattgcaatacaggagcttaaaagaagagaggacgcaatagcacgaagtagtgcaatcttctatatgtctttttacatcttccaatgaccttttacgggtttttgtagctaacttgatacggttgttttggcagctggagttgtcattgaagagaagaattggccggagttttttcctttaattcatcatgacattccaaatgagattccaattcatttacagaagatccaatacgtcgcattcaccacattgttaggtatgtgaacccttcttagaccgctgcaaaaaaatcaagaaaatgttaacagggtaaattcttgaactatgcagggttagtaggatgtctcttgtggaatattgtggcagtaactgtagcttggatcaaaggagaaggttactgtttttacctaaacgatcagattcgtaatgttaattcctctgaccatgttgaatcatctgatgtgttctgttttgtaatcaggtcccactatatggcttctctcaataatttacttccttgctggggtacctggagcgtacgtcttatggtaccgccctctttaccgagctacaaggtaaaaccagctctcttagtatatgctggaacacgatgcattttaaatagatatatgaaatgagtcaataatacaatgcatgtgtacctcttgcagaactgatagtgccctgaagtttggagcttttttctttttttacgtggtaagaaaaaccgaatttctattggtagatttcctctgcatttaagtttttcaagaagccatgagtaaataaacccgtgtcttgcacttttcagttccacatcgcgttctgcggctttgctgcagttgctccaccagtcatcttccaaggaaagtctctcacgtaagagttttcttctagataaaagcatcagaatcagccttttaagttttacattctttaacgattcgtcatttcatgaacatgttaaaaaccttttgagtctttgatgatctccatctgatccatgcattgttggttatatgaacagaggtttcttgccagcaatcgagcttctaactactaatgctgcagtcggggtacgtaacctttctgtctatttacaagtactttacttcggattgtgagagtcttcttagtcctcacctaattttcttctttttcaccctcacagataatgtatttcattggtgctgggttcttctgcatcgaaacacttctcaatatctgggtcattcaggtttctcaacttcttctactccagaatttatcagcactgtaaatcacttgaatccatctgtttttctaacccatgacgtgcaatactcgactttcagcaagtatatgcatacttccgagggagtggcaaagctgcagagatgaagcgtgaagctacaaaatcgaccttgatgcgtgcactatga

SEQ ID NO: 164432 - DNA, 1361 bp, Arabidopsis thaliana landsberg
aagagcttgagaaaagctgtgaagtcggatctttattagtggatctcatgggtgaccctcttgccgggatccgacaatctccttctttccacatgctggtacgtatatgtgactatttatacgtttatgtcaaaaatgggtttgattcgagtttttggccaatgcatgtgacaggtggcagagatcggtaatgagatagtcgggatgatcagaggaacgatcaaaatggtgacacgtggtgtaaatgcattacgtcaagccgacgacgtttcgccggaaataaacaccaccaaacttgccttcgtctccggccttagagtctctccgttttacaggttcgttttctaaatagtatttttccaatatcatatcaactataccaaaaataaataaagaattaagtacaagcacttctatttttgaaaaatgcatgatggttacaacataaagtatactattttgatgatatacataactcctaacggaaaaggaagtttttaactaatcaaatttaaaaatattttaggaggatgggaattggactgaaactggtgcaaagacttgaagagtggtttctacgaaacgacgccgtttactcctacgtgcaaactgaaaacgacaacatagcttcggtcaaactcttcaccgagaaaagtggttactccaaattccgtacaccaactttcttggtcaacccggtcttcaaccaccgagtcactgtctctcgacgagtcaaaatcatcaaactcgctccctccgacgccgagtcactctaccgcaaccgattctcaaccaccgagtttttcccttcggacatcaactcaatcctcaccaacaaactctccctcggcacttatctggctgtgccacgtggaggagacaacgtttccgggtcgttacccgaccagaccgggtcatgggccgttataagtatttggaacagtaaagatgtttacagacttcaagtcaaaggagcgtcgcgtcttaaacgcatgttagctaagtcaacgcgcgttttcgacggagcgtttccgtttttgaaaatcccgtcgtttcccaatcttttcaagtcgttcgcgatgcattttatgtacggtatcggtggcgaagggccacgagcggcggagatggtggaggcgctttgctcacacgcacataacttagctagaaaaagcggttgtgccgtcgtggctgctgaggtggcgagctgtgagccgctcagagttgggattccacattggaaggtgctctcgccggaggatttgtggtgtttgaaacgtctccgatatgacgatgacggcgtagactggaccaagtcaccacctggattgtctattttcgttgaccctagagaaatataa

SEQ ID NO: 164433 - DNA, 726 bp, Arabidopsis thaliana landsberg
atgtttaggatagtttttgcatgcttgttgcatatttgtgttgttttcaggtgatttggagctgtcgacgagctaactggaagaagcggacctgatcatgacaaaccactcgacccaggggtcgagtaggagcttcaagatctcaagagaccactcgacccccaggtcgagtagaagacaccgccactctaccacatcactcgacccccaggtcgagtgtcttcatctccatctcttgaccaccactctatcacatcactcgacccccaggtcgagtgacttcatctccatcttctgaccaccactcgatcacatcactcgaccacgagaacgagtgtctttacctccattacgagaccactactcgaccacaccactcaaccttgaagtcgagtatcaccatcaccaccactcgactacatactcgattgcaagcttcagagtcttcttcattttgcacgcaaccagacactcgagcacaaggaagaaaagaagactccagcgattcactcgacctcccactcgaccagatgggtcgagtacagttcttaatccgtcccgatacttcgtcgttttcagtattagggtttcggaatatttggctataagtagcatgtacttcacattttcgcagacaagaagttttttatctagttttatttccgcaaaccttgtgttctagaccttgtgttctagaccttttgtaatccggatttttctttatct

SEQ ID NO: 164434 - DNA, 620 bp, Arabidopsis thaliana landsberg
gtcctctagctgttgcatgcgaagaaggtgttgggtacctcctcgatggggagagagctttgttttgaatccttgacaaaagcgagcgtctattcatcatcaagaacaaaggtgggagaaactcaaaaccaaaattcagtagattaggatattgaatgatggaggaaagaaatgaatttgtgaaaagtttttgataagaaagggaagtgaaggagataacgagagaattgtaaggatttgagaatgctttggtatgggagatggagagatgagattgttgagttcgggaattgcaatggggggaccaaagtgattattggggggggggacaagaagacaaagggacaacagcgtttcaatggtcacaaggcatcggtgtctacgaagagagtgtctttggtttcttcacttgatcagacggtgagaaatgcttcatctttaagcactcgatcaaacggaccaaaatgaatcgcaagaaatcactcgatcaaacggtgatgatgcttctctcatttgatcattcaaatcaacggctcaaaacaatcctcctcattctactcgatcaacggttgagatctttcttgacttggtttgaatttactcgaccgttgacttcataa

SEQ ID NO: 164435 - DNA, 1401 bp, Arabidopsis thaliana landsberg
ctccgtaacctaaaactctgtctaattataaatccaaccaaaacaaaaaaaaagtccatcatcttcttcttatgtcttcaatgcataagaaaggtacaagcagagacgtaaatagccaagcatttacaaaactaacgaaagtagaaactattccagatccagacatttacgacataacctacgtagatatctctccctccgaaggctcctcttcaccattatccaaatcaccatggtccgttcaagtcgatccatccgctgtagattctccttatcattcggtgaaagctatgacggatacaaccaaagaaaaatcaaccaaccactctcctaatattctcttggggtctcttgttcgcgaagaaggtcatatctattcattagctacatcaggagatttactctacacaggatctgattccaagaacattagggtttggaaaaaccatgttgagttctcgagttttaaatcgaatagtggattggttaaagccattgttcttgctggagataaaatctttaccggtcatcaagatggtaagatccgtgtgtggaaagctgcatctaaagaatcaaacgttcatcgtcgtgtaggtacaatgccaaaccttctcgattatataagaaactccattgttccttcttcttatttcaacttcacgcgacgtaatcgtagcagtgctgcgttagggtttcgtcatttagacgcgatttcttgtcttgcgttaagcgaagataaacggttgttgtactctggttcttgggataaaacgtttaaggtttggagagtttcggatttgcggtgtgtggaatctgtgaacgctcatgaagatgcggtaaacgctgtcgtttccggttttgacggtttggtttttaccggttcagctgatggaacggttaaggtttggagaagagaagatcaagcgaaggacacgaaacatttcttctctgagacgttattgaaacaagactgtgccgttacggcgatcgctgtagatcaaagcgcgacgttagtttattgtggttcgtctgacggaaccgttaatttttgggaacgtgagaataatatgaaaaacggcggcgttttgaaaggtcataaactcgccgtgctttgtcttgtcgcggcggggaatttgatgtttagtggttctgctgatttagggatacgtgtgtggaggagaccagaaggtgaaggtaagcatgtttgtctttcggttttgaccggacatgctggtccggtgaagtgtttggcggtggagagagatcaagaatcggtttccggtgcgagacggtggattgcgtatggtggcagtttttatccatcgctgaagatgttgcttgttttgcagagttcaccgacgattgtgaattaagagtttaaggtgccggatcagactggtg

SEQ ID NO: 164436 - DNA, 990 bp, Arabidopsis thaliana landsberg
tgtggttatacccttctcttagtcgcattattgtccctcctggctcgtggtaccctcgctcaaccgccaaagggaagcccaggagtcgatatcgaacagcaagaaatgctcgccgctcacaacgtagagtacgtcaaggattggaacgagactcttgcagcctatgcacagagaatcgctaacaaatgtatcgatgactgcgtcgtagtgttcttcggagaaaatctggattctgggatgagtggtcccgcggcaaccaagtattggatatggtaagctatgacaccaattcgtgcatgtgtgtgtgcgatgactatactcagatcgtgaaacgtgattaggtgaggtgtcagaatgatcctcctccggagaatatccctggtcaactttcctattgatgtttacgataatgaatctcaagcattagttacttatctttgtgctttcttcttacacaaacaaaaaactacataagtttattagtgaaattttcaagttacgattgtttttatacatgtgcttgaatactttataaattgtgtatatacaagtattaagtataaaacacacacacacacaatgatacattctgacagcaaattctcctagttccttgccttagcgatagatgtggttacatgataacacacaaggcaacagttaaggctaaacaacttttgaaaaggtaggagaaaatcaaattgaaggatcaaaacagacaaattttggatatcaatgtaaaatgaaatctctagatattgttgacacaactgttttcttttggcaagaaaaacgagtatgatacaaatcgaccaaacacaactgttttcttgcagcctatgcacaaagcatcgctaacaaatgtattgatgactgcgccgtggccctctccgaaggaccctacagcgagaatatagccatcgcggataatccagattcggggatgagcggtcctgtcgcgactaagtattggattgacgatgggccatg

SEQ ID NO: 164437 - DNA, 3136 bp, Arabidopsis thaliana landsberg
  unsure (1)..(3136): unsure at all n locations
caaaaccaaggtcctgctgctcctgatgctgaaatgaaacaaatgctacaacagctgcttcacgggcaagcttctggctccatggagatggcaaagaagatatctgagttacagaacaagctggagtgtagctacaatgatctcaatgtcaagatggaaacactgaataccaaagtccgttacttacagggacattctgtatcttcttcagctccaaaatagacaagccaactaccaggcaaaccagttcagaatccaaaagaatatgctcatgctatcacactgcgtagtggaaaagcacttccaactagggaggaaccaaagacggtcactgaggacagtgaagatcaagatggggaggatttaagtctcaagaaagatcaagatgaccaaccactcgaccagtcacttgagcaaccactcgtccagtcactcgagcaaccactcgatctgccactcgacagcgttactcgaccaaccactcgatctgtcatcccagcagcatcaccaactgctccaaaaccagttgctgtcaaaaacaaagaaaaggtctttgtcccttctccctacaaaacgcagcttccatttcctggccatcacaagaaagcgttggcagacaaatatagagctatgtttgccaagaacattaaggaggttgagttgcggatacctcttgttgacgctctaccgctaatcccagactctcacaagtttctgaaagacttgattgtggagagaattcaagaagtgcaagggatggtggtattgagtcatgaatgcagcgctatcatacagaagaagatcattcctaagaagcttagtgatcctggttcgttcactctaccgtgctctttaggtccattggctttnnnnnnnnnnnnnnnnnnnnnnnnnnnnnnnnnnnnnnnnnngccgctatctgtcgccaaaagattggggttcactcaatacaagtcctgcaatatatccctcatcctagctgacagatcagtaaggattcctcatggtttgctcgaaaacctctcaatcaggatcggtgctgtagagataccaactgactttgtagtcctggagatggatgaagagcccaaggacccgttgattctagggagacctttcttagccactgcaggagctatgattgatgtcaagaaagggaagattgatctaaaccttggcaaagactttaggatgacctttgatgtcaaagacgcgatgaagaagcctaccatagaagggcaactcttttggatcgaagaaatggatcagttagctgatgagttactggaagagctggtagaagaagatcatcttaacagtgctttaaccaaaagtggtgaagatgggtttctgcatttggaaacattgggataccagaagctgttagactcccataaagcgatggaagaatcagaaccctttgaggaattgaatggaccagcaacggaggtaatggtaatgagcgaagaagggtcaactcgagttcaacctccactctcgaggacgtactcgaccagccactcgaccttgtctaccaacgaatctggggagccgatcattccaacttcaaatgactggtctgaacttaaggcaccgaaggttgatctcaaaccacttccaaaaggtctaaggtacgcattccttggtccaaactctacttaccctatgatcattaatgctgagttaaatagtgatgaagtgaacctgctattatctgagcttagaaagtataggagagcgattggttattcattatccgacattaagggaatttcacctagtttatccaaccataggatccatcttgaaaacgaatcctattctagcattgaaccacagaggaggttaaatcccaatttgaaagaagtagtaaaaaaagaaattttgaaactgcttgatgctggtgtcatctaccctatctctgatagtacttgggtttctccagtgcattgcatccctaaaaagggtggaatgactgttgtcaaaaatgaaaaagatgaactgatccctactagaagtataactggtcatagaatgtgcattgattataggaagttgaatgctgcctctaggaaagatcattttcctttaccatttattgaccaaaagcttgaacgtttggctaatcatccatactattgctttcttgatggatacaatggtttctttcaaataccaattcaccctaatgatcaagaaaaaatcactttcacgtgtccttatggaacttttgcctataagagaatgccatttggtttatgcaatgctcctgcaacatttcagaggtgtatgacctctatattttcagacttaatcgaggagatggtggaggttttcatggacgattttttggtctatggccactctttctcctcatgtttgttgaatcttagcagagtattgaccaggtgcgaagagacgaatcttgttctcaattggaaaaagtgtcatttcatggtgaaggaaggcatagtattgggtcacaagatatcagagaaaggtatagaggttgacaaaggaaaaatttgaagtgatgatgcagctgcagccaccaaaaacggtgaaggacatcagaagcttccttggtcatgctggattctatagaagattcattaaagacttctccaagatagcccgaccgttaaccagactattgtgcaaggaaaccaaatttgaattcgatgatgactgcctcaaatcctttcaaaccatcaaggacgctttggtatctgctccggttgttcgagcgcctaattgggactatccatttgaaatcatgtgtgatgcatcggattacgcagtaggagctgttttaggccagaaaataaacaagaagcttcatgtcatatattacgccagccgaacgtgggatgacactcagggaagatatgcaacaactgagaaggagcttctagctgttgtattcgcatttgaaaagttcagaagctatttggttggatcaaaggtaactgtctatacagaccatgcagctttgaggcatctgtatgccaagaaggatactaaaccaagactgttaagatggaaacttttattgcaagagtttgacatggagatagtagataagaaaggcattgaaaatggcgcagcggaccatctgtcaaggatgagaattgaa

SEQ ID NO: 164438 - DNA, 2407 bp, Arabidopsis thaliana landsberg
gggttccaattcgaaaatcaaattgtaaatccggagcccaaaaagcaagagagaagaaaagaagagacaaaatgacgaagtctttggctgattctatgttgaggtatgtgaaaagatcaacacctctcaaaccaaatgagaatcctacgagtgttgagaatgacaaagcagaagaaatttgtgaagatactgatgtgaatatgaataccataccagaatgtgtttacagtggagaaaaaaatgagcttttggaaattacggatccagcaaactggaaaaatattgatagggaattaagagattttctagtcgaaaaaggtcctatgaaaagggtacatgagaactatgctttcccgaaaactgctggtattagaagacatttttctcacaggtattacaaaagagagatgaaaaatggagataagcaagacagaaattggttattgtactcaaaagtaattattgcttttgctgcaagttatttggtcgagaccaagacgcgatgcagttgtcaagcaccgggtttaatgattggaggaatattaggataagacttagccaacatgagactagtcatcggcatattgtttgcatgagtaaatggatggaactagagttgagactacgaaagcatctgaccattgataagtgtcttcaaaaagaccttaacctagagaaaaacccttggagagaagttctgttgagaatattttcattggtaaaaaaccttgcaaaacagaatttggctttccgtggagaaaatgagaagattggtcagaaaaacaatggtaactttctgagttttattgaatcgttcggcgactttgatccagtcatacgagagcatatcaaacgagttaaagaaggtgaaactcactatcattggctaagccataaaatccaaaatgagttgattgttatgttaggatctcaggtccaacttatgattattaagaaaattcaagaggcgaaatacttttctgttattctcgactgcactccggataagagtcataaagaacagatgagtctcattatcagatgtgtggatgtctccatggcttcgacacaagtttcagaattttttctaacgtttgttgaagtttcagataaatccggggaaggactctttgagctactttgtgatactttggttgctctcaatttgaaaatcgatgatgtgagaggacaaggctatgataatggatccaatatgaaaggaaaacacaaaagagtacaaaagtgattgcttgatatcaattgagtagcattttatacgtcatgtggttgccacagtcttaatttggcacttgctgatatgaccaaatcatcttgaaaagcgatttcattctttggaattatccaacgcatctattgcttgttttcatcctctacacctaggtgagaactcctaaagcgatggtaggaggtctcacacttaagccagtatcagagactcgttgggaaagtcgcgttgaaagtgttcgagcaattcgttttcaggcccaaaaataagagatgcattggactacttggctgaaaattgtgatgacccgaaagctcgcagcgatgcagactgccttgctacaagtgagacacacggaattggtggatttgagttcttgtttggtatggttatttggtacaatcttctttttaccatgaacacagtaagtaaggcgctacagtcagagaatattgatattgaacttgcttttgttcaactgaaagggttagtctcttatctacaaaattacagagaaactggttttcaagaagctaaagcagaagctacattaattgctgaatctatggatatcgaaccaaaatttcctgtgaaaagaaagcgcatcattaaaaggaaaaggcattttgatgaagagatggagaatgatgttgaaactgaattgcttagcgaggaagagaactttaaagtcgattttttccttcgaatcctagatcaagctatagaatatttgcaggtgaggtttgagcaatttgaagagtatggaagaatttttagatttttgtttgatctaaggaagctcaaatctgcaagtgatgatggcttaaaggcagcatgtataaaccttgaaacttctcttaaacatggagatagttcagacgttgatgggaatcatttattcttagagctgaaagttttaaaagaacttttaccgaccgagatcacgaaagctattgaagtgttaaactttttgaaaaagtttgaaggttgttatccaaatacatggattgcgtttagagtgatgctaacagttccagtttcagtcgcctcagccgaaagaagtttttccaagctaaagttgataaagtcatacttaggatcaacaatgtcagaagagagattgaatgccttggcgatattgtcaattgaaagagatttagt

SEQ ID NO: 164439 - DNA, 415 bp, Arabidopsis thaliana landsberg
  unsure (1)..(415): unsure at all n locations
atggccgttaaacaaagctcactgatcatcgggcgccagccactcatagaggcgctgcaatcgggaaaagcgatcgacaagatattattgcaaaaaaatgcaacgggcgaagccttaacggccatcaggcaactggcccgcgaaaggcaggtgcctgtgcagcaggtgcctgcagaaaaattgcattacctcacccgcgccaaccaccagggagtgatcgcttttgtggcgctggtgcagtatatggacctgcagcaggtgatcgatcatgtaatatcggaagggcaaacgcccctgttcctgatgctggatggtattacggatgtgcgcaatataggcgctatagccagaacagcggtttgctgcggngcacaggcgatcattattcccgataaaggtgtgggcgccatgaatg

SEQ ID NO: 164440 - DNA, 1340 bp, Arabidopsis thaliana landsberg
atgaaatgggttttcccagaaatcaaaacaactcagaatttcctctctccttcatcacttccacaagaaccaccgttatctctccgctccagcgcaaacttcgatctaaacagcaaaatcagtccaagtattctcctcataatcataatcctctcaatcatcttcttcatctccggtctccttcatctcttagtcagattcctcctcacaccatcgagcagagacagagaagattacttcgacaacgtcactgctcttcaaggccagcttcaacagctttttcatctccatgattctggagttgaccaatccttcatcgacacgttacctgttttccattacaaatccataatcggtctcaagaactatccttttgattgtgcagtttgtctttgtgagttcgaaacagaggataagctcaggctcttacctaaatgcagccacgcctttcacatggattgtatcgatacttggcttctatctcactctacttgtcctttgtgtagatccagtctcctctctgatctctcttcgcaccaagatcctcgttcttctttcctccttgtgctcgagtctgcgagtgatcatagctcgagagagattggaggagatagagacagtgcagcttgtgtggctgcaaatgatgatattgatgtgtctagtgctcatcttggtttggtcggaaacaatgatcttggatcaaccaggatagattcgggtcacggagatcagtacctggatggtgaatttggtggttcggttggaaaggttgttcctttttcagttaagctagggaagtttaggaatatagatattggtgaaggaactagtagcaacaacaacattggtaatagtagtagtttagatgagaggaggtgtttctcaatgggatcatatgagtatataatggatgaagaaacgactcttaaggttcatgtttcaaccaagaaacaatcaagcaagaaccgtggcttgcccggtcataggacagcgatgtccgaatgcgggtttgatccaacagggagattgaaattcagtgggagtggatcgatgaggatagtggaagaagcggccgaaaagaatgtagtggaaagagagagcttttcggtatcgaaaatatggctaagggggaagaaggagaagcatagtatagttcgaggaaaagaggatagttcattggtttcttcgtcttcgggaagagcattctctttcaggttatcgaaccagcggaaccatcccgatgcgatgatcgaaagtggttgcgaagaagataataaaaagaaagaatactcggagtctttggacactatgacaccatctatagctagcaggactatgct

SEQ ID NO: 164441 - DNA, 651 bp, Arabidopsis thaliana landsberg
  unsure (1)..(651): unsure at all n locations
tggagtacatcatccaagagtctacatctatcacacaacctatcaacacacaggtttaatttttcatccatttaaacaatattgttttcattcatttgacatagtatatgtaacttctctaacttttcatctgctttgtcaacagaggaagattgcaagattatacattccggaaccaattctcgcactaattgttagccacatttcagaagaaggaattgaggctctgaaaaactggattaaatctggtcatgnnnnnnnnnnnnnnnnnnnnnctgtcgagacactctcccgagttcgtttagataaaagccctgacttcatcaacatgtcttcgcccaactctgtccacttctcattctactcaaaatgtcttgcaaaacgaaacccttacgctatgtatctgcagagcttgaggctagggttccgttctctcgacctaataggcgccatttcattattgaatgattgtaaagatgtcattcctatagccaatcttctttacattgctctaaaccgtttcacaaataataaagtattagacgcttttgatactttcaaacgagagaacaagtgttttaccaatgtagatatcatgaccaagacactaattggccacatttctgattcggaaccaaaacaattcggatc

SEQ ID NO: 164442 - DNA, 196 bp, Arabidopsis thaliana landsberg
  unsure (1)..(196): unsure at all n locations
gtgtttgcccttctccggccctttctgcccttcgtgcgggcgggcngctgttgcnttcccctttttgttctgggttctcgcgtcggtccgcgncccctgggtnccgtnggcgtccttggggtgttctcgtggttcctncggggtggggtcgttggggtcggtccctggnttttccttccttgtgtcgcgtttcgct

SEQ ID NO: 164443 - DNA, 81 bp, Arabidopsis thaliana landsberg
atggttccgacaatcacatcccggaaggtcacctatcgtgaaactactctagcccaagcacgcttaactatggagttctct

SEQ ID NO: 164444 - DNA, 1058 bp, Arabidopsis thaliana landsberg
atttggttgaggacatactccaaactaatttggtataggacatgcaagcaatggaaaactctaatcacagaaccgatattcgtcaacaagcacatgtctcacatgcatggtcttgaaccgatattcacagtcttcaattacgttccggccacagtttctccattgtgctcaacaatttcttgtatcggtatggatttcaacaacaaacctagtttaaattttcaggtttttaaaccgctttcatcttcggatttattggagcacaacatgtttcattgtgatggtctattgctaatggtcatgggaaccaaaattttagtttccaatccgttgttgaaagaagcaagatggatcaaatgtggctatagctttgagtttgaccattccatcgatgcatatggtcttggatacattagtaacgagtcaccaagtggttgtaatgattacaaaatggttaggtttcggtgtcctaataatttaagtgttgaaatctacgatttcaaatctgattgttggaaggttgttgttgttgataaaaccttccatgggttctttcgattaccattgtcaagtgtgtgtataagaggaactccttattggataggttataatatctacggtaccgtttcgatacaaagtttcgatttctcaaaagagagatttgagaccttgttcgagtctcttcatcactcatccatcgggatccagtggaaagattctctttctttaggggttttcagaggagatcgactttcgttgttacataagtcccgagtaacaagtaagatacacttgtgggtgatgaagaagcattggagtaggttaatgacagttggtctacctgaatttcccatgtgtccgaagtattcaagatacttcagtgagaatcatggtaaaattgtgctatctattcatcacttagggtctattagtatctacattgttggagaggatcaagaatgtcacaaagttaaatactcttctatggatcgttcagttggtggttcagagaaagctactatgttccgagcttgcttccggttcccggttttctctag

SEQ ID NO: 164445 - DNA, 3616 bp, Arabidopsis thaliana landsberg
agccagacttccggaggtttgccgacaggttcacgataagcagccgttcggaatgttcaaaggcgaaaatggcatgaactacacattttcaacctttttgatcgaagcaatactcatcattttcttcatcaaaattgtttacgtcctccttcgacctcttcgccaacctcgtatagtctgcgagatcattgttcgtattcgatcttatattttcttttacatagttaataaatttccattgatggagctaattatattatttaagacaaaatgcatggttttgtgttttgaagggtgggatgatgataggaccgtccatgttaggaagaaaccgaaacttcaattactatctgtttccaccgattgcgaattacatatgcgcaaacataggactgatgggattcttttacttcttcttcctcacggctgccaaaacagacgttgcagaaatctttaaagcaccaagaaagcataagtacattgctgcaattagcgttttggtgccgattgcttgcgtggggagcacgggagctgccctaaaacacaaaatggatataagattgcagaaaccttcgtccattggaggggtcacgttcgccttgggtttcacttcttttccggtcatttacactgttttgagagacatgaaccttctcaactctgagataggaaagttcgccatgtcagtgactctccttggagacatggttggggtctacgtgcttgttttgtttgaagccatggcgcaggctgacggaggaggaggagcatactctgtcatatggtttctcatatcggcggctatcatggccgcttgtttgcttttggttgtgaaacgatcctttgaatggattgtcgccaaaacgcctgagggaggactcgtgaaccaaaactacatcgtcaatattctcatgggtgtccttgtctcttgtttcctcactgacatgttcggtatggctatagctgttggacccatttggctggggttggtggtccctcatgccccaccgttagttcgacgttggctattaggagcgagacctctgttaatgaattcttgatgcctttctcttttgctttggtgggacaaaaaaccaatgtcaacttaattagcaaagagacgtggcccaaacagatctctcctcttatctacatgagcatcgttggcttcgtcaccaagtttgtctcttccactggcgctgctctcttctttaaagtccccactagggacagtctcacgcttggcctgatgatgaacttgagaggccagatcgatatcttactctacttgcattggatcgacaaacaaatggtaggcttacccggttattctgtcatggttttgtatgcgatcgtggtcacgggtgtaacagcgccgctaatcagcttcctctacgatcccactcggccttatagaagcagcaagcgccgcacaatccaacacactcctcagaacaccgagacgggactagttcttgcagtaaccgaccatgataccttctcaggcttgatcacgtttctagacttcgcttatcccactaaaactagtcctttctctgtattcgcaattcagctagtggaactggaagggcgtgcccaacccttgtttattgcacacgacaagcaaagggaggaagaatacgaggaagaggaagagcctgcagagcgtatggggagcaggcgagtagaccaagtgcagagcgcatttaaactgtaccaagagaaaagaagtgagtgtgtgacgatgcatgcctacactgcacatgcttcaaagcataacatgtatcaaaatatttgcgagctggctttgaccaagaaaaccgctttcattctcttaccttatcagaaagagcgtcttcaagacgcagctcttaccgagctacgtgactccggcatgctatctgtgaacgcagacgtcttggcacacacaccatgttctgtctgtatctattacgagaagggacgacttaagaacgctatggttaggtcatccatggacccacaacacacaacaaattctagccatatgaggcaagaaatgtaccgtttcgtggttctgtttttaggaggagctgataacagagaagctctgcatctggctgataggatgacggagaatccgttcataaacttgacagtgattaggttcttggcgcacaaccacgaaggagaggacgagagggagaagaagctggacgatggggtggtgacgtggttctgggtcaagaacgaaagcaacgctagggttagctacaaggaggttgttgtgaagaacggtgctgagacgttggctgcgattcaagcaatgaatgtcaatgactatgatttgtggataaccgggaggagagaagggatcaatccaaagattctggaaggactttctacgtggagcgaagaccaccagcttggagtcattggagacaccgtggctgggagcgttttcgcctcggagggttcggtgttggtggtgcagcaacaagtgagaaaccagatgggtggtgatggtttcttgaacggcaagtttgattacaagaaattagtgtctccttggtctcactctcataattgatttaattagtacaatttcttgattgattaggtttcttaattttattatatccgagttgtagaatctgtattattggggattgttttgctttttatttgtatcccaatagatagatgagttaataaaattccagtatagaagcagctaaattagctagcaaatcacgattcatttttttcttttcaaaatgtattgaaacatcaatcaatctctgtccctgtcatgaatgtattcccaaaatgaaatagccaagaaaagcagggatctttctctaaagtgttattcaagatcaaacatgggacatctgttgcttgagcgtttccagtagctttctcttagattcacagatctggagaaactcacggaggactctctgttgcgccatgactgttttacgtgcggtatctgccgtgttccatgatttcagtgcttgaaagatgcgatttccaacctccgattcttcgctggatgcgatgaaactctctagtaccccaagaatctgacctggtcctgctgcatttccatctctcttcagagttgtcagaaatccctccacttgaccatcttctggattgttcagttgattcagtagccagttagaaacatcttgtattgtgctgcatagtgactgtatagaatctttgattgcttgtgatatgggggacgaagataattgatctgaatgttgatttttcttcttctttttcccagatgggagagacgagcgggtgcaggcctgaatgataagactgtgccacgccaacggttcggtgatgatctgaaccaagacctggacatcagagtagcaagaactcatgtctgaagatcccattgatctgactctatccagaataagcctctcaaacagggagttcaacacatgccagtgctcctgggaacttaggctccacgcattccaaaacaccgcaaaatttaaccagtccaccaaatttgaaccgaggctctacagagatgtttcgacaaggttactaacagtaagaccagttaatatgagtgcaggtagaaggagaaaggagtagaaaagct

SEQ ID NO: 164446 - DNA, 247 bp, Arabidopsis thaliana landsberg
  unsure (1)..(247): unsure at all n locations
tctctcgcccccgtcgtgccgtcctctgcttttcgttttgttgcctgtgttcgcttcgcctcgggctttggtctctctgcttctcttcctggtgttggccttctctttccggccccttctgtngtctttgtccgcgggggccgggttctggctttggcgggtgtggggggtctcgttgttcgaggtccccttgcccctgtcggtgtgttggttcgtcccaccgggacttctggtgcgttgtcgcttc

SEQ ID NO: 164447 - DNA, 2236 bp, Arabidopsis thaliana landsberg
gccacaatcataattattatcatgtccttgtcttcgagagccacgttagtcgttttgtgttgtctgttcatgttgattccatcttttacgacagcagcaacagaacaaggacttcatgctagatctagatgtgaatcttacagcttcaacaacggaaaaagctttcgctcttgcacggatcttttggtgttaaactcttatctacactttaattatgctcaagaaaccggagttcttgaaattgcataccggcactccaatcttgagtcttctagttggatatcgtgggctataaacccgacaggcaaaggcatggtgggagctcaagcactcgtggcttatcgaaactcaacttctggtgtcatgcgtgcttatacttcctccattaatagctactctcctatgcttcaagagtctcctcttagccttcgtgtaacacaagtatccgctgagtattctaatgaagagatgatgatatttgcaactttagtcttgcctcctaacacaaccgtcgttaatcacttatggcaagacggtccgttaaaggaaggagatagacttggaatgcacgcaatgagtggtgataatctcaaatccatggcttctttggatttgctttccggacaagtcacaaccacaaaatcagttaacagaaacatgttgttggtaaaacaaatccatgcaatagtgaatgcattgagctgggggattctcatgcccatcggagttatggctgcaagatatatgaagaattacgaggtattagatcccacatggttctatatacacgttgtttgtcaaaccacgggttattttgccggtttgatcggaggattaggaacagcaatctacatggcgagacataccgggatgaggactacactgcataccgtgataggattacttctgtttgctttagggtttttgcagatactttcgctcaaagcaagaccgaacaaggatcataaatacagaaaatactggaactggtatcatcatactatgggatacatagtgattgtactaagcatatacaatatctacaaaggcttgtctattttacaacccggaagcatctggaaaatggcctatactaccataatctgttgcattgcagcgtttgcggttgtgatggaaattttacagtttaagaagagatgggctagattgttcttcaagaaatccaaagacgtagaagctgatcaacccactgtttccgttgatgtggtctagttttttttttgttacttttacttttgggagattttaaggtcgtcttagcattcgtatgtcctttccttctgtaaaattcagtcattcttaatttttacttgttaaagatgaattactttttgattaataaaagttcttttattcaataattcaacaagaaaaaattatttctaatagaccaaattctaagcatataaagtgttttggttccacttttgctttaaaaattggaagtatcttgagcttgtcctgtgggccgtcccaagttacactgctgctaataataatatgctcttcaaaaactttctgtagagactcaaattattcaagggatgtgataaaactttaatgaacgttgaggaatgatacttagctggacttaacattttagtgtctggtctttgtaaatgatactcaaaattgatattctgaatgttaaagaatgatactcaaaatttgagtgtctgatcaaaacttttttttttacttcccagacaaactcaccaaagaaaaaaagacattgaactttagagtttaattaagctaacaaatggatctataaattcgtgaatgtgtatttcaggagtgcacaaagaatataaaaatattttgcaatcttgactaataaaagttcttctattcaataataactttcgaaatttctattctacaagaagtgagatttgaatatccttggaccttcagagctataatcatcacaaggtcggcggcgggagcagatcggagagacggaaaaggcggagaggaaaaaggcgagcggcggaattgaaattcagattgaaaactataatataacgaagaacttcatgatcccctcagtttttgttatttcttatccacatacttctccgccgcttctagcctttcattcctaccaccatccgtctacttccatcgccgccaccgccgcctgaatgtttcagaacggtctcttatagagttagggttttgacgttttgttcggcccttttctctgataaat

SEQ ID NO: 164448 - DNA, 81 bp, Arabidopsis thaliana landsberg
atggttccggctatcacttcccggaaagtcacccatcctgaaactactacagctcaaggatgtttaactgtggagttcttt

SEQ ID NO: 164449 - DNA, 4831 bp, Arabidopsis thaliana landsberg
cattctttgtacattctcatacaagtggataagagttccgagtatgaaactttatgtcagtcttttccacagggtaatctggagaacaagaagagaaatgtatcggttttaagagaattgggaatgcctcacaagttgttattccccttgcttatatccgttggtcaacctgtatgtggaaaagatagatttaatacgtctctcaagaaggtagttgagatgggttttgatccgaccaccgcaaagtttgtcaaagctctccacgtatcttacgaaatgaacgacaaaacaatagaagaaaaagtcaatgtctacaaatggttaggcatggctgtgggagatgcaatgttcaaaaagcttccacactctctcacaatctcggagaagaagataactcaaacatgaattaatggatattttcactggaaagaagagaaaaaatgaattgtatatgttacttgttcattacctttttcttgtaacttgatgtgattacaattacaagatgcattaatccatccgtggcgaagtatctttcttctatattctcaacatcttcaaaagattcttattcaaggaaaagtcaataattatagcttaaccattggaaattcttgagaattataacaacaaattagagagacacatatttataattttctttagaatattacttcttcttgttttgtaaaatttatgactcctcctcaacaaaaataattccgaacgactagagtcaattagaaaaagtgacggcaaaaaaacatttatatggaagaataatactttgactaactttcgactcccataagtaacgagttgcaagtagcttaggaagtgatacaacagagcaatgtaataaatgacatggagctggagtgaggagctcaacacataaatggcaatatacgctccaagagacagttgttgagatggtgtcttggaaaggatattggaagtttgtatagtttaaacataagaagaagttcctttttcatctacaaaaaggaaatatgtcaatttcaccaacgtgttgttggcccagtggtaaatctctcagatagaggtgctggattcgaggcacgttgagaaggatctcttttccaaagaagatgaatttctggtatgggtcccgcctctgggagatgtagggcctttgggcctgaacttccagatattcaaaaaaaaaaaaaaaaatgttaatcataccaagccttttcactaaatgtttttggtatagaaaatcaattactcttagtggcatggcatttcataagtcaagtcttttatatatttggtgttgataggaggatcggagaaggtaaattaccttttgggataacaaatgacggaagtggctatcacggggaattgttcgggctttaacgattacatataagaaaatgatagtactagacaagtcgaatgccgaactagtcttagagatagaatgaagtaatattttgtgactctttctctcagttatgtgatttttttttctgacacgtaagctgatccggtccaacgttatctaaagccctattcaaaattataatttttgacatcgtttatgaatgttataattttataaacaaaaagaacagaaaattttattggtaagaacaaagaaaagaatcatcaaaaaaaacgatgggatccaaatttcatcattttcagtaaacaaaaaaaaacaaatcagaacaaattgataaaataaaacccgtcaatcatatatataaaataacataaccacatacattttaaaagaattatttgttacaattaagttagacaagtttcagattacaagtaatataactacatatattttctcaatatatattatatattgttgttgtatgagttcatgatagtgaaaaattatgataataggtatataagtattcatattatagtaaaattgatatgtcgagttatagatgaatataatcacacaaaaattataattatataaaatagatatgaatttagtaattccataataacaaaacacagaaaataacatcaaaatcaacaaaaaaaccataatcataatgttttccaacaatttaaaaagtaaaaactcatacttagcatgagtgttcatctagtaatattagtttggaagaagtgatttactcattcaatgtaattatggaccaaaagcccaaaacttttgagttttttttttgttatttcgacgaaatttataatttttttacaaaattaatttagtatacatgatcttcgtaaattgacaggtgtacatttggaatgatatgggctcatttggtatgcatattacatttgggctcaccaaatagatctaatgtcatgggatgacactttaataaaatttggaaaatatacggtcaagtctcgctactatacataacaaatgatgaagcaaggtggaaacaaactcgctaatttttcctggataccaaacctctttcaagcttactcttggaaagttcaatatcaaccaaaattgagacattttgtttagcaatttattactggatatgtgccgcttccttcaaatctgaggaaaagagatattaattttgatacggtttgtggtagatgtgtgaccctataggagacaattaatcatatgatttttgagtgtcccacagcccttcaaatatggacactaccgcaaatatcaacagtttggaatattcccattcatcactacttgtgaacattgatcatttttttagaggacacctagcaaattcctaaattcaagttatccttagatcatgttatacatttgtaaagtacggaatggtgggatgatgaagaggcaatgctaatgtgtactaccacggtttcaaaaagatggtgatgaatgcaaaaaggttttaaataattgatttggccacctatgtcaccaaagtgcacttatcatttcagtcaaacgtcctgagagaactccacaattaagcgtgcttggactggagtagtttcagggtggctgacctttcaggaagtgattgtcgtaaccatgcgagtgggaacaaagcatggggaaagatcatgtggtaatttgtagggttggtaacaagtctttagaaccttctggacgcagagagaggatgtggggaccgctggcaggtacgttcgtagcgttacaattttttttgtcaatattttaatatttttgttcatagatatttcgtcaaaaatgttttggatatttggttttttcgtttttttttggtattttgtgtaaaataacgggaaccaaacggaacggatatctattaatggcccctatcatactcttcgactctgcatctaacaatccaagcttactcccggtagttgtataaaaatcaccttgggcctgtttaatctagagccaacctgcgatttgagtatgcatacggtatgtgcgatgagatcaataccctttgttgtcgaccatccaaaaagccatccccattctcttacctttttccccgcacaagcttctttaatttgcagtttctgtgcaacgattaagaagcttgatcccacatacatctgtatcgaatgtgtcttcgtgatccatgaacattgtatgggtttcccacatgtcataaggatatcccgtcacaaccaccatatctcttttacctcttctcttccatccggaaatctgtcttgcggagtatgtcatcaacaagttgacaacgattatggtgcatactcttgcgagatatgtgatgcttattttgttcattcgaaatgtgcattacttccaaggatttgggatggaaaagaacttgaaggagtaccagaagaagatgatatgatagatgatggggagccgttcaagaggatagctgatggaataatactccatccttttcattgtcacaatctgcatcttgagacaactagagcttatgacgaaaataagtattgtcgagggtgtgcccttccaatctacgaaggtcaattctattcatgcattgaaagcgacttcatcctccatgaacattgtgcaaatgctccacgcatgaagcgacatcccttacatccacatccacttacactagttgttgccaccaggggacctggtaatgaggaaggtacatttcaatgtgacgcatgtcatcgtaaaggtactggcttcttctatgagcatcatactgatcaagaaaacatcttcatgctagacatacattgtgcctctattttcgaaccctttcaatatcaaggccatgaacatccattattcctaccttcagaaccaaataaatggggaagatgtcagatgtgcacatacgaatacgttgatttaaatttaaattgcttggaatgcgattatattttatgtttccattgtgctaccttgccatacaaggtaaggtataagcatgacagtcattttctcaagatttgtaatgggaaggaggcaaatgatcaatcatactggtgtgagatttgtgaaggcaagatagaggaaggaacggaaagagcgttttacaatactccaaagaaggacacgtcattttacaaatgcaatgcctgctgcaccactcttcatcaacggtgcttacttgggatagatacttacatgaaacctggagaaactgtaaaagactacctttcttcaatcaagtatgcatctgaaggtcaaagcaaggaatcaatcacagatgttcggattcttctcaacagttctctcacccgaccaatttgcactcgatgtctttgccgttgtccatttccaatattttttaaagggcacaacacaatattttgttcttgggattgtgttgaagattcggccatgcgatcctaccaacgacttctctattcgtttatatcgggt

SEQ ID NO: 164450 - DNA, 81 bp, Arabidopsis thaliana landsberg
atggtttcgacaatcagttctcggaaggtcacccatcctaaaactactccagctcaagcacacttaactgtggagttctct

SEQ ID NO: 164451 - DNA, 796 bp, Arabidopsis thaliana landsberg
ttgaatttgttgagggtaaagaaggaggaaaggaagaaacaagaggagattccttttcaagaaaatgggagcttattgttggaggaaactcattgcatcttcacgaggtatatacaatcccatccgtacgtttcgcctcactcaagctacaaataacttcgactggacttacatgatcactgtagacagattcatgtgttacaaaggtatgatagaaaacagaagcgtgctgataaaggtatgtcaaggcaagatctacgaccctgacaatttagtccgtggtatcgaggtttcatctttgatgagtagtcacaaaaacgttctaaatctcttgggtggttgtctatagtttcctcatctggttcttgtttgccaatacactgataatggaaaccttacgggtataggacgtgcaggggaagaccctatgctaatggaaaccttatgggtacattgtcttgtttcagcctcagcataccaattataggaggagaattaggtgtaactgacatactatgcgggtgaccagctatatcgagcccgaatatcccagaacaggctttgtcactgggaatgttgacgtctatacgatgcactttggatgatgattgtgacccattgcctgaattatgttggcaagttgctggagcgaggttccttcactgaactgatagaccagtcactgttgaacaacgcgagtgacgataatctaagattgcaaatggaagctttcggtaaacttgctttgagatgtgtaagattcagtcaagaagaaaatgtgcctcgtacgattggg

SEQ ID NO: 164452 - DNA, 81 bp, Arabidopsis thaliana landsberg
atggttccgacaatcacttcctgaaaggtcaaccacccttaaactactccagtccaagcacgcttaattgtggagttctct

SEQ ID NO: 164453 - DNA, 784 bp, Arabidopsis thaliana landsberg
gatcttaattcatctttcatttgtccagagatcaaagctctgaaagcacatgtgtggaaagtgtaatgtccgcctaagttacggcattttttatggcaaatattatcaagttgcgtgcctgtaacagagaatttgcagaaaagaggtataaattgtgattcaggatgtgtcagatgtggttctatagaggaaacaataaaccatactcttttccagtgtcatccggcgagacacatatgggctctttcaaagatccctattgtccgagggatttttcccacctatttatgcaaatttggatcactcattctcaagaatctctttagaaattgattcagtcgcatatccatggatactttggtatatttggaaagcagggaatgaaaaaatcttttgaaaatgtggacaaagatcctctaaagatcttacatttggcggaaaaagagtcagacttgtggaagtccgctcaacttgagcttcacaacgagaattttggttctttcgatttggaagatcgtaatcgagtgcggcatttttctttagacaacaattattctggatatcgttgttttgtagatggatcttgaaaagataccgacaagttttcaggctaaggatggtactgtacatcatcaagtggagagacatcacctttgggaggtgcctatctcagaaaaagtttatctcctttacatgccgagctgaaaaatataatctggacgaggaagtgtatgagtggtgccaacaaccaagaggtagtttttaattacagcaaagttcaaat

SEQ ID NO: 164454 - DNA, 6585 bp, Arabidopsis thaliana landsberg
aatgggctggggggcaaatgttgaagctggatttccctccaagaatccacctgcgaaaataccaggccagcccactaagcccaccaagcccaccaagtagagaacctgcacaactgatgagcccacgtacgcaaatgggtacttgggcctgataagcccggtcacctgataaagggagataagcgaataacaacttaagagctgatgaggagatattcgcggagcagacctactgaatatccaggaggatctccgaatatcccggacggagataccacgtgcgtagacctatgtaagggagcaaggatgactaggaagacacattcaattcagcttacattcacacgcatacttttacacttgtagtctcatttcacattgtaaaagctttgtcataatcaatacaaaaattccattcgttcttagcaatataactctcaaggtttcagtgaagttatagacctcctttctcataatctcaattacaaatctctagtgtggatttcagaacccatatttgacaccgtctgtggggacggaaatagatcattccaacaccgaaactaacacatcaattgtgaccaacgatcatggatcccaattcatcaaattcaacgggatctggcttaccagttcagatcccgaacgatgacgctacggacgggcacctcccaacggatctccctctcggaatccaggttggtgctgtctataacgctgatgcggagaacctgtaccaaaacttgaattcttctagaactgaccaaatcactgccccttcgtaaacaaggggcggggaacaaaatgtcacaatacatgcctccgaacggagataacccgcccaacccgtcttataaggtccctccgcgacctgccagcgaattggccgagcttcgcgcaatgatcatgaacctgatcaacataagcaaaaacaaagaaattgcgcatcgtaacctcgccgcaatggtgggtcagcagagacgcggctacactcgcatggcacatgaggtagagcgcgataccgcgggtaaggaaatttcgcccccccctcccctgcaaaactgggattcctgcccagatccccacagatctgacaggtaccgtctccccgacatatcctactccaaggactcgtctagacttcatctcgatagacgtctcacctcctaacaaccggtaggtcacctttttgcaggcacctaccaacactctcgtcgaaaacccggcaacaggaagcgagatgagcacaacacttgccttcccaaggctaccggtcccaccttcactgccgctaggctactcgcctcctgaggtacacgtggacgagaaaccaaacaaccgcgtccagctcctgcgttcccgggaactcaacgcaacaacgaacctccattgctaatctaccatccgttccctggataccaggaagtgacctctttaacggtccaaccgatcctcgagcaccaatcgattcgcgtaacgtcttggatatggaaacattccgcaattacgcagctcaaacaaatgcgaacatggctcaaatgcattcacgagtgcatctagcagtgagcgatcctcccgacatagatcgagtgatcgaagaaaccaggcgtaccccattcacggataggattacccattatcgcctccgagacgtcgagagactccgtttcccaggatacgacggaatgagcgactcaaaggctcatctgagatccttccgttttgctataacacgagcgtacctaacagacgaagaaaacgaagcaggtcattgccgtttcttcgcagaaaacctcgtaggtcacgccctcgaatggtttgctagcctcgaagggaactccattgataccttcgaccagctcgccgccgctttcttaaaacaatattcggtacttatcgaacacaggacgtctgaagccgacctctggagtctctatcaacttcagaacgaatccctgcgatcttacgtcgaaaaattcaaagcaatcaaatcgaaaattgcaaatctaaaattgcaaacctaaacgaagaggtagccatagcaggccttcgtaacggcctttagttctcctctaggttccgtgaggaactcactgttaggcaaccagtctctttagacgatgcccttcacaaagctttccacttcgccaaagccgaagaggagctcgccgtgctggccttacgattcaaagaatctaaaatgcaaaacgctccccttgcatttaagaaacccttcaaaaaggaaaacgaaacgcaggggcaacataccttattcgcaatagacgaggcagctgaggacgagagtccagaacttgacctcggaaaatattgtaagtaccacaagaaaagaagacattccaccgaggagtgtcgtgccgttaaaaagttaatcgcagctgcgggaatgactgaaaaaggtgcaaaccccaaagttgaaacccctcctcccgacaaacaggaggaggagcaaactcccaagcaaaagaaacgggaacgaacaccggagggaagtgactctcccccacctgctaggagagaacgcatagacgtagtctttgcagaactcgatctaggtggtcagtcaccacacctccccccgccccgcataagaaaaacatgaggtttccattacgcctcttgaaattctgcagaagcgcaaccgagcacctctccccgaaatgcatcgatttcatcatgggagggtctcagctctgcaacgactcaatcaattcattcaaaactcatcagaggaaggcaaattcttacacaaaaggcaagagcccgatgatgggacctgaccaccagatcacattctgggaaagcgaaaccaccgacctcaataaacctcacgatgacgctctcgttattcgaatcgatgtaggcaactacgaactctcccatataatgatcgacacgggaagctcagttgacgtactcttttactacgccttcaaaagaatggggcacctcgattccgagttgcaaggcaggaaaacgccacttaccgggtttgccggagatacgaccttttctctaggatccatccagctcccaaccatcgcacgaggagtgaggcgactcacgagtttcctcgtagtcgacaagaaagctcctttcaacgcaattctgggaagagcatggccacacgccatgaaagccgtcccatcaacctaccaccaatgcattaaattcacctcggacaagggaatagcactcggatgggcagccaacgcagctcccgaaaatgctatatgggcagctacgatcttatcaaaaaggctgaccccgtagtactaatgatagaagacaaactcgcggaaataaaaacagtcagatcctctgatccttctcaacgcggacctcgaaaatcattgataacacaggtctgcatagacgaatcagatcccaaacgatgcgatgggataggtcaagacctcgacctagcaatacaagaggatctcataacctttctcaaggaaaacaaagacagctttgcctggtcaagtgcaaacctccgaggtataagcctcaaggtaacctcacacgaactcaacgtcgatccgacctaccgacctgtaaagcagaaacatcgcaagctaggtcccgaaagggccaaagttgtgcacgatgaggtcgatcggttgctaaagatcggatcgataagagaagtaaaataccatgactggctcgccaacccggtcgtcgttaaaaagaaaaacgggaagtgaagagtatgcatcgactttacggacctgaataaggcatgtcctaaagacagcttcccactcacacatattaaccgactggtcgaagccaccgcgggacacaaactattgtccttcatggatgcattctccgggtacaaccaaatacttatgcgcccagatgaccaagaaaaaacagcttttattaccgactaagacacctactgttataaagtaatgccctttggtttaaaaaatgctggagctatttaccaaagattggtgaacggaatgttcgccaaccagctagataaaacgatggaggtctatatcgacgacatgctggtcaagtcagctcacgaaaaagaccacgtcccgcaattaagagaatgcttcaaaatcgtaaacaaattcgaaatgaagctaaaccccgagaaatgctctttcgaagttccctcaggagaattcctcggatacctagtaaccgaaagaggcatcgaggccaatcctaagcagattgcagccttcatcgacatgccatcgccaaaaatggcacgggaggtccaacgactaatcggccgtatcgccgccctcaaaaggttcatatccaggtccaccgatgaatgcatccctttctatcagctcatccgaaaggataaaaagttcgattagaacgaggactgcgagcaagccttcaaacaattgaaagcatacatgtccgaaccacccatactcgcaaaacccaaagaaggagaaccgttgtacctgtacacggcagtctcccgaaccgcgataagcggcgtcctggtgagagatgatcacgaaggacagaaaccgatctattacgttagtaatacgttgatagacgccaaaactcgttatccagcaatggaaaaactggcactggccgtagtcatgtcagctcaaaaactgagaccatattttctatcacatctcatcgtagtgatgacgtctcaaccaatcagaaccattctgcacagtccgactcaatcaggtcgactttcaaaatgggctatagaactaagtgagtacgatatagaatattacacgagaaccagcctgaaagcacaggtcctaaccgactttgtaatcgagctcccgttaacggacctggatggaaccaactccaataagaaatggctcctccacgtcgatggctcctccaaccgacaaggatccggagtaggaatataactcacctcccccaccggggaagtcatcgaacaatcgttccgactcggattcaacgcatcaaataacgagtttgactacaaagccctcattgctggcattaggctagctcaaggaatgggaatctgcaatatacacgcccatagcgactcccaactcgtcaccagccagttccacggggaatatgaagctaaagacaagcgcatggaagcgtacgtcgaactagtcaaaaccttgacccaacagttcgagtcttttgaactgaccaggatccccagaggtgaaaacacctctgcagatgccttggcagctctcgcctccacgtcagatcctttcgtcaaaagaattatcccagttgaaggaatagaacacccgagcatcgacctaacggtcaaacacgctgaaatggaaacctcggcaacttgcaactttacgcgagtaactcgaagctcggaacccccgaacaacttgcctcgtacgaacctgaaccgtacaacgactggagaattccaatcatcgattacatcgaacgagggatcacacctcccgacaagtgggagaccagaaaactcaaagcccagagcgcaaggtactgcatcatggaagggagacttatgaaacgcagcgtcgcaggtccctatatggtgtgtacctacgggcaacaaacaaaggacctcatgaaaagcatgcacgaggggcaatgtggtagccactgtagtggacgtaccctccgctgcacaatgctagccgattgcatagctcattcactcaggtgcggtaaatgccaacgacatgcacctactcttcatcaacctcctgaggaaatgtcttcgatatcttctccttacccatttatgaagtggtccatggatgtcgtacgtcccatggaagcctccggtgggaagaagagactaaaaaacctgctggtcctcaccgactacactatcaaatggattgaggctaaagtcttccaacaggtaaccgagaaacaagtcgaggtcttcctatgggaaaatatcgtatgccgataacgggactaacctcacctcgggaaaaatcaaagcattttgcgacaagtggaagattcgtcttaccacatccaccccccgttacccacaaggtaacggacaggcaaaagccgccaacaaagctatacttagcaacatcaagaaaagacttgattccaaaaaatcaatatggtccgacatgctccacagagttctctgggcctaccgaactacacctcgcaaatcaacgcaagaaacaccgttctctctcgcctatggtttagaagcagtaatccttgtcgaaaccatagtaccaagcgtgagaaggaccgccagtcctgctaacaccggaacacgcaaatgttacaggacaacagggacttcatcgatgaacgcagatatcaggcaatgatccgagttcaaaactatcaacaacctgccgcccgctactataactccaatatcaaaattcggagattcgaagtaggagagctcgttttacgaaaagtgttcagcaacacgagagagctaaacgctcgaaaactgggaactaactgggaaggtccctatcgaatcaccgaggtggtacgtgacggcgtctataagctcgtaaaagttttcaacggagtacctgagttacggccttggaatgccatgcatct

SEQ ID NO: 164455 - DNA, 571 bp, Arabidopsis thaliana landsberg
atgatggctcagaggtctcttttccaaggcgaatctagtgttgatgaggtatttatctccacatctgaatagtacaaatcgttgcccatctaacgtcgagtacatcatgtttgtgttaatgtaggagctcgaccgtatggaaataaggatgcgaacgaggtacggcgaaaacaggaggcgcgataagggcgttccgatcgagtgtgattgcaatgctaaagttgtcgttgccacttctcttgatcctgttacaaccggaaaactttttttagttgtccgttcaaaatatcggatgtaagcatcttttcttgagttaatgttttttattttatttcttttattttgtatccctatgaatcaagctcctggtttttttataagggtcccggtcaaggatgcggtttcaagagatggtggactgttgcattgtgtgacgagtttgacatgataaaagaggagacgactgatatgaagaaggatttggaagcagccaataagcgcgtcgagtctcatgcggaaaagatctttcttatggagaagaagtttgatacgctagagatgaagtatgaag

SEQ ID NO: 164456 - DNA, 1891 bp, Arabidopsis thaliana landsberg
ctgagattagtatatcctagtactcgtacaagcaaggtattcttgctgaatactaagcggtatggatactggaaagtttgtatgacacaactcattagaggtcaaggtaaagatgcatgtactgcagtagaggaaggatgggaacctccgtttgatctaacttaagatgggttcaaaatcaccaaaccaaaggcgatttggactgtagaagagaagaatctgtcaaagtttaatgcaagggctatgagcgctatcttcaatggtgttgataaagatgagtttaagctcattcaagggttcaagtcagcgaaacaagcatgggatactctacaaaaatctcatgagggattttcgagtgtaaagagaacaagactggatcacattgctaatcagtttgagtatctcaagatggaaccagatgaaacaatatgaagttcagttcaaagataagtgctcttgctaatgaggctgaggtcatgggaacgacctataaagatcaaaaattggttaagaagcttttatgttgtctgccatcaaagtttgctgcccacaaagcaattatgagggttgtagggaacaatgataaaatattatttgttgatctaatgggaatgctcaagtcagaagaaatggaagctgatcaagacaaagttaaaccttcgaacaatattgcatttaatgcagatcaaggctctaagcagtttcaggagattaaggatggattggcacttttagcaaagaattttgggaaagccctaaaacgtgtggaaagaggtcagaatcgtgacagtacatcttggagtaataaagatggagagagatcacgtggaagattctccaaatcagagaatgatgactcatgaaagaagacggaaattcaatactatgagtgtggtggttttggtcacattaaaccggagtgtctagtcaccaagagaaaagaaatgaaatgtcttgaatgcaaaggtgtgggtcacactaagtttgaatgtcccaacaagagaaaattgaaagagaaatcacttataagctttagtgattgagaatctgatgatgaaggtgaagagctgttaaactttgtggcattcatggcgagttctgactctagtaagtttatgagtgacacggattctgactgcgatgaggagctgaatcccaaggatgaatatagagtgttgtatgacagctgggtgcaactaagtaaggacaaactacaattggtaaaggaaaagctaactctagaagcaaaacttgctaatgtgagcatagaggataagcagaaactgagtggaatcactgttgatgaaaattcacaggactactatcaaaagaaacttgactgtcttcagaaagagtgtcacagggaaagagatagagctaaacttctggaaagagagttgaatgacaaatacaagcagatcaggatgctcaacaaagggttagaaactctagacaagatcttggcaatgggcagaactgattctcaacaaaggggtttgggttatcaaggttatacaggaaagatcaacaaggaagaaggaagagtcatcaactttgtcagtggtggttcaacaagtgaaactgtggtgagacaaagctatattgaaccgaagaaacaagtaaagtcacatgttgaaataaaaagagaatctgttgtgagaacaaggatggtgggtgtgatttgctgcgatcattgtggtaagagatttcatatgagagaacagtgttacaaattcaaagagaaagtcagaacgctgtggaatttagcaaagtgcttcattgagccatcgagattctgcactgtgtggattaagaagaaagatctatatggtgatatggaagctgaaatgtacaatcacaagttagaaagaatgtatgaagaagaggaaat

SEQ ID NO: 164457 - DNA, 81 bp, Arabidopsis thaliana landsberg
cctgttccgacaatcacttcccggaatgtcatccatcctaaaactactccagctcaagcacgcttaactatggagttctct

SEQ ID NO: 164458 - DNA, 378 bp, Arabidopsis thaliana landsberg
atagttgtgatatctttgatatgttcagaagctcttcaaattcaacaagctaaagaaccatttcgaggtcatcttacgagagtcacgattcaaaattataatgactatcttcttggaattcattgtaaatcaagagatgatgatttaggctttcacatacttgctaaaggtgaactatttggttggaagtttcatgttaattttcgttatttgatgatttatttttgtggttttagccaaggacaaataaataaaggtgtgtttataatgtatgtagcatctagagatttttatagatatgcaccctgtacatccaaagctgagaaagatggtcttaaaagatatggtaaaattcttactagagattatttattttat

SEQ ID NO: 164459 - DNA, 425 bp, Arabidopsis thaliana landsberg
ctttcagaagagagttgattcgcgtctattatatgttggaggttcaatatcgagtccattgcagaggtgttatgtgactctgtcggtgtctgcagactataggatatgcctcgacagtattaggacaggtctgggtatggtagcaataatttgtagcgtctattgctacactgttttgtatacccaaggagtcgattgtatgtatatgtacaatacaggatttccaatcctagcaggaagaggagggacgcggatactcaatttaaaagtgagtaaacagaattccatactcgatttcagagatacatatataaatttcttgtggggaaaggcccgtatttccgattgaaaagtttcttatgttaccgggttttgggaaggggaagaatctttttccattattcttttttccgaggaatcccccc

SEQ ID NO: 164460 - DNA, 81 bp, Arabidopsis thaliana landsberg
atggttccgacagttactttccgaaaggtcatccatcctgaaactactccagcccaagcacgcttaacagtggaattctct

SEQ ID NO: 164461 - DNA, 1302 bp, Arabidopsis thaliana landsberg
  unsure (1)..(1302): unsure at all n locations
gaattcccgttgccaaggatagactctctagtcgatgcagcagcttcttcagagctcatgagtctcttggactgttactcaggataccatcaaatctggatgaaaaaggaagataagccgaaaactagcttcataactccaagtggcacgtattgctatcttcggatgcctgaggggctcaaaaacgctggaggaagtttcagcagaatgactgcgaacgttcttcagtctcaaataggcagaaatgtgttgacctatgtcgatgacatcatagtaaaaagcacgaaacaagaaaatcatattgccgacctgcaagaaacatttgccaattttaggagggctggtctcaagctaaatccagagaaatgtgtcttcggggtgaagaagggaaaatttcttgggtgccttgtatctacaaaaggaattaaagcaaatccaagcaaaatagaagctatacttcggatggagccaccaaggacaataaaagtgctcagaggttaacagaaaggccaaagtctttcaatggggaccaattcaacaaaaggctttcgaagagctaaagaaatatctgatacaactaaaaacattaactccaccttcgctaggagccccatcgctactgtatgtagctgcttcctacgctgtagtcagtgcagcgctggtgcaggagagacaagatgagcaagcgaacaagcaagtcccagtatattttatctctgaagtgttgagcttatcaaataaaaattacacagaattggagaaagtgatgtatgctgtgttaatggcttccaggaagcttcggcattattttcaggcttaccacataattgttccatcatcacagcctttgaaggatataatgaggaacagagaagctactagaagggttggaaagtgggccgcggacgtcaatgaattcaccattgactacgtgcatagatcttcaattcaatctcaggcgctacgagacttcatagctgattggacaccaggggctcacgaggaagggacaagcaaagatgccgaagcttggacggtattttgcgatggttcttggggaacttcggtgcaggagcagctgcggtcctagtagcaccttcaaaagtcaaaacatgttttgcagtcaaactggacttcagttgcacaaataatattgctgagtacgaagcacttttattggggcttcggaaactaagggcaatgggaataagaagggccgttttaaagactgattccaagtcatagctggccatgtggatnaaagcagcagggcaccgagatcgaagcttgaaaatatttgga

SEQ ID NO: 164462 - DNA, 134 bp, Arabidopsis thaliana landsberg
cgaagacacacggatctcggacgacatgacacaagaggattgccccggcagcaaatatttatagtcccaagtgttatattctctatgtccttgggcccacgtgtcggggctcagtacctttgtgcatgcccccc

SEQ ID NO: 164463 - DNA, 1630 bp, Arabidopsis thaliana landsberg
atggctaccgttaatcagcagctctaccggccaatactcaccgccgtcggcagtgactgccggcggcatgtaaccaccagtttcctccctgttccgagacgcaacgtaaccactcgtctacggccaattttgagtcttgaggtgggcaaggaagtggcttcagcaccgtcgacagtgaacatggaagagctcgtcggattcttgtacgaggatcttcctcaccttttcgacgaccaaggaatcgataaaacggcgtacgatgagcgcgtgaagttcagagacccaatcactaagcacgacaccatctctggctatctcttcaacattgctttcctcaagaatatcttcactcctcagtttcagcttcactgggctaaacaggtctttgctaacttttgtttatcatttgatttctttaattctagttttttttaagttcactgatgcagctgatatatagacaggtccatatgagatcactacgagatggacaatggtgatgaagttcatacctttaccatggaaaccagaacttgtcttcactggattatcaatcatggaagttaatcctgaaactaacaaattttgtagtcatctggtatgtatggttgccatgtccttcttgcaaaatctattgtggtatggtctacttattacaagtagatgttgtgcaggacttgtgggattctatcaagaacaatgactacttttctcttgaaggtcttgttgatgtttttaagcaggttgctttcttggcatttggcatgaattgagcccccttagaaatggttaatcatatcttacaagtactacctttttttgcagttacggatatataaaacgccagacttggaaactccaaagtatcaaatactgaaaagaacagcaaactatgaggtcacatatcttcatgtattggcttaatggaaccaactatgcaaatgtggttgcttgccttaagttggatttgattgtttggcaggttagaaactatgagcccttcattgtggtggagacaattggtgacaagctttctggttcttcaggtttcaacaatgttgctgggtgagggttaagtctaagtttctgtgagtgtccataaattcttctggcatcttgttttattttgataaatgtaacacatgctagcttttttacctatgaagctacatatttggaaagaactcgaccatggagaaaataccaatgacaactccagtgtttactcaaacaacagatactcaactctcttctgatgtctctgtacaaattgttattccatcaggaaaagatcttagcaggtaaagccttatcatggatagttttttagttgacatcagatatggttaatgagaatcattgtgtgatgagaatggttttgctttcctttttcctctagcttaccaatgcctaatgaagaaaaggtaaatttgaagaagttggaaggcggttttgctgcagcagtgaaattcagtggtaaaccgacagaggatgttgtccaagcaaaagagaatgaactgaggagcagtctgagtaaagatggtctgagagctaagaaaggttgtatgcttgctcgttacaacgatccaggacgaacatggaacttcataatggtatgattccaagcttt

SEQ ID NO: 164464 - DNA, 7792 bp, Arabidopsis thaliana landsberg
catgtggagaagaacttgtctgatgctttactatctacattgatgcaaagtgctaagtctaaagatggcttaaaggcgagaaaatacgtggaagatattggaattcgaaggcatttgcacctagagactcagggaaagaaaacagatttgcctccagcagcctattggatgtctaaggacgagaaaaaagtattttgtcaaagattgtctaagtttagaggtcctgatgtctattgtaggaatattgctaattgtgtttcagtcaaccctcctatgattgggggtctaaagtcccataatcatcatgtactcatccaaaatttgttacatgttgctttaagaggctagctgccaagcggacctagggctgcggtgactcgagtctgcaactacttcaacagattgtgccaacgttccattgaccctgagaatctaatttccttggagtctgaaattgtagagacaatgtgtcaacttgtgaggtactttcctccttctctgtttgatatcatgttccacctcccaattcatctagcaagagaagcacgattaggaggtccagtgcactttcgttggatgtatctatttgacaggaatggtcttatttctatctttacattatgtgctttgacagaagttactttcaaacataatgactacaaattgtatgagttgcaggtacatgaaaacacttaagggatatgtaacaaactatgctagaccagaagcgtgtatggctgaaggatacttagttggagagtgcattgccttctgcttagagttcctccaaaattttataccagtgcaagaggctgtaagccgtaatgtcgatgttgaggctgatggaagtgttgttgaaggcagaccattgcataggggtcaagaagttgtcctttcagagaaagagagagacatagtgatatatccctatttttcctattttaactatgttttagatataggttttagagtctaattgttaattttagagtcttttctagtccttttcaggtctttacatgttttggatgcatttgaagataatggagcattctggaggaaaaacagaaaatttatgttgctcaagaaatacggagactaaaaatcgcgtaggtgtcgaacgataccacccctggtgtcgagcaacaccaatacctgacggcaattgaaaacgaaacttattgaagttttgaagatttctaaatttggcccagaactttctcctatgtttaatgaaggtccatcacgtgttttagacttatatatatagtttttaggtcaatgtttaggcgtaagctttggaaggctattccctttttctcttttgtactttgggagcaaaaccttgtggagactccctttagatctttcttactctattctcttcttgttttattcattgatttcttattcaatcatgttgtttgcttcattcatcatgcttgagtaatcttcttgttaggtttagggtttctcattagggatttagatgatttagtagattgcccccttgctaggttatctgttaggattcttcatctttaattgttcttaatgctagttcttgagtagctaactagaacttgaatccacacaacaggtatgcccactatatgtatatgtagttggatctattatttgatgagcctggtttataggtgtgtaataagaatcggcctatctactaaggtgaataatttaactcgttcagaatgcatgtttaggttaaagatctctcggtttctccggttattcttagctataaacatagggagtttcgcgaaacaccactggttattccataattagagtttgagtttaagaaacgttcgataacattccaactatcactagatgtactaatcatctatctcatgagattaccctaaacctgactcttttcttatctgatttacatctagatatttattgcttttctttatttcttattttataatctattggtctagcttaattgaaaacatcataagtccattgtgtgaacatcgagagctcagtggaattcgacccttaagtgctaacgacgatttcttatttgagggagtaagcttaaggcagtttgagctatatcacaatatgcggcgttgccgaagttctattttagttcaccattatactaggtgtcattttaagtctagatattacttttctaccacctattgacgtgtttctttgtcttttggtctcttgtgtttccggtaccttcaaattgagaatcactttcccatggcagactttcacggctgtatcgacagacaatatcagggtgtcgatcgacaccctctgcagaaccagacggctacaataggcgatttaacagaaatgatctcttctacacaaaccgatcagcattcaagctacctccaatgaatcaccattagatcatttggaagtcttcaaaggcatcggttcctctattaaagcagaaggtgtaccagctgattaccttctttgcaaactcttcccccactctctcgcgagcagaggaacatcatggttgcgtcaactggaaccaggttccttaaccaattgggctgattcatagtatgcattcatgtatcatttcttcgatgagtccgtgacagaggcaattcgtttgcaaatttctttgttcacccaggctccagcagaatcccttagagcatcttggctccaattcaagtcttatcagcgtgaatgtccccaacatggtttccaagagagccaactcatcaacatcttctacaaaggaatagacaagccataccagattcaacttgatgcagcaacctcctgtaacttcatgacaagaacaactagtgaagcattaatcctagtcaccaatgctttaactggtcattcgacgcaggaatttgacaaagaacgaagaatttcagctgagaaagctaccaagagcaaagagactcttattcctgaaatttctgctcctatccaagcccccccccctccaccctcatcagagaccagaatggagtctatgcttacgcagctacttgcaggcctcacaaagcttgataccaaatataaatctctctccacaaagcttgatagcaaatatgaatctctctccacaaagcctgatagcaactatgattctgtctccacagatatcaatagcaagattggcaatctacgctctcaattctccaatctctcacctacatccgcttctatcaatgcagttacactacgcagcggaaagcagctaaacccaatacttcagcgcgaacaatcggctcagccttcatcttctccaattgcagaaaacggatcagtgtcgatcgatacaccagggtgtcgatcgacaccaactactcttgacgaatctgttttaatttcctttgtcgagtggaatcgacaattttgcgaaggaggaggaaacaattcccgatggtgtcgatcgacacctagctcctattgatcgacaccctgttcgatcagacaatgtgcaaattccagctgcaaccaagtcagcaaatcggcgaattcccttccccaagagtcctaaaaagtcaagacaagccttatatgatgttagatgcaaggctatgattgataagctgattgttgagatgcctctagttgaagctattcatctatctcccacaatcagaaggtatgttaagacaatggtcattaagaatttgacgaaagaatgtagtgttatgatgatttcagagcagggcagcgacaacattcaagaacaaattccaaaaaagctacctgatcctggaacttttgtacttagtgtcaccattaatcacgattccttcccaagagctttatgtgatctcgttctagtgtgaatctgatgcctcgttcagctcctatgcgtcgtgggtattccaatcttgagcctacctttatcactcttgtgttggcagatcgttctacccgaattccatatgaaattcttattgatgttccagtgataattggaaagagcatgattcttacagactttgtagtcttgccttatgagaaggaacctaaggatccattaatcctagggagatccttcttgcacacagctggagcaatcatagatgttcgacaagggaggatagggcagaatgttggcgaccttactatgcaattcgatatgaacactttggtcaagaaaccgatcatagaagggaaaacctttttgatagattctttcacttcatcagcttcagatagtatttcagagatcgaataagaagacccactagagcgagttttggtctcttccatagaggataatgcagatttggacagtgaaacttcaacatatactaagctgctagatgagaccgaacatgtgatgtaacttacagttggagaagctcttccatctgtgacttcaacgccgactcctagttcagattgggatccagcaaaagctcctaaaatcgaattgaaaccacttccagcagggctaaggtacgcttttcttggtgaaaattctacttatcctgttattgtgaatgcttctcttaatcccgcagagctcaccttattgctaagcaagctgcacaatcatcgcaaagctcttggctactctcttgatgacattgcaggtatatctccagatgtatgcatacataggattcaccttgaggataagtctaagtcttcagtcgaacatcacagaaggttgaatccgaatctgaaagaagtggtcaagaaagagattataaaactgttggaagcagggattatctatccaatctcagatagcaattgggttagcccagttcatgtggttcctaagaaaagaggagttacagtagtcaagaatgagaaagatgagttgattcctactcggacaatcacaggacatcagatgtgcatcgattacagaaagctgaatgctgctaccaggaaagaccatttccccttaccatttatcgatcagatgttggagaggttagcaaatcacaagtactattgcttccttgatggatactcatgattctttcagatctcgattcatccagatgaccaggagaaaacgactttcacctgcccctatggtacatttgcttattggagaatgctcttcggtcttcataatgttcttgcaacatttcaaagaggtatgatgtctatcttcacagacatgattgaggatatcatggaggttttcatggatgatttttcagtttatggatcatcgtttgaggattgcttggagaatctctgcaaactgtttgcgagatgtgaggagaaacatttatttttgaattgggagaaatgtcactgtatggtgcaggatgggatagttcttagtcaccagatttctgagcatggtatagaagtatatagagctaagatcgaagttatgacaagtcttttagcacccgataatgtttaagcagtgaggagtttccttggacatactggtttctataggagattcatcaaagactttagcaaaatcgcaacaccactgactgctctactctgtaaagaagtcacattcgagtttacactagagtgtcatgatgcctttcagcagataaaacaagccttgataagcgcaccaattgttcaaccaccagactgggatctatcttttgaggtaaggtgtgatgctagtgattgtgcagttggggctgttctaggacagaggaaggataagaaacttcatgccatctactatgcaagtaggacacttgatgatgctcaaagaagttatccaactacataaaggagttgttaactgtggtttgctttcgagaaattcagatcttatctcgttggatccgaagttattgttcacacagataaagctgccttgaagtatttgatgcaaaagaaagatgcgaagccaagacttttgagatggattttgcttcttcaggaatttgacatcgaggatagagataagaaaggagttgagaatggtgttgtagatcatttgtcacgtattaggatcgatgatgatgttccttttaatgatttcttgcctgaggagaacatatacatgattgatatagcggaagaagatgactgcaaatgtgataagttgcagaatcgagcttcagtgtcgatcgacacttcttttatgtcgatcggcactcactttttggatgaagttgatattcgcaattacgcgatagtgtcgatcgacaccgtcctgaatcgacaagaaattagtcaccaactgagaattgcggttccatagcggtcgagaaggactacccatggtatgctgacattgttaattacctagctctagatgtggaacaggataatttcacagattacaacaacaagagattcttgagagagattaggcgatattatttagatgaaccttacgtctataagcattgttctgatggagtttataggagatgcattgctgcaatagagtggtcattttcacattgctgatatactatcgcattgtcacagctctagctatggtggtcattttgcaaccttcaagaaagtatccaaagttcttcaagcaggcttttggtggcctacaatgtttcaggatactcagaagttcatatcgtagtgtgatccttgttagagaaggggaaagatcagcaagcgtaacgagatgcctcagaaatttatcctcgaagttgaagtcttcgattgttggggtatagatttcatgggacccttcccaccattcaacaagaatctcttcatccttctagttgtcgattatgtcgccaagtgggtagaggctatagctagtccgaagaatgattcagcagttgtcatgaaactcttcaagtctatcatcttccctcgttttggagtgccacgcatagtcattagtgacggaggtaagcatttcaataacaagattcttgcaaaattgctctttcagtatggagtccagcatcgggttgctaccccctaccatccacaaacaagcggccaagttgaagtttctaacatgcaaatcaaagagattcttgagaaatcagtgggtaattcgaaaaaggagtggtcctacaagttagatgatgcactgtgggcctacaggacagctttcaaaactccgcttggtaccacaccttttcatcttctatatggtaaagcttgtcatcttccagtggaattagagcacaaagcagcttggacagtcaagatgatgaatttcgacatcaaatcagccggagaaaggagacttattcagttgaatgagcttgatgaaatacgaattcacgcttatgacaactcgaagctctacaaggaacgaacaaaagcctaccatgataagacgatctttactcggacctttgagcctaatgaccaggtacttctttatggttctagattaacattatttcctggcaaattgtcttctcgttgtacaggtccctacacatgtccactcggttaggccatatggaacaatcattttcaaaaacaacaatggaaaaccatttgccgtgaatggacagagagtcaaactttactggcatgaagccaagattccagtagaaaagcctttggatctttaggacccacctgttgattaagcaactgcagagtcaagctattgaatataaacaagcgcttagtgggaggcaacccactggtaagtatttgttctttttattcatttcattcatttgattcttaacttaagatttttattcagattttttttttttaaaaaaaaaaaaaaaagaagaagagagtgtcgaccaaaaacgacagagaggttcagaatcaggatctgcgcctacaaagaccgaggacaagttcctcgttcgctcttccatatcagctgccttctcctccagccatcccc

SEQ ID NO: 164465 - DNA, 2368 bp, Arabidopsis thaliana landsberg
ctatctttagcaatgagcatatcagtgaacggacaatctcaagtgcctcctgggtttaggtttcatccgaccgaggaagagctgttgcagtattatctccggaagaaagttaatagcatcgagatcgatcttgatgtcattcgcgacgttgatctcaacaagctcgagccttgggacattcaaggttcatcatttatcttttattcttgatgaaacgtattaatagggcttgtatatattaattaaattagttttttaatgcatgtgttgagtcaagaactaaagctctgaattcaggaaattttgcagagtaatatatactttttgtgataataaaatttgcagtaacaaaattcagtcaaaacttaacacaactcttgttttttctatgtagagatgtgtaagattggaacgaccccgcaaaacgattggtatttctttagccataaggacaagaagtatcccacggggactagaaccaacagagccaccacggtgggattttggaaagcgacgggacgtgacaagaccatatataccaatgatgataggatcgggatgcgaaagacgcttgtcttctacaaaggtcgagcccctcatggtcagaaatccgattggatcatgcacgaatatagactcgacgagagtgtattaatctcctcgtgtggcgatgatgacgtcaacgtagaaacgtgtgatgtcataggaagtgacgaaggatgggtggtgtgtcgtgttttcaagaaaaataacctttgcaaaaacatgattagtagtagcccggcgagttcggtgaaaacgccgtcgttcaatgaggagactatcgagcaacttctcgaagttatggggcaatcttgtaaaggagagatagttttagaccctttcttaaaactccctaacctcgaatgccataacaacaccaccatcacgagttatcagcggttaatcgacgaccaagtcaacaactgccacgtcagcaaagttatggatcccagcttcatcactagctgggccgctttggatcggctcgttgcctcacagttaaatgggcccaactcgtattcaataccagccgttagtgagacttcacaatcaccgtatcatggactgaaccggtccggttgtcataccggtttaacaccagattactatataccggagattgatttatggaacgaggcagatttcgcgagaacgacatgccacttgttgaacggtagtggataacggaaatggaagagaggaagtgactaagtgagtgacataccaaaacattgtgtagaaagatataataatcatcataccatatggtatagttgttgaaacttttacggtataaaggtcagattgtgataattacagtacgtagttatgtgatatcattacagaaaataaaagttgtctatatctgtgtacattttatatcatgattaactttatagaaaagatttggttgcatagttgaatttctttggatcaagaatattagtttttgtctttttgaaacttaattgccattcgatgaacaaaaaggcaattacattttctactgtatagaaatcatagtctgtcacatgcatggtttgccggatgttttctaattacaattatacaaaaaaggattttgaccaaaagttgattatgatttcaagagagacaaaagaccaaaatgataattaattcgtcgacaaattaactttagaacacataatttccattacgttattcaaagtttctcatttactctcaattaaactgaatttttatttactagaaacttgagatatttagttggtaaatgcttagtttgatgttgaatagtttgcttcattcatcattaggaatagattaattacccaattaatcacccccaacaaacttggattaagatgcaccaagtgcttaataatagtagctaattaacctacccatcaaagctaatcacactcattatttttcaattatagcatttaatcaaacattattcgttcttattgttgaataatctctttcaaggtgcggaatcttacttttgaagaaaaatggaggattcaaatattctcatctttctttttatcatgtgataatattagtaacagactccataactgtaacgttttgacctttcattttccactttagctttctgaaattagattcgatttgttataatgatgtattgatattgatcatgttgtaaatactaaacgcaacaattacatgaaacttgaatttcgaggcattaatttttctcttttctctttgaccttagctgatgcaaaatggaggatttctcaaatatcctcactgttatttattttttattttttgggttaaaccttaataaaaaatattggaaatatcaaaa

SEQ ID NO: 164466 - DNA, 509 bp, Arabidopsis thaliana landsberg
  unsure (1)..(509): unsure at all n locations
acgccgcgctgcccaagctgcgactgttcacgctcacctccacgtcgctgaccgacggccagccgctgggcaaagcccaggtcagcggaatcatgggtgccggtggtgaggacgccagcccgcagctgagctggtcgggctttcccgaggagacccgcagcttcgcggtcaccgtctatgacccggacgcgcccaccgcgtcgggcttctggcactgggcggtggccaacctgccggccacctgcaccgagctgcccgagggtgtcggggatggcagcctgctgcccggggatgcgctgaccctggtcaacgacgccgggatgcgccgctatgtgggtgccgcgccgccggccggtcacggggcgcaccgctactacgttgcggtgnnnnnnnnnnnnnnnnnnnngctggagctggccgaggacgccagcccggcctacctgggcttcaacctgttcatgcacgcgatcgcgcgcgcggtcatcgtcgccccctacgagcagaagtag

SEQ ID NO: 164467 - DNA, 361 bp, Arabidopsis thaliana landsberg
tccttcagctcttctctgcgccctccatgtcgttcccccgcttcctgctcgctcttcccgccgcattcctcagcgccgctacggctctcgccggcgagacgccggagttcagcctcgccatccgcaaccaccgcttcgaaccggccgaactgaaggtgccgtccggcgtacgcatgaagctcgtcgtgcgcaacgaggacgcgacgccggaagaattcgagagccacagcctcggccgcgagcgggtgatccccggcggcgccaaggcgggagatctacatcgggccgctcaagcccgggcgctatggcttcttcggcgagttccacgaagcgacggcgcaaggcgcgcgtcgtcgccgag

SEQ ID NO: 164468 - DNA, 1756 bp, Arabidopsis thaliana landsberg
atttatcttaacagacatttttttccctcttttatggtttcgttcgctcactgttgagaagaaggaagaagaagaagacgatgaagctctctgtgtttcgattgagctattggaaccgtcgaggaagtagtttcagatcatcgccgtcgttggatccatcattcgatggcaaatctccgtcgtctgtgttttggttcgtgattcatggtctctgctgcttgatcagcttgattctagggttccgattcagccatttagtactcttcttccttttctcgacttccgtcaccaatctatacacaacgccatttctctttgccggaaacggcggtgtaagccagcttctccggctaaaacctctggaaacagcgactaacagcacggtgaagaagaactctcgagtggtggttggaagacacgggatccggatccgtccatggcctcacccgaatccgattgaggtattgagagctcatcagttgcttgtgagagtacagaaagagcagaaatcgatgtacggtgtgaggagccctaggactgtgattgtggtgacgccgacttatgtacggacttttcaggcgcttcatttgaccggagttatgcactcgcttatgcttgttccgtacgatttggtttggatcgttgtggaagctggtggaatcactaacgagactgcttcgtttatcgcaaaatcaggattaaagacgattcacttaggattcgatcagaaaatgcctaatacatgggaagatcgtcacaaattggagaccaaaatgagacttcacgccttgaggttaaatctttgattcacattttgttttgctgttttgattgattgattcttatttgacttgaaatttattgttcttgtgttgatgtttgctcatcagagttgtgagagagaagaagttagatgggattgttatgtttgctgatgatagcaatatgcatagtatggagctttttgatgagattcaaactgtgaaatggtttggtgctctatctgttggtatacttgctcattctggtaatgcagatgaattatcatcggtcttgaagaatgaacaagggaagaacaaagagaaaccttcaatgccaatccaaggtcctagttgtaattcctctgagaaattagtgggttggcacattttcaacacacagccttatgccaagaagactgcagtgtatatcgatgagaaagcgcctgtgatgcctagtaagatggaatggtcagggtttgtgttgaattctagattgctctggaaggaatctttagatgataaaccagcatgggttaaagatctcagcttgttggatgatggttatgcggaaattgagagtcctttgtctttggtgaaggatccttccatggtggagccacttggaagctgtggccgtcgtgtcttgctttggtggcttcgagttgaagctcgagctgatagcaaattcccacctgggttagttttctttaatcattctctctgatggaaagcaaatttctcatcacattatcacttgctgagttgcagtcttctaacttgtattgtatgaacgcagctggatcataaagtcacctttagaaatcacagtgccatcaaagcggacaccctggccagactcttcctcagagctcccagcggcggcgatcaaagaggcaaaaagcaactctaagccaagagtgtagaagagcaagagctataaggagaaacaagaacctaaagctttcgatggtgtcaaagtgtcagcaactagctaa

SEQ ID NO: 164469 - DNA, 484 bp, Arabidopsis thaliana landsberg
gaacagaccctcgacgccatgttccaggccctcgccgacccgacgcggcggcgcatggtggatcgcctgagccgggggtcggcatcggtcagcgagctggccgaaccgttcagcatgtcgctgcccgccatcgtccagcacctgaaagtgctcgaggatagcgggctggtgaaaaccgagaaggtggggcgggttcgcacctgcaccatcgacgcaggagcgctcaccatggtcgagaagtggatcaacgatcgccgcatcggctgggagaagcggctcgaccgcctgggcgcgtttctggacgccctacccccggacaagcccggcaagtaagccgccggggcacaagcctgactgaaccatcaccgaaacgctgccgggccgttggccggccacggcggcctgcatcccaaggagaattagcaaaaccgaccgttccatcgcccatggcagcttcaccatcgagcgcaactacaagcaaccg

SEQ ID NO: 164470 - DNA, 512 bp, Arabidopsis thaliana landsberg
atgtccgaaacccccattcctgcagtctatccttttgatctgcagctgatcgagcaggagctcgggagggtgcctcgcggcgtcgtgggcgtcgccgcccggtgtccgtgcggctgcccggccgtggtgcggacgctgccccggctgccggacggcacgcccttcccgacgaccttctacgcaacctgcccgcgactgaccgccgcgatcggcacgctggagtcacagggcatgatgcgcgaaatgaccgagcggctgactgtcgacccggatcttgccgccgcttaccgcggtgcacatgatgactacctgcgccggcggaccgagctcggcaaggtgccggagatcgccggcatctcggccggcgggatgccgcaccgggtcaagtgcctgcatgttctggtcgcacactcgatggcggtcggaccgggtgtcaacccgctcggcgatgaagcactcttcgcccttccggcgtggtgggacggtggctgctgcaccccggagcgcggatg

SEQ ID NO: 164471 - DNA, 1158 bp, Arabidopsis thaliana landsberg
tcggtctcaggaggtgagacagtcttccaattctggtgggggtctgcgggaagcaggcctttccactggtcttacactcaagaccgtgatcatccgatcgttgaggacgaggccgggttggcgaacctgcttcgccacatcaaagggaggaactgccaaatgagcggagtgaagaacatggccgaggcggcggcttatgctgacatgatggcgaaggagggccaggtaataattgataactgcctccttctaattccattcttatgtcagctctaacctttggcaagtgatagctgccacgaacaagctggtcgctctctatgagcaacgtctgagcaaggttccctcggcgagcgagctcgaagaagggaagaccctcaaccaggagctgacaacgagtgtgaaggctggtcaggagcgtgaggtttcgttccaggtatgcctcggttatggcttgtttgtatatattttatcgatgatacgatgactctgacctgactatggtttcaggcggagatcgagaggttgaaaatggagttgtccacttcgaaagacctcgagaaaggttatgctaagaagatcgggctcatggagatggaaatcaggggattgcaggctggcaagcagacgacgagaaaccagattcatcgcttggagcagaggagggaggagctctccaaaagggtgatggaactgacttcgactgcgcaaggagcgaagaaggcggttcatgatgctaaggttgaactggccgctgcgtattcgaggttgctggctgggatcaaggaaaagtgggtcgccaaaaaggagtacacgatgctggagggtcaagcggccgaggtggagtcgaacttggctttgatcgaccagatcacaaaggctgctatcgatttgaccgtggagagacctcggctgcaagcagagctggatgacctagaggcgcattgcaaatcgaaggaggtatcagacttcactctaagcaagttggatctcccgcatgttttggagatttcggtggtacgtccaattgacgtcaacgagcaagggacgccaattggcttggatgagttcgggagcaacaaagacgcgtttctgagaggtctagcggatggttctggtactgtctttgctacgccagccggagaatcgagggagtga

SEQ ID NO: 164472 - DNA, 493 bp, Arabidopsis thaliana landsberg
atggaggattcaggagcgattctatgtcagatctccattttcaaggacatgcttgatcaggtttcactattcttcatcttcttcactggattggtatctctcgtctttagcttaatctgagctgtgatcgaatgaaacaggtcaatcgggaaatcgaagcaaacattcaggtgacgcgagagatcgaatcacagatcggagcgtgttatgagattgaatcttctctgtctctcaaggaagctgagcttactagatcgttccttgcttctcaattcgagatcagcggtttgatctccgttacaggtgtttaaattttccgaaggatttgttcaatattcacattagtaattttgatcagtatggttttatttccgtaaaagttgattcaagaaaatgtttgaagaaattggaggatgagatttgttggttatgtaaggaggcgcagtgagctaattcctaggctccccgagaggcggtaaacatcaataattgc

SEQ ID NO: 164473 - DNA, 1353 bp, Arabidopsis thaliana landsberg
caagtacggcattgagccaagatacttcttctttagacatgagttcatctggtattactgaagaaaatgttgcatgagccacctcacagcttgaagatcttcttgatagaacccttggtcttggtgctgcaacggtggcaggcaagaaagatacaatagagacatcaaaagatgatatggaagagaagatgaaacaggaagagaagaatgcagtagtgagagataagccttatatgtcaaaagctgaaagaagaaagcttaagatgggccaaagcggcaacacagctgctgatggtaacactgggcaagaaaagcagcaacgaaaggaaaaagacgtttcttctttaagccaagctaccaagagcatacctgataacaagccagctggggaaaaagttagccgtgggcaaaggggtaaacttaagaaaatgaaggagaagtatgctgatcaagatgaagacgaaagaaaaatacggatggcattgttggcagtaagtacttcccttggattctccattttttgtcatagaccatcattgttctcttatcagtacttcataactggtaaattaatttgtctcccctttgcagtcgtctggaaagccacagaagactgatgttgaatcacagaatgcaaaaaccgcggtcactgaagtgaagaaaccttctgaaggtaaaaaatttcaattttgtcttttttcttctgaaattgtttccgggcatacactttccattagactggaaccatatgatactgatagttgctttgggttgctgtgcagagacagacgatgctgtgaaaatatgttacaggtgtaagaaggttggacatcttgctagggattgtcatgggaaagaaacttcagacatggacaaagtggtgatggaagaagacgatattcatgaagtaggggacgaagagaaagaaaaactgattgatgtcgattaccttactggtaacccgttaccaaccgacatccttttatatgcggtccccgtgtgcggcccctacaatgctctccagtcatataaatacagagtcaaagcgattccaggcagcatgaagaaaggaaaaggtaataacacattctcttccaagtagttgtaaatgtagagcttttggactgtattgatgttgacttttgtgtttggacagctgcaaaaactgcaatgaatctgttcacacatatgtcggaggcttcagtaagggagaaagagttgatgaaagcttgtacggatccggagctgatggctgctcttgtcgggaatgtgaagatcacagcagcaggtttgacgcagttgaagcagaaacagaagaagggcaagaaaagcgggaaacaacaacatagctag

SEQ ID NO: 164474 - DNA, 1717 bp, Arabidopsis thaliana landsberg
atggatcctaaggggaagggaattgtgatcaacgacaaggagaaggagtccttcgtcaacgagccaagggatgacaagtccaatgactcgggctcgggccacaagcgaagagatgggaagaagaagaagacaagacgcatcaaggagatcgtctactacgacagcgatgagtcctcttcttcccaaaagaacgacgaccacgacaaacaaaggaaaccggttaattcgaacttttcatttgattattctcgtattccacatagttcgaattcgcatttgctttccattcctcttggtaaacctccacattttgatggggaggactacggattttggagtcacaaaatgcgtagtcatttattctctctccatccaagcatatgggagattgtagagaatggaatgaaatttgatagctcggatagccctatgtttatcaatgaacaaattcataaaaatgcacaagctactactgttctcttagcatctttgtgcagggaagagtcaataaggtgagccgcttggacaatgccaagcagatctgggacaccctcaagatctctcatgaggggaacgatgtcaccttactcaccaagatggagttggtggagggcgagcttggacggttcgcaatgataaggggcgaggagccaactcaaacatacaaccggctcaagacccttatcaacaaaataaggagctacggaagcacgcgatggacggatcacgacgtcgtccgcctaatgctaaggtcctttactgttcttgatcctcatttggtgaacaatattcgtgaaaatcctaggtacaccaagatgtcgcccgaagaagtacttgggaaattcgttagcgggcgaatgatgatcaaggaggcaagatacgtggacgacgccttgaatggtccgatcaacgagccgcaaccccttgctctcaaggcaacgaggagcaaggaggcgctaccgagcaaggtggcgcaagttgaggcggccgggctaaataatgaggagatggccctcatcattaagcgcttcaagatggcgcttaaaggtcgcaaggggcagccaagcaagaccaaagccaaggggaagcgctcatgcttcaaatgcggtaagcttggtcattttattgctaactgtcccgacaatgatagtgatcaggaccaagggatacaagagggagaaaaagaagcattacaagaaaggccaagggcgaggcacatatcggtaaggagtgggattcggattgatcctcctccgactctgacaatgaaggactcgccgccaccgccttcaacaagtcattcctcttccccaacgagcgtcacacttgcctcatggcaagagacaagaaagtaagcactcatactagtacttatgattcttcaagtgaggatgagtctagtgatgatgaaatatactattcatcgcttatctaaaggcttagatagatctaagattgacaatagtaatgaactgattgatgctataaatgataagtataggctactagaaaagcaagaggatctcttgtacgaagaacatgataagtttgtagaggctcaaaaatcccttgcattagaaattaagagaaatgaaatgcttgcttgtgaattgtctacatgccatgattcaatttctaaattaaagagcattaatgatgacttaaatgctaaactagtagaagcacaaaaatccaactcttgtgttgaacatgttga

SEQ ID NO: 164475 - DNA, 3751 bp, Arabidopsis thaliana landsberg
atgaccatgatggcttcaccgtactcgtccgacgatatccattctccggtgaactcaacggtcgttgcaatagacaaagagaaacatagttcttacgctgttcgttgggccgtcgaccatctcctcaatatgattcacaatccagtcatgattcttgtccatgttcgtaccaaaaattcaaaccgtaggtaccttatactcattatcctataatattgaatctattatcattcttggaactactatgaatcatcatgtgttttcaaaacgttaaagattttgaatgaattgcagatggagccaacttgaacaatgatgatctaaatcagctttttattccatatcgaggatattgcgcgcgaaaaggggtataatatatatagttaatccatttcgttttcaagcatatatgaacagaaatgttttaacgccatgcactcttagtagatttctatgacggaggttgttctagacgattccgacgtagcaaaaacaatcttggattacgttaataacaacctggttaacaatcttgtattgggagcatccacgaagaacaccttcgctaggtcttttatgtttagtaaaccacatgaggtgcaatctagcataatgaaatcgacgcctgatttttgttcggtgtatgtcatttctaaaggaggcaaagttcagtcttcccgaccagctcaaagacctatcaccaatacgcttgccccgcctcgtgttccatcctctggctttttaatccaatctttatccgatagcgagcaagatctcatacctaggtaacccaaccttcggttctttttatcagttttctctcaaaacttttactaaaagcaaatgttattgttttcttgatacgttttagggtccagcgtagtgcaaggaacaaacctaatgagactacttatccgcataatcgtgccgccttcaacaccacgcaaaaaggttacaaaagccctataaatgggtcgatggatttcaacaacggctttaatcaagctgcctttcaaagaaatcccacgttacaaagttcattttctgatgaatctgatggtgggtttggagtgatgggttcagttgatctctcttctcataatagtatggatttttatcatggtgcttcgagttcttcagaagagtcgattccacaatcaactgtatgttttctcaaatgattttctttttgtggttcaagagttaaggttagaaggctctaaatccctatatggttgtttgctttatttgcagaaagatattgaagctgaaatgagaaggctaaagcttgaacttaagcaaactatggatatgtatagctcagcttgtaaagaagcacttacggcaaaaagaaaggtatatagtttaatttgagcaagtttcttgttgaacacggtactcatggcttcttttattttctaggcaaacgagctaaatcaatggaagatagaagaagctcgtaaattcgagaaagcgaggctttctgaagaagcagcattggcagttgctgaaatagagaaagcaaagtgtagaacagccgtagaagcagctgagaaagctcaaagaatggctgaactagaaggacaaagaaggaagcaagcagagttgaaagctgtaagtgaagaaaaggacaaagaccgcgcagtgagtgctttggcacataacgatgttcgctacagaaaatatacgatagaagagatcgaagaagctacagagaggtttgcaaacaacagaaaaataggagaaggcggatatggaccagtctatcatggcacacttgatcacactcctgttgccataaaagtcttgagacctgatgctgctcaaggaaagaaacagtttcaacaagaagtcgaggttctaagtagcataagacatcctcacatggttcttcttcttggtgcgtgtccagaatatgggtgtttggtgtatgagttcatggacaatgggagcttagaggatagactctttcgtagaggaaactcgcctccactttcatggaggaaaaggtttcaaatagctgcagagatcgctaccgcactctccttccttcaccaagcaaagccagagcctctggttcatcgtgacctaaaacctgccaatatacttctagataaaaactacgtgagcaagatcagtgacgttggattagctcggttagtacctgcgtcagtggctaacacagtgacgcaataccacatgacatctgcagcaggaacgttctgttacatagaccccgagtaccagcaaacgggcaagttaaccacgaaatcagacatattctcattagggataatgctgcttcagatcatcactgccaagagtccaatgggtttggctcatcatgtgtcgagggcaatcgacaaaggaactttcaaggatatgcttgacccggtcgtgccagattggcctgtcgaagaagcattaaattttgctaagttgtgtctaagatgtgcagagctaaggaagagagatagaccagatcttggaaaagaaatagttccagagcttctccgattaagaaacttggggaaggacaatgaaccaggtatattactatacatataaaaccctaaacaaagtcttgaatctatcaagtaatactaacttaattgcttacactttcattaggatgccataaataacaaccgggtctgaagatcatcatatacttattaaatattttcaagacttttgtgaggaactgaatagagagattgcttgcttctcaaggaagaaagtaagaaagtggtaagtgaagtgccatgaagagattactaactaaaatctaatccttgtttatattatatctctgtaacatattacttccacctttctagctttccgatgaaaagtattgaacaaaatgcaatggcttattgttaatgttctcgttgcatgaaacattgtcattatgttcctttgtaagttttaattctaatttttgagagtatgtgatattgatatagatttttgtgtgtggataggttagcgtttaaaaaaaaaaaaaaaactcaaaagagttcaactcaatttgggcttcaacatataaaatcacccggttacaactaaaagtactacttttttcttggtatcaatgttaagctaaaagtactacttggttaccaaagaacagagaaattataaaactaaaacaaaaatttaagaaaaagataaactaatcaaaacaatggtgacctttataaactgggaattgatacaaagccacctttgaaagcaaagtataaaaagaaaaatgagtacataccgaaaaattttggagagtgtgacactttttagttctagaatcagttgtattgcttcataacataaactatttttgagtatgagtcgagaaaggaatatcataagtcatttatcaaaatgttgaaaaagctatgtttgcatctttaccctaagataaataaaaacatctaaagcttaacattgtctttttgatattctcaattataatattaactttccagcaaaacacaatccatcaagaaagcatcttagtatcaagccaccttatgatttataaatgtccaaccaactcagctaagcaatgaacattttactccaaacaccatcatcatcatgggcctcatcgtcatcatcattgcattggtcatggtcatggtagttgcatcatcaccgtccgatcaaacaaatgtcctcactcctctttgcatcagcgaatgctccacgtgtcccaccatttgctctcctccgccctctaaaccctctc

SEQ ID NO: 164476 - DNA, 903 bp, Arabidopsis thaliana landsberg
tgaattgattatcgagatggactgttttcttccagtacagctccagttatgcttccaaggagtttgtactcagggtgtagcatacttgtgaagttgaaactaaagaaagttgttcttgtggatgttacttctccattctctttcccatctctcaaggaattgagccttaaatctgtcaagtacccagatgaagaatttgtccagagcctattatccaattgtcctgttcttgaaagcttggttgtgaaacaatgtccaaatgacaatgccaccattttcactgtaaaaaactcttctctcaagagtttagtcttggaaaatcaagatctcagatataatgatattggagctgggtatgtgatagacgccccttctttagagaaatttaagattcgtgatcttcatgaggataggttttgtgtcattgagaatgaaatgcctaatattgtagaggcagatattgacgtcgcttatggtcatccagggaaaattctaagttctattacttcagtcaagcatctcactttatgtataacatcctcaaaggtaataatctactcaactatacatgcttgtttctacttttttataccatctgtatccttgattttatttcagaatcagaacgaatagaaaaatgtgtaccccattactgcaaagaatgggtgttcttgtgagcaaacctgttgcgactaacattgcttttgtactttgttctgttttgttttgtaggatgcatatcctgttggtctagccttctgctctcttgtatatttagagatatggacactggatacagagtggtcgaatgacttgaatctacttatgtgtgttctcagagattcacctaatttacgagctctcaaacttgaacaggtgcatataaaatgtcccaatttattc

SEQ ID NO: 164477 - DNA, 1420 bp, Arabidopsis thaliana landsberg
atggccaccattgtttctcctccacatttctcccctgtcgaagacgctgaaaacatcaaggcggcttgtcaaggttctacttttctttgcattagtgtttcaaaacttatgtggttcatcaagtttcttgctatctcctttactcctcttctttatttctatttggcgttttaggatggggaaccaatgaaaatgccatcatctcgatcttaggacaccggaatttgttccagaggaagctcataagacaagcttaccaggagatttaccatgaggatctcattcaccagctcaaatctgagctctctggcaattttgaggtttagattttatatatctcctccatgtgctctactctactctatttcaataatccacaaaagataaatatatttgttacctgcagagagctatttgcttgtgggtcttggatcctccagagagagatgctctcttggctaacttggctcttcaaaagcctattcctgactacaaggttcttgtcgaaattgcctgcatgagatcccctgaagatatgttagctgctagacgtgcttaccgttgcctctacaagcattctcttgaggaagacttggcctcccgtactattggcgacatcaggagagtaagtaattttaaatttccagatagtttcttcttgttttgactgatcttcaacgcttgggcgtttcttgatatatacagctcttggttgcaatggtgtctgcttataaatatgatggagaagaaattgatgagatgctggcgcaatcagaggctgcgattcttcatgatgaaatccttggtaaggctgttgatcacgaagaaacgatcagggtgttaagtacaaggagcagcatgcagcttagcgcaatcttcaaccgctacaaggatatatatagcacatcgatcactaaggtatacaaacaaaaaaatgaacatcaagttatgttataactgatctgtgacaaagcaatcaattggaaatttctagacaacaataaagcagtcataccagtttttcttcatgacaatgttctttttgctgtccttaatgaaacatttgatgaccaggatctcctcaatcaccctacaaatgagtacctgagtgcactacgtgcagccatcaggtgcatcaaaaaccctacccggtattatgcaaaggtaggatgcaacaatattgtttagatgtgttctctaaattatcccaataaaactaactggtattcatatggttaatccctaatgcacgtaggttttgcgcaattcaatcaacacggtggggactgatgaagatgctctgaaccgtgtgattgtcacacgagcagaaaaggacctgacgaatataactgggctgtactttaagaggaacaatgtgagtctcgatcaagctatagcaaaagagacatcaggggactac

SEQ ID NO: 164478 - DNA, 2880 bp, Arabidopsis thaliana landsberg
tgatcaatattcagttcattggggtggcacattatgtctcaagctttttaccaagattttaattttgtgtcacagtaaaaaggatgccgataactcaatggtgtatagtaaccgacatggctttcaaggttttgcggccaggctcaccaagtcccgagccaaaaaaatagctggaactcgtggttgtcttaagtgtcacacacaccttgtctttgcttcttagcattcaaaatatttgatattaactaacactatagtttgactgtctaaccaagcagagcttaatgttttcattgctgattcttgaaacagatttacctgaagttgttcacgtcataccggatggtttccatgagcttgcgacaacacggacttgggaatacttaggcctttcttctgccaatccaaagaacctcctaaatgatacgaacatgggtgaccaacttatcattggcgttattgacacaggtatcagtatatatatttcatcacattggagatcttatctttgtttctatattttagtgcctcaataacttgttgttttgtgtggttgtaggagtgtggccagagtctgaatcatttaatgacaatggggttggaccaataccaaggaaatggaaaggaggctgtgaatcaggagaaaacttcagatcaacagattgcaacagaaagctcataggagcgaagtactttatcaacgggtttcttgctgaaaacaaaggattcaacaccacagaatcacgtgactacatttccgctagagactttgatggccatggcacgcacgtcgcctccatagcgggtggttcatttgttcccaacgtaagctacaaaggccttgctggaggaaccttgagaggtggtgcacctcgtgctcgcatagcaatgtacaaggcttgttggtttcatgaagagctaaaaggagtgacttgttcagattctgacatcatgaaagcaattgacgaagctatacatgatggtgttgatgttttgtcaatctctcttgttggtcaaattcctctgaattctgaaaccgacatacgtgatgagtttgctactggattattccatgctgtggcaaaaggcattgtagttgtttgtgcaggtggtaacgatggtccagcagctcagactgtggtaaacatagctccttggatcttaacagtggctgcaaccactctagaccggtcctttcccacccctataacacttgggaacaataaactgatattggtaacaacaagatatatacaacaccataatgtttttttcacaacataatgtttgatgatacgtgccttagtgtgagtttggtaattttattacagggtcaagcaatgtacaccggtccagaacttggcttcactagcttggtttacccagagaatccagggaacagcaacgagagtttttctgggtgaagatcaaatctctagtttctcattaattaggaccaaatctttctatatggatgacatcatttctctaacatcatatcatgcagtgactgtgagcttctatttttcaactccaaccatacaatggcggggaaagtcgtgttatgcttcacaacatcaacacgttacatcactgtatcaagtgctgtgtcttttgtgaaggaagctggtggtcttggcgtaattgtagcaagaaaccccggcgacaatctttcaccatgtgaagatgattttccttgtgttgctgttgactacgagcttgggacagatatacttttatacatacgttccacagggtatgaatatatgaactatgagcaaatatgaacatgcatcagtatttttatggacttgtatataattttcagatcacctgttgtgaagatacaaccttctagaacacttgttggacaacctgtggggacaaaggtggcaactttctcatcaagaggacctaactcgatttccccagcgattcttaaagtatgtccggatcctaattttcagattttctgcatcagatgttttcaaaaacaagaaaatgtaacgttttttgcaatgcagccagacataggggcaccgggagtgagcatattagctgctacatctaccgattccaattcaagtgtagggggatttgatattcttgcgggaacatcgatggcagctccagttgttgcgggagttgttgcacttcttaaagctttgcatcctaattggtctcctgctgcatttagatcagctattgtcactacaggttcttattttcactcaatcgcagaacaaccgatcaaaagcaaagggcaaaggatacacttgtctcaataattgtgttcactactttgcagcttggagaacagatccattcggagagcagatatttgcagaagggtcatctcgcaaagtagctgatccgtttgattacggtggaggcattgtgaaccctgagaaagctgcagatcccggtctcatatacgacatgggtccaagagactacattctctacttatgctccgccgggtacaacgactcatctatcactcagcttgtcggtaatgtaacagtctgctcaacccccaaaacttccgttcttgatgtcaatttgccgtcaatcaccatcccagaccttaaagacgaggtcactctcacccgaaccgtcactaacgttggaacagtcgactctgtctacaaggtcgtggtcgagccgccgcttggcattcaagtggttgtggcaccggagacactagtgtttaactccaaaaccaaaaatgtctccttcacggtccgtgtatcaactacacacaaaatcaacactggattctactttggaaacttgatatggacagattctatgcataatgtgactattcctgtgtctgtgagaacgcagattctgcaaaactactatgatgagaactga

SEQ ID NO: 164479 - DNA, 428 bp, Arabidopsis thaliana landsberg
atgaccgccgccgagctggcctacccgcccgtaaccgaacaggatttcgacgcgctggccgagctgcgcgacgccgccatgcggcccagcctggaacgcctgggccgctacgacccgcaacgctcgcgcgagcggctgcgggccggcttcagccccgcccgcacccatggcatttgcctggctggccggcgcatcggcttttacgcgctgcgcccgctggacggggcgctgcggctggaccacctgtacctgctgccggccgaaagcggccgcggcgtgggcagccgcgtcatgcggcatatcatcgggcaggcctgggcggccgggctggcattgcgggtgggcgcgctgcgcggcagcgactcgaaccgcttttatgtgcgccacggtttcgtgcaaaccggcgaaaccgaatgggacatcgaata

SEQ ID NO: 164480 - DNA, 3643 bp, Arabidopsis thaliana landsberg
atgcatggactacatatcatgaagcttgttaggtcattttgcaggtcttctggtgaaactgctggtatgtacttcccactttagtattggaatataatttgcccaagtttatatatatatatatctacttctagatatgatagcttggaattttcttttcatatatcaagtttttgtttcatatatctaaatctaatcctcggtaggacagtctagaattttaatgtttgcattggcaccattgaatattatgcgtagttacttactggtagtttttttagtttgcaatcaagtttcatagctactgtataaacagaggaatgaattactgaatattgtttttatttgcgcaccagatgatcagtttgagcatgttggttcgatccttgtcaacatatcaaaaacagaagatgggaggaaattgttactggagccaaagagacgactattaaaacagatcattaggcagtttgattcaacaaatcagttgcgaaagaaaggggtacgtttaaaaggagtttggcagattactctttaatgaacatgttgcttagtctataccctttgaacaatttaacatggattatgcttatcggctttcaggttgctgggactattcgtaactgttgttttgaagccaaaaaccaactccagaatatactcttgatatcagagtttctttggcccgctctgctcctaccagttgcaggcagcaaggtttgttgattttgctttatagctgctacgttgttgcttaaaaaggttttcttcttttatgagaaaatagtttctgattattgggttttactttccttagacatacagtgagcaagatgtcgcaaaaatgccacctgagcttggaagtgcactgtccattgagcgagaaccagttactgatcctgacattcgcgttcagacactcgaagctatatatttgatcatcttagaggtaaaacatttctctgtctcgctttcccttcttgtgaactcttgtgaaggaccaatcaaacccaaaacttacaaaaggtcctctgttatgtcaaaactacttttgatgttgcaggaggcaggtcgaagggcattttggtcagtcaacggcccacggattctacaattgggatacgaatatgaagaagatccgaaagcaatgagagcctatgagcaagtcggttctttggtatgttcactccctctaatctcactcactgactaactctacaggacttaagatagcatctttctcactattaaccgttatttgctgtgccgtttttaaccagcttgttgaggaagctggaggtccggaagagtcgttggagccaacaaaagcagagtcttgaagttcattatttgtggttctccgactctagtccccattattggctgccctcgcaaagtaagttacttatcctgttatgaaagagttactactacatcttgtgcactactagttgtaacactagattcgttattgacttacgcgatcttattagtgctccattttctatttttggttgtaattttattttatattagacattatagtatgttatcttcgttagacaatatatttgtgtattcttacacacattttttgctacttctctaattgttttgaatctgaatcggaaatcaagcagagaagatctaattaaactactaatgagttaatgttttttacatattttatagaaatatcaattaataaacgataaacaccacattactgccaaccccacgaggtagccaccaaatgtgtccacaattgtacagataagagaacagagaggcaaaatcaaatcaatgattttgttcttttaggcttttatgtttctttggcatgtgttctaatcatactttttaaccattcgcattattaaatatttagagatattaattaattaattagcacacattaaaatcgaaaccagttggcgcgccttgaccattcctttaaagccacgtggaaaattccgaatagttgggtcccacctgataaatcatgttagatctcttcgtcatctcctcctctgcgtcttcttctcctcttcttcttcgcgacgaaggagaaagagagaaaacaccgaagcgacgaagaagaagattataatctaatctcttcttcgtgtagtttagcgaagagtcatgcgattttcttctggcgtttgatttcgttatctcgagttgttgtgcggggcacagattgattagaattagagatgatgagtttcgtgatttcagatgaatttctggggacatttgtgccgattctggtgtattgggtgtattcagggatgtacatgtgcttaggatctttgcataaatatagattgcattcgaagatagatgaggatcagaagaatctcgtttctaaatctgccgtcgttaagggcgttcttcttcaacagactcttcaggctattatctccgttattctcttcaaggtattgaatctctctctctctctcccttctttgaacattgtggcaaatctgtgaatgttataggattttggttgtggattatgctaataatgttgttgtcctccttgtgcttcttgttaatctaattttgtggttagtgaacttaggtcgatgagaatgaattaggggttttctgatttcaattcaccttttgttgtcctgaagctgttggatcaaggttacagatttaggctgcattaagaatagtttagattctggagattgtttgatgaaataaaacttgaatctcctgcttcttgctgttttatatagagaatttgctagattgtttcacttgaaattcttgaacataaggcgttactttagaaaagcttttacgtctagatttgtgattcccttgtctaatagtgcttagaggaatacaatctttacccttcatcattcacatgtgcaaggttttgttctcttgcattggagaccgttatagatagtcttggaatttctcactatttgtgtgtttcagagtcgtgagcttgtgatgtttctctgtattggaagaaattgattgaggtttctagttctcatgttatggtacactctggatattttgttgatagagcttcatgtattagcattttggagcatttgtttcttgtttacctgaaatattttgtttggaatttggttgttctctttagataacaggaagtgatgcagatgctgctacgacacagcaattttccattctacttctggctaggcagtttatcatcgctatgcttgtaattgacacttggcaatatttcattcatcgatatatgcacctcaacaagttcttatacaagcacatccactctcagcatcatcgccttattgtgccttattcgtatggagctctatacaaccatccactagaaggtcttgtgttggacactattggtggtgctttgtctttcctcttctctggtatgtccccaagatcagccatctttttcttttccttcgctaccatcaaaacagtagatgatcattggggactatggcttccgggaaatccatttcacatcttcttcaagaataactctgcttaccatgatgtttaccaccaactttttggaaccaaatacaacttctgggagccattctttggtatgtgggataaggattctcggcacttacttgccttattcattggagaa

SEQ ID NO: 164481 - DNA, 657 bp, Arabidopsis thaliana landsberg
atggacgaggctaccggggaaacagaaactcaagatttcatgaacgtcgaatccttctctcagcttcctttcattcgccgtcctaaagataagaaccctaaacccattcgtgtcttcggaaaagatttcaccggcagagatttctctattactaccggtcaagaagactacaccgatccttaccagaccaaaaacaaagaagaagaagaggaagaagaccaaaccggagacaacagtacggacaataatagcatcagccacaacaggagattcgagtgtcactattgctttagaaattttcctacttcacaagccctaggtggacaccaaaacgctcacaaacgcgaacgtcagcttgccaaacgcggtgtttcctcttacttttatcatcctgacaataacccttacagttaccgtcattacccgtcgtggaccaatggtccgttaaccgcggctaggtcctatggaggattttcttctggtcctaagccgtcggggtattatacacgacccagctatgggagtcagttaggactatggcgtctaccgcctcgcgttcaaggcgtttataactcaaacgcagcgtttactagtaatggctcttcttcttcttctaattcgactttaccggtgttgacccgttctcaaactcaacta

SEQ ID NO: 164482 - DNA, 1679 bp, Arabidopsis thaliana landsberg
  unsure (1)..(1679): unsure at all n locations
cttgctcaggaagcaacatcaagggaaagtgagtttaaggttgtcatggtcttgcattgtaaggtttatctaacgagcatcaacctccgtggaattcacaacggctttgacccgtctataaaccgtcaagctaaacttgttagcctaaacggtacagatctgatcgatatatctgaagtatatcactgcgacggtttactgttatgtatctcgaaagactacactagggtcgtggtttggaatccgtataggagccaaactttgtagctcaaacccagtagtcctgaccatagaatggactggtatatctgtgctataggatacgagaagcgtannnnnnnnnnnnnnnnnnnnnnnnnnnnnnnnnnnnnnnnnnnnnnnnnnnaatttgttgagtacgaaatatacgagttaaagtctaattcatggagggttctcgatgtcacttccgactgggaagtagagttttatgcacgaggtgtctctctcaagggaaatacttattggtttgctacagacaagtttccagaaatcagcactaatcttatacatagtgtttatttcttgctctgttttaattttacatcggagagatttgggccgcgtcttcctttgccgttttaccctatggatgtagatactgtgagtctttctagtgttagagaagagcaacttgctgtgttatttcagcgtaaggacaacttacatatggagatttgggttacgactaacattgaacctgaagaggtgatgtagaagcaagttgtttttagcagtggatatggaaccactcactggttcttttatcccgtttgcttttttcgctgggagtgtcttcattgacgaggagaaaaaaatcgctgtggtattcgataaagaccaagaggagatcaacgacagagcttacctgattggagagaatggatactacaaagaagtggatcttggatacatgaatggatactaccaacaacaagtagatcctaggggacctgatccagttttccctctcgtgtgctcgtattctccgagtttggtgacgatcccacaaggaacacgaggcaaaaggaaagaacgagattattagtacttgtttgtttctatttgcttacaaaacattagtctctgttgatgagtttgattgttgtcgaataattcctctttctcttcttccttttgaggttgtttttaaatttgagaagaacatgtgcttaaagaaacattgtccgatgatggtatgataatccggcaactgaagacaagagtcgagagtaaaagtaaaaccacgaaatgtggacatgattgatcttaggtttctcccattacattcatgacatggaaaatcaaaattaacttgagaagaacatgttctgaaagaaaccttgtctaccaatagactctaggcatgttcttacactaccaatagctactaggcaagtttactagactttcctaattggcatgatattgcacacactcagccaggtcaaagagattcaaattactttgccagccgatgaacctaactaacaactccaaaattttccttaaatcaacacaaattaagccatcaacgtgattgatggtatcagaatacagtaaaaacaacaactagagtttcacaagtcaaatgcaattaaacaatatcaaaaagctacgtgccgagtacaagaaaatgg

SEQ ID NO: 164483 - DNA, 1006 bp, Arabidopsis thaliana landsberg
  unsure (1)..(1006): unsure at all n locations
ttttattatgtcaacttacagcatcacagaatcgttgcaaccatacgtagattgaatttgagggaaaaatctaggagagctctccaggagggtntgtggtttaacatctctcagtttcgtgtgattccgtctacacacagagtagaaacgtatgtgttgaaccgtctccatatcatgttcagatgggatactgtagtgttcagaatgtcagagttagtgaaatctgatttcacagattatctgtttcccaatgaacttgaggactctgctacagacaatgttgttgatgttactggtatgtttaaaacgatcctaattctttagatcatttcatgagtttatattttgagtactctgctgcatacaataactagctgattttttgttttcatagatgctattggtgtggttgcaagcgtttcttctatcaagatgtttccttacgtccgcaacaagggtgagaccgactatgaggctagatacgtttctttcgaactaatggataattggtaagtttatagattatagatttaggattagttcatctaggctgcagactttacatgtagattattgcctgtgattatttaccatagtctgccaatggtatagggaacaaaaactcaagtgtgttgctgttggttccatgtgtgaagagtttgtcaccaagtggtctaggcgtatcactaaatcaacatacaactatgaaccagttgtatgtgttgtgcgcttctggagaattgcttctgttgatggttagtatactaaataaacatagattattgtattgatttatgtcccatgaaacctgtgtgtacatttaaattcttttctgttttgaccaatgaaacctttgcttttcctgtgtttaaggagaaaacgttttaaacagtgagtttggatggtcccgtctactatagacccagcttcccttctttgatcttgcagttatctgaagttaccaattgtttaatttcggagttacattaaaacaggtcttagtttt

SEQ ID NO: 164484 - DNA, 3683 bp, Arabidopsis thaliana landsberg
attagtgaatgcaagcctataataaattattggatgcttggaaatatgtctgatatgataggaagtaatcgccctccagtatatattgagaatcaaatcagcctggatacatttatgttgattcgtaatggcgatccttctattaacttgtttgtgtctttctactctatcggcaagggaagctttacagagacagaggttgcaaatgttgatgcagctcataagtttgacgaagatataaatgtatatgaggatggaagagatgaaggtgatgaggatgaggataatgaagaggaggatgtggatgcagatcaaatgtttggcgaatatatggaagtaccctcgaccctacaatcgacggtagtgaaggtagtggcgaagattacgattacaataaatagggtgatctgattgtggaagactatggaattggtcatgttgaggaggacgtcgtgaatgacactcaacaaaccgtggaaccccaggggaattcactcgtctattggcattgtgtacgtcgacaggtaaacatgtacatcatgtagaacccactgctgttttggttgacagtacaccaacctctgctccatccccgacgtgtcaacatggtttgtaccaatgtacgtacattagagtctgtgcagaggagacaagatgcgaaggtgaattagttaagtacatggctgcaaatgtggatgatatagctgagaacataactggagatgagggtatagaatgcgtaaaaggggcttctgcaagtgggttaaatattgaatctgaccaccgtctagtaacaacaggtgaagcctacgaagtgtataaagggttttctacattgcacaatggtgagaatgagttactcgatactgatgctgctccagtattcgatgatttagccaatgttcgagtcgatgagacagaagttgaattgagtacgtcaggtcatcctttgtatgtgggaagtgttttcaaaaacaggcacgtcatacagtagactatgcgactttttgcaatcaaaaggtgcttccgctacaaacaaactcgctcatgccctaaaagattatagatggtttgcgtagatcgtaattgtccatggcagttgactgcacatgtcatacccaattcaaaatgtttcaaaatcacaggttatgattctatccatgtttgcaagatcgggagtcgaaaggattatcgtaaacatgctacttacaaacttttaggcaaggtaatgaagaatagatatagttctaggcaagggggtctaagagcagtagatttacctcaattggtcttaaatgatcttaatgtttggatctcatattctacagcatggagagctagagaggttgtagtcaactctgtaaggggtgatgatatggctagttacaggtttttacctatatatctgtatcttctacgtttagcaaatcccggtacaatctgtcatctccactccactccggaagataaaggtcgtcagcgcttcaaatatgtattcgtttctctctcggcgtctgtaaaaggttggaaatatatgaggaaagtcattgttgtagacggaacgcagctagtcgttcgttacaaaggatgcctccttatagcatgtgcacaagacgggaacttccaaatttttccattagcttttggggttgttgacagcgagaccgatgcttcatggatttggttctttgagaaattatcagagattgttccagatactgacgatttgatgattgtctcggacaggcattcttccatatataaaggcgttagtgtggtgtacccgaaagccaatcatggagcatgtatagtacacctggagcaaaacatatcggtgtcttacgcaaggtacggtgtgtctggtttattctttagcgccgctaaagcatatcggattagagattttgaaaactactttgaagagttaagaggtcggagtcccggatgcgcaaagtatttagaggatgttggatttgagcattggactagggcatattgcaaaggggagcggtacaatatcatgactagcaacaactccgaggcaatgaacaatgtcttaaggaaggcaaaagcttatccaattgtctatatgctacagttcatccgagaggtcatcatgcgaaggtttgcagcaaggcggaaaaaagtgttgaagtgtaactctttggtgaccccggaggtagatgaacgtttcctccaagacttgcctacgttaggaaagttcgcagtcatgatgtctgggccatggagttatcaagttacttcaaagagcgttgagcattttcacgttgtactagatgagtgtacgtgtatttgtcttaggtacacgatgttaagaattccatgcgagcatgctctagctgccgcaatacattttggcatcaacccgaaggctgaggttggattgtggtatagctttcaagtgttttctaattctttccaagaacccgttttacctatagcggacccaaaagacgttgttattcctcaagatttatcggacctgattctcatacctccacgcagcagacgaccacctagtagaccacccaccaaaaggataccatctactggggaaaaccgggtaagtttttcccccatcctaactgctatgcaatttttacttcgttttaaccgacttactattttacaactttcaaaaaaagaggcagaaaagactcattcctaatcagtgtacaagatgttggaaaaccggtcataacaagaagacatgcaaaaaccctatttagtcgatgacttttttactcgcgatggttagagtttacgtttctgtgcttttggacgattttctacgtacgttttttggaaatctttttatcagtctaatttttattttaaatattattttgtctgtacgttactgtgtgtacgaacgtttgtggacctcgtattatcggttttacttatcattcaactttttgtaagtagacgttgttgtctgtacgtaactttgataaatgttttcatttgtacgtatgcttcgtacatcttattataaaagagttgacaattatatttttaactaaaccgttacattgatttgggaccaatcatcgcgtcgttttaaaatctatttaagaacctggtaataacacccttcactcattcaaacgaaagtctaaacccaccacacaaataatacagaaagttggttattctgagtttttttggcatcatggatgctggatatcatgccatttccgaactttgtccaatgatccccggatgaagtatacgcgcttttgtggtcacggtgtttaagaaatgcgtgggaagaaatgagttcaacgtgggtctcatcttgaccgataatcgagtactatttcgcaaatgtgtttataacgtttttactttcacataccttacatgtaactaatcatcatgatatggtgcagggttgccgttcccgcatagaggctaccattaatcgtcgcattgcttcattttactttgaccgtatccgagaaaatgagtggatagttatcaatactttctcggttcgaaaccacgacgaggggatacacacaacgtcccatgactaccggatctgttttatggatcagaccattgttaccaaacttcgggattggctgcaatactgtattacgattttactccttttgactacatcatcgagaagacagttaccaccggagtgttag

SEQ ID NO: 164485 - DNA, 398 bp, Arabidopsis thaliana landsberg
ccaaactgcggcgtttaagagatcatattcaccatcgaccaagtagtatttagtctactctttcaacactctaattcctttgttctaagtatttttcctgccccccacaatctttttttttattaaatgagccaatttttatagattgtgggcatgcatgcgcaaggagatgcagtaagacatcgaggaagaaagtttggcacagagcctgtggaagttgttgcgccaagtgtcagtgagtgccgccgggaacctccggcaacacagaatcatgttcttgctacgccagtattcgtacacatggtaataaactcaaatgtccttaaaagacttctcatttctcaactatagtctcatcttctgattatgttacttcttttgatatgttgcatgtgtga

SEQ ID NO: 164486 - DNA, 377 bp, Arabidopsis thaliana landsberg
  unsure (1)..(377): unsure at all n locations
gcacctnataatagccacgccccgctttccccccatctgcaggtttatcgtccgcagatcagctccgttctgtcgatcatgcatcgcgccaccggcattgcgctcagcgcggggctggttgtcgtcgcatggtggatcatcgccgccgccagcggtcccgacgcttatcagcgcttcgtcgacgtcgcgggcagcgtcccggggcagttgttgctgctcggctggacgtgggcgctgttctaccacatgctgaacggcatccgtcacctgttctgggacatgggccgcggcttttcgatcccggccatgacaaagtccggaagggccgtcgtaatcgtctcccttttcatgaccgtttccgtgtggagtaccatccg

SEQ ID NO: 164487 - DNA, 2883 bp, Arabidopsis thaliana landsberg
ggacttgggtaacggtcaaacccttctgttttttctctcttcccccgacgcctcctctagggggtcgtgtggattatgaaacgacgccgtcagaacctttccggacagagtcaccggactttttgattgtcggggagacctcccgccagaagtttgccataactgtgtcgcctttgccgtcaaggacaccttaattcggtgtccgaacgagagagatgtcacgctcttttatgatgagtgtacgctaagatactcgaaccttgtggtaacatctgctctagatcccacttatgtataccatgtttgtcccagctgggcaaattttcccagaagcagcacttacatgactaatctcataacccttttgtctactctctcttccccctccgcctcatactccactggattccaaaacgccacggcaggaaaacaccccgacagggtaacaggacttttcaattgccgtggagatgtctcaccggaagtttgccgtagatgcgtctcttttgccgtcaacgaaacctcaactcggtgtcctaacgagaaagaagtcacactctattacgatcagtgtacactcagatactctaaccggaatatcctctcaacttctaataccaatggaggaattatcttggctaacagtcagaatatgacatctaacgaacaagcccggttcaaagatttggttttaaccacgatgaaccaagccaccatcgcagctgccaacagttccaaaagattcgacgcgagaagtgccaattttacgacgttgcatagtttgtacacactggttcagtgcactcatgatcttacaagacaagactgtttgagttgtctagaaacagatcatcaatcaattacccactgacaaaattgggggacaatttattgtaccgagctgtagttcaagattcgagctttgcttgttctacaatcaatccgccgttacaacacctcaaccgcagcagaattcagctcctccaccaccgccaacttcaattccttcaccacgacctggtctgaacagtcgatttcctttgattacatgtttaagcgcagtttcttttgaaaagttcaaagatttgctaaaaccagggttcatatgtattctaataaaaattgtttctgagaatacaggaaaaggcggaaactcctctgtcataattattgctgttgttgtttcaatcactgcccttcttctgctctttgtagctgtttttagtgtccgcactaagaggagaaaaaagatgattggagcgataccgttgttaaacgtaaagagaaaagacacggaagtcacggaaccacttgctgaaagtaaaatactcctctttataggtcaagtgaatagtctctgatgtattaaactgtttaagttgttgctacagatggggatagtattacaactgcaggctcacttcagtttgattttaaggcaattgtggcagcaacgaataactttttgccgattaacaagcttggtcaaggtggattcggcgaagtttacaaggtattaccattgaacagagcttcactatatgaggatgttcatttcacagttgcggaacaaacaagcactagttattaattatcatcgtccttcatttgtaacaagaactgacttcttcagaattgcatttgagtacatcttcattttcatgattaatcttacagtcagttccttatgaatatttatcaaaaatattacttaagtagggtacatttcctagtggagtacaagttgcggtgaagaggctatcaaagacatctggacaaggtgaaagagagttcgaaaacgaagttgttgttgtggcaaagcttcagcatagaaatctggtaaggccgcttggttattgtctggaaggagaagaaaaaatacttgtctacgagtttgtgcccaacaagagccttgatcacttcctctttggtcagttaaatttagtacgtagccaagatattttcaaattgtatgccattctttgttcttaacattttaaatacgctgtacagactccacgatgaaaaggaagctagactggacaagaaggtacaagatcattggaggaattgctagaggaattctatatcttcatcaggattcacgactcacaatcatacatcgtgacctcaaagcagggaacatcctcttggatgttgatatgaatcctaaaattgcagattttggaatggcgagaatttttgggatggaccaaacagaagccatgacaagaagagtagttggaacttagtaagtattgctcttgccacttttttttcatcaatagaccgtaatacgtttcaatcaactaaaaaaaataagaattatggcagtggatacatgtctcccgagtatgcgatgtacggccaattctccatgaaatcagatgtgtacagttttggcgtcttagtacttgagattataagcggcatgaagaatagtagtctctatcaaatggatgaaagtgttggcaacttggttacatatgtgagtataaagccttaaaacttctaatttctttttgctttatttaaaaacgtgaccaaagtctaaattattaaaatgttcaatagacttggagactatggagcaatgggtcgccatcagagcttgtagatccgtcatttggagataattatcaaacaagcgaaattactaggtgcatccatatcgctttactatgtgttcaggaagatgctgaagatcgtccaaccatgtcatcgatcgttcaaatgctcactactagcttgatcgctctcgctgagcctagaccacctggatttttcttccgaagcaagcaggaacaagcaggtccatctattgattcatctacgcattgttcagtcgacgaagcttccattaataatgtaactcctcgttga

SEQ ID NO: 164488 - DNA, 1008 bp, Arabidopsis thaliana landsberg
actccgatgacggaagagatgagtaaagagtctcctcctcctcctcagacgtcgttttcttcgttaccggacgacgtcgctctcgattgtcgggctcgtatatcgagattccattatccaactctttctctcgtctccaagggtttcagaactctcatcgcctccccggagctcgaggccacacgatccttaatcggaaaaccagagaatcacctctgcgtctgcttgaggctgtataaaaaccctaatcctctctggttcatattttccccaattccgaaacagaaattgaaacccatcgtcccatggtttcctaaccaacaatatcctcaatacccgaccgttgtctcaaatggttcacagatatacataatcggtggattcgttaggagaaggagaagcaacagagtgtcgatttttgattgtcgaacttatcaatggcgtagactccccaaaatgcgtcaacctcgagtttatcccgccgcgtctgtaatcgacggtaagatctatgtgattggaggcttcagaggctccatgcccacagatattgagaactcaggagaagtttatgatccaaagaccaatacttgggagccttgctcacatcacttgatctcactgttcaaaatgttttcaagaaaaaacattactttacgaccaaggcatgcttagtgattaataaggtgtcgtgcctactatatgtttccgatgggaagctatattggcgtgaagacaaggaaggttttgagtgccgtaaggtttatggacttgcagaacagtcctctaatctgtttcgtgtggtggcaaactccggcggcggaggaagagtgacagtttggtggaagtcgatgacaaaaggttgcgagtttgactgtctgctgactaaggaatgtaaaacagagatttggtgtgcagagatttcgtttgagaaacgcggtgtaggaaaggtttgtggatcttgttgaatggtctaagaatgtctttactaaggatgactacaagactata

SEQ ID NO: 164489 - DNA, 2311 bp, Arabidopsis thaliana landsberg
taggcgcatccgtaagcttgatgcccctctcagtggccaagagacttggtttcagtaaatacaaggcttgcaacatttctttgattctagcagatagatccatcacaatacctcatggtttgctagaaaacttactagccaagataggcacaatggaggttcctacagatattgtggtgctagaaatggatgaagaacccagggatccttagatcctaggaagacccttcttagctacagctggagccatcatcgatgtcaagaaaggaaagatcaatcttaacattggcaaagaactaaagatgaacttcgacaacactaacaccatgaagaagcttacaatagaaggaaaggtcttctggattgaagagacggatatgttggctgacgactgctagaagagctagcagaagaggaccatctacagaatgctcgaacaaaggatgggaaagaaaaagatttacacttggaaactttggggtaccggaagctgttagatatgcataaagaagtttagaatccagaggagtatgaggatttgtttggaaacgcaaaggagtagaatatactcgatcacgtcattcaacagactgtccacccaatccactcgaccaagcactcgatcacaaccttccctgtgaagccgatctaacatccggcgactggtatgaactcaaggcaccaaaggtggaagtgaaaccgctgccaaaagggttaaggtacattttccttcgacagaactctacttaacctattatcattagtgatgagctaaacaccgatcaagttaatctgctatttacagaactgaaaaaatataggagagctataggatattcactagatgatatcaaggggatctcaccgattctatgcacccatagaattcatttagaaaacgaatcatattctagcattgaacctcagaggagattaaatccatacttgaaagaagttgtaaaaaaagatacttaaactattagatgcaggtgtaatctaccctatatctgatagcacttgggtatctccagttcattgtgttcctataaaaggaggtatgacagttattaaatattcaaaagatgaactactacccacaaggaccataacaggacataggatgtgtattgactataggaagcttaatgcagccactaggaaagatcatttccccttacctttcattgaccaaatgctagaaagattagccaatcacccctattactgttttctagatggctatagcggattttttcaaatccctatccacccaaatgaccaagaaaaaactacattcacgtatccctatgggacttttgcttacaaacgaatgccttttgggctttgtaatgcacccgccacttttcagcgctgcatgacttctattttctccgatttgatagaggagatggtcgaggtattcatggatgatttttctgtgtatggctcttctttctcctcctgtttgctcaatttgtgcagggtactcaagagatgcgaagagacaaacctggtactgaactgggaaacatgtcacttcatggtcagagaaggaatcgtcttggggcacaaaatataagaaaaagggatagaagttgatagggcaaaagttgatgtcatggtgcaattgcaaccaccaaaaactgtgaaagatatcaaaagttttctcggacatgcttggttctacatgagattcatcaaggatttctctaagttttctaggccactcaccaggctgctatgcaaagggggtgagttcacgtttgatgaagaatgtctggttgctttcaaatcgatcaaagaagcactgatctttgccccaatagtccaagcacctaattgcgatcacccttttgaaatcatgtgtgatgcttcggattacgctgtgggagcggttctaggacaaaagattgataagaagttgcacctcatctactacgctagcagaacgatggatgatgcacaagtaaggtatgccactacggagaaagaactattggccgtggtatttgcattcgaaaaatttaggagctacctggtaggctctaaagtgatagtttacactgatcatgttgctctaaggcaaatctatgcaaagaaagataccaagccaaggttgctgagatggattttgctgctccaagaattcgatatggagatagtggataaaaaggggattgaaaatggtgtagctgatcacttatcgcgaatgagaatttaagatgcagtccccattgacgacaccatgcctgagaaacagcttatggccatccgggaagtgaacaaaaaattcaaaagcagccagttttgg

SEQ ID NO: 164490 - DNA, 1708 bp, Arabidopsis thaliana landsberg
  unsure (1)..(1708): unsure at all n locations
atggcttctttcacggcaacggctgcggtttctgggagatggcttggtggcaatcatactcagccgccattatcgtcttctcaaagctccgacttgagttattgtagctccttacctatggccagtcgtgtcacacgtaagctcaatgtttcatctgcgcttcacactcctccagctcttcatttccctaagcaatcatcaaactctcccgccattgttgttaagcccaaagccaaagaatccaacactaaacagatgaatttgttccagagagcggcggcggcagcgttggacgcggcggagggtttccttgtcagccacgagaagctacacccgcttcctaaaacggctgatcctagtgttcagatcgccggaaattttgctccggtgaatgaacagcccgtccggcgtaatcttccggtggtcggaaaaattcccgattccatcaaaggagtgtatgtgcgcaacggagctaacccacttcacgagccggtgacaggtcaccacttcttcgacggagacggtatggttcacgccgtcaaattcgaacacggttcagctacgtacgcttgccggtttactcagactaaccggtttgttcaggaacgtcaattgggtcgaccggttttccccaaagccatcggtgagcttcacggccacaccggtattgcccgactcatgctattctacgccagagctgcagccggtatagtcgacccggcacacggaaccggtgtagctaacgccggttnnnnnnnnnnnnnnnnnnnnnnnttggctatgtcggaggatgatttaccttaccaagttcagatcactcccaatggagatttaaaaaccgttggtcggttcgattttgatggacaattagaatccacaatgattgcccacccgaaagtcgacccggaatccggtgaactcttcgctttaagctacgacgtcgtttcaaagccttacctaaaatacttccgattctcaccggacggaactaaatcaccggacgtcgagattcagcttgatcagccaacgatgatgcacgatttcgcgattacagagaacttcgtcgtcgtacctgaccagcaagtcgttttcaagctgccggagatgatccgcggtgggtctccggtggtttacgacaagaacaaggtcgcaagattcgggattttagacaaatacgccgaagattcatcgaacattaagtggattgatgctccagattgcttctgcttccatctctggaacgcttgggaagagccagaaacagatgaagtcgtcgtgatagggtcctgtatgactccaccagactcaattttcaacgagtctgacgagaatctcaagagtgtcctgtctgaaatccgcctgaatctcaaaaccggtgaatcaactcgccgtccgatcatctccaacgaagatcaacaagtcaacctcgaagcagggatggtcaacagaaacatgctcggccgtaaaaccaaattcgcttacttggctttagccgagccgtggcctaaagtctcaggattcgctaaagttgatctcactactggagaagttaagaaacatctttacggcgataaccgttacggaggagagcctctgtttctccccggagaaggaggagaggaagacgaaggatacatcctctgtttcgttcacgacgagaagacatggaaatcggagttacagatagttaacgccgttagcttagagg

SEQ ID NO: 164491 - DNA, 898 bp, Arabidopsis thaliana landsberg
atgatttcttcttctcattgtttcttgatcctttcagtggcacttctattgcaagttctcttatcccctgtttcggccttaaccttaacctccacaaaatacattaataaattatgccagatgtcatttgtcgtcgataaacccttctgtttgcaaacattgagtgcctatcctcctgcggcttctgccactggcttggtaatatctgaacccatatctccaatcaaattagttttagatattgcatatattttaattttatacttttatccaacttttacatgtcaattgaattttcgaaactatgtttcattatcatctacgttttcctattttatttttttgtttaatcatggattatcagtctaataaaatttgaaaaaaataaaatttattgaatgttatggtttgaaagaaattagaaccatttttcaaaacataaaaaaatcatagtttttatttatgactcattcttaaaacaatttttttttataaataatatgacaaatatagctcccacttgcgtcagccgtgatccgcggcattgtcctaccccaagccaagaagtctgcgagttttgcaaatggagcagcgaataaggagccgagcttgaagacacagttccatacgtgccaagaggcctttgtaagtattggagattctctcatgagcgcttttgaagaactcgagcgcgatccacatatcgcaacctatgatgttatgacttgtaccgaccatacaaccaaagtgaagaatttggtcgggaaaaacacagatgtggcttcgaagactctcatagagatgacaatgcaaatggagaagctcattcctcttgctcttgcatccacacaagttcttggcgggtgaaaacgaaagtgataacgtatatcatcgtgcg

SEQ ID NO: 164492 - DNA, 2332 bp, Arabidopsis thaliana landsberg
tcgcattctaacgcctctctttcggcccctaccgattatctcgtcaattccaatgactcgaatcaccgagacgatctccccccaattcacaaacgaagaatggtctagactgcatatgagggctccgagactgactttgtgtcatctactaacgcttccgaggaggcggcgcctttttttgctcgggaggattctaccgctaatattgctcgggacttggacctgcctaaagatcctgagccgtctctcatccgcagaacctgcgctccagctgttaatgaggctggagcatcaaactggcaagatgcgctcgagctacttttcccccaagttaagatcgaggagcatctttactttggtcaggatgagacagaaaacatcgtgcaatcgctcgagcagatggactttgagaaagccgagaagaagaaaaagaagaataataaaaaggtggtgagaacaaatcctcatggctcgtctttatgcaccgagcggtcgctatcacacttaaaagctaggttcgaatttggcgacgaagttactctcgcgttccaagcccagatgagcgcgccgacagtcctccagaaggtttcttcactttgtacaagggattcttttatctttgctttctctggttgccgatcccgaggctagtcctagagtacgcgaccgcgtatcagatagccctctctcagataacggcccgatctttgaggcatctcattcggatattggtgcgtggctatgagaccaaaaccaaggtcacgcttgcacatctaaggaattatttagagatccggcaagtctcgaagtccatggcagacagatactacatctcttctgctaaaaacaggaacattatcgagggttacccgagcaaagatgatgcctacaccgactactttttctttgtggctttagaagatgttgttcttgatgatctcctcgggaaagttccgacaaaatggggacttttgggtagtttagatattatggtttatttattcgtgcccgaggtgattgatataattttttgcttatatactttactttatcgcagatcgcccaatttgattccttgagccatgtcccgaagatctcctctcgtatcaacaagggttatccgccggaagtgcactggacaaagcatttctctcgagagcaacttgacgaagcgcttcaattgtttcacggtgttccttgcccctccagcttagaattgtcaaatcatcaaacccaattttttgtcgacatgcagactagcaaatctaccataagggaggtttatgagaggaagaggcttgctaccgagaagaagcgtgcggccgagaagaagcgtctcgcggtagagaaaatcgctgctgagagtgcgaatgttggtcccaacgcgaccagggattgggaaggtgcccccaaggctgctgtgcctgccgcatctgagcacgctaaagctggtgacaccggcttgattttgagagatccgccggttggagaagctaggcaagcaatcatcgtgcttttgaccaacgacaaggcctcacgaacgcgtccgcaggttgacgactccgaggagaagaagaggaagttgaagaagaagaaagcagcgaagagggaggagaagcctcctattttcgaggataaggctgcttcggcgaatctccgcgggaaatgtgcgggtcgcctacttccgtctccaaacactctactggaatctagaaagtacgtcgagagggtgtagcattttgtaagggtaagcgtgttactcattttggttctttggcgtgttttccgagctgttatttaatgtcgatgcttgcctctatgttttaggacgttggttcaatgaatcggatggtcctgtcttatgatcggtcatgcgaaacaatctggaggtggttaataagttggctaaagatgaggcaagggcgaaagaggccgagcaagcgagagatgcggcgatctccgaggttgccatcaagagagaggcctttgtcaacaaggagaatgccatcaagatggccaagcgcaaccttaagatggactccgaggttgttcgttgcagacgactgtttgccgaggcgagaggacttagggaaagcgaagtggctcgggctacgcaaacggcgaggcgagaaacttcggaggccttcaccgccaggctcaagatggctgaggagaagatgtcgctcttcgaggatgctaacaaccaattcatgtatttgtcccaagcgtgggctaatgcacaattgatcaaggcgctggaagacggtggatctttggcgatcgagaaaaaacaagtcgaggactcgcccaaggatttcgccaatgccgaggt

SEQ ID NO: 164493 - DNA, 2116 bp, Arabidopsis thaliana landsberg
gatactcaggattctttcaaataccaattcaccctaatgatcaagaaaaaatcactttcacgtgtccttatggaacttttgcctataagagaatgccatttggtctttgtaatgctcctgcaacatttcagaggtgtatgacctctatcttcacagacatgattgaggacatcatggaagttttcatggatgatttttctgtttatggatcatcgtttgaggattgcttggagaatttctgcaaagtgttagcaagatgtgaggagaaacatctagttttgaattgggagaaatgtcacttcatggtacaggatggaatagttctaggacacaagatttctgagcatggtatagaggttgatagagctaagattaaggttatgacaagtcttcaagcgccggataatgtcaaagcagtgaggagtttccttggacatgctggattctacaggagattcttcaaagacttcagcagaatcgcaagaccattgactgctttactttgtaaggaagtcaaattcgagtttacacaagagtgtcatgatgcatttcagctgataaaacaggccttgatcagcgcaccaattgttcatccaccagattaggatttaccttttgaggtaatatgtgatgcgagtgattttgcagttggagctgttctaggacagaggaaggataagaagcttcatgcaatctactatgcaagtaaaactcttgatgatgctcaaaggaattatgcaactacagagaaagagttgttagctgtggtgtttgctttcgaaaaattcagatcttatctcgttggatccaaggttattgttcacacagatcatgctgccttgaagtatttgatgtataagaaggatgctaagccaagacttttgagatggattttccttcttcaagaatttgacatagaagttagagataagaaaggagttgagaatggtgtagctgatcatttgtcacgcattaggatcgatgatgatgtccctagaaatgatttcttgcctgaagagaacatttacattattgatacagctgaagacgatgactacaaacgtgacaggttgcaggatcgtgcttcagtgtcgatcgacaccccttctatgtcgatcgacactcacatttcagaggaagttgacatttgtagttgcgcgatggtgttgatcgacactggaactgtcgatcgacacccttctgaatcaacaaaaaattggtcaccaactgagaattgcgccgtcacagcggtcgagaaggactacccatggtatgctgatgttgttaattacctagctgcatatgtggaacctataatttcacagattactacaagaagagattcctaagagagattaggcgatattattgggataaaccttatctttataagcattgttctgatggagtttataggagatgcattgctgcaacagaggttcctcatatactatcgcattgtcacagctctaactatgatggtcattttgcaaccttcaagacagtatccaaagttcttcaagcaggcttttggtggcttacaatgtttcgggatgctcagaagttcatatcgcaatgtgacccgtgtcagagaaggggaaagatcagcaagcgtaatgagatgcctcagaaatttatcctcgaagtcgaagtcttcgattgttggggtatagatttcatgggacccttcccaccttccaacaagaatctctacatcctagtagctgtggattatgtccccaaatgggtagaagttatagctagtctgaagaacaattcagcggttgtcatgaaactcttcaagtctatcatcttccctcattttggagtgccatgcatagtcattagtgatggaggtaagcatttcaataacaagattcttgcaaaattgcttttacagtatggagttcaacatcgagttgctactccttaccatccacaaacgagcggtcatgttgaagttttcaacacacaaatcaaagagatttttgagaagaaagttgaaaaatcgaaaaaggagtggtcttacaagttagatgatgcgctgtgggcttacataacagctttcaaaactccgcttaggaccacaccttttcattttatatatggtaaagct

SEQ ID NO: 164494 - DNA, 1222 bp, Arabidopsis thaliana landsberg
  unsure (1)..(1222): unsure at all n locations
cggttattgcatctccgatcgttgatgatttattttgtagcgcatcgcctgtgtatggagctgctgggtctattcatacgcctctcgctgcccgttctcgttccgctactcatccgtttgaaatctctgactcaccggacaacatccacagtccttaccatcttcacagctccgatcatccaggtttagttctcgttcccgatctcttagatggaacaaactatggaacttggattgtggctatcaccactagtattgaagctaagaataagcttggttttgtggatggtactatcgttcgacctgaggaatatgatccatactacctgatttggaagcgatgtaacagcatagtcaaatcgtggttattgaacagtgtcacgaagcagatctactccagcatcttgtactttgcgactgcatctgagatttggaaggatcttcatactcgttttcacaaatcaaacctccctcgactatacaagctgcgtcaacagatacattctcttcgtcaaggtaccatggatctctctacttatcatactaagactcaatctctgtgggaagaactatccagtcttcaggttactgctcgatctgttgaagcnnnnnnnnnnnnnnnnnnnnncaatcgtgttattgatttccttatgggactcaatagcaactatgatactgtcagaagtcagattttgatgaagaagagcttacctagtttgtctgaggtctacaatatgttggatcaagatgattctcagaggtcagcttgtgctcaaactggtacattggattctacagctttccaagtctctcaacagtcagctcagggcacttctggtggttttcagtttcagcgaaaggacaaaccaatttgcacttactgtggacgtgttggtcatgtcatggataaatgttacaagaaaaatggctatcatgttggtcatccacgtttcaagtcttctaaggctccagttactacggctaatgtcttggtggatggagatattgaagctaatgcagttgttgacaattgtcataggaaatgatgacctatccacagaacagatgcagaagattgtctccttcctcaacaccagaattcatagctcttctcccacacctgaagttcacgctgtttcagtgccttccctccctactatatcagccactggtccaacacctggtatctttcatcccactatcatttgttcttttaccagtg

SEQ ID NO: 164495 - DNA, 923 bp, Arabidopsis thaliana landsberg
atggttaagcctttgatttgtttttgagtgatttcttgacttcactttgtttcttttgataggtatgggacgcgctaaagacgctacaggcacttctcgagcacgcatgaggacttccgaggcaccgacaaacaatgatcctaacaaacgtcctgtcagaggcacatgagatggcgtggacacaaagatgctagcagccttaaagcatatcgatgtgaagccaacaatggatgctgccagatgtgatctacaggtacttttcttgtacaatgatgttgcgacaatgtttcaaacactcaggatgggacggtattggaaattggatgaagtacctgattcacaccaattccaccaagctaggaagtgaattgtaccaatttctgggcagagacggtgtcacttattattgcaagatacccaacgagcacataacgtcacttctctccgcgacgaacctagcgttcgaaccggacgagcagtaccttgttcgtaacccttcaagggcagtcactagacgacgccggactgcagcggcccaacctacagctgagcatgttgtcggtaacgataacgtttatgaggattatgctgatccggcaccttctacgcacgctcagccatacttgctgctacctgaggatccagcatcgtaccttgtttcatcaccaccagcggtgacgatatctcccagcagatggcatggatgatcgaattgacaaggaagaacaacagtatgatgcacatgatgtatagagccattttaaagatcaggccttgtgtttgcactcgcggaggaggagtggatgatggagaccgtgaacaccggtccaaggctactgaggatcgacatgctgagaggttggtccctgctgctggagcgtccacctcgcagacaccaccagagcagtccctaggccatcggt

SEQ ID NO: 164496 - DNA, 2596 bp, Arabidopsis thaliana landsberg
gctatgatggataagttgattgtagagatgccacttatagatgatgtgaagtcttctcctattatcagacagtttgtgaagaggatggttactaaggatatgcttactgagaaagctgtgatgacgatgtctacacaggttagcgacattattcagaacaagattctaccacagaaacttccagatccaggtagctttgttctcaattgtggtatccttaacgagagttttgatcgatgcttgtgcgatcttggttctagtgtcaacttgatgccatgttcagttgcgctccggcttggtttgacagaattagagcgtacccaaatcactcttgttcttgctgatcgatctgtccgtagacccgatggtatcctatgcgatgtccctgtacaagtcggtactagctacattcctacagattttgtggttttatcttatgagaaagaaccgaaagatcctttaatcttaggaagacctttcttagccacaactggtgccattattgatgtaaggaagggcagaatagacttgaatgtaggtgatcttacaatgcagtttgacatgaataaggtggttaagaagcctaccatcgatgggcagactttctatgtggatactatctcttctctggctgacgaatttctcatgaagatgacacctgctgatcctttaaagcatgctctgattccctcaatagacaaagttcccgacgggtatggtaagctgctggataggattgagcatgtaatgcaattggttgctcaagaggagttaattggcacatcttcccaagcagcaacaattggcgattggagcctagaaaaagctcctaaagttgatctaaaaccacttcctccaaggctaaggtacgcatttccttgtgaaaactctacttatcatgtcattgttaatgcttctttaaacaaggtagagctcactttattgctaagcatgctgcgcaagtatcgcaaagctcttggctattctcttgatgatattacaggtatctctccagacttgtgtatgcataggattcacctcaaggatgagtctaagccctcagttgagcatcagcgaagactaaacccgaatctcaaggatgctgttaagaaggagatcatgaaattgttggaagttgggatcatctatcctatttaagatagtgattgggttagtccagtgcatgtggttcctaagaaaggaggtgttacagttgttaagaatgacaaaatgagctgattcctatacggactgttaccggccacaggatgtgtattgactgcaggaagctgaacgctacaacaaggaaggatcattttcctttgccattcattgatcaaatgttagaaaggctagctaaccatgtgtattactgttttcttgatggctatagtggtttctttcaaattgcaattcaccctaatgatcaagaaaaaaccactttcatctgtccctatggaacctttgcttataagagaatgccttttggtttatgtaatgctcctgggactttctaaagaagcatgacttcgatattctcggattttattgaggagataatggaggtatacatggacgattttttagtctatgaatcctctttctcctcatgtttgttaaatttgtagagggttctagaaaggtgtgaggaaaccaatttagtactcaactaggagaaatgtcacttcatggtttaggaaggaattgcaggcataagatttctggtagagaaattgaagtcgacaaggcaaaaaacgatgtcatgattcagttgcaaccccctaagaccgttaaggatatcagaagctttctaggccacgtaggattttagaggaggttcatacaagatttttcaaagattgctcgacccctcactagattgttgtgcaaggaaactgagttcaactttgatgaagattgtcttaaagcttttcatttgataaaggaagcattggtgtctacccctatcgttcaagcacccaactgggaccatccatttgagatcatgtgtaatgcatccgattatgcagttgggggctgtcctaggccaaaagattcatggtaaacttcacgtcatctactacgccagtagaacaatggacgaagctcaaacaagatatgcaaccacagaaaaggagattagctgtggtttttgcctttgagaaatttagaagctatttggttggctccaaagtgaaggtctacacggaccatgcaaccctaaggcacatctatgccaagaaggaaaccaagctaaggcttctaaggtggataatgttgcttcaagagtttgatatggaaatcattgataaaaaaggtgttgagaatggagttgcagattatctctccagggtgagaattgaagattcagtcccgatagatgacattatgcccgaagaacagcttatgttctacgacctcgttaacaaaaacatcgacacaaggacatgctgtaagaagcatatgcagttgaagaagaaaagttgccatggtatgcagatttagtcaattatttggtaagtggtatgatcccccagagtttggatgcatatacaaaaaaaaaattctttagagacatccaccattactactggga

SEQ ID NO: 164497 - DNA, 593 bp, Arabidopsis thaliana landsberg
tggacacttctggccacactgtgacatgggtgatgacacatttgattaaaaacccaagagttatgaagaaagcgcaagccgaggtaagagaagtgatcaaaaacaaagatgatatcacagaagaagatatagaacgactcgaatatttgaaaatggtgattaaagaaacattaaggatcaacccacttgtgccacttctgattccaagagaggcttcaaaatatataaagattggaggttacgacattccaaagaaaacatggatttatgtcaacatatgggctgttcaaaggaatccaaatgtttggaaagatccagaagttttcatcccagagaggtttatgcatagcgagattgactataaaggtgtagactttgagttgctgccgtttggtagcggaaggagaatgtgccctggtatgggattaggtatggcattggtacacttgactcttatcaatcttctttaccgtttcgactggaagcttccggaaggaatgaacatagaagatgttgatcttgaagaatcatatggacttgtttgtcccaagaaaagtccacttcaacttatcccagtccttacccaatggact

SEQ ID NO: 164498 - DNA, 857 bp, Arabidopsis thaliana landsberg
agctacaacccaaatctgctggacgatcttgtgagtacgcctcacaatcagttggtgttgtatgcagattttggcgggtcagatctgtgacgtacttcatcaccggaccgctccactccacatgttcggcttcctgttgagcttgtggatataagtgatgatgataaggacaatttggcttccatcgttccagtcaaaagccaacaggtttccatgccgatgtctgccaaagttccaagggtactaacagtggcatcgcgcctgacaaagcgcaaacgagacaccccaagtgagaagtttctgtcacaaaaacaacagaaaggaaagggagttgttgtttcaagtcttggaaggagcgatctatttcatgagttcaaattcagttctcctctcgccgaacaaaggtacttgtatttctctcattgacaaatgatcaaggaaatgaatttggatcttctggttgatcaatggatcaatggatcatggatatgatttctgaggcgggtcttctcaacacagtaacgggagtccaaggttttgaggaagaagtggtctatgaattctgagccaatctaccctcagttcgggtggagggagactcagtcaaggtgttagtaaggggtttcgagtgtgaattctcacccgcaaagatcaatgctctgttttatatgcaacatgttggagccagaactcaatgcattcagactgcggggttggttgatgagtaggtggctcggtatttgacagatggtcgagtccaaaatctgcagaacattccgatgaacaagttttcagaaaactgaaagagtctttttaagatatcgtgtcggaattggtctccccaaaccaataagggt

SEQ ID NO: 164499 - DNA, 1906 bp, Arabidopsis thaliana landsberg
tgaacttctccttgatggctttgcaagaatccaatctcaagaaagagttttgcagctaaccgatggcacgactcagcaaaagggtcatgccttcttcaaccatccattcgatttcggttcagcttcatctcagtctctctccttctttactcatatcgtttgcgctcttgtccctaagccacgagttgctggtggtcacgggattgcgtttgtgctatcatcttcaaataatctcaaaaaagcatctgcaaatagttacttaggacttttcaacagatcaactaacggatctacttcttctcacattttagctgtcgagcttgatacggtccaaagcgcagagtttgatgacatcgataataaccatgtcggtatagacgtaaacagcctccaatccgtcttttctgcttcagcttcctattattccaacagagaagggaaaaacataagcttattactcttgagtggagatcctattcaggtatggattgattatgaagatactcaactcaatgttactttagcacctctaagagaacagaagccaagtaagcctcttttgtcaagaaccactaatctcactgcaatcttcccggatcgaatagcatttctcgggttttcggctgcaactggatcacttataagtaaccaatacatcttagggtggagtttcagcagaagcagagtgttgttacagagccttgacatttctaaacttcccacagttccacgtcccaataaaccgaagaaaacatctcctctgcttattgagctattgattaaactcgctatcatagtaatggtggtggtagaaggattttatctttacagaagaaagaagtatgcagaagttagagagccatgggaaaagccatatggtccacttcgttattcatacaaatctttatataaagcaacaagagggtttaacaaagatggtcgtcttggaagaggaggttttggagaagtgtataaaggtactctgcctattctaggagatatagctgtgaagagactatcacacgatgcagagcaagggatgaaacagtttgtggctgaagttgtgacaatgggaagcttacaacacaagaatctggttcctcttctcgggtattgtaggcgaaaaggcgagttattgctggtctctaagtacatggaaggaggtagtgttgatcagtacttatttcacggtgataaaccgcctctttcttggtctcaaagagtagcaatattgagagatatcgcatctgcgctctgttacttgcatacaggagctagtcaagttgttttacaccgagatatcaaagcttctaatgtcatgttaaatggaaatctccaagggtttttaggagattttggaatggctaggtttgatgatcatgggtctaacctctctgcaactgcagctgtaggaaccataggctacatggcgctcgagctaacgtcaacaggaacttccactagaacagatgtgtatgcatttggtgcattcatgcttgaagtaacatgtgggagaagaccatttgatcctgcgatgccggttgagaaacgacatttggtcaagtgggtttgtgaatgctggagagaaggttctctagtcaatgctgtccatccaagactaagaggtaaatttgtacccggggaagttgaaatggttctgaagctagggttgctttgtacaagcattataccagaagcaagacctaacatggaacaagtggtccaatacataaacagacaccaaagattggctgagttctctccaaatactcccgggatcggcgtttcgactccggtgttaatgggtctacctttcttggcagtcacttctagttcagagacttcatcagtttcaggaccatcagcctctccttcctctgctaacaactcagtgttcatttctcac

SEQ ID NO: 164500 - DNA, 615 bp, Arabidopsis thaliana landsberg
agaacaaaaaaaagaatttgcctttgtgctcaaaatcaagtacccatttcacaaaaactgatttttattttgtgaaaaatctcagctaagatccaagagcttaacgtctacgagttcaacgaaggtgatcgaaacagcccagcggttttaaaactagggaaaaaaccagatcagctttgtctcggagatcttgtccccttcacaaacaaactctacacaggagatctcacaaaacgcataggaatcaccgcaggtctctgcgttttgatccaacatgttccagagaagaaaggtgatcgctttgaagcttcttacagtttctacttcggagattatggtcacatatcagttcaaggaccttatctcacttacgaggacacgtttcttgctattactggtggctccggcgtgtttgaaggagcttatggacaggtcaagcttcgtcagcttgtgtatcctacgaagctgttttacactttctacttgaaaggtgttgctgctgatttacctgtggagcttaccggaaaacatgttgagccgtcgaaggaagtgaaaccggcggctgaagctcaggcgactcagcccggcgctacgatcactaactttactaattga

SEQ ID NO: 164501 - DNA, 958 bp, Arabidopsis thaliana landsberg
actagatggatgatttgtgttatggttcttagagtgtatagaaagtttcacagtgggaacacattcgaactacgggtcgtctttgtcgatgaatcggtaaaacaatcttcactcttcttacaagttatatttaaccttattcttattccctatataactcaccctccgatgttgttttcatagggaacacaaattgaggctacaatcggaagacgtttttctcctttttacttctatatgctccaagagaatcaatggaaatcaatctcaacttttcgtgtcagtccaaactttgaaccaatcaaagcaacatcccaccattatgtgattgagttcatggaagaaacatttgtcacatgctcatacccaagggaaactgtattacttaacaggttcacaccttttgactacattgttgaagacacagttcttacagatactttggtcggtaagtaatacgtcgctattctttgtttggccttttacttttgacacgcctatttttaacttttaatttatactcccagatttgcttggtgcactcgttgatatcggatatatgagtaatacctaacacaaaagtgtcgagattgacggattcagacttcccttcaagattatggacaaatagtacaatttctttcgatcaattccctttaaatttctttcttttcatcatgtatttttccctcaaggggtataattgtaacactgtcttatatgtttcagcaaagtgatattgaaatgtgaggctgttggccaaatggcagttgacttcgataataggtttcaatcttttagcaatgacaattttgttattgcactcactttgtggaggattgttaggtattcttatggagcccaccgcgtgaagattgttagttattcgtccatatctgatgtgattgccgaacccaatatcgaagaagtgcaagagataaaaatggtcgtcgactaa

SEQ ID NO: 164502 - DNA, 525 bp, Arabidopsis thaliana landsberg
acgcaggaccgcgtaagcacccggcgcagcgaagaagaaacgaaaaccgtagttggcatcgccctgccgggaccggccgaggaaaaaccaaaccgcggcgaaggcgccgccgacggcaccggtcgcatcctggacaacggcgaagggcgcgcactggccgagaaagtgggcgacaaagtggttttcggccctaactcgggcagcaacaccgtgaaagccgaaggcgaagacctgctggtcatggccgagaacgaaatcctcgccgatatcgaaggctgatttccccgacttcccgttactccaaagaattccaaggaacaaacgaccagggctgctaaagacgaaaaattcggcgattccgctcgaaagaaaaagctggctggagtcaacgttccggctgacgcggaaaaagcgaccctgggcccgaaaggcacgaacgtggagccggccaagagcttcggcgctccgaccatcaccaaggacggcgtcaccgtcgccaaggaaatcgagctgaaagacgcctaa

SEQ ID NO: 164503 - DNA, 1545 bp, Arabidopsis thaliana landsberg
  unsure (1)..(1545): unsure at all n locations
atggaaaagcaatatgaaaagaagatccaatggacgatcaagaatttctcctctttggaatcggataaagtttattctgataatttcgtagttggnnnnnnnnnnnnnnnnnnntatttgttctctaatgttttcgttcatttttggtttacgtgattttgtcctttgcttgcaggcgtcttggggcctatcccaagggaaatgctgaaaatgttaatgtaagtttgtctctgtttctggaagttgctgattctgaatctttgcctaatggttggaaaagacacataaaatatcgcctaaccgttgttaatcaaatctcggagaaactctccgcacagaaaggtgattctttatacattcgctagattatatatgtttctaaggcgtacaaagggaagtccatattttatggttctacttttcatggactcataggacttataacttaagtcatatgagttgtgcaattcttgttttgacttaagttctatgtttcatgacttttacagtaacacaatactgatttagtcagaataattccaactggggtttcccatcaatgcttccccttacaaaacttcttaacataaaagatgggtttctggtgaatggagaagtaaagattgttgttgaggttggtgttcttgaagttgttggcaaatctgatgtgttagtggaaactccattggtaaatgaaaccattgatctcaatgggtttcaagttcttccttcacaggtaagaccgttactttttttaaaaagtattgtctatctgtttgtttgtcgctcactatacaagaagctacatatatggtttgtttgtcgatctgttttcaggtcaccaaaaactgacatctgatatagttttactacttattcgtccatgtttaacttgcaggtagaatctgtgaacaatctctttgaaaatcacccagacatagcatcaaaattctgtctggagaacccacttctgagaacaacatacttgaatagcctactatgcttgacagagattctaagccagtcccctgagaaactctccagtgttgatctcggcaatgcatattgtacactatcttctctgacaaaagccggttttaagttggattggttggagaagaaactgaaagaggttggtgatactcgggtgcaacaacttgagcaagatttgaaggacttgaaggaaaagtttatgttggatcctgactatgaggataacttgagtcgattttagtccctgaagagtttggatctaactggttgtgttctggtctgtttgtttttcgttttagttttgagaacaatgtcctcttaatcttggagtagaagatcaagacttgtgttgtcattgaggtttccctagctttgtttcttttattgcactttgtttctggatgtaaaaatgatttatagctttgtttctagctttcttagtgtccttaaggttgaaatgtgaaagttggcacatgaatgatgcatttgaagatgaatagcaacagtggtgatgtggatgcaaagataattagttattcttctttataagga

SEQ ID NO: 164504 - DNA, 1747 bp, Arabidopsis thaliana landsberg
  unsure (1)..(1747): unsure at all n locations
attaccaaatacatagccggagaaaacgaaacgacggttgttgtttccgatgatacatgcccggagaaagatgtcaaagagattaagaaattctgtgagaagctcggttacgtttacgaaggcagacttagcgaagagtacactcaaaccaacactggacccggtttggtctaaaaattccaaagttacatattaactttctatgttttactctttcttcatttgctttatatgatgatcattctctacagatgatgattggattactaatggctttgagtcagatgatgacgttgatccttctatcaagactattggatttaactatcctcatgtcaatagacgaaataaattacctgatccggttgaaaaagagaaaagtgttagcctttggtcaatgatcaaagacaacattggcaaggatcttactaaagtttgtcttcctgtttacttcaatgagccactatcctctctacaaaaatgctttgaagatttggagtattcatatcttcttgatcaagcttctgaatggggaaaaagggtaataaaaatctgcaaacgactaataatatttagattcttttatgacagtcttgtaattttgcctagaaaatgatatttttcagggcaataaccttatgaggattttgaatgtagctgcatttgctgtatctggttatgcatcaactaaaggaagaatttgcaaaccctttaatccaatgttaggggaaacatacgaggctgattatcccgataaaggccttcgatttttctcggaaaaggtttctttatgtttatatgaaaaacttataagattcactaattaatgtgaagttaatatacataacattttcttgtgaactttgttgttaggtaagtcatcatcctatgattgtggcatgtcattgtgatggcaccggatggaaattttggggagatagcaatttaaaaagcaaattttggggtcgatcaattcagctcgatcctatcggtttgttgactttacaatttgatgatggtgaaattgtgcaatggagtaaggtatgaatcttagtttaaccaaaaaaaaaaccattcatggatgatatgttacttatccttctatgctcaaaaatataggtgactacatcaatatacaatctcatacttggtaaattgtattgtgatcattatgggactatgctgattgaaggtaacggtgaatactcatgtaaacttaaattcaagaaacagtccgatgatggatagaaatccgcatcaagttcaaggtatagtagaagacaagaatggaaaagcagtggctaggttgtttggaaaatgggatgagagtatacactatgtgatggttgatcannnnnnnnnnnnnnnnnnnnnnnnnnngtggaaacgaaacaaacagcccgaaaacccgacaaagtataatctaacacggtttgggatcacattaaacgagctcacgcctggtttaaaggagaagttgccaccaacagattcaagacttagaccggaccagaggtatttagagaagggagagtatgaaatgggaaacgcagagaagttgaggttggaacaaagacaaagacaggcgagagagatgcaagagagaggttggaaaccaaagtggtttagaaaagagaaaggaagtgagacttatagatacattggaggttattgggaagctcgagattctggtagttgggatgattgtcctgacatctttggtcaagttcaccaatccatcaagtaa

SEQ ID NO: 164505 - DNA, 989 bp, Arabidopsis thaliana landsberg
gtccttcgtcatggcactccagaacgtggcccagacttggtattcttcccttcggccagggacaattacgtcgtggcagaagctcaaggacatgctggtgacaagtttccaaggctttcagacgaagccagtcatagctcaggccttgttccaatgcacgcaagaccatgaagaataccttcaggcatatatacgaaggttcttgcgattgagggcacaagcgcctacggtgcccaatgagattgtcattgaagccatgatcaaggggctcagaccaggaccaacagtgcaatattttgcaaggaagccaccacaaaccttggagaagcatctccagaaaatggacgagtacatcagagccgacaatgactttcagcaaagaagggaagaagcctacagatactctgagatgatcatgggctttagaggaaggctccaccttaggcatgtcaggacgatccataatcccagctcaagcgacaacaggggaaatcatacccaagggcaacaacacagctcccaatcatcaggggcacaacaaagttccttcaggccaccagctccaagaggtagagggaggagaagcttcggaggaagatatggtaattagcccaggagactgttctgcctattctgtggcgaagataagggacacacgacaaggacgtgccaagtcacgatccaaaagcataaggaaatcgctgaagccgaagctcgcagaatcagccgaagcaggtcttgcacactgcttcgtgccactctccttacatactagaatacgtgggcaatcaacctacagcctctgttgcttcggcaagccattcacaggcttcttcgcctcagcttccatcgccaccaccactgcagcccacttattcccgaagccagcagccagaagggcgtcaacactcccagcaacaacgtgacttcagagaggatccgaagctcgtacagtcaatagcactgtaccagaatcgaagcacatattt

SEQ ID NO: 164506 - DNA, 4463 bp, Arabidopsis thaliana landsberg
atgtttggacttgaaaatcaacaatctcaatcttcttcgtcggatctctaataagtgttttgagttttactgttaaagaagacacattagctattctactgttattaagttctcgtttcaaacgccatgccgtttgttatatttaaaaacggcagcgcatcgctctatcccctactaaaccctgagcatttttaagttaaactcagaggtcctctgtcacaagccgcaagaagaagcagagcaatgtggaagctgacgcggcgactgcagccgcatatcaattcgacccgatggttagtccgaaatttccggaatggaggagctggagacgccaccggtctctatggcttcgatcatctaaaaacagctaaagggtttcagagattcgttgctgatgccattgaaaggtatgatttttatagaattagtctatgtgtgctttgtcaaagtagccattgaagttgatgggttggtagaactgttattagcttagtcattttcatgaattatgatgtggtttttagacttagtgctactgtgttgtgtagtgttgtgatgtaatttggttaattgaagaaatgattttggaaccattttcttaggtctggtgagttggtgagctacatatcaggaatgccttcgtctccagagattattaaagccatggatgagatttcagacactgtaagttcttgctgcatttatgttactataactctattagtgttcttgttatactagctcttattcgtgcttgtagtgatgtttttctgaatgcgaatttttgtaggtttgttgtgttgttgactctgctgaactctgtagacaaactcatcctgacaggtctcttttctttttctagttctgagctttcaatacttggtttattatgttctgttgtaattttatttaaatttgtgtactttgctctataaatatgatagggaatttgttgaggaagcgaataaagcagcaattgaaatgaatgattatctacatgtgaggtgaccaacaatttgctcagctttgatttttctctcttatcatggaatgtctataatgacgacttgtatgggaattccttcatctttgaatttttttttttattgtttagacatgaatatgcagctgtacgaaaagatctgtaaacatagcatcttataaaatacctatctagactctcattcgtatcagtatcgtagacagagttgagtctatgtttattcttggcaatttcttaactttttctgggttgtttatgttcagcatcttaacacgaaccatactttgtatgctgcggtgaaaaaagcagagcaagattctaacttgcttaccaaagaagcaagtaggaccgcacatcaccttcgaatggactttgaacggggtggcattcatctagaccctggtttgttatttaccattgttatttctgtacccttttgacgaggctgatgtatcttaagttgaatgatttttttattagtttcttttattctttgcagagaagctagataaagtgaataacttaacaaccaacatatttcagttatgcagggagtgagtacccatgaatacacacgattgattctattaaaagtctgatattataacggggctttgtgttgtgagtgctaacttccttatgatctatattcaggttcagcgaaaatattgctgatgatccaggacatgttgatatatttccaggatcacgcatccctcgacatctgcatcatcttctcaaccctacctaccgatccacttcagggggctcaagagggtctacaagatcagcgcataagtcgaaacagaaagggtttcgaataaatactgatccacgaaccgtttcttccattttgcaatggacatcagacgaagaggtgcctacttgacctatttttctatttcctttttctgacacccgaacctcagggatagaggtgggagaataaacagtttttcattggtaacttacaagcgttttataaacaagtaccctagagtggtggtgtttcaaaaacagggaaatgtgctttgaagttgcatagattgtacacctaaatccattttctgctgactaatgtaattgaatatctctattttcaggttagaaaaatggtatacatccaagggaactctgttcctcatgcaaatcacggagttcttgagaagcttattgctgcacgccatgagctttcccaggtttgtacatattcatttatgatactctgtagtatattgcctgtcttaaaagatttctcttacttattgtaatagctttctattgttgctctcagatgatggggtgtaattcttatgctgacattatggtcgagccaaacctagcaaaatccccaaaggttgtgacatccttcctacaagaactgagcaagacagtcaaaccgaaggcggacgaagtaagctgaccttcacactattttcataaaagctgaactttctatgatgttctctttgtggctgtgtttgaaaattaaggctctaataaccagtttccatctctgtaggaattcatagccattagagactttaaaagagagaaatgtggtaatccatctgcagagttagagccatgggatgaaacttactacacttcaatgatgaaatcctccatcaatgatgtggacactgctgtaagttgcttttgttatttatttttctattgttgtgctgcaaaagcacttcggcttctctatcttcattttgtatacttatgggagctttttggttctttttacttctgttgctaagacttctcttgtcatgctctgttggaatattcttgtacaggttgtagcatcatattttcctctgccacagtgtattgaaggcctaaaagtgcttgttgaatcattatttggtgcaacatttcatactattcctctcgcgccaggtgaatcttggcacccaaatgtggttaaactgtctcttcatcacccggacgaggtatgttgttcacaaaactaagataatccttgcataagtcttgtagatataaacacaataatagttcattcctagatggccaattttttcgtagcatctttgttcccttgttctcacaaatcatgcgactgtctcttgcagggtgatctcgggtatctttaccttgacttatactcaagaaaaggcaagtaccctgtgtgtgctagctttgcaatcagaggaggacgcaagatttctgagacagaataccaacttcctgtatgctggttcacatttcatttattttccttcatatatgaaaactgcctacgtggattaaaaaatatcattttcttacactccgcctgttgatctaatcttatggcataaatagctcttgtttgcaatttttcgcgagcttgtgattcgtcaattgtgaagcttaatcactctgaagttgaagttttgttccacgaattcggacatgctcttcactctctgctctcacgaacggtattgtacaaatttatcaattcaagaagtgaagaagctaagtacagtccccctctcaaatttctctcttactttgctgattgctatgttttctggattttgcaggattaccaacatttttctggtacccgggtggctcttgacttggcagaaatgccttcaaatctatttgagtgagtataattcccaacgttgtaactcttgtttcaatacgctttcaattttgagttgcaaaatcttcgagtggtacataatgaatgtgaccatgcgtccctcaggtactatgcatgggactatcgcctcctgaagagatttgcccgtcattactcgaccggtgagacaatacccgagaagttggttaattcgttacaaggtgcgaggaacatgtttgcagcaacggaaatgcaacgccaggtctgattaattgattcacctctcaaatagattcaatgcagtaaaaacaactgtgttagagagatcaacttgaacttcggtttctatttggtttttggtaggtcttttatgcgctgatcgaccaaatgttgtcggggaacaaccagagacagcaagagatgtgagtcacctcgtggctgaactgaaacggcagcacactagctggaaccatgttgaaggaacacattggtatatccgattcagtcacctacttaactatggagcaggtatatatcagtctacatatataaatgcatacaagcgtttctctgcagatgtatcttgaactctgttgtgtatgtgcagggtactatagctacttatacgctaaatgctttgcatcgacgatatggcaatcaatatgtgaagaagatccgctttcgttgaacacaggaacattgctgagagagaagttcttcaaacatggaggagccaaagatccagctgagctacttaccgatctagcagggaaagagatcattagtgttcatggtgaaggcatagttcctgcaaccacgtatcttttaaacgagcttagactatagaagaacaac

SEQ ID NO: 164507 - DNA, 1993 bp, Arabidopsis thaliana landsberg
  unsure (1)..(1993): unsure at all n locations
atacacctttacttacattatattcccgccatcgcgatggcgacgtctctgaatctatcatcgatcttctcctcctcctcaaggctcgtcaccactccctcctctgtttttcccatccgtcagaggcgacggatcatcctcgttacgtcttcttcttccggagctggaggaaaaccgacgattctcgtaacggagaagctaggccaagcggggatcgatctgcttaagaagtacgctaatgtggattgctcttatgatctgagtctcgaggagctttgtacgaagatctctctttgtgatgcgctcatcgtcaggagtggtaccaaggttgggagagatgtgtttgaatcgtcgcgtgggaggcttaaggttgttggacgcgctggtgttgggattgataacgtcgatttggcggcggcgactgagtatgggtgtttggttgttaatgctccgactgcgaacactgtggctgctgctgaacacggaattgcgcttttgaccgccatggctagaaacattgctcaagctgatgcttctatcaaagctggtgagtattttaaacggttgttgaatttgaatagcgatttgagaaattgcgatgtgaaatgtagaaatgtggttgtttgtaggcaaatggacgagaaacaagtatgtaggtgtttcacttgtggggaagactcttgctgttcttggttttggtaaagttggatcagaggttgctagacgagccaggggacttggtatgcatgtcattacacatgatccttatgcaccagcggatcgtgcacgagctattggtgtggagcttgttagttttgaagtagctatttcaactgctgacttcatctctttgcatctgcctcttactgctgctacttcgaagatgatgaatgatgtgacctttgcgatgatgaagaaaggagtccgtattgttaatgttgctcgtggtggagttattgatgaggaagctcttttgagagcgcttgactcgggtattgttgctcaggcagctcttgatgtttttacagtagagccacctgttaaagataataagttggtgttacatgagagtgtcactgccacacctcatcttggtgctagtactatgaaggctcccccatttccaccgtatattcgttttgcctttagtgcattttgttctgctctcctgaaacctttacttgacgcctaggaaggagtgtctatcgaagtcgcagaagctgttattggagctttgagaggagaacttgctgctaccgcggtcaatgcaccaatggttccactagaggtaatttcagacttcactacagagtccttaattcaggatcaagtttcattcttctagttcttggtgatattgcaagtagtgatgatgatttgtcctgcaaattctctgacactgttcagttgctatctgttttcaggtattgagggagctgaagccgtatgttgtacttgctgagaagcttgggaggctggctgtacaattggtaactggtggaagcggtgtgaatgctgtgaaagtgacttatgcttcttccagagctcctgatgatctcgacactagacttctccgagccatggttataaaggggatcatcgaacccatttccagcgtattcataaatctggttaactccgattatattgccaaacaacgtggagtcaaaatctcagaagaacgtatggttctagacggctcacctgagaatccaattgaatacataactgttcggatagcaaacgtggaatcaagatttgccagcgctttatcagagtccggtgagatcaaagtagaaggcagagtgaaacaaggggnnnnnnnnnnnnnnnnnnnnnnnnnatttggagtggatgtgagtttagaagggagtgtgattctgtgcaggcaagtagatcagcctgggatgatcggtaaagttgctagcatgttagcagatgataacgtcaacatcactcccatgagcgttggtcgaattgctccagactagca

SEQ ID NO: 164508 - DNA, 1255 bp, Arabidopsis thaliana landsberg
ttccgatgaccacgagactcatactctctagcttcgtctctctcggctactcactctcttcttcatcaccagaaccggtttctcaccgtcatcttcatttcatcagcctttgaacaacactctccggatctccacttcctccaccggcagtaaattacagagtccaagaagttgtaataagatccctccttccctcgccgatgctctcgtccactatgcctcctccaatgtcactccccagcaaactctctccgaaatctccgtcaccaagaaggtaacaaattaaagtatactatttaattatcacaaaaaaaaagacttttgacatgcaaattaaattgtaaactgtagattgttaattgatatctaaatgaagaactcaattcgtcatctaaattctggaaaaatcaaatatgattagcaaattaaatgaatctagtctaatcttttgtactaatgttgctaccgtaacataagtttagtagtccggtaatgatgtgaatttttagtcttttagacgtcacaaaaaatgagcaaatgaccgtagttaaattttattttacttttctactagtaaattgttgtcgtattgtataagataagtgtaaatgtgaattatagatgatacaaattaaattggatcaggaattagagaagaaatctccgtgcaacttcttggtatttggtcttggtcacgatagcttgatgtgggcgacgttaaatcacggaggaagaaccatcttcttagacgaggacgagtcatggattcaccaaatcgctgagaaattcccgtctcttgaatcgtaccacgtccggtacaagaccaaggtaagagacgcggaagctctcatggctgctacgaaagacagagaagaatgccgccgcgtgtcaactgatcttagggtttccacttgcgagcttgcgttgaagggcttaccggaggtggtttacgagacagagtgggatctaatcatggtggatgctccgacggggtttcatgaagaagctccgggacggatgtcggcgatttacacggcggggatgatcgcgaggagacggaaggatgaggaagagacaacggctgtgtttgtgcatgatgtggataggaaagtggaggatgagttctcaatggagtttttgtgtagagattacatgacgaagcaagagggaagactccgtcatttcacggtgcctagtcaccgtaactatggtgtctccggcgttaaattctgtccttaaccctatccgccggtat

SEQ ID NO: 164509 - DNA, 3554 bp, Arabidopsis thaliana landsberg
gaggaggaacaagctccctagtgaaagaaacgggaccgaacaccagaaggaggtgactctcccccacctgcccggaaagaaacgggatctagtctttgcggaactcaatctaggaagcatgacagaaaagtcagtcactacacctcctcccgccgcgcaaaagaaaaacacgaggttcccattacgcctcccaaatttctgcagaaacgtaaccaagcacctctccccgaaacgcatcgatttcatcatgggaagatctcagctctgcaacgacccgatcaactcgatcaaaactcatcaaaagaaagcagattcctgcacaaaaggcaaaagcccgatgatgggatcacattttgggaaagtgaaactcaccgaccttgataaacctcacgataacgctcgcgttattcgaatcgatgtaggcaactacgaacactcccgtataatgatcgacacaggaagctcagttgacgtactcttttacgacgccttcaaaaaaatgggacaccacgattccgagctgcaaggcaggaaaatgccacttaccgtgtttgctagtatacgaccttttctttaggaatcatccagctcccaaccatcgcacgaggagtgaggcgactcacgagtttcctcgtagtcgacaagaaagctcttttcaacgcaatactgagaagaccatgggtacacgccatgaaagccgtcccatcaacctaccaccaatgcattaaattcccctcggacaagggaataacagtcgtatacggcagccaacgcagctcccgaaaatgctatatgggcagctacgagcttgtcaaaaaggctgaccccgtagtactaatgatagaagacaaactcgcggaaatgaaaacagtcagatcctctgatccttctcaacgcggacctcgaaaatcattgataacacaggtctgcatagaagaatcagatcccaaatgatgcgttgggataggtcaagacctcgacccagcgatacgagaggatctcataacctttctcaaagaaaacaaagacaactttgcatggtcaagtgcgaacctccgaggaataagcctcgaagtaacctcacacgaactcagcgtcgatccgacctaccgacctataaagcagaaacgtcgcaagctaggtcctgaaagggctaaagctttgcacgatgaggtcgatcgatcgctcaagatcggatcgataagagaagtaaaataccctgactggctcgtcaacccggtcgtcgttaaaaagaaaaatgggaagtggagagtgtgcatcgactttacggacctgaataaggcatgtcctaaagacagtttccctctcccacatattgaccgactggttgaagccactgcggaacacaaactattgtccttcatggatgcattctccgggtacaaccaaatacttatgcgcccagatgaccaagaaaaaacagcttttattactgactgaggcacctactgttataaagtaatgccttttggtttaaaaaacgctggagctacttaccaaagattcctgagcagaatgttcgccgaccagctaggtaaaacaatggaggtctaaatcgtcgacatgctggtcaagtcagctcgcgaaaaagaccacgtcccgcaattaagagaatgcttcaaaatcctaaacaaattcgaaatgaaattaaaccccgaaaaatgctctttcggagttccctcgggagaattcctcgaatacctagtaactgaaagaggcatcgaggccaatcctaagcagattgcagcattgatcgacatgccatcgccaaaaacggcacgggaggtccaacgactaacccgccgtatcgccgccctcaacaggttcatatccagatctaccgataaatgcgtccctttctatcagctcctccggaaggataaaaagtttgattgaaatgaggattgcgagcaagccttcaaataattgaaagcgtacctgtcagaaccacctatactcgcaaaacccgaagaaggagaaccgttgtacctgtacacggcagtctcccgaaccgcgataagcggcgtcctggtgagagaagatcacgaaggacagaaaccgatttattactttagtaaaacgttgatagacgctgaaactcgttatccagcaatggaaaaactggcacttgccgtagtcatgtcagctcgaaaactgagaccatattttcaatcacatcccatcgtagtgatgacgtctcaaccaatcaaaaccattctgcacagtccaacttaatcaggtcgacttgcaaaatgggctatagaactaagtgagtacgatatagaatatcgcaccagaaccagcttgaaagcacaagtcctagccaactttgtaatcgagctcccgttagcggacctggatggaaccaactccaataagaaatggctcctccacgtcgatggctcctccaaccgacagggatccggagtaggaatacaactcacctcccctaccggggaagtcatccaataatcgttccgactcggattcggcgcatcaaacaacgagtctgagtatgaagccctcattgctggcattaagctagctcaaagaatggggatccgcgatatacacgcccatagcgacttccaacttgtcaccatccaattccatggggaatatgaagctaaagacgagcgcatggaagcgtacctcgaactagtcaaaaacttgacccaacagttcgaatcgtcgaactgatcaggatccctagaggagaaaacacctctgcggacgccttggcagctctcgcctccacgtcaaatcctttcgtcaaaagaattatcccagttgaaggaatagaacacccgagcatcgacctaacgatcaaacacgatgggacagaaacctagacaacttgcaactttacgcgagtaacccgaagcaccaccgccgcggctagaacccttgcagcagccgcggaggcagatgcagcggaggaagagccggagctcggaacccccgaacaacctgcctcgtacgaacctgaaccgtacaacgactggagaatccgaatcatcgattacatcgaacgagggatcacacctcccgacaagctggagaccagaaaactcaaagccgagagcgcaaggtactgcatcatggaagggagactgatgaaacgcagcgtcgcaggtccgtacatgatgtgtacctacgggcaacaaacgaaagatctcatgaaaagcatgcacgaggggcaatgtggtagccgctgtagtggacgtaccctcgccctcagaattaaaaagcaaggttacttctggccatcaatgctagtcgattgcgtagctcattcactcaggtgcgataaatgccaacgacacgcacgaactcttcatcaacctcccgagaaaatgtcctcgatatcttccccttacccatttacgaagtgctccatggacgtcgtacgtcctatggaagcctccggtgggaagaagagactaaaaaacctgctggtcctcaccgactgttctaccaaatggattgaggctaaagccttccatcaggtaatcgagaaacaagtcgagaac

SEQ ID NO: 164510 - DNA, 1461 bp, Arabidopsis thaliana landsberg
gcagtgtcttcaagtatctttattggttctagcttcatcatcaagaaaaaggtctcaagatagccggtgcaagcggtgtccgagcaggtgaaggagggtatggatacttgaaggagccatggtggtgggctggaatgataacaagtaagtcttatcaaattctgcaaaaatgttttagtgatcattgactaaacatgtgttttgttctcttaatttagtgattgttggggaagtagctaattttgcagcctatgcatttgcaccggctattttggtaacacctttgggagctttaagtattatattcaggtattcttattgttgaaaatggcatcagtatcatatatttagattatagactatggttttcttgaaaacaaagatccatgttttatgcagcgcagtgctcgcgcattttattttgaaagagaaattgcatatgtttgggatacttggttgcattctctgtgttgttgggtctacaactatagtcttacacgcaccacatgaacagaaaatagaatcagtcaagcaaatatggcagcttgctattgaaccaggtatatgctcataattaccgcaaagttatggtgtgccaaatcgattctagtgaagattgatatatatatgaaagttctgtttcatcaggtttccttgtgtattctgctgtgattgtgattgtggtggctatactgatcttctactatgaaccgcgctacgggaagactcatatgatcgtatatgtcggaatctgctccttaatgggttctcttactgtacgtttttcttgagctctctctgccttatgttaactatgtttcatgggaaatttcttcatgctttcttgtgtgtttgtaggttatgagtgtcaaagctgtggcgatcgcgattaaactgacattttcagggacgaatcagtttaaatacttcaacatttggatcttcattttagtagttgcaacttgttgcattttgcagatcaattacttgaacaaggtaaagaaaaaacactagtgaaacctaaccttcatatacattctactgagttcctctctttgaatgtggcaaaaaaggcattggatacattcaacacagcggttatttctccggtttactacgttatgttcacaacattcacaatcatagctagtatgatcatgtacaagggcaaaatcaaatctctatttgctttttcttctttctcaagtaaataaacagtttcttaatatttcctctgctgagtgattacaggattgggcttctcagagtggattaaagattgcaacagagttgtgtggttttgtgacgattttatcaggaacctttctgcttcacaagaccaaagatatgggaaacagtgcaagtggtcgtggttctatctcaatgcctactagagacactcctgtcttcactaattcaggatccggtcggagctccagctctgataaagtagcttcctga

SEQ ID NO: 164511 - DNA, 4393 bp, Arabidopsis thaliana landsberg
atgccgtcccccgtgacatatgtcgcccgtgtgtgcggcagctgtccagacatggggcggtagtcggtgctgcatgggccaacttaggcggactataaatagtcttcatttttcgcccattttcatttttgaggcgagagagaaccgaaaggctgtcgactgatagaaaatagtcttaaaccaagaaaactttacccgaatcgagagaaacttgaccgtggtcgagggatctcgtccgtaagagggaaaatcatcgaccgtgagcaagataactcgtccgtgagtgttcgaccggctgactatgacaaaggatcttgctcgtgactcagaaatcttctcaaataccgaatctgtgagttgtggttgaattgtgtgtttgtttacatgttttctagagctagtctttagatcatatgcatgcttactcacttaggtttaactaatcagattttggttaagattgaacttgaaacttaaaatgatatgggcattttgacaacttgataacgttaaggaatgaaatgaactagtgtatggctaggttaagtgaatgaggacataactatgtttacttgatgaattatgattgattcgggggcgtaacaatcgggccctaattaaaactttgagaaaacttgtaagttcttgagtgttttgtctattgcttgctacgttctcttcgtatctctgattgtttgttcgcatatttatcttattgcatgttgcatgtggggttatgggtggggttagactaacgtttcttgggaatcccaaactcattgagtaattctagattactcatgattctatttgttttgcaggaaaccttagaggaaactagagggagtggtgaacgctaggaaacccgaaatttcattgtccttgtagtgtatgcaagaatgaaaaacacatcatctagaagagttaatagtcatttgtttagtcaaggatttatgcctgattattatgtttggtataagcatggagaagaagtgaatatggatataggaacgagtacttacacggatatgacgtattttagttcgaatcatgaagaagtgagtaatgttgtagaagatccatatgtggatatggtgaacgatgcatttaattttaacgtggggtatgatgataactatcatcatgatgatagttatcagaatgtggaagaaccggtccataaccattcaaataagttctacgacttgttagaaggtacaaataatccattgttcgatggttgtcgtgaagggcagtcgtagttatccttagcatctcgactcttgcaaaacaaggcggagtataatatgagtgaaaagttggtggactccgtttgcgaaatgtttacagattttttaccagaaggaaaccaggctaccacttcacattaccagaccgagaagttgatgcacaatttaggacttccatatcatacgattgatgtttgtcagaacaattgtatgctattttggaaagaagacgaaaaagaagatcaatgtcgattttgtggcgcacaaagatggaagcctaaggacgaccgtcgaagaaccaaagtaccatatagtcatatgtggtatctacctattggagaccggttgaagagaatgtatcagagccataagacagttgcggcaatgcgatggcatgttgagcaccaatcaaaggagggagaaatgaatcatccttcagatgcagcggagtggagatatttccaagagttacatccccggtttgccaaagaaccccgtaacgtttatctcgggttgtgtactgatgggtttaatctatttgggatgtctcgtaatcattcgttgtggcttgtgatcctgactccatataatttacccccttgtatgtgcatgaatacagagtacttatttcttaccattttgaattctggaccaaatcatcctcgaggttgtcttgatgtgttcctccaacctcttattgaggagttaaaagagttgtggtctactggagttgatgcgtacgatgtttcattaagtcagaattttaatctaaaagcagtactactgtggacgattagcgactttccggcgtatagcatgttatcaggatggactactcatggtaatttgtcttgtccagtttgcatggaaagtacaaagtctttttatttacccaatggacggaagacacgttggtttgattgtcaccgtagatttcttcctcatggtcatccatcccgtaggaatagaaaagactttttgaaaggaagagatgcttctagcgagtatccacccgagtctttgacaagggagcaagtttattacgagcggttagctagtgtaaatccaccaaaaacgaaggatgttggtgggaacggtcatgaaaagaagatgcgaggctatgggaaggaacataattggcacaaggaaagcatcttgtgggagttgtcttactggaaggacctcaatcttcgacataatattgatgtgatgcatatagagaagaattttcttgacaacatcatgaacactctcttgcgtgttaagggtaaatcaaaagacaatatcatgtcaagaatggatattgagaaattttgttcacggccagacttacatattgatagtaatggtaaggctccatttccagcgtattgattaacagacgaagccaaacagagtttatttcaatgtgtgaaacatgatgttagattttcagattgttattctagcgatttggctagttgtgtagatctggagaatggaaagttttcaggcatgaagagtcatgattgtcttgtttttatggagcgactacttccatttatctttgttgatctccttgaccggaatgtccaccttgccttatcaggtaaaataagaatataatttactctttatatcatatatgcacttgagatgatgcattttttttccaggggttagtgcattttttagggacttatgtccgagaattttgcagaaaaggcgcgttcaaattcttaagcagaacattgttttgatcatatgcaacttagaggagatcttcccaccatcattttttgatgttatggagcacctgcctatacatctcccctacgaagcagaattgggcggtcctgtccaatacaggtggatgtatccttttgagaggtttttcaaaaagttgaaaggaaaaacaaaaaataaaagatatgcggccggatcaattgttgagtcatatatcaatgactagatttcttatttctcagagcactacttcgccgataataaacgaacaaaatcaaggtaactaatagtaattaattaaacatctccaccaagcaagttttcaatgcgcaaaaataaccatgaattacctcttttggatcaagtcaacaagattcaatgagggttaagttcctgtatatcatgttcctggagtacctaatatatttagttccgttggtcgtccaagtggtgcaatgcatgtagaatggctttcagagaaagattaccaaaatgcacatgcatatgttttaagaaattgtgactattttaaaccatttgagaggtatttttaatcactttgatttattcatagataagatcactttgatttatttgtcttcgtttgttgagacagtatgttcgaggattatctttctgcgaaatatccatccttgtccgaaaaagaactctacgtcagaagagctgaagaatatcatctatgggttaaagaatatgtaagtctactgtaattttggttcatgaatgtaactatttgtctgttttcttgtagctagcgtgatttaatttaagatcatattgatttcatagaactcgagcagatttctacggtaccttaactgatgtcatagaactcgagtatgagggcatcgtcaatttgaggatcacactttttaagtgtaagtggtatgacccaaagatcgggagaggaactcgccgaaaccatggtggcgttgtagatgttctatctacgaggaaatacaataaatacgagccatttattcttggtacgtaattaagtatacttaaaatttctaattcattaataaatactattgtatatatttttgttgatatatgtataacatgtttgaacagcatctcaagcagatcaagtttgttatattccatatccatatacaaagaaaccaaagaacatttggctcagtgttttaaaggtcaatccaaggggaaacatttctggacaatatgaaaatactgatccgacattgttgcaaaccgaggatgatgaagctgttttgcagactacaattgaagatcttgtaatagactatccggtagcagacgtaaccccaatcatcctcgattacgatattggagatgctgaaccagaagatgaattccgatgtaatttatcgtcctcggatgaagatgaaatagaagacgaagatgaatga

SEQ ID NO: 164512 - DNA, 3591 bp, Arabidopsis thaliana landsberg
atggcttcttcttcttcctcgcctcgcaactggagatacaatgtcttcacgagcttccatggaccagacgtccgtaaaacattactcagtaacttgcgcgaacattttcaaggcaaggggataactatgtttgatgacgaaaagattaagagaggcggagacctctctccttcactcaaaagagctataaaaacatcgaagatctcgatcgtgattctctcccagaaatatgcttcttcaagctggtgtttggatgaattgttggagatcatgaagcgcaaaaaggctatgaaacagatagtgatgaccgtcttctacggagtagagccatccgatgtgcggaaacagaccggggatttcgggatcgctttcaataaaacttgtgtgaataagacggacaaggaaagaaaggaatggagcaaagctttgactgatgtgggcaatattgctggagaagacttgctaaactggtatgtctttgatgaaattgaattatttccttatgttccaagtggtaaccacaatagaggaaacaagcacaaaaaatggttaataggaactacgttgagtagaatagattttcattgattgaagggaatgtttgttgaatgaattttcgaaaatagagtcttagcctatggcaaaagaagaatgttatatctatgattagctcttttttcacaacagtttaatggaaatgtctcctttctttcttttattagggacaatgaagcgaacttgatagagaagattgcaagtgatgtttcagataaactcaatgtcacaccgtctagggattttgatggcatgattggacttgaagctcatttgagaaaaatagagtctttgcttgatttagattatgatggagctaagattgttggaatctctggtcctgcaggcattggtaagagtaccattgccagagctttacatagtgtactatctaaacggtttcagcataattgttttatggacaaccttcatgaaagctataagattggtcttgttgagtatggtttgaggttgcggttacaagagcaacttctttcaaagattttgaacctcgatggcattaggatagcccatttaggtgtgatacgagaaaggctacatgaccagaaggttcttatcattcttgatgatgtggagagtctagatcaacttgatgctttggctaatatcgagtggtttggtcctggaagtagggtcatagtgaccactgaaaacaaagagattttacagcaacatggtatcagtgatatataccacgtgggttttccatcaagtaaagaagctttaatgatcttttgtttatccgcttttagacaaatctctccacctgatgggtttatgaatcttgctgctgaagttgcagagctttgtggttatcttccattggctctgcatgttttggggtcatcattgcggggaaagaactattctgactggatagaagaactaccaagattgcaaacttgtcttgatggaagaattgagagtgtattgaaagtgggctatgaaagtttacatgagaaagaccaagctctatttctctacattgcagtcttcttccattataaacatgctgattatgtgacatccatgctggcaaaaactaacttgaatgttagacttgggttaaaaatattagccaatagacatcttatacatataggtcatggcgctaaaggtatagtggtaatgcaccgtttgctaaaagtaatggctacacaagtcatttccaaagaagagccttggaaacgccagattcttgtagatacccaagagatttcttatgttttggaaaatgcagaagtaagctttctgtttgcgctatcatgtttattcactgctgtttaaagcagatcttgccaataacaagttttgctttggaatattttttgttagggtaatggatcaatcgtaggtatatcatttgacgtaggagagatcaacaaattaacaataagcgctaaggcgtttgaaagaatgcacaatcttttgttgctaaaagtttacgatccgtggtttactggaaaaggacaagtgcacattccagaggagatggattttcttcctcgcctaagcttacttcgttgggatgcatacacgagaaagacccttcctcgtagattctgcccagaaaatctcgtcgaactcaacatgccggatagccagctcgagaagctatgggaaggaactcaggttagttatttattatttgtgttgatatgagacgagacagctgatatttgatgttaattagcaatattcacatagaaaaatataaactaatgctgaaactgtacttaatgattatattatgatttttacgtgcagctgcttgcaaatctcaaaacgatgaggctctttaggtcatctcgtttgaaggaactcccaaatctttcaaatgctaaaaatctggagtgtctggatttgcatcaatgcgttgctctgttagagcttccatcctcaatttctaatcttcataaactaaaattcttagagacgaatcgttgcagaagtctacaagtcattccaactctcaccaacttggcatatctcgaagatatccagatgatgggatgcttacgactgaaaagttttccagatattcctgccaacatcattaggctctctgtaacggagactacgattgcagaatttcccgcgtcacttaggcatttctcgcatatgaagcgtttcgatataagtggcagtgtaaatctcaagaccttttcaacacttctccccacgagtgtaacagagctacacatagacaacagtggtattgagagtattacagattgcatcaaaggtcttcatgatctacgtgtccttgctctatcaaactgtaaaaaactcgcgtcattgccagaagcttcctggttcacttgaatggctacgggcaagccattgtgattcactagagagtttaaatggccatttaaacactccaaatgcagaccttgatttcgctaactgcttcaaattggatgcagaagcacgacgagcgataattcagcaatcgtttgttagcgggtgggctctcttaccaggattagaagtacctgcactgttcgatcatcgagccagaggaaattcattaataattccttattctgcttcctataaggttcgcattgtgatttctacagagtttgatcataaagacagagattctaccatagtttcaagactactgtgtcgttgcatagtcatcagcaactcagtaaactccactgacaaggagtttgtactaacggatgtctataaatatcgaatggaacatctatttatatttcatatggtgaacccggtgtcctttttctacccctctagcagagagatagtgctcgaattcagcagcatacacaaacatttcgacattgttgaatgtggtgtccagatcttgacggatgaaacagagcgaaacaacaatgtgggttctgcagatgaagatgatctctggtatatacatgaattcagcgaatcgttacgcaaagaagaaaaagataaagatagcgtcgctaaatctgaatcctgcggagcgtcagaaaaagaagatgaggaagcaaccaaagacaa

SEQ ID NO: 164513 - DNA, 993 bp, Arabidopsis thaliana landsberg
atggattcaagaagaagtaaagtttgtggagaaacagcttgtgggttttcaacatcttcaagtgatgctaagaaacgagctgcttcaatgcgaaaactctgtttcgttgtggtgttatgtcttttgttcatgagcatagaagttgtttgtggcattaaggctaacagtttggctatattagcagatgcagctcatttgctcactgatgttggtgcttttgctatctctatgctctccttgtgggcttcttcttgggaagcaaatccgcgacagagttatgggttcttcaggatagagattttatgcactcttgtctcaatccagctcatttggttactcactgggattttggtctacgaagccgtaactagactcgttcaagagaccaatgatgatgttgatggtttctttatggttcttgttgctgcttttggtttagttgtaacacatcataatgattgttgtgcttggacatgatcacggacatgggcatgatcatggtcacagtcatgatcatggtcatagttatggggaaagagctgagcagttgttggagaaatccaaggaaataaggaacattaatgtgcaaggggcttatcttcatgttcttggggatttaattcagagcattggggtaatgattggagggggtatgatttggtataaccctaaatggaaagtaattgacttgatatgcacgttattattttcagttattgttttagggacaaccattaagatgcttcgaagcatacttgaagttctaatggagagcacaccgagagagatagacgcgaggcagctcgaatagggattgatggaaattgaggaagttgtggatgttcatgagctgcacatatgggcaattacagttggaaaaggtctgttttcttgccatgtcccggttagaccagaagctggtgatgaaatggtgatgaacaaagtgatcgattacatctggagagagtatcgtatcagtgcgttacgatcaaa

SEQ ID NO: 164514 - DNA, 2147 bp, Arabidopsis thaliana landsberg
  unsure (1)..(2147): unsure at all n locations
ccatcatcattcactcgaccaatcactctactaacaggtgcagtatcaccatcatcattcactcgaccaatcactctaccaccaagtcgagttccaccatcatccaccactcgacatcatactcgattgccagcagagtcagaacaaaccttttgttccctacaatcaaggttttgttcccaaacagcaatttcaggagaactaccagcaaccaccacctgggtttgccccacagcaacaccaaggtcctgttgctcctgatgctgaaattaaacaaatggtccaacagctgctacagggacaagcatctagctcgatggaaattgctaataagttatctgaattacaccataagctaaactgtagctacaatgactgcattgaataccaaagtcagatacttggaaggccaatcagcatctacctctgcaccaaaagttacaggacttccagggaagtccatacagaatccaaaagagtatgttaatgttcatgctatcatcataaggagtggaagagagttatccactagagagagacccaagtcagtcactgaggacagtgcataccaagatggggaggatttcagtctcaataaagatcaagctgtcaaacaactcgagctgccactcgaccagtcactcgagcagccactcgacctgtcactcgagcggccactcgaccacttcactcgaccgaccttccnnnnnnnnnnnnnnnnnnnnnnnnnacatgttgctgtcaaaaacaaagaaaaagtcttcattcctcatccttacaagcccccacttccatttcctggtcgacataagaaagagttagaagattaggtcaaaaccaatgttggccaagaccattaaggaagtcgaattaaggatacctcttcccgatgctctaacgcgtatcccggattcccaaaagttcctcaaagacttgatcatggagagaattcaagaggttcagaaaacaacagttcgagccatgagtgcagtgccatcatacaggagaacgatctcccagaaaagttaggagatcatggttcattcactctaccatgctccctaggttcattgaaattcaataaatgcctttgtgacctaggagcatcagtaaatctcatgccactctcagtagctaagaggttgggtttcaacaagtataaatactgcaatatctccttggctgataggtctgttagactacctcatgggttattagaaaatttgcctatcaagattggaaatgtggaggtgcctacagacttcgtagtgctaaacatggatgaagaaccaaaagatctcttgatattaggaaggccctttttggctacagctggagcaatcatagatgttaagcaaggaaagattgatcttaatctggggaagaatttggaaatgaagtttgatatcaatgatgctatgaagaagccgacaatagaagaacaaaccttcttagttaaggaagtggaacagttagctggtgaactgctagtggaacttgaagaagcaaataattcaaaaactgtttttaccaatagtggtaaaggtgggtatctccttagtgaaactttgagttctgagaagtcattagactcacacaagacagcagttggctcagaggtttacaagggcttgatggggtctgacacaaaggttatgaaagctaatgaagtaagttcaacacatactcgaccaactaattccaccaacaactcgaagaagcctccaactttccctgagagctcatgctcgaccgaacagcttaaggcaagcactcgaacgtcaaatgattggttagaactcaaggagagatctaaatggcaggacaaagccatacaagagctaacatatattgtgaaagagatgaaggatcgaatcaaggagctcaatggaaaagctaaccaagtaccactcaacatcaaggacgtcccagattatggagccactattctggtcagcaaagaaatatgtgaattcacgttggaatggtctagtggagaagactatcctgataaaaaagaagcttacttcgaggacatggccactaagttctcaattgcagacctgtcaagaaacactaacgagtacgatgatcaccctactcaagaaggagaggagacctcatctcctctctgcaacccagcctaa

SEQ ID NO: 164515 - DNA, 408 bp, Arabidopsis thaliana landsberg
tggctcgcgttcgcaaacggcgaggcaagaaacttcggaggtttcaccgccaagctcaaggtggccgaggagaagatgtcgcttcgaggatgctaacgaccaatttatgtatttgtcccaagcgcggctaacgcacaattgatcaaggcgctcgaagacggcggatctttggcgaccgagaaaaaacaggtcgaggagtggctcaaggattttgcagatgcctaggtgaaccttgttcgtctcacatctgagctgaaggaagagctcaaaacccctgtgcacgtaccggctcctctaagccccagaggtcatagaccggtcgagactctcgcggatgaggtgggagtcaccgatcagtccgggtcgtacttgcccgctggtgggactctcccgaccgaaaagcctgag

SEQ ID NO: 164516 - DNA, 190 bp, Arabidopsis thaliana landsberg
atgcccaaaatgaagaccaaatctggagcgaaaaaacgcttcaagattaccggcacgggcaaggtccgcgccgccgtcgcctacaagcggcacaatctgcgcaaacgcacgcagaagatcaagcgcaaagcccgcgggacaaacgtccaacagccaggtgataaagcctcgtcataaatatatgcccatc

SEQ ID NO: 164517 - DNA, 544 bp, Arabidopsis thaliana landsberg
ggaacacactgcctgttcggcatcccgatggaacatggactggcggtcgccggcatcctgttcgcgctcggtctcgccggcgtgatgatgcggcgcgacatcctgttcctgctgatgtcgctcgaagtgatgatgaatgcgacggcgctcgcgttcgtcgtcgccggcagccgctggcagcagccggacggccagatcatgttcatcctcgtgctgtcgctggccgcgtcggaagcgtcggtaggccttgcgatcctgatccagctgcaccgccgcttccgcacgctggatgtggatgcggcaagtgaaatgaaagggtgaggaaccgcgccatgaaaacgaagttttctgcggtgccgcacgcccgggcaggaatggccgggccggggccagatcaaacaacgaatgtcgcgccagggatggccatgactgcagctggggtcgtgcgctgatgaatcttctcttcctcgtcttcacgttcccgctgctcggcttcctgacgctggcgctcggccgcacgcgcatttccgaaaatgccgcggcg

SEQ ID NO: 164518 - DNA, 5529 bp, Arabidopsis thaliana landsberg
atgttgattgaaagcttatcttctagcattagtaccaacaacgttgacattacaaggaaaacgcaagttcagtatgttgcacatgttgaaagtttagctacttcagagaagatggatcaacagagatacatgagctacaatcaacaatctatacatcagaaaccggttcagcaaactaaaaacttcattcagaatcatgcttcttcaacccaaattcaccctccacccgagaccactaggaagattgaatctcttctcgaacagattctcaaaggtcaagagaagcaaacaacagattttgatcacaaactggttgcattatccgacgatatgaataggaagattcaaatattgaacaatcggatcaagcaattgactacaaacaaagaagatgttcgtgctattgagttaaggagtggaaaacagccaaatccagtgcttcaacgagagcttcctgcagccaaaatcgtgaatttggaagaaaatgatgttgcagtttttacagaccagacaccagtgtcgaccgacactactgggtgtcgatcgacaccagccacggtagacactacagaacgcgacagtgtcgaccgacaccaacagggtgtcgatcgacaccaacccagtccaaacctgcgaattctccaaaacccgatttcagctgcagcaaaggtaaccaaacccaaggttccttttcccaagagtcctaggaattccatataggagcttgatgatgatgctagatgcaaagctatgatggataagttgattgtagagatgccactcatagatgctgtgaagtcttctcctatggtcagacagtttgtgaggaggatggttactaaggatttgctaattgagaaagctgtgatgaggatgtctacacaggttagcgacattattcagaacaagattccatagaaacttccagatccaggtagctttgttctcaattgtggtatccttaacgagagttttgagcgatgcttgtgcaatcttggttctagtgtcaacttgatgccacgttcagttgcactttggcttggtttgacaaatttagagcctgcgcaaatcactcttgttcttgctgatcgatttgttcgtagacctgatggtatcctatgtgatgtacctgtacaagtcagtactagcaacattcctaaatattttgttattttatcttataagaaagaacctaaagatcctctaatcttggtaagatctttcttagccacaagtggtgccattattgacataagaaagggtagaataggcttgaatgtacgtgatctaaaaatgcagtttgacacgaataaggtggttaagaagcctaccatcgatgggcagactttctatgttgacactatctcgtctctagatgaagaattcctggcgggcagacgtactgatcgatgggcagacatgctgatcctttagagcatgctctaataccttaaatagacaaagtttcccacgggtatagtaagctgctagatagaaatgagcatgtaatacaattggttgttcaagaggagttaattagcacatctactaaagcagcaacagttggcgactggagcaaaataggcttctaaagttgatctaaagccacttcttgtcattgttaatgcttatttaaacaacgcagagcttactttattgctaagcaagctctcttgatgatattacaggtatctctcccgacttgtgtatgcatagaatccacctcaaggatgagtctaagcccttagtagagcatcagaggagactaaacctgaatctgaaggatgttgttaaaaaggagatcatgaaattgttggaagctgggatcatctatcctatttcacatagtgattgggttagtctagtgcatgtggttcctaagaaaggagttgttacaatggttaagaatgacatgaacgagttgattcctacaaggaccgttaccggccacaggatatgtattgactacaggaagctgaacgctgcaacaaggaaggataattttcctctaccatgcattgatcaaatgatggaaaggttagctagtcacaagtactgttgctttcttgatggatactcaggattctttcggatactgattcttccagatgacaagtacttttgctttcagacactttcacgtgtccgtatggcacttttgcctatcgcagaatgcaatttggtctttgcaatgctcctgcgacatttcagagatgtatgatattgttgaataatacatattttgctttcaaaccatactgaagaagtcaaagagagaacaagtagttacatgtgaaagaagttggtttgaatgtagttgcttttggaaaactaagctataatctagagtaagcatgcttgtagtgggagcagcctggaatagtgtattcgtgtaggtgttagaagctagtgttttgtgttttactttatgttttgctataagaatgtatgtgtgtgtaagaaagaattatggaaaaattttaagaaaaaacagagtttatgcatttctctctcaacttctaattcgttttaattcacaaaacatgagtgagaatcacaacaggtgttgatcttcacaaacatgattgaggatttcatggaagtctttatggatgacttttctgcttattggtcttcaatagaagcatgcttggagaacctgtgcaaggttctagctagatgtgaagagaagaatttggttcttgattgggagaagggtcatttcatggtttaggaaggtattgttcttggtcacaaaattacaggtgctggtattaaggttgataaagccaagatagaggttatgacaagtttacatgcactagttagcgtgaaatcagtaaggagttttcttggacatgctggatttgatagaagattcgttaaggattttggtaagattgtcaggccactaacaactttgctttgtaaggatgtgaagtttgacttcaattctaactaccatgctgcttttaatcaaattaagaaagctttagtgagtgctccaatagttcaaactccggactaaaatttaccttttaatttaagaaagctttagtggagctgttttgggacaaagcaagaacaatagacttcatgttatccagtacgcaagtagaacacttgatgatgcacatcgaaattatgcaacaacagataaagaattgttagctatagtttttgcttttgagaagtttcgctcttatctggttgggtcaaaggtgattgtgcatacagatcattcagcactcaagtaccttatccataacaaggatgctaagccaagattactacaatggattcttcttcttcaacagtttgacatcgaagtacaaataagaaagggattgagaatggagtttctgatcatttttcaaggatcacagatgaagataacgtttctatcaatgattttctgcctgaagaaagtatctacttggttgagacaagtttgtaggaaaatcttggcagctgcgattcatgcgccgatgtggcagtgttgatcaacactactttggtgtcgaacaacaccttatatgaagcgaatgataatcgaccaactaatgttgtcctcaatactacctctcgacacaatactttagtgtcgatcaacacccctactactattgatttacactcgcctcatctgtattagtgaacagagccagaattatcctcaacagttagttgtcgggttagtcaaactccaacaagtacaagagctattgacaagctaaatagttgcaccattcatacttcattcgcatcctattaagctaaggtattcaccctcccctcttaaacctcctgatttcatcaataagactttaaaattttgcaagactgtttcacggttaagcaagcaacgagtttcttgtcaagcatttgtttattcttttgatgattgtttacgaaaaggagtattcaaccatgcatgagtcccaccctgctgatgttcctcacatccttcatcgttctctcgcgccaacagcttatacaccaccatggatgataagaaacatatccaagaagaatgtattgccaccttctaatccacctgatatatgaactccagcaaagtcaagctaatgactaaaaataagcgattagtgggaggcaacccactggtatgattctttgtttttttttgttccatttaaggttttcttttattttatttatgctaacttcggatttgaatgtcactgggaacagtgtcgtttaagtctgggggaggtcgttgctgactacgtttttctttttgagtcttatttttacttttatatttggttttctgtcaatttattgggtcaaacttttgtagggaattatgatatttctctcgagtatattgcctagttgattaatgtttcagattcgactcaatccgactaatggaaaatccaaagggcaaactgacagactaaaggatatccacatttccaacataatccactaagccttgagctaatctcactgctcttccttttacgtcgtcaaaacggttagtgttcatagaacttgactcctttctcatacctgataaatgagaccaatgtgaagagaatagtattcctctcccttatatactaaaaaaaatatgaaaagagagaaattgagatgatgtcctatagtgtaaagggctagatatatttcctttgatcccatttattttacattctaaggaatcataaattgcaaaggttggaaatatgcggaggatacctataacaccccccggaagcatcacgatcgttggcgaccgcctggagacgaatctgacctaagattacccaaggctaagcccgaccacaaaagaccgctcttcgcgaccacgagacttagaggctttgcaacctgtactgcgaccgcaagttgggattagtccagactagactaatgagaggatacacgatttcttattcatagataatgtattgaaatacattaccaaatacatgtataggttttgggtacaaaaggcgaagcttaatcgagtcgtacatactagtttacaaaaataccattttacaaaggcaacgcaaaactaaatcggcttccctaacatccatacttaaaataaagtttacgtctaaggttatctgcgaaagagagtggggggatgagctctactcgccctatgagtcctagctccctctaacaaaaaataaatccccaactcaaaacccaatataacaagtagcatgcagaagtataacaatattgaaagcataacatcaagcaatcaataaaataaacaatcaagctggttaccatgagtacgtcgagtacatggaaccacatgcaacacgcaatcaaacataactagaaacttaccttgctgaacggtttagactcgatctaatcctaatcctaatcagcctctaatcgcctaactaatatactcggcagaacttcggcagtacccgaaagctcctcgggacgaaccagtcgtaccggactctcaactctcactcacggacttttcagagagattttagttcgtttggtgtgaatgaggaagaatga

SEQ ID NO: 164519 - DNA, 1289 bp, Arabidopsis thaliana landsberg
gcggacaatcgaagaagaagaagcctattcgacttcctacttttctccgtgtttctaggactggcatgtctctgtttatctccgattccggcaacagctcaacgtcggaaactcaggttcagtgttaacggcgagttcaagatactacaagtggcggatatgcattttgctaacggcgctaagacgcagtgtcaaaatgttcttcctagccagagagctcattgctcagacctcaacaccaccatcttcatgtcgcgagtcatcgccgccgagaagcctgatcttatcgtcttcaccggtaagacccccaaattgaacaaaaccctaacttttcttctcgtgatttgaaaaatcttaactttcaggatgtttacataaaccctaattgtgaaatttcgaatctttttggggttttgtttcgtttcaggtgataacatatttgggtttgatgtaaaagacgctttgaaatccataaacgctgcgtttgctccagcgattgcgtctaaaatcccatgggttgcaattttgggaaaccatgaccaagaatctacatttacaagacaacaagttatgaatcacattgtgaagcttcccaacactttgtctcaagtgaatcctcctgaagctgctcattacattgatggttttggtaattacaatctccaaatccatggagctgctgattcgaaactacagaacaaatctgttcttaatctttattttctcgatagtggagattattctagtgttccttacatggaaggttatgattggatcaaaacttctcagcagttttggttcgaccgcacttcaaaacgtctcaaggtacatcaatgatgaacatgatcaatcttgttttttgatcatgacattgttgttttaaccctggttttgatgatattgcagagggagtacaacgcaaagcctaatcctcaagaaggtatagctccaggactagcttacttccacattccattaccggagtttttgagttttgactcaaagaacgctacaaaaggagtgagacaagaaggtacatccgcggcttctacaaactcgggtttcttcacaacattgatagctagaggagatgtgaaatctgtgtttgtgggtcacgaccatgtcaacgacttctgcggtgaacttaaaggtttgaatctatgttatggtggtggatttgggtatcatgcttatggtaaagctggatgggaaagaagagcgagagttgtggttgttgatttgaataagaagagaaaaggaaagtggggagctgtaaatcgattaagaca

SEQ ID NO: 164520 - DNA, 2382 bp, Arabidopsis thaliana landsberg
acaagaagagagaacacatgcttataacaacaatatcttggactttttggatgacgaatgaagtggattgtaatgtgggtgatatcaaagatcaagatcacgtttttcatgaacagaataaaagtgagcagaatgaagaactttcttccaatatttccgatccagttaattgggatgacatgaatatgagattcacagatttattagttgaaaagggaccagcgacaaggttatcaactaattaccggtttcgtaaagatagtattggatggcatttttctcaaacattctacattagagaaatgaggaatggggagaaacatcatagaacatggttgctttactcaaaagcattaaataaagtcttttgtttttgttgtaagttgttgagacatgccaaaaaaggtggttactgggcaactagcggggacaatgattggagaattctttcaaagggactcaaagaacacaaaggcagccatgatcacattacttgtataactcgtcgagctgagttagagtctagactacagaaaaatagaacgattgataagcatgcccaagaagcaataagcaaagataatattcattggagggaagtacccctaaggatcattgcattggtgaaaactctcgctaaaaataatttagcatttcgtggaaaaaatgaaaaggttggccaaaacagaaatgggaattttttgagttttattgagatgattgcagaatttgatgcagtgatgagagagcatatcagaagaattggtgcaggtgagatatattctcattatctaagtcccaagattcaaaatgagttgataagtatgctggcccaagatattagacttatgatcatgaagacgattcgtgcttcaaagtacttctccataattcttgattgtactccagatattagtcataaagaacagatgactattctcattcgatgtgtggatatttcttcaacaccaattaaggttgaaagaattctttttgaaatttttggaagtcaatgataaaacaggtgaagggttgttctctacgattcaagaagtactaattgatatggagttagagattgatgatgtgagaggacatgggtatgacaacgggtctaatatgaaaggaaaaaacaaaggagtgcaaagaagattgctggaaattaatccaagagcattttacacaccatgtggttgtcatagccccaaccttgtgctttgtgatatatcatcttcttctacaaaggcagtgtctttttttgggattatacagcggttatactgtttgttttcatcttcaacaaacaggtgggatatatttaaagagatggtaaaaggtttaacacttaaatccttatctcaaactcgttgggagagtcatctcgaaagtgtcaaagcaatacggtttcagactcctgaaatcagagatgctttactttacttggcagaaaagaccgacgatccaaaaacacgaagtgatgctgaatagaaacacatggtattggagggtttgagtttctttttggtatgattatttagtatgaacttctagctgttgtcaacagagtgagcaagactttacaagctgatgacattgatattgatgttgctattcttgagctgaaaggattagtttcatacttacaaaaatatagagagacatgatttgagaaagcaaagtctgaggctgtacgaattgcagaggctatggatatagaagctgaatttcctgtgaaaaagaagaagatcattagaagaaagaagcattttgatgaagtttcagaaaaaggggatgatcatgggaatatggaattgtcaacagaggaggatttcagaattaattacttccttacactcatagatcaagctataatttctcttgagtcaaggtttgagcaattccaaaggtatgaacaaacttttggatttttgtttgatttacaaaaattgacatctgcaaatgatgaaaacttgatggcatcatgtgtgaatcttgaatcatcccttaagcatggtgagcattctgatatagatggggctgacttgtttatggaactaaaagttctacgagaagtgctaccaaatgaagttacgaaacctattgaagtgttggattttttgaaaagagtggagggttgttatccaaacacatggatttcttatgggatattattgaccattccagtgtcagttgcttcagccgcaagaagtttttctaagctgaagttgatcaagaattatttgcggtccaccatgtcgcaagatagattgaatgggttagccatattatcaattgagagagcaatgcttgaaagtatcaattgtgagtatgttctgcatgctcttgcaggacaaaaattcaagaaggaaagtatatactaag

SEQ ID NO: 164521 - DNA, 1706 bp, Arabidopsis thaliana landsberg
atggatcctaaggggaagggaatcgtgatcaacgataaggagaaggagtccttcgtcaatgagctcaaagatgacaagcctatcgactccggctcgggtcatagacgaaaggaagggaagaagaagaagacaaggcgcatcaaggagatcgtctactacgacgacagtgatgagtctacttcttcccaaaaggacgacgaccacaacgactacgagcaaaggaaaccggttaattctaacttttcctttgactactctcgtattccgcaaagctcaaattcacatttgctttccattccactcgcaagcccccacactttgatggggaggactacggattttggagccacaaaatgcgtagtcacctattttctctccatcctagtatatgggagattgtagatagtggaatgcactttaatagttcagatagtcctatattcattaatgagcaaatccataagaatgcacaagctactactgttcttctagcctcattgtgcagggatgaatataataaagtgagtggcttggataacgccaagcaaatctgggataccctcaagatctctcatgagggaaatgacgctaccttgctcaccaaaatggagttggtggagggcgagcttggacggttcgcgatgataaggggcgaggagccaactcaaacatacaaccggctcaagacccttgtcaacaaaataaggagctacggaagcacgcgatggacggaccacgacgtcgtccgactaatgctaaggtcctttaccgttcttgatcctcatctcgtaaacaatattcgtgagaatcccaggtacacgacgatgaagcctgaggaggtactcggaaaattcgtaagcgggcggatgatgatcaaggaggcgagatacgtcgacgacgctctaaacggtccaatcaatgagcctcaacctcttgctctcaaggcaacaagaagcaaggagatgctacctagcaaggtggcacaaattgaggcggccggacttaatgatgaagagatggctctcatcatcaagagatttaagacggcgctaaaaggccgcaaggggcagctaagcaagaccaagacaaaggggaagcgctcatgcttcaaatgtggtaagcttggtcattttattgctaactgtcccgacaatgatagtgatcaggatcaagggaacaagagggagaagaagaagaactataagaaggcaaagggcgaggctcatcttggcaaggagtgggattcggactgctcttcgtctgactccgacaatgagggactcgccgccactgcattcaacaagtcatccctcttccccaacgagcatcacacttgcctcatggcaagagagaagaaggtaatcactcgtaatgatgtcacttatgattcttctagtgacgatgagtctagtgacgatgaaatagattactctagtttgttcaagggattggatagaaataaaattgataaaatcaatgaattgattgatgccttgaatgaaaaggataaacttttagaaaagcaagaggatttgttatatgatgaacatgataagtttgtagaggcacaaaaatcctatgcgttagaagttaaaagaaatgaagtgctttctagtgaattatcttcttgtcatgaaaacattgctactttaaagagtgttaatgatgacttaaatgctaaactagaagtagctagtaaaacaaca

SEQ ID NO: 164522 - DNA, 504 bp, Arabidopsis thaliana landsberg
  unsure (1)..(504): unsure at all n locations
gctcttttctttgccctcaacatcctttcttgcaccttatttacttctactggatgccgatgcaacctaagtcctgagcctaggacggtcccaagtccaaaggtcccgagtcctaagtacccaagtccttcgattccaagtccttcggtcccaactccttcagtcccaagtccttcagttccaactccttcggtaccaagtcctaaccctacgcctgtcactcctccgagaacccctggttcatccggaaactgtcctatcgatgctctcagactcggtgtgtgtgcgaatgtcctaagtggtctacttaacgtgcagttgggacagccatcagctcaaccatgctgctcgctcatccaaggtttggttgaccttgacgctgcgatttgtctctgcactgcccttagggctaacgttcttggcatcaaccttaacgttcctatatctctcagtgttcttctnnnnnnnnnnnnnnnnnnnnnnnnntctgatttccaatgtgct

SEQ ID NO: 164523 - DNA, 1156 bp, Arabidopsis thaliana landsberg
  unsure (1)..(1156): unsure at all n locations
agcacggatttgaggaaagtggcggatattgtggtggcgaaggatggttcagggaagtatagaacgataaagagggctttacaagatgtgccagagaagagtgagaagaggacgattatatatgtgaagaaaggagtttattttgagaatgtgaaggtggagaagaagatgtggaatgttattgtggttggagatggcgagagcaagagtattgtctctggtagacttaatgtcatcgatggaactcccacttttaagaccgccacattcggtaaacctctctctgtttttgtttttcttcttgtttacttttggaaacagaggatttcgaaatagcacgacttggttgtttcattaatttaattatggcctaataatatcaaagtagactaaataatctcataaatcaaagatataatgtttagaattatgattggtaacgttattctgaaataatatcaactagaaaaccgaacataatatcattacttataacccaagaaatcggtttttgacatgctctgttttctgcagctgtgtttggaaaagggtttatggcaagagacatgggcttcatcaacacagctggtccatccaaacatcaagctgttgctctaatggtaagcgcagatctcacagcattttaccgttgcacgatgaacgcataccaagacacgctttacgttcatgcacaacgccaattctaccgtgaatgcaccattatcggaacagtagatttcatctttggtaactcagcttcagttctccaaagctgccggattctccctcgccgaccaatgaaaggacaacaaaacacaatcacggctcaaggacgtactgatccgaacatgaacacaggaatctcgattcaccgttgtaacatctctccactcggtgacctaaccgatgttatgacgtttctaggtcgaccatggaagaatttctcgacgacggttataatggactcgtatttgcatggttttattgaccggaaaggctnnnnnnnnnnnnnnnnnnnnnnnncgccggatactatattttacggtgagtataagaataccggtcctggtgcatcgacgaagatagggttaagtggaagggtttgaggtttcttagtacgaaggaagcgaataggtttacggggaaacctttcatc

SEQ ID NO: 164524 - DNA, 3983 bp, Arabidopsis thaliana landsberg
  unsure (1)..(3983): unsure at all n locations
cgactcaatcaattcgatcaaaactcataagaggaagacagattcctacacaaaaggctaaagcccgatgatgggacctgatcactagatcacattctgggaaagtgagaccaccgacctcgataaacctcacgatgacgctctcgttatccgaatcgacataggcaactagaaactctcctgtataatgattgacaagggaagctcagttgacgtactcttctacgacgccttcaaaaaaatggggcacctcaattccaagttgcaaggcagaaaaacgccacttaccgggtttgctggagatatgaccttttccctaggaaccatccagcttccaaccgtcgcacgaggagtaagacaactcacgaactttctcgaggtcaataagaaagcttctttcaacgcaatattgcgaagaccatggctacacgccatgaaagccgtcccttcaacctaccaccaatgcattaaattcccttccgacaagaggatagcagtcgtatacgacagccaacacagctcccgaaaatgctatatgggtggctacgagcatatcaaaaaagccaacccagtagtactaatgataaaggacaaactcgcagaaatgaaaacagtcagatccttagacccttctcaacgtggacctcgaaaatcaatgataacgcaggtctccatagatgaatcagatcttaagcgatgcgttgggatacgtcacgacctcgacccagcaatacgagaggatctcataacctttctcaaggaaaacaaannnnnnnnnnnnnnnnnaagtgcgaacctccgaggaataagcctcgaggtaacctcacacgaactcaacgtcgatccgacctaccgatctataaagcagaaacgtcgcaagctaggtcccgagagggctaaagctgtgcacgatgaggtcgatcaataaaacaagctcggatccataagagaagtaaaataccctaattagctcgctaacccggtcgtcgttaaaaagaaaaacgggaagtagagagtatgcatcgactttacggacctgaataaggcatgtcctaaagacagtctcctactgccacatattgagcgactggttgaggtcactgtatgacacgaaaaattgtccttcatggatgcattctccgggtacaaccaaatacttatgcgtcgagacggctaagaaaaaccagcttttattactgaccgaggcaccaactgctataaagtaatgccctttggtttgaaaaatgccggaactacctaccaacgattggtgaacagaatgttcgtcgaccagctcggtaaaacaatggaagtctacattgacgacatgctggtcaaatcagctcacgaaaaggaccacgtcccacaattaagagaatgcttcaaaattctaatcaaattcgaaatgaagctaaatcccgagaaatgttctttcgaagtccaatcaagagaattcctcggatacctggtaaccgaaaggggcatcgaggctaatcctaagcagattgcagccttcatcgaaatgccgtcaccaaaaatggcacgggaggtccaacgactaaccggccgtatcgccgccctcaacaggttcatatccaggtccaccgataaatgcgtccctttctatcaactcctccgaaaggataaaaagttcgattggaacgaggactgcaagcaagccttcaaacatttgaaagcgtacctgtccgaaccacccatacttgcataacccgaagaaggagaaccgttgtacctgtacacggcagtctcccgaaccgcgataagcggcgtcctggtgagagaagatcacgaaggacagaaaccgatctattacgttagtaaaacgttgatagacgctgaaactcgttatccagcaatggaaaaactagcactggccgtagccatgtcagctcgaaaactgagaccatattttcaatcacatcccatcgtagtgatgacgtctcaaccaatcagaaccattctgcacagtccaactcaatcaggttgacttgcaaaattggctatataactaagtgagtacgatatagaatatcgcaccagaaccagcctgaaagcacaggtcctagccgactttgtaatcgagctcccgttagcggacctggatggaaccaactccaataagaaatggctcctccacgtcgatggctcctccaaccgacaagaatccggagtaggaatacaactcacctcccccaccggggaagtcatcgaacaatcgttccgactcggattcaacgcatcaaacaacgagtctgagtacgaagccctcattgctggcattaagctagctcaaggaatggggatccgcgatatacacgcccatagcgactcccaacttgtcaccagccagttccacggggaatatgaagctaaagacgagcgcatggaagcgtacctcgaatcgttcgaactgaccaggatccccagaggagaaaacacctctgcagacgccatggcagctctcgcctccacgtcagatcctttcgtcaaaagaattatcccgttcgaaggaatagaacacccgagcattgacctaacggtcaaacacgctgggatagaaacctcggcaacttgcaactttacgccagtaacccgaagcaccaccgctgcggctagagccctcgcagcagccgtggaggcaggtgcagcggaggaagagctggagctcggaacccccgaacaacctgcctcgtacgaacctgaaccgtacaatgactggagaattccaatcattgattacatcgaacaagggatcacacctcccgacaagtgggaggccagaaaactcaaagcccagagtgcaaggtaccgcatcacggaaaggagacttatgaaacgcaggatcgcaggtccctatatggtgtgtacctacgggcaacaaacaaaagacctcatgaaaagcatgcacgaaggacaatgtggtagccactgtagtggacgtaccctcgccctcagaatcaaaaagcaaggctacttctggccaacaatgctagccgattgcatagctcattcactcaggtgcgataaatgccaacgacacgcacctactctgcatcaacctcccgaggaaatgtcctcgatatcttcaccttacccgttcatgaaggggtccatggatgtcgtaggtcccatggaagcctccggtgggaagaagagactaaaaacctaccggtcctcaccgactactctaccaaattgattgaggctaaagccttccaacaggtaaccgagaaacaagtcgaggacttcctatgggaaaatatcgtatgccgacatggcataccatatgagatcgtcaccgataacgggactaacttcacctcgggaaaaatcaaagcattctgcgacaagtggaagatccgtcttaccacatccaccccccgttacccacaaggtaacagacaggtagaagcccccaacaaagctatacttagcaacatcaagaaaagacatgattctaaaaaatcaatgtagtccgacatgctccacggagttctctgggcctaccaaactacacctcgcaaatcaacgcaagaaacaccgttctctcttgcctatggtttagaagcagtaatccttgtcgaaaccatagtaccaagcgtgagaaggaccgccagtcctgctaacaccggaacacgcaaatgttacaggacaacagggacttcatcgatgaacgcagatatcaggcaatgatccgagttcaaaactatcaacaacctgccgcccgctactataactccaatatcaaaattcggagattcgaagtaggagagctcgttttacgaaaagtgttcagcaacacgagagagctaaacgctcgaaaactgggaactaactgggaaggtccctatcgaatcaccgaggtggtacgtgacggcgtctataagctcgtaaaagttttcaacggagtacctgagttacggccttggaatgccatgcatcttaagaaataccacgaatag

SEQ ID NO: 164525 - DNA, 1384 bp, Arabidopsis thaliana landsberg
gatgttggtaatgcacaacaatcatatggcaattcaacggtttcggcacttttcgcttttggagactcaatacttgacacaggcaacaataatcttcttttaagtgtttctaaagtcaatttttatccatacggtagagactttataggtggaagagctactgggagatttggaaatgggagagttttttctgatataattggtatgtatatatatattgatctctacttgttgatatacttgtaacggatgaattcaatgtttgtaatactatgacacaaatattatctaatagcaagtctttgttttcagctgagggtttgggattgaagaatctcttaccagcatatcgtgatccatacctctcgaacaatgatctaacgactggtgtttgtttcgcatctggtggatctggacttgatccaatcactgcaagaacaacagtaaatttttcttagtttgtccaatagattataacaacttttattttatctatagcaaattttaatagattatattttggtgtgattagggaagtatatgggtgtcagaccaggtcacagacttccaaaactacatcaccagactaaatggtgtagtaggaaatcaagaacaagcaaatgcagttatatcaaatgctgtttacctaatctccgcaggaaataatgatattgctatcacttattttactacgggggctagaagattacaatacactcttccagcctacaatgatcaattggtctcttggactcgtgatctcataaaggtacaaagttagattgttttacatatatatagaacatagtaagagattaaaattttggtcaaattgtatgtgacatattctattgttcccccttctttttttgttatttgaagagtttatatgatatgggagcaagaaaattcgcgattatgggaacattaccattgggttgcttgccgggagcaagcaatgctcttggaggtttatgtctagaacccgcaaacgcagtggctagactctttaataggaagttagcggatgaagtcaacaacctcaactcgatgctcccaggttctcgttcgatatacgtcgacatgtataatcctctcctcgaacttgtcaaaaaccctctaagatcaggtaaagtctaaatcaccaaaatctttattgctataaaattttcaattcttgtgaatcaatttttcatgatcatatttttggtttttttaaggatttatctcgccaactagaccttgttgttgtgctccggcggctcccataccgtgcttggatgcgtctcgttatgtgttttgggacattgcacatccatcggagaaagcttatcagacaattattcctccgattatccaacaaattcaacaaagcttcgcttga

SEQ ID NO: 164526 - DNA, 1437 bp, Arabidopsis thaliana landsberg
atggagatgttacttggtggacaagcaaccaatggagctcttcgttcaaagacgaagataatttgtactcttggaccggtttcaagatcggtggagatgattgagaagcttctcaaggctggtatgaatgtagcccggttcaatttctctcatggttctcactcttaccatcaagaaactctcgataatctccgaaccgccatggacaacactggtattctctccgccgtcatgctcgacacaaagggtcctgagatacgaaccgggtttctcaaagaaggcaaaccgatacagctaaaccaaggtcaagagatcaccatctcaattgattacatgatagaaggagattcaaacgttatctccatgagctacaagaaacttgcagaagacgtcaaacctggtgatgtgattctctgttcagacggcacaatctctttaactgtcttgtcctgtgacaagtctttcggtcttgttcgttgccgttgcgagaactctgcaattctaggagaaagaaaaaacgttaatcttcctggaattgtagttgatctcccaacacttactgagaaagataaagaagatatcatccaatggggagttcaaaacaaaatcgacatcatcgctctttcttttgttcgtaaaggatctgacctaactgaagttaggaagttacttggagaacactcaaagaacatcatgctcatgtcaaaggtggagaatcaagaaggggtcatgaattgtgaaaagattctggagaattctgatgctttcatggtggctagaggagatcttggaatggagattccgatcgaaaagatgttccttgctcagaaaacaatgatcaagatggctaatgctcttgggaaaccagttgtcacagccacacagatgcttgaatccatgacagtatctcctcgtccgactagagctgaagccactgacgttgcaaacgctgttcttgacgggacagactgcgttatgcttagtggagaaaccgctgctggagctcaccctgaggctgccgtgctaacaatgtcaaggatctgtaaagaagcagaggatttcatcgattacgacattctccacaagaaaaccctaggaatggtttcgttaccgttatctccgatcgagagcttagctgcttcagttgtttcgacggcacagagtgtttttgcgtcggcgatcgtcgttctcaccaaaggcggttacacggcggagcttgtggctaaatacaggccgagcgttccgattttgtcagtgattgtgccagagattgctcaagggaatgatatggagatgtcgtgctcagactcggtggctcatgcggcgagacgtggtttgatttaccgtgggattattccggtggtggcgacgggatcttcggctagggattcaaacaaagatgcaacggaggagatgattaatttggctatcggattc

SEQ ID NO: 164527 - DNA, 1090 bp, Arabidopsis thaliana landsberg
tatattcacatcaaaagcggtgttcatcgggtactctcggttcttcctgtctgtgttctgtttcttgttcttcctttgttcttcgtctttacgattttctcttccaccactgcgttttgcctctctatacttgctaattttaagctcatcttatttgccttcgacaaaggtcctcttttaccacttcccgctaatctcttccgattcatatgctttacttgcttgcccatcaagattcaaaaaaactctaactctcaaaatcatctacctaaatgggttttcttttgtaaagctgcaatttttggggtgttgttaaacgtccataactataaaagttcgttgcctccaattcttctaatatgtctctatccattgcatctataccttgtgcttgacgttcttttaaccatcgtcaacgctttgcttacaatcattctttggtgcgacctcgagccgcatttcaatgaaccatacttatccacctctcttcaagacttttggggtcgccggtggaacctcatggtcccggcgattctccggccgaccatctacctcccggtgagacgaatggccggtcggaaaatgaactctgatcaggctttgttcttgggagtttttgcctcgttccttgtctccggtgtggttcacgagctgattttcttctattttacacgtgaatcgctgacaggtgaagtcactttgttctttgtattacatggagtttgcactgccgctgaaggtgctgcgaagaggacgaggttggtgcggcggtggaaggtgagtcagatggtttcacaactgctcacggtgggatttgtggttctgaccggtggttggttgtttttccctcagcttaccaggagtggcatgatcgagagactagctgacgaagcctttttgtttattgatttcgtcaagcacaagtttttctacctttgtagaaaccaatcgctaaaatcgtagatttatgtttatagctaattttatcaatcatattacttttgatgatttgggaagagaactaaagagatattctgtgattaaaacggctttggtaaatgtcaaatcgttgaaacaacgtcattgtttc

SEQ ID NO: 164528 - DNA, 528 bp, Arabidopsis thaliana landsberg
tgtgaacatgatccacatctcgttccgagggagtccgaagcgatggccgaactgcatgtgccggtaaacccggtccggttcgtgaccgcggcgagcctgttcgacggtcacgacgcagcgatcaacatcatgcggaggatcctgcagcggcagggtgccgaggtcatccatctcgggcacaaccgctcggtcgacgaggtggtgaacaccgcgatccaggaggacgtccagggcatcgcgatcagttcctaccagggcggacacgtcgagtacttcacctacctggtcgagctgctggccgagcggggcgcgggccacatcaaggtgtacgacggcggcggtggcgtcatcgttcccgaggagatcgagctgctgcactcccgtggcgtctcccgcatcttctccccggccgacggtcagcgcctgggcctgccgggaatgatcaacttgatgatccgcgagtgcgacaccgacctcacggagatacagaaagcctcctacgacgggctgttctccggcgaggagctg

SEQ ID NO: 164529 - DNA, 1070 bp, Arabidopsis thaliana landsberg
  unsure (1)..(1070): unsure at all n locations
tgagaaagatgtataacacttttatcaaaaaccaaaaaaaaagtactatagctttttcttaagttaattatgattcctgaagaccctttggtcgaaattctcctaagattgcctgtgaaatcactagcgagatgtctatgcgtatccaagcgttgctactcaatcatccgcagtcgacatttcatcaacttataccaatctcgagcctctactcgtgagtcacgtgtcatgtttgctttccgtgatacaaacacattttttcgctggaatttcttctcgttatctcaaccaccttcttcagttaccaatatcgatagtacttcttattgtatgcctgtttgcgtcaatggcttgatatgtgtcgaacacatgtttcgactgtggatatgcaatcctgtcacgaaaaagatcacactttttcccgattgcggtccccgtaaacaattcacgacatggtatatgggatatgatccaatcaattatcaatacaaggtcttgtatttgtcaagagaacatttaatagctccttatatagtggaagtgttcacatttggagatgaaggttcgtggagaatgatcgaggccgatgagaatttccactctccagaaaccagaggagtatgcacccacggggttctgtattatggtgcttatacgggggatggagcgaaaattgtgaggttcgatgtgaggacggaaaagtttggtaagttcattgaaatgccggccgaggcttgtagtattcatggtgtctatttgggtctctatacccttttggactaccaagggaagttaggtttacttgctacacaagctacaagcacatatgatttatgggttttggaagatgcggagaaacatgagtggtctaaggtttctatcttcataactcgagagatgtgtccgtatgatcttatttggccaggtgtggtgggttttgttgctggtagnnnnnnnnnnnnnnnnnntgctcgtgatgagcttggtcagtttcatattctctatgttgatctcaagaagaatcggtcgagggaagtttggttcgaagaaatcacaccctcgtttggatc

SEQ ID NO: 164530 - DNA, 302 bp, Arabidopsis thaliana landsberg
catgagcactgcgactaggccttcgtcttcatcgactaccatcttagaaaatcctgtttctcaatcacagcctacagaaagattagtgcttcggttgaacaggaagaagaagaaagtttcatggaaagacgggacggtggacaacgagtttatgcagaagaagagttcaaagaaatgttgtatatatctttcataaacaaaagccctttgatgaggatgacagtgaagaagaagataacaacaaccatcaccatcaccatgaacactccgaatcttgtgaggcatcttcttctaacgattct

SEQ ID NO: 164531 - DNA, 1965 bp, Arabidopsis thaliana landsberg
  unsure (1)..(1965): unsure at all n locations
tttttttcttacatagacgtaattttcaatgaagagttacctgtntgcgtttgtcaccttcaaatcccgaagaaatgccgcgttggcagctcaaacacagcagcactcaaatcctctagaactgataactgaaatggctcctgaaccaagagatgtatcctggagaaatcttgctattccacaaaagattttgcctctcaacaagatcggagtcatccttgcagcagcacttcttacaatcttctttgctattccggtcacagctgtccagggaattgcaaagtatgagaagcttaagaaatggtttcctccagccatggctattgaattcatgtaaggtttctcttctccttgactattacttttctcataacgtagcatattattgtttttctcttgattccaaaacaataagataagtttgttatttgcaacagaccagggcttagctcagttgtgacaggttacctcccaagtgctatactcaaaggtttcatgtacattattcctttcgctatgcttggactggcctatctcggcggctctatttccaacagtaaagaggagataaaagcttgcaacatggtcttctattttctaatgggaaatgttttcttcttgagtcttatctctggttccttgcttgatgaaataggagaatatctcactcatcctagagacattcctagtcaccttgctgctgctgtttcagcccaggttaaggcctattatacactcttcaaatctatctcaatccaaaaccaaatttattctcaaaatagtaacttatatttcactttcttttctatatataggcagagttttttatgacatacatcttgacagatgggctgtctggattttctttggagattcttcaattgggacttatactatttgatatcataagatcatacacttatggaagaggaaaagagagaactccttacctcttttcatttccatattttagagttatccccacagtttccttatcgataatgatcggtatgatttatgcggtggttgcgccattgatgctccctttcctagttggttatttctgccttggatacattgtctacttcaatcaggtccagattctcttataacctctttcacacatactacttttgcattatattaaccctggtttctgtcagatggaggatgtttacgagactacatatgatacttgcggtcgattctggccattcattcatcattatatatttgtctcaataatactaatgcaaatcacaatggtgggtctttttggacttaaatcaaagccatctgcagcaattgctacagtacctctcatattgatcactatagcttataacgaatactgcaagatccgcttcctcccatcatttaaacatttccctatacaggtacttatcaactttcctgaggaaatgatggatagattcaggggattctttgtttttttaaatctacataagtgtttttgtggtgtagacagcagttgaaatagacgaagaagatgaaaagaatggggagatggaaacacattatgttgatgctgcaacggcgtataaccggcatcaaccttgcttagagcgtgtaagctcagcggaatcaccaacaaacttaagccaaccattgcttgggacagactccatttgagtctaaaggtgaactggtttgaaaaccttgtcttcttagtcagggattttgaagctcctccacgcacgcacgtcctcatgtgttgtcactttagatcagtgaaggctatatatggccaaaatgcttatagagagaatgctgaatgcttctttttttaggttgtttactgttttttcattagtttgggttattacatggttttgtttttaaaaaacgtattgcctatgacccattagtcacaaaagtggaaaacagatcagaaagaatttatcagattatgttttatttctacttctcctcgcacttcgtcta

SEQ ID NO: 164532 - DNA, 2227 bp, Arabidopsis thaliana landsberg
gtgaagagagcttcagtttcaactaataaatcgagtgtgtttcctagtcctggtactccgacttatctacatagtatgcaaaagggttggagttcagagagagtacctttacgttcaaacggaggaagaagtccgccaaatgctgggtttttacctttgtatagtggtagaacggttccttctaagtgggaagatgcggagagatggatagttagtcctcttgctaaggaaggagctgcccgtacttcatttggagcatcgcatgaaaggcgacctaaagcaaagagtggtccattaggtcctccaggatttgcatattattcgttgtattcccctgcagttcctatggttcatggtggaaacatgggaggcttaacagcaagctctccgttttcagctggtgtgttgccagaaactgtttcttctaggggttccactacagctgcctttcctcagcgaatcgatccatgcatggcgagatcagttagcattcatggctgctctgaaacacttgcatcttcatcccaaggtatagacggatcaaccctcagtgacacctacttttaagttttgaatataatccaactctcggtaacttttatcggttttgtgctaaacttagagtggacaaaaggactcatgcatcaacacattattatcttactctagtgatcgtttcaatatcataatctgaacactttgacattctggtctggtaagtgcttacgtatttgttaacaatatgtacagatgacatccatgaaagtatgaaggatgctgctaccgatgctcaagctgtctcaagaagggatatggcaacccagatgagtcccgagggaagcatccggttttcccctgagagacagtgttcgttctctccctcctctccatcagcactacctatttcggaactactgaatgctcattccaaccgagcagaagtcaaggacttacaggttgatgagaaggtaaccgtaactcgctggtcaaagaagcacagaggtctataccatggaaatggctcaaaaatgcgagatcacgtacatggaaaagctactaaccatgaagatttgacatggtatgttctaatctgttttactcccacggcattattacaaactcatgaatctgaataggcatgacatatttgatatggctcaacgtcacagttaatccaattgcccaccatcacagattttcatatgaatggattagacttggaattctgattgaaagtttaatatttatgtagtgcgacagaggaagccagaattatatcttgggaaaatttgcagaaagctaaggccgaggcagcaataagaaagctagaggttctttcctcttatcctgtctttttcttctttctgaagcacaaaaaatgaggctttaagcatataaacaattgcaattggtaccaataatagcttaagtaatgatgtgtccataggtagcttgtgtgtatcactcctacggtaactaatgtcagaaatatttcccacagatgaagctgtaaaagaaaagatcatcgtcgatggaaaagattatgagaaaagtaaaatcagcagagaagagagcggaggagatgaggaggtcggtgttagacaatagagtctcatccgcatctcatggtaaggcttcatcattcaaaagaagtgggaagacgaagattccttcccttagtggttgcttcacctgccatgtattctagttgccctttttcgaagaaaatacggtaaatggagactcttcactgatgcgtacgcgtaatatttggctttctaattcctgcttgtaatactactttcgatagtcagtagctgttaattgatttcaatagatgcgcttagtacatttgtatgttagttcctagctgagtaaaatccgagggatgagtccacccatttccacctttgttggtctcttcgggtgtttagaggtgaattgatcccaagaggacaaactcttcttgataaaatgtatttgtaatttatgatgccttgatactaacattatgacataactttttttaacattatgacaaacattgttgttttacattcaaagctattttattttatttttgtcaactggaggattattattagtttattaccctcaaaaagccagtacagaggagactaaagtcaaacatcaattaaaggttacaacagcaaagcaaagatatacattcccagctatcagtgatgtgaaaaaatccagacttaga

SEQ ID NO: 164533 - DNA, 2730 bp, Arabidopsis thaliana landsberg
ttcaaaagatgtatttaaaattgaattgtatggcctcggattttttaaaataaaggttgttttcggatttcttttcttgttcattaccaatgtaaagcacaaatacaaaactagacgaaaattttcaactagtttatggatgtgtaacatattctcctctctttttttttctatctacttctatatgttcctcttattactattttaacaccattcaaacctttaatttacatggatcctattcctatgtatattgtacacacatataatctacttagatttaatttttgaaaaatgtattagttggatctatgtattgcagattctgtggactactctacggaaatatatacacaagtatatgataatacaaacacttttgctaattatgtctaaagattgtcattaatcttcttagagtatgatgaaagaaatctataaaaaatacaaatgagccttgtgtttttgtcaacatacacatgtgcattcattgatagacatttggtaaatccaaaagcaaagtgcattaatttaaacagaacttttaacaaaaacaaaaacaagtaacgctatctacgacgtggcaataaacaaatagtagaaaacatgagtcttttaagctttcgagagaagacttcgttttttctcgcataaacgttacgataatgtcaaattgtcaatcctacttttaagtagaatttgtaatcactcaatggtcgtcaatacattgtccacattcgacctattgaaggaagattaatttagctataagctttcaagggcaaatccgtcagtctagctttcttttatctacctctgttatcaaaagccctctcgtatttaagatgattgacttcacatgattttcaactctctatcatctttccagtttcccacctatctctctcacctttaaattcactgtgtattaaggaaaaaacagagacttcgtcttctcattgcttttccggagaatttgagaaccagaaaactactgcaatggcgattcatccttggtggaaacgtaacagaaaggtaaatacttcaacccataaatcaaagttttgctcttaggtttatcgaaatatatatcatcttcaatgtgtacaaaactgtatctgattcagaaagtggacaagtacatgaagaatgcgaaggatttgataaccagccaagatccaaacgacatcgtatcagctctcagtctcttgaattcaacgctttctatctctcctcaccacgaactcgctctggaactcaaagccagatcgcttctctaccttcgtcgtttcaaagacgtggccgttttgcttcacaattacattcccagtcttagaatcgataacgaagatgtcagcagtgtcttcgccgcttcatcggagctttcctctctcatgcttcttcttccgagtggctcaccgagtcatgactcgtcgttcaagtgtttctcttattcctacttgaagaacaaggtcatggcagggttaagtaataaatctgaagtacaagggcaatggaggtatttcatctttttagttatgacccgagtttttgttgacccgagcgtaactgattcggatcttctcttctctgtggcagatacttggttttgggccaagcttgttaccatctgggtttaatggatgacgcgatcatcctactccaaaccggtaaacgcctagccacggcggactccgccgcgaaagcatttgctggtccgaagatagcttcaacctttccacctccgaatctcagccacaaccaatcaccgaatccgaggtcgtatcgcaaatgctctcccaaatcaagctcttcctccgacgacggacggcggcgctctcagcacttaacgccggtctctactccgaatcaatccgccatttctctaagatcatagacagccgtcgtggtgcaccgcagagtttcctcgtcgattgcttaattcgtcgcgcctccgcctacaaatccgccggtcgaatcgcggattccatcgccgattgcaacttaaccctagccctagaaccgtcgtgcatagaagctttagaaaccagagctgaattgttccgatcgatacggtgtttccccgactcgcttcacgatctcgaacacttgaaactcctcttcaattcaattttacgtgaccggtcattaaccggcccggtttggaaacggcataatgtacggtacagagaaatcccgggaaaattatgtgtattgaccactaatatcaaacaaatgaaggagaaaattacaaacagagaaaacggcaatgaggattattactcattgatgggaattgaacgtgggtgctcgagatcggagctgaacagggcttacttgttactgaatctaagatataaatcggagagatcaatgacgtctatagaccggttcgatataatcgatgagcaagaattagtttcggttaagaaccgagcgagaatgtcaacattgttactctatagattgatccagaagggatattacgccgtattgagtgacattgaaaccgtagaagcggacaaagcggttgcaatcgataatcgacggattgaaacgccgatggatggtaataaagcggtggcaatgacggttgtgaggaagagtaacgacaagttagatgtggtggttaaaggagtgttttgtagagatatggcggcggttgggagtttgatttcccgtgccggtttaagacaaccaattacggtttagttgcatgcatgtcatagc

SEQ ID NO: 164534 - DNA, 317 bp, Arabidopsis thaliana landsberg
atgttttttctataactcctcacttcattcgaccctaagcaaccggcaaagccatgaaaaaaaccctaacgggctgctacagagaagcatcctaaagtttacagagtcgagcctgttaacttcaagaagttagttcaaaggctaattggtcaaaagacgttgagcaagaggtacatcaagttgaagctaaaccagtcaagatttctgatgatacaacaacagctaaggataatccgttcgcgtttgatctttcaccttcgtcatctcggttctgggaagctttccctctgcttagtcctgctaatctatcaagatgg

SEQ ID NO: 164535 - DNA, 294 bp, Arabidopsis thaliana landsberg
gagtcttgtgaaaaatatctcacgggatattacgtatgcaggacttcgttgttttgtaaacggatcttggaattagattgataagtttttaggattaagatggttttgtacatcatcaaatgaagaaacatgaagcatgggcgctgctaaccctgtaaaagtctctccccactccatacaaaagttgaagcccttctttgggcgatgaagtgtatgattggtccacaaaagcaagatgtaccattttttacagattgttccgacccggtgaagatgatgtctttcccaaccgaa

SEQ ID NO: 164536 - DNA, 1051 bp, Arabidopsis thaliana landsberg
tgaagctactgaggaggtgcatcatcttactcaagataatcatgaccgaagcctcaacacagggagcttcgtcaagaggactcattcaacgaagatgaatggtacgatgattttaatcatggtacctttacttttgatgatgcttctcccctggcagcataattgcaggccattccatggccacaatcctacaagccacctagctacctatgtacgatggccacttagacccgaagcaattcttgatgagctatgaggcgacaatatcctcatatggaggcaatgcagctgtcatggcaaagtccttcatcacagcagtccaaaatgtggcccagacatggtattcttctcttcggccagggataatcatgtcatggtaaaagctcaaggacatgttggttaccagtttttagggctttcagacgaagccagtcacagctcaagccttgttccagtgcacataagaccatgaggaatacctccaggcgtatgtccgaaggttcttgcgtctgaggcacaagcgccaacagtgcccaatgaaattgtcattgaggccatgatcaaggggttcggctaggactacggcccaatacttcgccaggaaaccccctcagaccgtggagaaattgcttcaaaagatggatgaatacatccgcgctgataatgactttcggcaaagaagggaggaagcttacagattatccgagatgaccaggggcttcggagggagagttcatccaaggcatgtcagatcaatccactccgcccagaatgacgacagaggaagtcaacaacaaaggccacaatattcctcgcaggcttcggggcagcaacaaagctatcctcggcccccagctccaaggggcagagtcgctaggggcttcggtggaaggtttggggatcaacccaggaaaatttattgcctattctgtggtgaggacaagggccatactacaaggatgtgccacgtcaccattcagaaatagaaggagataacagaagctgcagcacaacagaaccagcggaagcatgttatgcacactgcatcgta

SEQ ID NO: 164537 - DNA, 517 bp, Arabidopsis thaliana landsberg
atggcttctactggtgaaactatatgtaacaatggccaaagcgcagtttcagtaacaaggaggaggagttaccaagttgtaatagcggcgacaagagacatgggtcttggtatggacatgaaacttccttgggatctaccttcagagtatcagtttttccaagatgttacaactaggacatccgatcccacgaagaggaacgcaactataatgggaagaaaatcatgggaatctactcctctagagattcgtcctcttcctggtcggctcaatattgtcttgacaaagtctagctgccacaacattgccattgatgagaatgtactggtgtctagtagcatggaatcggctcttgaacttctagccactgagccctattccttgtccattgagaaggtctttgtcataggaggcggcgagttgttaaagtttgcatcttctttccacaagggttttgttctttttctaaaaacacatgtttatgtcttgatatagcgtgtcatgcgatgtttgagac

SEQ ID NO: 164538 - DNA, 424 bp, Arabidopsis thaliana landsberg
ttcatgaaattcttagaggagaagaacagagacttagaggctgtgtttgcttacatggatgcaaacagagacggtagaatctctgcagaggagcttaagaagagttttaagacgttgggagagcaaatgtctgatgaagaagccgaggctgcggttaaactctctgatatagacggtgatgggatgttggatattaatgagtttgctctgcttatcaaagggaatgatgaattcactgaggaagaaaagaagaggaagataatggaagcttttagaatgtacattgctgatggagaagattgcattactccggggagcttgaagatgatgctaatgaagcttggtgagtctagaaccactgatgattgcaaagttatgattcaagcttttgatctcaatgcttgaggagttctaagctttgatg

SEQ ID NO: 164539 - DNA, 678 bp, Arabidopsis thaliana landsberg
cacggccaaggaggatctgttgcgattccgacggatcaacaagagcagctttcttgtcctcgctgtgaatcaaccaacaccaagttctgttactacaacaactacaacgtaaaccaacctcgccatttttgtaaagcttgtcgtcgttactggactcatggaggtactctccgtgacattcccgtcggtggtgtttcccgtaaaagctcaaaacgttcccggacttattcctctgccgctaccacctccggttgtcggaagccggaactttcccttacaagctacgcctgttctcttccctcagtcgtcttccaacggcggtatcacgacggcgaagggaattgcttcgtcgttctatggcggtttcagctctttgatcaactacaacgccgccgtgagcagaaatgggcctggtggcgggtttaatgggccagatgcttttggtcttgggcttggtcacgggtcgtattatgaggacgtcagatatgggcaaggaataacggtctggccgttttcaagtggcgctactgatgctgcaactactacaagccacattgctcaaatacccgccacgtggcagtttgaaggtcaagagagcaaagtcgggttcgtgtctggagactacgtagcgtgatagagactatcggatcagcttctacttcatcggagggtttcaat

SEQ ID NO: 164540 - DNA, 930 bp, Arabidopsis thaliana landsberg
tgcgttgacccgccctctgacttcggccgcaagctatgattttaagttcatgtcgtatatggtcaataaggctaagtccgtcaataaagcactagaagaggctgttcctctccgcgagccagaactcaagatccgtgaggccatgaggtacacgcttctctccgatgggaagcgtgtaagaccaatgctttgcttagctgcatgcgagctcgtggggggacaagagtcaaccgcaatgtccgctgcatgtgcgattgagatgctccacgcgtcgtctctcatcctagacgacctcccttgtatggacaacgacagcctccgacgtggaaaacccactaaccatatagtctttggcgagagtatagccatattagcttctcaagcgctcatagctttggctgtccaaaagaccacgtcatccacctttgcggacgtcccccagagaggattctcaagaccgttcaggagatggttaaagcagtggaagggcttgttgcaggtcaacaggcggatttggctggagaaggtatgagatttgatagtgacactggattagagcatcttgagtttatacatattcataaacggcgggcgttgcttgaagccgcagctgttatgggagctataatgggaggtgggtctgatgaagagattgagaggcttcggagttacgcaagatgtattgggttaatgtttcaggttgtggacgatgtgcttgatgtgaccaaatcgtcggaagagctcgggaaaaccgccggtaaagatttgatcgccggaaaactgacgtatccgagactgatgggagtggagaaatcgaaagaatatgctgagagattgaacatagaagcgcgggaacatcttctagggtttgatatagacaaggtggctcctttggtgtctctcgctgattacattgtcaacagacaaaac

SEQ ID NO: 164541 - DNA, 371 bp, Arabidopsis thaliana landsberg
atgtgcccatcgtcatttcgcttgattttaagtgttatattaatcgcttttctctttgttggtctttgcgaggctcatcggcatataaatgtggatatcatcaatgatattggtccaaatgttcaattgggactacactgcaaatcgaagggtaaagatctcggacctcaatctttagcccctcatcaacactggggatttactgcatctcttaatgtttgggagacgactctgtttttttgtcactttgtttggaaaaatcagtctagatggttcgatattcttaaggaaaagagagatacaattgtatgtaaatatcatccctgtgtttggagtattagacctagtggtccatataggttaacggatca

SEQ ID NO: 164542 - DNA, 411 bp, Arabidopsis thaliana landsberg
aaaaattcaattcggacctttttatggtcaaaggtccaaatttgaataaattccaaaggttttccctaccttggccggggccaccaaccaattggaaaggcccggccctttttaaacaaggtccgggtccaataccaataatttgaaccccttttttttccccaatttgggaaacccaagactccaatggaatggaaaggtaaaaacagggatttccctccccagccggaaaagaagggaacgggaaccccaatttacaaattagggagcccgaatcccgaccccgatttcaaaatacaaaaaaaaatttgttggaaaccggaattcaattaaaatcgaaggtccggtttgaaggaaaatcttccaattcttttgggaccccccccccaaaaaaggggcggaaacccaaaa

SEQ ID NO: 164543 - DNA, 1461 bp, Arabidopsis thaliana landsberg
caacttggttttgagccgatctggtgtcatccgcccacgactctcagcgatgaccggctcagaaattaatgaccacgggtacgacgagtcccaattcgacccatccctcacgaatgacgacttgaaaccgacaactccaagccagagaacgttttcatggttggatatgtcaagtttatggatcggtctcgtagttggtgtgcctacttactacctcgccgggagcctagtggatcttggcatggcgtggtggcaagggatcgccacagttgttacagccaatctaatactacttgtgccgctggtcctcaccgctcagcctggcactctgtacggaatttccttccctgtccttgctagatcatcatttggtatccgtggagctcacatcccgactctacttagagcattagtcggttgcggatggtatggtatcgagacatggatcggaggtgaagctatcttcttgctcttaccgggtcatattaagaagtctgctttgtctcatacactaccttggctcggcacttctccccttgagttctcttgttttattgtcttctggttggctcagctttgtattgtctggagaggtatggatggaatcagaaagctggaaaagtactcagctccaattctgatcagtctcacgtcctgcctccttgcctggtcctatctcaaagccggtggatttggtcacatgctttccttatcatccaagctaacctctgctcagttctggactctcttcttcccgtccctaaccgcaaacataagcttctgggcaactctagctttaaacatccctgatttttcccggtttgcaaaatcacagacggatcaaatcatcggtcaagttggtcttcctgttttcatggggtagtttacgtttgttggcgtagctgttacgtcctccacaagtatcatctttggaagagtcatatccaatccgattgagcttctcggtcaaattggaggcctcgccacaactctactcgctatcgttttaatatccctagccacactcactacaaacataggtgcaaacgtggtcgccccagcaaatgcgcttgtgaatctaaaccctaagtttttcacattcggaagaggagccttcttgaccgcagttctcggaatcgtgtttcagccatggagattgcttaaatcgagcgagagctttgtgtacacatggctcatagggtactcagcgcttcttggtccaatcggaggcataattcttgtcgattattacctgatcaagaagatgaaactgaacattggagatttgtactctttgagtccctccggcgaatattatttctctaaggggtataatgtcgcagcggtcgtcgctttggtcgccggaataatcccagtcgtgcctggttttctacacaagatcagtgctttgtcgaagatctcaaatgggttcgtcgttgtttacgacaatgctttgttttt

SEQ ID NO: 164544 - DNA, 461 bp, Arabidopsis thaliana landsberg
gtagtagtaataggaagatccaagtgttcatcaatttccggggagaggagctacgctgcagctttgtgagccacctcgttgacgcatttaaaaggcatggaatcaacttcttcatagacaaagacgaacaaaaagggaaagacctcaaacatctctttgcaaggatcaagcaatcgaggatggctctcactatattttccaaaaggtacgcagagtcaagctggtgcctggacgagcttgcaaggatcaagaaaagagccgataaatgcaagctacgagtggttcccatcttctttaaagtgaaggcagagtctgtgagatatcaaaaggctgagtttggtcgcaacttctggaggttggctaagacttcgagtggagaacaaatcaagaaatggaaggaagctttagagtctgtttctgacaaggtgggcttaacgttaggagacaaaaggtaccttact

SEQ ID NO: 164545 - DNA, 857 bp, Arabidopsis thaliana landsberg
atcgagttcgtggatgttagacccgatcaccttacgaaaacttggctgtctcggccaaggcgagcatggctacatctctctcgttcaaaccaccgatggtttactcatggctaagaaaacatgtctccgcaaatactcagagaatctcgagaaagaacagaggatcttacatcacttcaactcgatcaataccaacatcgtaagacccacaagccctatcgtctattaccaaaccatgccgttcaatgtcaagatctgctcaatttacatggaaatcgcaccacatggttcactcggagacatgataatcaaagccggtgggagattaccggagaacgtggtcgggtactgcactctcttgattcttgaatgactcaaggatcttcacaaagatggttacgttcactgtgatctcgggccagagaacatgcttatcttcccgacctacactcatggagagctttgtgaactcaaactcgctgatttcggcttagcaaaagagcctaatggacctaatccattggatggatctctcttcgagggatgtcctgcatatttggctccagaggcggtcgggccatgtcgaattatttcgtctgcggatgatatttggtctttaggtgttatggaaatcgagatgttgggggttaatggaggaggaagaaatgattacttgtgacagacgctatcatcgatggcttgggactttgtgaggaaatgcaaagtgcatgactgggagagtagagccaccgcaaaggagctgctgagccatcctttcgttaaccaaagtattggggttccaccgatatgagatgccttctgttccttattgcttaactgatggagtggttcaagga

SEQ ID NO: 164546 - DNA, 367 bp, Arabidopsis thaliana landsberg
tgcgctactcatcgagccatcatcctcgtcactgatatagtagcagctcgtcattagtgcggaacgatctatagcatacgatgtatacccgaatccggttgatccccggtcaggacgcggctctccggcgacaggagatgatgctccatacgttggcgggtcacctggacctagcggaggctttgagaaacgagatttggtgcgaccaacgatgccgtgcaccgagtccggacgttgtaacggcaagaagcctgggcgtcctgctaagtgttacaaatctcgtagccgcgccgggaatggatacgacgctggaggtgacggtggaggatttacggtggatatgcaggcgaagtgtatcgcttactgt

SEQ ID NO: 164547 - DNA, 2260 bp, Arabidopsis thaliana landsberg
cgaaatttcattgtccttgtagtgtatgcaagaatgaaaaacacatcatctagaagagttaatagtcatttgtttagtcaaggatttatgcctgattattatgtttggtataagcatggagaagaagtgaatatggatataggaacgagtacttacacggatatgacgtattttagttcgaatcatgaagaagtgagtaatgttgtagaagatccatatgtggatatggtgaacgatgcatttaattttaacgtggggtatgatgataactatcatcatgatgatagttatcagaatgtggaagaaccggtccataaccattcaaataagttctacgacttgttagaaggtacaaataatccattgttcgatggttgtcgtgaagggcagtcgtagttatccttagcatctcgactcttgcaaatcaaggcggagtataatatgagtgaaaagttggtggactccgtttgcgaaatgtttacagattttttaccagaaggaaaccaggctacaacttcacattaccagaccgagaagttgatgcgtaatttaggacttccatatcatacgattgatgtttgtcagaacaattgtatgctattttggaaagaagacgaaaaagaagatcaatgtcgattttgtggcgcacaaagatggaagcctaaggacgaccgtcgaagaaccaaagtaccatatagtcgtatgtggtatctacctattggagaccggttgaagagaatgtatcagagccataagacagctgcggtaatgcgatggcatgttgagcaccaatcaaaggagggagaaatgaataatcctttagatgcagtggagtggagatatttccaagagttacatccctggtttgccgaagaaccccgtaacgtttatctcgggttgtgtactgatgggttcaatccatttggcatgtctcgtaatcattcgttgtggcctgtgatcctgaatccatataatttaccccctggtatgtgcatgaatacagagtacttatttcttaccattctgaattctggaccaaatcatcctcgagctagtcttgatgtgttcctccaacctcttattgaggagttaaaagagttgttgtctactggagttgatgcttacagtttttcattaagttagaattttaatctaaaagttgtactactgtggacgattagcgactttccggcgtatagcatgttatcaggatggactactcatgataaattgtcttgtccagtttgcatggaaagtacaaagtctttttatctacccaatggacggaagacatgctggtttgattgtcaccgtagattttttcttcatggtcatccatcccgtaggaacagaaaagactttttgaaaggaagagatgcgtctagcgagtatccacccgagtctttgacaagggagcaagtttattacgagcggttggctagtgtaaatccaccaaaacaaggatgttggtggaaacggtcatgaaaagaagatgcgtggctatgggaaggaacataattggcacaaggaaagcatcttgttatcatgtcaagattggatattgagaaattttgttctcggccaggcttacatattgatagtaaaggtaaagctccattttcagcgtattcattgatagatgaagtcaaacaaagtttatttcaatgtgtgaaacatgatgttagatttccatatggttattctagcgatttggctagttgtgtagatctggagaatggaaagttttcaggcatgaagagtcatgattgtcatgtttttatggagcgactactttcatttatctttgctgaactccttgaccggaatatccaccttgccttatcaggtacaatacttactattttatttgccatcatttttttatctaattatttaacttgcacatatatttcaggaattggagcatttttccgggacctatgttcgagaactttacagacaagtcgcattcaaattctcaaacagaacatagttttaatcatttgtaacttggaaaagatttttccaccatcattttttgatgttatggaacacttacctatctatctcccatacgaagctgaattgggtggccctatccaatataggtggatgtacccatttgagaggtttttcaaaaagttgaaaagcaaagaacaaaagatatactgtaggctcaatttttgagtcatatatcaatgacgagattgcttacttttcagagcactactttaccgatcatatacaaaccaaatcaagg

SEQ ID NO: 164548 - DNA, 4096 bp, Arabidopsis thaliana landsberg; identical to SEQ ID NO: 34562

SEQ ID NO: 164549 - DNA, 1207 bp, Arabidopsis thaliana landsberg
cctatccgatagatggcttcaccattgatctgatccaccgcgattctcccaaatcaccgttctacaatttcgccgaaacctcttcacaacgtatgagaaatgctatccgccgctccgctcgcagtacactccaattcagcaatgatgatgcttcaccaaactcaccacaatcttttatcacttccaaccgcggtgagtatctcatgaacatatccattgggactcccccggtcccgatactagcgattgcggatactggcagcgacttgatttggactcaatgcaatccttgcgaagattgttaccaacagacatctccactctttgatcctaaagaatcttccacatatagaaaggtttcttgctcctcaagccaatgtcgtgccctagaagatgcttcttgttccacagatgaaaacacttgttcttatacgattacatacggtgacaattcatacaccaaaggtgacgttgccgttgacaccgtgacgatgggatctagcggtcgccgccctgtgtcactcagaaacatgatcattggttgcggacacgaaaacactggaacctttgacccggccggctcagggatcatcggactcggaggaggatctacatcgttggtctcacaactcaggaaatccatcaacggtaaattctcctattgtttagtacctttcacctctgaaaccggcctaacgagcaagatcaactttggaacaaacggcattgtctcgggcgatggagttgtgtccacctccatggtcaagaaagatcccgccacatactatttcctaaacctagaagccattagcgtgggaagcaagaaaattcaattcacaggcacaatctttgggaccggagaaggaaacattgttatcgactccggtaccactctaactctattgccatccaatttttactatgagcttgaatctgtcgttgcttctacaatcaaagcagagcgagtgcaagatcccgatggtattctgagtctttgttatagagacagctctagttttaaagttccagacataactgttcatttacgtttgtggcagtgtctgaagatgtgtcttgctttgcatttgctgcaaatgaacaactaaccatttttggaaacttggcgcaaatgaacttccttgttggatacgacactgtttctggaactgtgtcgtttaagaaaacggattgctcccaaatgtagctc

SEQ ID NO: 164550 - DNA, 945 bp, Arabidopsis thaliana landsberg
tgttgcagaatcatttgaagagataaagaaagcgatgaagaaaagtgttcagcttaaagcggagctatcagcaaaggagagaaatcttgtatcagtggggtacaagaatgtgattagcgcaaggagagcttcattggaaatactatcatccattgtgcaaaaggaagagtcaaaaggaaatgaggaaaatgtcaagaagcttaagaattatcgaaacaaggttgaagatgagcttgccaaaattttgtaatgacatcctgtccgtcatcaataagcaactcattccatcgtctaccactgtggactcctctgttcttttctacaatatgtgagcgaaaatgtgttgttgtggtgcttgaggccgcaaaagtgttgcactgttttggctatactttatgttctttccaggctggcagacttcagttctaatgctgaacacaaggaagctactgatcagtctcttgatgcatataaggtccttggctcatgtttgtttttgtgccttgagctcggaacaaaataaactgaacaatatgttttgtgttttggtaatggcaatgttggttgttgttactgctgcagagactggtttggtaccaacagttccagctatacatgactttgaattggacttctgttttcttaaactctcctgaaaggttcctttgcttacatgcatacatatgattatttaatgaaatcggtgtggtgttacttactaacagtctgaatcagtgaaactgtgtgttgtacagtgcataccaattggcaaagcaagcgttcgatgatgcaattaatgaatttgacagtaagtgatgaatcaaacaaggacatgactcttattatacagctactcagagacaatctcaacatgtggactttagacctcacagaaagagaggaggtaatctttttatttccctatctgcctcctctgatgataga

SEQ ID NO: 164551 - DNA, 905 bp, Arabidopsis thaliana landsberg
tatggttggcaaattttttccttcaattccattcaatcatcaccgtttttgaaacaggggttgattcaagaaaacgatcaagagaagtttattcatcggctctgatgaaccctccacctccaaaaccgtcgcaagttattgatataaccgagttgttgcagaaaacgcctaacgtggtttccactggtcttcgattatttcatgatcagtcacagaatcaacaacagtttttttcttctcttcccggagatgttaccggaaagattaaacggcaaagagatgaactagacagattcattcagactcaggtgtcttattaaactcgacctaaaatgtggtttggtttgttttttctttgtgttgataatttgattttgcagggtgaagagttgcggcgtacgttagcggataacagagagagacgctacgtagagctattgtgcgctgcggaggagatagtcggacggaaattgagagaaaaagaagcggagttggagaaagccacgcgccgtcacgctgagctagaagcgcgtgtagctcacatcgtggaagaggcgcgaaactggcagttaagagcggcgacgcgggaagctgaggtgtcctcgttacatgctcatctccaacaagccatagctaaccgcctagatacggcggcgaaacagagtacgttcggagaagacggcggagacgcggaagaagcagaggacgctggatcggtttacgtggatccggagcggatcgaattgatcggaccaagttgtaggatttgccggcggaaatatgcgacggtgatggcattgccgtgtcaacatttgattctttgtaatggatgcgacgtcggagcagtgcgagtctgtccgatttgcctcgccgtgaagacttccggtgtcgaagttttattttga

SEQ ID NO: 164552 - DNA, 458 bp, Arabidopsis thaliana landsberg
  unsure (1)..(458): unsure at all n locations
nnnnnnnnnnnnnnnnnnnnnnnnncgaacaacgccgaatacgcgaagaccttcacgggtccgctgcccatgccgccgagcaagcatgtcgcgatcgtcgcctgcatggacgcccgcctcgacgtctatcgggtgcttggcctcaaggagggcgaggcgcatgccatccgcaacgccggcggtgtgatctccgacgacgcggtccgctccctggccatcagccaacggctgttgggcacccgcgagatcatcctgatccaccacaccgactgcgggatgctcaccttcaccgacgacgacttcaagcgctccatcctggaagagaccggcatccgcccgacctggtcgggcgaggcgttcccggacccggtcgaggacgttcgccagtcgctgcggcgggtcaaggccagcccattcatcacggcgaccacgtcgctgcgcgggttcgtcttcgacgt

SEQ ID NO: 164553 - DNA, 3295 bp, Arabidopsis thaliana landsberg
taacttttcaaaaattcatcaaaaccgtcgactctctcgttgcgtttcgattccggcgaacttctcatccaaagtcatcgactttctcttctctctccgttcagttcaccgtcgccgactttctcttctttctcttctctctccgtcgtcgattgtgtgggtcgtgttcgatttcgcatagtcgttcatcccgtttagccgccgttgcaattccgccgtgaccggtgttgttccaaaccgtcgtcgttccaaaccaccggcgttccaaattgtaagtgtcgaatagggctttaagtttagaaattggaacggtttttgatttgaaacattagaataggttttcgttttgttgatttgaacggtttccttgattgttgagtggttttgcaaggtaatcatgggtcgtgtaaggttagtcactcctagttcgagtgaaagtgaagacgagagggtcacgatcacccgtgaagcggatatgaaccgtgaagaagttgcagccgaggaaaacaaatttgaagacgaaaactgtgaacaagagcctctggaaaaccttaacgaaccggaagaagaaaagatttctgaggtatatacaaatttatgaaacttttgtgtgaatattgatgtagtgtttaggtacaactagaaaataatgagtacaagttaatagtataggtctgtgtaattggtgcatggatatacgtgattaatcatacattgggttgcattagaaaattgaattctgaaaaaagttgataatgttgttctgagataactagtacaagtagtacagcgaaatattaattgtatggttgtgtatgaattttcagaaagttgatgatgaggaaccaatgcagtctcaggggatggaagaaaaccctgaagaagaggaaaaagaaggggaagaagaagaagaatctgaggtaaatggttatttatgtaaattgtgtttgaatattgaaagtagtgtatagggacaactagaaaacaatgagtacaacttaatagtattggtttgtttgattggtggatgtatggatttatacgtgatcaatcatacattgatttgcattagaaaattggattctgagaaaattttataatgttggtctgagataacgcgaaatattaattttatggttgtgtatgaattttcaggaagatgatgatgtggaaccaatgcagtctcaggggatggaagaaaaccctgaagaagaggaaaaagaaggggaagaagaagaagaatctgaggtaaattgtatgggaatcaattgtatgattggtgttatgagataactagtacaagtagtacagcaaaatattaattgtatgtttgtgtatgaaatttcaggaacttgatgatgaggaacaacctatgcagccagagaggatgttctttagtccaagcgaatacgtaaagacgtgtaagatagggacgagatgcactgtgcagcagacagtgaagtatttggaggagtttaaagaatatttgccatggttcaaggcgcatccacagtttaggcatgtattccacatgcctgaggagaaaaaccacatgacccaaggcttgtggatgcttttgcttcgcacagcacagacagagatggatagggagtgctggtttgttgttaatggagtgcctattaggtactccattaaagagcatgcgttgttatgtggtttcgattgtcatgattacccggaggagttgcagccgagtatgaagatcgtggatgcagatttgaagtttgccaaaaagatctttaagaaggtatatgggattaagatcgttgatgttgagaaaaagttggatgaaatgaagaaatgtggagaaaagaagaagacggataggaagaagtaggtaatctttttgatgttgtgcaaggtgatcgcgaccaagtcaaaggctgatggaaacattgacaaattctttctaaagattgttgatgatgtgcgtgcatgtgagacatccccatggggtcgtttcacatttgatggatgtatggaaggtattaagtcggtaatgaaatccatgaaagggaaagcaaaactgcatgacttgtttctccggatttattcttccattagaggtaacaatttagagtattatatatagtgagatgcattagtagacttaaaaataatactaatgtgacttttactttgaatgtgtagattttgccttttgaggctattccacatttgggacaaaagtttagagaccctgtaaggttcgagaatgagtgtccgagaatgtgtaaggccaaattctctagtagtgtcatgaaagggttctcgttggaagagataaacgaggagcttgaaagtgtaaaggtaagagttgtcccagttatctctagcgttgtcctagttatttctagagttagcccagttatctatgagctagaatatgattattttttatgtttgaatttgtataggttatctctagcgttttggaatcggattacgaagagaaagatttgttgaggcgcattgtagatggtgatgatgttgatgatgggatagggtttgttgatccggttgtcgatagctggagaaaccgtttgatcaaagagaggaagagaatcttctggaaggatatgtttgaagcggatgtccaggctcgaagcggcgagcaaatggaggaagagaatgttccgagacatgttccagatgttccgggcagcagtagctcttgctctttgaaggaaactattgatgaaggctttaagagagtgatggcgatgttggcggaacacaatgaaaggcttgtaaccattgaaaggagacaagccggtgagagtgtgcctccatttgagaagagggtccattccgatgtcaataaggagaaggaagatggtggtaagaatgagaagaacgtggatgtggctgttgagaccgaggctagtgttgagcccgaggctaatgagacccatgatgttgagaccgaggctgttgaggtcgcggctgttgagcccgaggatgttgagacccatgatgttgagaccgatggtgttgagcccgagggttttgtacccgagtttgttgagcccgatgatacgagttctgctatggttctttgtgttggaggctctccaatcggtatgttttgttttaataatctttgatctttttactatatgatgtttgttgtttatgaatggttgtcttttcttttgaaggtcatgtttaagttgagaaggaaactgaagcggataaaggcgatgatgagacgccgaagaaggaaacgaagaagaaagggagggagggaaaaggaaagtgcttcgataagaaa

SEQ ID NO: 164554 - DNA, 298 bp, Arabidopsis thaliana landsberg
atggatacttggatagtaattatcattgctattgcttcttttgttggtgttttgatatttcttgcggccttgactggagccgggggcaaaggtgggggtggtggtgacggcggaggaggaggaggaggcggagaaggaggtgatggtggaggaggagaggatggcggaggtgaagatgtggaaataggtgatggagcaaatgggggtggctttggcggtgatggaggtggtgttggcggtgatggaggcggtgggggtcatggagggttttggtccttttggagtggtggagggggag

SEQ ID NO: 164555 - DNA, 5910 bp, Arabidopsis thaliana landsberg; identical to SEQ ID NO: 28355

SEQ ID NO: 164556 - DNA, 966 bp, Arabidopsis thaliana landsberg
aaaaatcttatagactcacggacaaatttctggaatattgatcttttacaagagctttttgatccggaagatgtctcgttaataagtgctttgctcttgggtgcgtcaactaaggaagatatcctaggttgacatttcacaaaatctggagaatatacagttaaatttggatatcatgcggcgaggttaaaaactttggatgctaacttttctttttttggcccagacatcaaagtcttgaaagcattctcatggaaagtacaatgtccgcccaagttacgtcacttcttgtagcaaattttagcgggatgtgtaccggtgacaaacaagttgcagaaaagaggaattaactatgacacagggtgtttcagatgtggtcaggtagaaaaaacaattaatcatacacttttcctttgccaccctgcacggcaaatatgggcactctcagaaataccttctgttgaaggaaattttacatattcatctatttatgcgaatttggatcacttattctggagaataccttctgaatttgacttatcttcctaaccatggataatttggtatatttggaaagcaaggaacaaatttttttttgagaatgtggataaagacccctcatatagtacgcttgacggaaaaagaggcacattcgtggcagttacctcaaattgaactttatactgaaaatcatggttacttaaattttgacactaggcctcaagtgagatatctctcaattgatatcatttattcaagatatcgatgctatgtggatggttcatggaaagaacgtgataaattctctggaacatgatggtattgtacataccaaatggagagccaccaaccataggagcttccaatctaagaaggagtttgtcgccactacacgcagaagtggaagcccttctttggactatgaaatgcatgattggcgctgataatcaagatgtggttttgtta

SEQ ID NO: 164557 - DNA, 507 bp, Arabidopsis thaliana landsberg; identical to SEQ ID NO: 77765
  unsure (1)..(507): unsure at all n locations

SEQ ID NO: 164558 - DNA, 2164 bp, Arabidopsis thaliana landsberg
atggcacagagtagtacatctcatgactcaggccctcaggggctcatgagacggccatctcgtagtgctgccacaacagtgtctattgaagtttttgatcatgaggtggttccggcctcccttggtaccattgctcctattctgcgtgttgctgcagagattgaacatgagcgccctcgtgttgcctatctctgtatgtatttgcgtttccttgttgttttgtttgcagaattaagctgatatacttcacttgctgtgtgactcacttgaaattttccttgtaatttgtatataggtcggttttatgcatttgagaaagctcacaggttggatccaagctctggtggtcgaggtgtgaggcagtttaagacacttctctttcaaagattagaaagggtaatcatctcttactattctatctgttttcttgaacacagtaaatattgtcatatgggactttatatcaggcttttatcatatagacactacacatagatagcaagtattaacttgtggatttctccatcggtagttttcattaaggatgtgttcaaattccagtttaatatgtcatcatctcagacctccaacatatgatacagtccagctacttgacaagctttagtttgcaaaattcctcttaaatggggattacacagtagaatttgttttacactttgagaatatccatttgaaatgatacagataatgacatatttttctaacctgagtagagataataacaaatttatcaacacaggacaatgcttccagtcttgcttctagggtgaaaaaaactgatggacgggaagttgagagcttctatcaacaatattatgagcactatgtcagggcacttgatcaaggagatcaagcagacaggtaaagatggttgttgtgtatatatacactcatgtattttccaaactttggccatgttggcatattcggattacatgggactttgatgataaataatgcagtgttcttcttctgacggactttttttgaaccaacatcttgcagagctcagcttggtaaagcataccagacggctggagtgctctttgaagtgctcatggcagttaacaagagcgagaaagttgaagcagtagctcctgaggtttgtgtccaaatactattttttcagagcaaccagaacagctataaaatattgcttattcagttaattgagatgggagtttaaaacgttcccatatgtgtttctgagtagattattgcagctgctagagatgtccaagaaaagaacgaaatttatgcaccctacaacattcttcctttggattctgctggggcctcgcagtctgttatgcagcttgaggaggtatttactgtttgaataattcttccaattctttaaactaatcgctactcaattctgatatctgccttcttatacctctttacgctgtttgatgactaggtcaaagccgctgtagctgccttggggaacactcgtggattgaactggccatctgggtttgagcagcaccgaaagaaaaccggaaatctggatcttcttgactggttaagagctatgttcggattccaggcaagttggtgatcgggaaagagtaacacgaagatctgatgtattgatgttaaaccagtgagacatatttcttacgtttcatttctttgattttcacagagagacaatgtcagaaaccagagggaacatctggtttgtttatttgctgataatcacataagattgactcccaagccagaacctctgaacaaggtaccttttgatagttctacccgttcacctatatagcattttgggatgtgttttgacacccaccaacactagggatgagtagagtggtaattcagagctttggctattgtctgattaacgttcatcgaccttgtgaacaacataatagaattttccaatgtttattcatttatatcaaggggtttcttttccaagacccttaaacagaattgtccaatgttgatagaaaaacaaagcattatctcaatattccattatatatcttcatctattaaaaacgtttcctttagcaacagattcttgatctatttattctatatatgcagctcgatgacagagccgttgatactgtcatgtcaaagctctttaagaactacaagaattggtgcgaatttttag

SEQ ID NO: 164559 - DNA, 1717 bp, Arabidopsis thaliana landsberg
atgaaattaagtagtaatcattgtgacacaactgcctatgcttcgcaggcacttgccgcagcatcaaaaactgttgaaactataaggatagtccataatttccattcctatttccttcttgttggagatataaatagtaagggcatagttttaatgtgcttttgcaagcaagcaattgcttttcctcctaccttaaaaccatgcctgctgttttctccggatttctctagagctcacgcatctgttacactttgcaagttaccatagtttgctactcttgcagttcccatcatatttgaagttaaccgcttacgtgacggcaacaacttttccaccagaagtgtagatgctagacagaaaggaaaaactatattcaccttgttcgcgtcatttcaggtttcatgttatattcctgaaatatttcattatgaatctctgtgtttctcttactatgtcatcatgagcgaatagcttttcacgctttaacacaacagtttataaccttgtagcttctgtttttctttggttttacagaaaaagcaacaaggttttattcaccaggagtcgaccatgcctcatacaccagctcctgaaacggtaaatcatttctcctactttgaggcttattaaatgaattgcgatgagtgtcagtttcatccctacctactgcagcttctaccaagggaggaaatacttgagcggcttgtaactgatcctctactacctaggtaagtggaaatttgccagaccaattattccaagagctcagagtcatacacttctcaattgtttcttcatttcagggattaccgtaacaaagttgcaactgaaattgaagttccattccctatagatattcgattttgtgagccaaatcattccactaaacagacgaagtctcctccaaggttatcctagttgtctaactcctgaaaaaatcagttttattgtttactacaatggagcatatttcattttgtcactctaaaacttaaatactaaatgtttacgtggttactgataaaaaataaccatttcttttctaaaatcatcttgcagactgaaatattggtttagagcaaagggaaaactttctgatgatgatcaagctttgcacaggtgagcaactctacttcagtggtattaaactgaaaaccgcctaaaaacttggtagacaatttgaattattgtagcgttcaccttttagcattccaaggagttcacctagcagcattatttaagtatcactgattgatatagttgatatatctcttgcagtctttctgattgtcttgcgcctgccattgttatacagatgtgtggttgcgtttgcttcagatctgttattcgcctcaatcagtttaaaccctcaccgcagagagggcatgagtgtagctgctcttagcctggaccactcgtaagctttttcttttgtcttagcgaagtgtgagtttgtatcatcctccctcacatatgtacaaaccatgtaattcatatatatacacgcaggcgcacacataattatatacctgctttatcgtctaatatcttgattttacaatctccgaaaacaatacttcaagtaattgtttcttatttttcttatgccccttggcaggatgtggttccaccgacctctaagagcagatgattggttgttgtttgtggtaagaaaagctcatttctttttctttttttctgaagaataggagaagtt

SEQ ID NO: 164560 - DNA, 1650 bp, Arabidopsis thaliana landsberg
aaggagagaagtctgacaccaatgatgaggaagaagagagtgaaaaagaagagagtgaagaagaagagaaagaagaagaagagaaagaagaagaagagaaagaggaagaggagaaagaagaagaggagaatgttgccggagaagagtcctcagatgatagtagtagaagcttgggggaagagacctcctccgatgagaatatggacgatgagactgtagtggaaattccagcggctatggtaaggatttctcaagtatttgaatggtgtaaaactggtagaacagggtaatactatgatttgtggagaatactatcaatactaggaaacaactacgtgtatgatttctggataatactgttattactaggatataactatgcgtttttgggtcatactgtcaatactaggaaacaactacatgtatgatttctggataatactgtcattactaggatataactatcaatttttgggtcatactgtcaatactaggaaacaactacgtgtatgatttatggataatactgttattactaggatataactatgcatttttgggtcatactgccaatactaggaaacaactacgtgtatgatttctggataatactgtcattactaggataaaactatgtgtatgattctatgtaacattggtagtaatatgaatgaatgtctgttgcaggagatcaacgagaaaacagaagcaataccaccgctgagtatgtatttcccgccctcggaatatgtgaagaaaatcaagctttcaactcggtgctatattcacgaagtgttgaatacattcgataagttgcagccggcgatgagcaagtccgagagggcatggtttgagaatcatccaagtttccaatacatcttcgcacgacgcgcattgaaaggaagaaagaagcgtggttcatcgtcaatggcgttccaatccgatatggtatatcggaacacgcattgatatcgggcttcaattgcaaaaactatacacttgggtataaaaatactggaaatttggatttcaagtcgaagcatttcaagagtactgttatgaagctcttagaaatggtaccgtcacgtgaaagataaaaagaaaggttgaagatgatgatcttgtatttcttaaggagcattatcataacgcctatcaaaaccggggaaaaggcacctcaagtggttgaattttcccccaacgctcacacagtgaatcattttaatggttcagtctccagcagcgagaagtccatatgcccgttcccgggtttctgtcttttgatggaggttacttacaacttatattaataggtgaatgttagcaatactggtaatattgtggaatactatttgttattaaaaattgttttcttattctgtagcttcttgtattcgaggcaatcccatagttgaggaaaaaatttattgtcgacattgcaggagcagatcagggatctcctaagatgtgcaaggtgaagtttaagaaaaaccatttgaaaggctttcctcttgatactattaatgcagaattgggtacaactcaggtgagttgtcctagatatacgattttatgtaacaattgctcttctctttagttgtgataatcagatcagattgttaatctttaaaggtcattgattgtatcgtc

SEQ ID NO: 164561 - DNA, 2145 bp, Arabidopsis thaliana landsberg
ctcaatgccaacactgaatatcttcaccgcttcctccacgggagctctgataaagtgcttttcaaaaagaacgtaccggtggttacctatgatgatgttaagccttatatcgaacgtgttgcgaatggagagccctcggatgtgatttctggtggacctatcactatgttcctccgtaggtaaatttctcatatggcaattaatggatcaactagttttgatgattttgacgatgttggttgcttttttatttctctagctagtactcttacatagtagtctaattataagtttgggtggacctctcgctatgtccctccgaaggtaaaatcatcatataactaattaatggatcaactagttttgattttgcttggtatgactttagctagtactcatatatagtaattttttgtgtgggtggaattttttgtgtagcaccggaacttcaggagggaaacaaaaggtatttccagtgaacgataagtacattgaaaagttgggatacgttattgctctacgatctctcgctatgtccaagtaatttccttctcttaagtgttataagttataacatatgtaatgactacatcggattgccattacgtaaacattagttcatttgaatatgtttatgctaagaaaaaaattgatattcatcaactttaaaatgtaaaagagcttctaaaaaattaagttggtgctgagacatgaacactttcctttaatgtgatttctcaaatgataaataagatactttgtatattatatctttaagttagtgctaagatcttttttgttttggactataggcattttgatagcggtggcgagcaaggaaaagcgatggagtttcattgcactaaaccgccatcggaaacaccctctggtttaccggtctttgctgtattttcaagcttcttcatgagcgattacttcaaaaaccgaccatcaaaatgtaattctgagtacacaagccctgaccaaattatattgtgcccagaccataatcagagtttgtattgtcatcttttatgcgggcttgtccagcgagatgaggttgtgagagtaggtgcagcctttgcttttgtcttggttcgagccatcgattttcttgagaaacactggaaggaattgtgtagcaatatccgatcaggtcatgttagtgagtggatcactgaccttgagggcagaaacgctgtctccaccattcttcgaggacctgatccaatattggctgatgttattgaacaagaatgcagccacaagtcctgggaaggtattattacacgactttggcccaaagccaaatatattgattgtattataacaggacaaatggctcaatacattccaatgttggagttttattccaacaagctgcctatagtttccacaacatatgggtcttctgaaagtacatttgggatgaatatggatcctctctgcaaaccacaagatacctcctacacatgtgcgccgaacatctcctacttcgagtttctacctgttgatcacaagggagacatggcaagcattgttgatcttgttgacgtcaagttagggtgctactatgaaccggtggtgactaattattttggtctacacagatatcttattggagatattctacaggttactggattttacaataacacacctcaatttagatttgtacatagaaagaatgtggttttaagcgtgagatcggagataacaactgaagaagacattttaaaggccttgaatcatgtgggactggttcttgaatcttcagatttaatgttgatgggcttcacatgctatgcagatatctccacatttccaggtcactacgttttttactgggaactcaaagctaaagacgttcaagatgttttcgagcttgaggagaaagtaatggtgaaatgttgctctttattagaggagtcatttgatgaagtatatagaaaaaataggagtaaagatgagtgtatcggacctctagagataagagtggtgcaacaaggaacattcgattccctcatggaatatttcatctcccaaggaggttcgattgctcaatacaagacacccatatgtatcaactcttctgaagccttagcagttcttgaaaacaaggttcttgctcgattctttagcgaa

SEQ ID NO: 164562 - DNA, 2085 bp, Arabidopsis thaliana landsberg
aagctgagggccgagatgccggaactaaggctgtttttgttcctcagaccaagtcgttcacgggttagaaattaccttccattttttggtccggccttatcatttcgattaaatgactcaacgctccttgcctggtccaaccctttctttattctaacagcgatgaaaacagagggaaacgtctttcggtgcttcaaaacttgaaaagacaccatcctgccagcctttgataggtggcgtcctgcaattcgcaagcaattcctactccatgcccatcactcatctcgggttagttctcttcacccataataattctttaaactttaatcctccacttagatgctaactcttttttgttaccacttggttcaggcaaacggcgaactcaatgacatgattgagtactacgagagactgttgctagacagggaaaaggaggttatgacgtggaaagacaaatcttcgtcccttgagttcgatctccgttcttaaatgatgccaggtttagattgggctggtacattcctaaactgttgaaaccaatacacagcgaattactcttgtatttttcctaatccgagataattgcctcaggtgctagcgatcccgtggagctcgaagcatccatcgtgccgacgacaattccggaggcggtaaccaccccgccagagattcctccatccacgaactcggagacagtggtcatcgaggacgatgatggttcagattccaaggttcctagcgagcagcctactactggcgagccgggtgagactgagacagctgtcgccgatttagttgatcctgagtcagctcaacccgaactcgaggtgcctgagaacctgtagtggctgtgtccacttaatggggattgtccctttttgttaacagactaaaagtttactattactattttacctgcctaagtaggctaaacaaatacttggcctgaggaggcttttaaacctttattattattttttaagactatgaacccaagagggttttctttgcgctcgattcaagtatagattggcaaactccaccttttatatagcatttttgtttaaccatgtggtcaagtcacgagattcgtaggttgatcagacctatctctaagaaatgcggacttgaatccgcgaactccccaactcgggtttaatctgttcgacttatttactgggcttcagcctttgttattatatatatatattttctttatttaatgatccgcttgtcttaaatgcgatggctgccatttccttcctcgcaaaccaggaaaagtgtcacgcctccaaggcaataattgccttttcctcgaatcccaaaaatggttaaatccattcggacacgccactattattaattttgtggtttcgagtaaaccctaaactactataaataagaacataaactttcacaactctctcaaaatatgatctcagaaatttacttggtaaacacctctagaatagaaaacgaaagagcctccaccgtctgtccctttgatcccggaagtccattgtttctgtccggcaatggctttgagcccgccggtgttctctttcctcaagcctgctgccccttcccctcgaaagacaaaaaggaggcgtacgattttatggataaggtaaatcctccttccttcttttttccggaacaaactttactcgtatttaaccagttcgcattctaggtcgttgacaagcatcgccgcttatgcgatgaaaggcaacgtttgggcctcaagaggcaaacgttcaaggcccgaattgcccatattgaaaggaaggtaagggctatggagagcgaccatttttaatgggagtggaggaacttcgatgcgtggcaaagatcccgcacatgctccggatgtacttttgtgctcgaggtcaagtacctggtcctgtaaacgctccggtccaagtgatcctgtttgacagtgaggactgtgacgacgacgaggaggatagcaacccttggaagcgcgtgaataatgaacccgacgtgaatgttaaaaacgaggcgtccacttcgaaccccgaaccggcgataaaggagcctgttcctgagccccttccctaa

SEQ ID NO: 164563 - DNA, 587 bp, Arabidopsis thaliana landsberg
gttagtattcgtgttctttgcgtttacagtcgcagatgcgatgtctatcaagaacatgtacgcattttacaaggatacagatgacgtcaacttctgcttgaaatacattggaacggacatacgtatcttagccgcacgcgacctccatgatgtgcttgttattgcagtaagtttgtaattcctttaattattatgtattgttcatacgtaaaaagtattgatttcttattggaatttattatcagatttctcaatgccaaatccaattgaccaaggcaaccaaacaaatcaacaaagttcgccaaaagtttagtggtccgattgggactcgacgactctatttttgcggaaagcactacagtttagcgtctgctttcttccaaaaggcttatgaagaagcacaagaagaagggctcgagtccatagctcagctttctgcagtggatggctcacactatatgttcaaatgcgaagatgaatggaaaaataatggaccgatacaaaagtctcctttcactttctattatacaaatgttgtcgaattgttatcaatcattcaggttattatcgaaaagatgtatggctag

SEQ ID NO: 164564 - DNA, 1749 bp, Arabidopsis thaliana landsberg
  unsure (1)..(1749): unsure at all n locations
ggcaggctgctcttaaggctgctaacgaganaaaagatgggataaagtaggaagttgtttccctccgttcagatattcaggtaggtccactgttattctggtattagaatatgtttgttattctgatctgcattatgtaatcatttcgttatgttcagatcttgaaggatgaggctgcaacagctgcggaatgccttcaagaagcagaggcagaagcaaaggctcttcgtataatgactcaaagaatggttttaacacaggacgaaatggtatgtttagaaagctcaagtctcattatactcacgtttaaagatttctgattgtatggaaaaaaaaaatgatcatctaggaggaagtagccttgaagagatgctggcttgcccggtattggggtttggcagtgcagcatggtaagtaatgcatccatcttgtgaacgtgttctcattgatacacttactcagctctctaatttttgtcaaaggcttgtagttgtggtgaggtagtttatttattaaaattcttagatatttggttttcctgtggcttacctatgtaggcatttgtgctgacatagcaccatccaggcatgaaaaatggtcggctctggctcctcttccatttgagctggtcatatctgcagcacaaaagaccaaggagttatctcgggacaaaggctagtcttaatatttgctatggccaaggtttccttgatactgtttacttaccagcctttggaattgatcaggtgggagtgatcagagcaaaactgctagatttttaagtgatctacctggagaaggaaatatcgaaagtatgctttcagttgagatgggtttgagagagctggcatccttaaaggtaatataccattgtttctttactttaaggtatcttcaagtacataattaagttctcatatcacaacgaaatttaggttgaggatgctgttatgcttgcattcgcacagaagagaacaccgagtttggttcgtcaaggtatgtatgctatatcatcaattagtacagtgtcaaatatagtctgtttttactagtcatcgagatcaatagtctgttttctccatatcttacagattccaaagggcatggagaactcagttttgtagaatcatacggtaagagaagagagtccaaacatgcacaatatatcatatcagcagtcaaacttgatgaaatccttactatgttatcacatttctcaaatgcagagataaaagaagcggaacaagaagatgttgcctttaagcaggtagtttctttatgcctataatttcataactataaggttatactgtgacattttgttacaagagatggtaattattggtatattgtggttggtaactaaatttatcgcgatgaatcttgatgaaccgacgttatttggttataaatgcaggcatggcttatgtacttctggggtacagccaagttgcatagtgtggaagaagacattgcagatgaacgtttccagttttggaccagtcgtagtgaaggaaaatctccgacttcacaagatgccgttgacggtaataaacttcttcaattgatttcccctgtgtcctaattctagttttaacaacaccccaacttgttctctttacagtggaacgaggtttgttagagctaaggaaattaggagtagaggaacagttatggnnnnnnnnnnnnnnnnnnnnnnnnnnnnnnnnnnnnnnnnnnnnnnnnnnnnntactctttcaaatcacaac

SEQ ID NO: 164565 - DNA, 1636 bp, Arabidopsis thaliana landsberg
atgggtggctctggaaattggattaaatctctgataactaacaaaaaaaccatcactgatgatcaagtaactctcgaaaaggctctcttctttacacttgatctatctctgttttcatctctcagtaactgattctattgtttttgcaggagaagaacatcaagaagaaatggaaactatggaggacttcatcggaaggtttgatttcttcctcaaagggtttcaagagccgtggtggtagttatggaactccttcgttaggctcagatccgccgtcattctctgctgacgactctttcacggcggctgttgctgctgtcattagagctccgccgaaagatttctttcttgttaaacgtgaatgggctgctacacggattcaagctgcttttcgagctttcctggtttgtgaatttaaccactattactgagattgcttcactgttcaattgttaatcaactctttacatagtctgctttggtttagtgacctgttcattggttttaacatctgattgcaattctaatagaaagttagaaacttaaatcaaccatcaacacttaatggatcattaaactaagtcaattcatttgagcagctcatttgttgtcttctctgaagcttttgttgttaatgtttttatgaatgcgttttacaggcaagacaagcgctgagagctctgaaggcggtagtgaggattcaggcaatattccgtgggagacaagtccggaaacaagcagatgtcaccctaaggtgtatgcaagctcttgtacgagtccaagctcgggtacgagctcattgtaacagggggccttcagatggacaggagttggagaagccatctgatcaacaaaaagatgatccggcaaaacaggctgaggtaatgattatcagatatggattttgggatagaatgggactcgtgggagactaaatgtatatgttttgcaatgatgtgttgttcagaagggttggtgtgatagcccgggaagtatcaatgaagtgagaacgaagctacaaatgaggcaagaaggagcaatcaagagggagagagctatggtatatgcattgacacatcaggtaatgcattcataactagaatcaattttgcgaggattttactctctctcagagcatttgtgttcattgagtttctcaaattttgacacagccgaggacatgtccaagtccggccaaggcgagcaagcaagggagtgtcaaaaagaataatgggtcgtgtaagagcagtccaggttggaattggcttgaccgatgggttgcagacaggccatgggaaggtcggttgatggaaggtcctacaaactcatcagaaaatgcaaggaaaagcgagagcagtgtgtctgaacatgatacggttcaggtcaggaagaacaatctcacaaccagagttttggctagacctcctccaatgtcatcgtctgctacgagttctgagtcttcatcgacttctcaatccccagttcccttctcgggaagtttccttgaggaaggagggtactacagaaagcctagctacatgagcctcacacaatctattaaagctaagcagagacgatcagggtcttcgtcctcttgttccaaaacaccgtttaaaagaaacagtcaatgtcttac

SEQ ID NO: 164566 - DNA, 4707 bp, Arabidopsis thaliana landsberg
ttatgtggctcgtgcatcttgggtgatatgtttcattggtaagtctttatagatgatgtttgtgtccctttttaattaagaaaaaaaccctaatttgatggatcgatctcaattaatgtaactaatcactatttaattttgtggatggtttgcatatttattaaccaaacagaaggatattgctggacaagaacaggggagagacaagcggcaaaaatgagagagaagtacttaagagcagtattaagacaagatgtgggttactttgatcttcatgttacaagcacttctgatgttattaccagtgtctctagtgacagcctcgttattcaagatttcatcagtgaaaaggtctcatcttttctatattacgtacattgatcttgtttcttgttcttaaacaagtttttttgatgatttttattcaagcagttaccaaactttttgatgaatacatctgcgtttgtcgcaagctacatagtgggtttcttattgctgtggagactcacaatcgtaggctttccatttatcatcctcctcttgatccctggactaatgtacggacgtgccctaatccgcatctcaatgaaaatacgcgaggagtataatgaggctggttctatagctgaacaggtcatctcatcagttcgaactgtctacgcatttggtagtgagaagaagatgatcgaaaagttctcaactgcgcttcaagggtcggtgaagcttgggttgagacaagggctagctaagggaattgccattgggagcaatggtatcacttatgctatatgggggttcttgacttggtacggaagtcggatggttatgaaccatggctccaaaggcggcaccgtctcctcagtcattgtttgcgtcaccttcggtggcacgtaagttactatatttacagtgtttagggttttgttgaaacaaaaacaaaccatcttgtggtcttcacctttggtattttacatttttcagatcacttggtcaaagtttgtcgaatctcaaatatttctcagaggcgtttgtcgtaggagaacggattatgaaagtgataaatagagtccctggtatagactcagacaacttggaaggtcagatacttgagaaaactagaggagaagttgaattcaaccacgtgaagtttacttacccatctagacctgaaaccccaatctttgatgacttatgtcttagagttccatccgggaaaactgttgctctagtaggtggaagtggatcgggaaaatcaactgtgatatcacttttacagaggttctatgacccgatcgctggagagattctcattgatggtttgcctattaataaattgcaagtgaagtggttgagatcacaaatgggtcttgttagccaagagccggtgcttttcgccacatcgataaaagaaaacatattatttggtaaagaggacgcatcaatggacgaaatagtggaagctgccaaggcttcaaatgcgcatagtttcatatctcaattccccaatagttaccaaactcaggttatactccattttttagaacttattatagttttttttttccttttacttaaaagtttttatatgagtgtatatttgatttttgtgttaaattaggttggggaaagaggagtacaattatcaggaggccaaaagcagaggatcgcaattgcacgagcaataattaaatcaccaataattctccttctagacgaagcaacaagcgcattggactctgagtccgaaagggtagttcaagaagccttagacaatgcctctattggccgtacaactattgtgattgctcaccgcctatctactattcgtaatgctgatgttatttgtgtagtccataatggtcgcattatagaaactggatcacacgaagaactcttggagaagttagacggccaatatacttctctagtccgtttacaacaaatggataataaagaatcagatcataacatcaatgtaagtttggaagaaggtcgagcatcgagtttgagcaaagatttgaagtatagtcctaaagattttattcatagcacgagttcaagcatcgttagagattttcctgatttgagtcctaaggatgggaattcactagtgccatcatttaaaagattgatggcaatgaatagaccagagtggaaacatgcattatatggttgcttaggtgcagctctatttggggccgtacaaccaatttattcatattcttcggggtcaatggtatcagtgtatttcctagcgagccatgaccagatcaaggagaaaacgaggatctatgtgttgttatttgtcggtctagctttgttcactttcttgtccaatatcagtcagcattatggttttgcgtacatgggcgaatacctaacaaaacgtatccgagaacgtatgctcggaaagatactaacgtttgaagttaattggtttgacaaagatgagaattcgagtggtgcaatttgctctagactagcgaaagatgctaacatggtatttcttctgcctttctaatttgaacttcaatgaacaatctattctaatctatgtattgatcttggaatggtttgttatgataggtgagatcattggttggtgatcggatgtcattactcgttcaaactatatcggcagtgagcatcacatgtgcaattggtttggtcatctcttggcgattctctatagtgatgatgtcggtgcagccagtgattgttgtgtgcttctacactcaacgcgttctgctcaaaagcatgtcgagaaatgccatcaaaggccaagatgaaagcagtaaactagctgcagaagctgtctccaatattcgaaccatcacagctttctcgtcacaagaacggatccttaacttacttaaaatggtccaagaaggaccgcggaaagatagcgcccgccaatcgtggttagcaggaattatgttggggacttcacaaagccttataacgtgcgtttcagctttgaatttctggtatggtggtaaacttattgctgatgggaagatgatgtcaaaagaatttttagaaatatttttgatttttgcaagtacgggtcgggttattgccgaagctgggacaatgacaaaagatctagtcaagggatcagatgcggttgcgtcagtgtttgcagtattagatcgcaacacaaccattgagccggagaacccagacggttacgtccctaaaaaagtaaagggacaaataagtttttccaacgtggactttgcttacccaacacggcctgatgtgattatattcaagaacttctccattgatatcgaagatggtaagtcgacagcgatcgtgggtccaagcgggtcaggtaaatctactataattagcttgatcgagcgattctacgacccgttaaagggtattgttaaaattgatggtcgtgatataaggtcgtgtcatttgagatcacttcgtcaacacatagctttggttagccaagaaccaacgttacttgctgggacaatacgagagaacatcatgtatggaggagcatcaaacaagatcgatgaatcggagattatcgaggcagcaaaggcagccaacgctcatgattttatcacatcactatctaacggctatgacacatattgcggggacaggggagtgcaattgtctggtggtcaaaaacagagaatcgcgatcgctcgagcggttctaaagaacccatcggtgttgctcctggatgaagctacaagcgctctggatagccaatcggaaagcgtggtgcaagacgcgcttgagcgtttgatggttgggaggacaagcgttgtgatcgctcataggcttagcaccatccaaaaatgtgatacaatcgctgttttagacaatggagcagttgtcgaatgtggaaaccactcgtctttattggcaaagggtccacatggagcttatttctcattggtcagtctccagagaactctcttttgaacttgaaagttagatttgtatcaatatgtctctttgcctaagttgctagattacctacctatgctctctattctcgaaaaaaccaaattaattataacggaacactatcaattgtagactaaactcatttacatatttttcatatttttgcaaataaaatgaataatatttttaaataagtcctttgcacaaatttttatgaaaccatttctttgattattaaaactgtttagtagttgatttgtgaatgttatagagaggatttgaaaaaggccatgtgaggtataagtacgctgcaatctattattgtagtcagcactagatcaatatttgatgttatataaaattatttccataagataatacgtaaagacagctaacgtcaatatgacatgtatgattaaacaatatttttgttttaaaatgatcggattggtctttcattaatggtgtgcctcggtaaacggtacgtcaatcgccggaaaaaaaatctaaaatccgaagaaagtgtgatcgatcgaaaagaaaaaaatcaaacggtcgagtaaaaataaaaacctgccgtgaataacacgaatcctcggtattgcagtatggtcattcgtttgttcaggttacttttatctttactttgaacatatgtagttttgctccgtggtccgtgtctagtttcaacatcggtcaacactggtcaatgccggttctgatcaaagcaggatgtatcggtcaatggtggttaacatcggctaa

SEQ ID NO: 164567 - DNA, 1243 bp, Arabidopsis thaliana landsberg
  unsure (1)..(1243): unsure at all n locations
atggcgccgaagaaagcttcagcggctggggctgcagcactacaaccgctggaccacaaccaggagaccctttctcttcgggaggcccgaagccagaagagaaaagctgttagcccgacgcttgaggaagaagagctggaccaagaaatcagaaacatggagatgctacatcaacaagtacagaggaagaaggagaagatggcccgactagctgaccttcaaaggcaaattgacgaagcttcggaagaggttcgtcaccttgctcaagacgagcaagatcgaaggcctcagcacatggagcttcatcaagagggcttgttcaacgacgatggatggtatgaagattttaatcatggaaattttgcttttgatgatgcttctcctctatcaacagaattgcaggctacaccatggccccagtcttacaagccacctcagctccccatgtatgatggtcattgagacccgaagcaatttctgatgagttatgaagcaactatatcttcatatggaggcaatgcagctgtcatggccaagtccttcgtcatggcagtttggaatgtggcccaaacatggtattcttctcttcggccagggaccattacttcgtggcagaagctcaaggatatactggtgacaagtttccaaggctttcagacgaagccagtcacaacccaggccttgtttcaacgcacgcaagatcatgaggagtaccttcagacatatgtccgaaggttcttgtgtcttagagcacaagcgcccacagtgcccaatgaaattgtcattgaggccatgatcaaggggctttggccaggacctatggcttagtattttgccaggaaaccccctcaaaccctggagaagcttctttagaagatggatgaatacatccgggctgataatgatttccgccaaagaagggaagaagcatacaggttttctgagatgaccaggggcttcagaggaagaatccaccccaggcacgtcagatcgatccataattccaacctaagtgataatagaggaagcccgcctcaaaggccacaacacagctcccaatcttcaaggcaacaacaaagctctttcaggccaccagtcccaaggggcagaggcgacaggagcttcagaggaaggnnnnnnnnnnnnnnnnnnngctatattgtttattctgtggtgaagacannggccacaccacaagaacatgccaagtcacaattcagaagcaaaaagagattacttgagc

SEQ ID NO: 164568 - DNA, 1548 bp, Arabidopsis thaliana landsberg
  unsure (1)..(1548): unsure at all n locations
caccaccatcagcttcatcatcacttgatccaacagcaacagcttcctccgccgccgctgagcacgacggcgacgatggatcccggcggaggaggaggaggtggggagagaatcccacagtggagcatagaggagacaaaggagcttttggctataagagaagaacttgatcaaactttcatggagaccaaacgtaataagcttctttgggaagtcgtggctgctaagatggccgacaagggttttgtccgaagcgcagaacaatgtaagagcaagtggaagaacctcgtcaccagatacaaggttacccttccactatttataatcctattgatgattctctctatatatagtcccgatatatacacctataaatgttagtatgatcatgattacgagtatatacaaactataattatgtgtatcatgtatttcatcactagtttgtgtggttagactgaaattatgcatattgaaatggatacctagtttatggtgtatgtataggtgaactacattatatatacatcaattaatgagcttaacctaatcgcctaggttttttagatattgtcctgtcattaatggtaacgagctatagaatagaattttacgcgtttattggtgagctttcatcatgatattgtctatgttcacattttgatccgttataccataatatctctctttttgttcgttgatcacatggtaagtaagtaacacaatatgccataaaaatataattaccgttatataacgggtgcataagatttaataagaaccgttactgntgaacacctgaagatcgttggggnaggctattcacacccccatttaacgtcaaagaaacgtgatatagatgatgaacatgtgtttttgttttcctatgatatatgatttcgagttaagatacttggttagctaaaatattttgcgtcggtactattacgtgtttacatataattgtttatataacataatgaatattcatgggacaggcgtgtgagaccactgagccagatgctattaggcagcagttcccattctacaatgagattcagtcgatttttgaagcaagaatgcaaagaatgctgtggtcagaagccacagaaccaagcacttcctcgaagagaaaacatcatcaattttcatctgatgatgaagaagaagaagttgacgaaccaaatcaagatatcaacgaggaattattgtctttagtagagacacagaaaagagagacagaagtgattactactagtacttcgaccaatccaagaaaacgtgcaaaaaaaggaaaaggcgttgcgagtggtacgaaagctgaaactgcgggtaatacactaaaagatatattggaggagtttatgaggcaaacggtgaagatggagaaggaatggagagatgcatgggagatgaaggagatagagagggagaagagagagaaagagtgccggaggagaatggcggagctagagaaggaaagagccgccacagaaagcaggtggatggagagagagcaagagagacggttcagacaaaagcttaggg

SEQ ID NO: 164569 - DNA, 996 bp, Arabidopsis thaliana landsberg
  unsure (1)..(996): unsure at all n locations
atgggttgctcacaaatcctgatccttgtgtctattttgtcatgtttttctttcatgtggtgcttagtgttggcaggtgatttcagaaaagatgttgacattatatggggaggcgataaagcaaagatactcgaaaacggccaagccattacattatctcttgacaaagtttctggctctnnnnnnnnnnnnnnnnnncagtttttgttcggtaagatctctatggagctcaagctagtcgctggaaactctgctggtactgtcacatcttactacgtaagaatctttaaaacctatctccttaatttcagggttggtctgatgatattgatgttataagataatgtgtgtgcatgtgtgtgtgttttgggtaggtagcgtctaaaggagcgatgtgggatgagatagactttgagttcttggggaatgtgagtggtgatccatacacagtccacacatatgtgatcacacaaggtaaaggtgatagagaacaacagtttcgtctctggttcgatcccacaattgatttccacacttactccatcctctggaaccctaaaacaataatgtaagaaatctcatttttttttatctccatgcatctattagcattagctgcatgaaaaacaaacatatatatagcaatatttaggagttggatctttggcagattctatgtggatggtacaccgataagacaattcaagaacatgaagacaatgaatgtatcttacccggtgaaacaagcaatgagagtccattcaagcttatggaatggagatgattgggctacaagaggagggctcgtgaagactgactggtccaaagcgcctttcacggcttattataggaattataaggtccaagattgtgttggctctaatgtaacttgcggtggtgatggttctagttcgtggctcaaggaagggaacgaagaaaataacttgaaacggcttaggtgggtccaaagcaacttcatgatctatgattattgca

SEQ ID NO: 164570 - DNA, 922 bp, Arabidopsis thaliana landsberg
gtagcatgcaattcaatgtttcattagccatagtttcaaagggaagatgaagaatctgtgtccatatatgtgtgttacggttatggtcatgtatatgttgctgcagcaacaacaacaacaacagttatggtcaatcccgaagccaacacgggtccaaaggaaaggtccatccggtcagcagcatcgagaaatgggaagaaaagatcacagaagctaacaaccatggcaagatcgtaagctttcttctttaaataaatttcgcttttctatgattcttcctattttccatttaagtaactactagcttgataaattcaatcaaaacagctggtggtgaatttcagcgcgccatggtgtgtaccttgtaaaaagatagaaccagtattcagggaccttgcttctagatacccttcaatgatatttgtaacggttgatgtcgaagagctcgctgtaagtaaactgaaaacttgcgtgttgttgagaagatagataagactgcagttttatgatatgagattgaattggtgaaaaaacaaaacgcaggagtttagtaatgaatggaatgtggaagctacaccaactgtagtgttccttaaagatgggagacaaatggataaacttgttggtgctgaaacctcagagcttcagaagaagacagctgcagctgctgatctctttctcagaaaaccttaaactctaaaacacataacagaacagagttaggtttttccattgtctgtcaaaaccagaagttacttgcggataaagtaagtatcatgagctctttctttgaataaagatctgatctggtaagactgatgactctctttaacgttttgttctcagacaaaatcttgtcttttggctgacaaaaacacaaaacatgaagatgaagatgaagaggagtttagtgatgatgaag

SEQ ID NO: 164571 - DNA, 1533 bp, Arabidopsis thaliana landsberg
agtcataggtgtaatcccatctctatcaattaatcgtaatcatagctgggctcttccatggaacaagctgggtttttaatgaaatccagtctcgccgaagaatcaacaacttacgccggcgtgatgaaggaatcgttcggaaaatctggtgccgttgctgttacggttgttacaatggttgtgacttttgggtctatgattattttctcgattatcattggtaaaatttgattttgtctcaaaaataaaaatctgaactttttcacaaacctttgaattgattcagtgattgtttgtttctcttaggtgatgttatttcgggtaatgagaaagatggaatcatacatttaggtcttcttcaagaatggtttggttctcattggtggaatacgagattctttggtttgttgttcatctttgtcttcctcttccttcctttagtcttatgcagacgtgtaggtaacgtttcttatactaaatacttagtctttgcttgaatcgatcaatgcatattggttttgatgattttgtctgtttatgttttgtgtagaaagattggcatttagttctgcaatttcgtttctgcttgcgttactctttgttgtcataagctcggtgttagcgattattgctctcgtgcaagggaagacaaagcctccgagactcttccctgaactcaatgatggtggattatcgtttttcagtctcttcactgcttcccctgtcattgtaacagccttcacctttcatttcaatggtaagaaaccaagaaccaagaactgttctcttactccaaatcatacactgttctcttttgctgatttttgaagttatggttattgcagtccatccagtagcattcgaactcaaagatccattaaatgtgctttcagcaacaaggatctctgtgattctgtgtgctacgatctactcagctactggtctcttttgttaccttctgtatggggattccactatgacagatgttctaatgaactttgatcaaagcaccagttcttcggttggttcattactaaatgatattgttagactcagctacgcgattcacctcatgctcgtgtttcctctgctcaacttctcgcttagagccaacctcgacgaactcttgttccctatgaagctttctttagtggaagacaacaaaagattcttcgcactcacttttccattactgatatcttgtttcttgggtgcaattgccataccagacatttggtacttctttcagttcttgggatcaacttctacagtctctatagcattcatctttccagctgcaattgtcctacggtatgttaccctttttggttaatccctctcatgtaattctgaatgaataaagtttaaatcttatccattgatttggtgtttttggaaactggcaggaatgtaaatggtttctcgactttaagagagaagattgtagcttcagtaatgcttgttcttgctgttgccacaagtatcatcgctatttcgacaaatatatacactttcacagcaacagaagaaaca

SEQ ID NO: 164572 - DNA, 2148 bp, Arabidopsis thaliana landsberg
ccggttttggatatgttcacaacaaaggagaagactcctccagttttggttacaagcgaggttggccttctgtattatctaagtgcacttagagaaaacagaggtcttaatttgtttgtgaagtttgaagaaatggaggaagatttacaaagcagtgtggagatagtagcactaaacgaccgcatcaaagcagtttggaggaagagtgtggttcaaaaacgcctaaaagtggtgtcacatctgttcgcgatatatcgtctgtgggttcaaaaactcctacaattgtgttgacccctcgtgatgacgaattcatggaggaattggaacaagcagaagcaaacataggaagtaacagtgggcataaatcgtcacggaatgatactgataacgaaggttttaacaatgatgttgaaaagttatttttcgttgataacgatacagaggaagttgaagcagtcatggaaaaacctgaagatagtatgccctgtggcggttatgataaggagttttggtcaaatttcttaacagatgattatggtggctccaatgttgaggagttgatggcaacaggaggtttagatgtaaggtacgggtctaacaataaggttgggggcaccaatcgggatgaagtagttttgtgtactggcagcggagtctttgaccacgttgtatatgtcaatggggctggagcagggataaagacagagcatgcaaaaaagaaagaacatgttatgaaagataagatggttggtcgagttggaagctctcagggactgaagaagggggtcagaaagttagaggaagtggatgacgaggagtttgacatcccacctttgtttgaggacatcgagtatgaagtagataacttatctgatttggacattgatgatgatggtaaaaggatataccagggaatagtgtatgcaagcaaagacgattgccaaataggattggctatatatgcaataaagaatgtgttttatttcaagcaaacaagaacaaagtggaattattttgttcttagttgctcacatgagaaatgtgattggagaatattagcgactctaatgaatgacaaaggttactatgtaattaagaaagccaatcttcaacacacatgtttggtagagactaggaagcaatacatgaagaaggcaacatcaaaggtaaatgcatatgtatttaaggcaaaatacagtgaaccttcaaatggtcttgtcccgctggatcttgagcaacttgtactagaagatttgagggtttttgcgtcatacacaaagtgttagagaggtagggaatcagctttaacagatgtggccgggagtgatgaagagtcttacagcaatttggctgaatatttgcatcttctaaagttaacaaatccgagaactataacacatatagaaacagaaccagatattgaagatgaaagaaaagagaggtttttgtatatgtttttagcttttggggcttcaatacaaggttttaagcatttgagaagggtattggttgtggatggatcacatttgaaaggaaagcacaagggcattttactcacaacaagtggtcaagatgcaaacttccaagtgtatccactcgcatttgctgtggtggatagcgagaatgatgatgcatgaacttggttctttacaaagttggagcggataatagctgacagcaacacactcactatattatcagataggcacgaatcgataaaggtaggggtgaagaaggtatttccgcaagcacatcatggtgcatgtattattcacctatgtaggaatatacaagcaaggttcaagaacagaggattgacgcagttagtgaaaaacgctggatatgagtttacgagtggaaagtttaaaacgctttataatcagattaatgccattaaccccctttgcataaagtatctacacgacgtagggatggctcattggacaaggctatatttccctggccagcgtttcaatctgatgactagcaatattgctgaaacgttaaacaaggcgttgttcaaggggagatcgtcacatattgtggaattgctaagatttattaggtctatgatgacatgttggttcaacgcgcgtcggaagaagtcacaagcacattcaggtccagtaccttcggaggttgacaagc

SEQ ID NO: 164573 - DNA, 1683 bp, Arabidopsis thaliana landsberg
agctcctggcggctccaatggtggcagtttcggtttctcaattcctccttcaagtcatctccatggttatggctggtcatttggacgagctctcgctctcagctgttgcaattgccacttccctcaccaatgtcactggtttcagcctcatcgttgggtttgcaggtgcgttagacactctttgcggtcaagcttttggagcagaacaatttggaaaaattggtgcatacacttacagctcaatgctctgtcttctcgttttctgttttccaatctctattgtatggtttttcatggacaagctcttggagattttccatcaagatcctctcatctctcaattagcttgcagatactcaatctggctcataccggctttattcggattcactcttcttcaacctatgactcggtatttccagtcacaaggaataactcttcctctcttcgtgagctctcttggagctctttgttttcacattcctttctgttggcttcttgtctataaactgaaatttggaatagttggcgccgctttgtccatcggtttttcatattggctcaacgtatttttgctttggattttcatgagatactctgctttgcatcgtgaaatgaagaatcttggtttgcaagaactcatctcgagcatgaagcagttcatcgccctcgcgatcccctctgcaatgatgatatggtaatttacatatctacatccaaaaaaaaacaaatctcagcaagatttaaaagcttcttggtctgactctgatctacaatgaatccataaatccttttgctctttgctcttccatattatgtgtgtaagtaaagcctgaaatggcggtcgtttgagattctactactaatgtctggactcttaccaaactcaaagctcgaaacatcggtgatatccatttggtacatacataacattttgtaaaataattcaaacagtcaaaaagcttgtgatattcctaacttttattcatggaacagcctcacaacatcggctgtgcatttcgttctggtgaatgcgataggagcatccgcaaggttttatagatttcaattgttcacaagaatctgattttttcatgtaacatagtatctcttaacctattttatcctgtttaacactatagcacacatgtctcaaacgagctaggagctggaaatcatagggcagctcgagccgcggttaattctgccattttccttggtggtgttggtgcattaataacaaccatcacactttacagttaccgaaaaagttggggttatgtattcagcaacgagagagaagtggttcgctacgcaacccaaatcacacccattctctgcctatccattttcgttaacagctttctcgccgtgctctcaggtaagacgattatactttgtttcttgaaccccaagaaactaggttcaaatcaagaattctttcatatttcaggggttgccagaggatcagggtggcaacgtataggaggttatgcaagcttaggatcatattatcttgtcggaatcccgttaggatggttcttgtgttttgtcatgaaattgagagggaaaggactttggattggtatactcatagcctccactatccaactcattgtttttgctcttgtcaccttcttcaccaattgggaacaagaggtatataaattactaatcatttta

SEQ ID NO: 164574 - DNA, 1166 bp, Arabidopsis thaliana landsberg
aaagttggaacaatttatctaaaagtgagagctttacgattgtgcttattggtagagcagcaacaagagaagagaagactatgatagtcgatgtgatgcctcacaaacttaatttaatgagtattgtcatcgacgacgttactccatctgcagagtttaaaggtcagtttagtttacttcacaagaactaccgtataaatcaagtcttacactatgagggtttgttgttatgcattatgaaagatcctactaggattgtggtttggaatccgtatttgggacaaacaaggtggatccaactcaggtattttcaccgtccacatggaatagaccatttcagatatgctctcggatacgcggataaggaatcttgtagtagccttaaattcttaaggtttttagattatttctacaaagcacccgaagaggaatttttttgggtatgaaatctacgattttgactctggtttatggacaactcttaatgtcactccacattggcgaatagcgttttgtaacagtggcgtttctcgttaagggaagcacgtactggtgtgctgcaaaaaggaacgtagatgtaaatgaagtctttgctaatcgcttaatctgttttgattttacaagtgagagatttggtcctcttctgcctctgccgtttagtggtgggcatattgactgtatgacgttatcttgtgttagagaagagaagcgtgcggttttacttcagcacgatgaatcaaatccatatgagcttgacttatggattacgaccaagattgagactggagaggtgttgtggagcaagttcttgagagtggaaacagctggatttgatagttatgttcctattataaatggcagtttcttcattgacgaggagaagaaactcgctgttgtttttgaatatgggaatcgccacacaattaacatcattggagaggctggacacttgagggcattggatctcgttggagattatggagaccaaagatgtaagacagatctgtgctcttatgttccaagtttagtgcatatcaagcaacctgaaggaggggaaagggaagaagaaagcgaattggagaagcttcgatatgatgaaaacatgtcgagacttgtcttacttgaaacgaatccatgagagcaacatgcatgaggagataacaaga

SEQ ID NO: 164575 - DNA, 401 bp, Arabidopsis thaliana landsberg
gagtgcggaaggtaatcgccgagtccctgtgtgtcgaccttgaagacgtgacacttaagtcgggtctcatcacggacctcggggccgaatctatcgacttcctcgacataatgtttcgattagaaaaagagttcgaaatcaagattcctcagcgtgagatcgagcgtcaggcccgtggtggactcgaaccagaggagtttgaagtagatggcgtactccaagcgaaaggcatcgagcggctcaaagaactcctaccggaaattgatcctggtgcctggcgtgaaggtatggcccttcgtgagttgccggcgctttttaccgtggaggtattctgcggcattgttaagcggaaactggatggcagtctctttgccagtgctggagacggcgcgactacggag

SEQ ID NO: 164576 - DNA, 2854 bp, Arabidopsis thaliana landsberg
tcatttggcacgcatacgatcgatgatgatgtcatattaatgtttcttgcttgatgtgacatatacatgattgatatagttgtagaagattactacaaatgtgataagttgcagaatcgagcttcagtgtcgatcgacaccctttctatgtcgattgacactcacttttcagaggaagttgttattcgtagttgcgcgatggtgtcgatcggcactactgaaattgtcgatcgacaccctcttgatcatacaagaaattggtcaccaactgagaattgcgccaccacaacggtcgagaaggactacccatggtatggtgacattgttaattacctagctgcagatgtggagccggataattttaaagattacaacaagaagagattcctaagagagatttggcgatattattgggatgaaccttatctttataagcattgttctgatggagtttataggagatgcattgctgcaacagaggttcctgatatactatcgcattgtcacagctctagctatggacgacattttgcaaccttcaatacagtatccaaagttcttcaagcaggcttttgatggcctataatgttttgggatgctcagaagttcatatcgcagtgtgatccttttcagaaaaggggaaagatcagcaagcgtactgagatgccttagaaatttatcctcgaagtggaagtcttcgattgttggggtatagatttcacgggacccttcccaccttccaacaagaatctctacatcctagtagctgtcgattatgtctccaagtgagtagaggctatagctagcccaaagaatgatttaacagttgtcatgaaactttttaagtctatcatcttccctcgtcttcgagtgtcaggcattgttaccagtaacaggggtaagcatttaattaacaagattcttgcgaaattgcttattcagtatggagttcagcatcaagttgctactccctaccatccacaaacgagcggacaggttgaggtttccaacaggcagattaaagagattcttgagaagatagtgggaaaatcgaaaaaagagtggtcctataagttagatgatgcactatgggcttacagaacagctttcaaaactccacttgggaccacacattttcatcttctctacggtaaagcttgtcatcttccagtggaattagagcacaaagcagcttgggtagtcaagatgatgaatttcgacatcaaatcagctggagaaaggagacatatacagttgaatgagcttgatgagatacgaattcatgcatatgacaactcaaagctctacaaggaatgcacaaaggcttaccacgacaagaagatcctcactcgaacctttgagcctaatgaccaggtacttctttatgattctagattgacattgtttcatggaaaattgtcttctcgttggtcaggtccctacatagtccattcggttaggccatatggaaccatcgtttttacagataacaatggaagatcatttgatgtgaatggacagagagtcaaactctactgggctgaaggcgagattccagtagaaaagcctttggatcttcaagacccacctgttgattaagcaactgcaaagtcaagctattgactataaacaagcgcttagtggaaggcaacccactagtaagtattcctctttttcattatttcattcatttgagtttaacttaggatttttgtttttatagaattttattcagattaaaaagaaaaataaaaaagggtgtcaaccaaacgcgatggtatcgatcgacaccattcgagtgtcgatcgacaccattattttccatgtaagtcgacataacctaaacttcatcttcttcatttcatttttcttccaaaccgccgttttcactcaaatctctctaaattcttcgatttgtaggcagtacgatttgtatcatgagctagttagacaatgcatggcttttgttagggtctactatttgaatgacaggaaacgcaatgctcaggaaggagctcttatcttcttcatcctcggtgtcagatacagtctaccactcagagtattgtgcgacatttatggctttgacaatgatctcactgaaggttcgttgcttggacagtttaaagatgcttagattttttggagcaggtttggcaatggaatttatgattccaaggatgcagttcactcagagattcgtcaccctgtttctgggatatttggttaggctgattagtagcacactgttgtgcaagatgaagcctggcaagatgagactttctatgctgttgttgctctatcatgttgttcatgatttctttcctaacagctttggagttgaggaagttgaccgcgatgtcaactttggcgttgtgtttgctcatcacttggtctcactcaagaccaagccctttacatgtaaagggaagaaatctaagagagttggcagtcttctcactcctatatttgagcaatttcgcatcaactttgaaggagaagaggtcaacaccacgagattcacaatggatgaaagttatcttaagaactttcacaggctgaaaggcaacttcctttggtgtttcagagatgagacacgacaccatatgattcagttaccttgccctgcacttacagagattacaggagagcatgaggagattggttttcatcatgatccttctcgtctgcattccgcaccatgctccaggacacaaagacgttcaggttcaggatccgcaccgactcagactgaggatgagttcattaaccctactggggtccgagagttggatcttcttctttagctctaccatatgagctgccttctcctcctcctatcccgatggagcca

SEQ ID NO: 164577 - DNA, 930 bp, Arabidopsis thaliana landsberg
atggacttcctggcccgatcatggtcgacatcttgaacaaagtcgttgactgtcaaaaccttacttccatgcagctctctttcaaaaagatttcactcgcttgtccctcagtatgagtcactcaccctccgactcgacctctcagtatccgattcacccgtcgtcacaagcattttccgatctttattcagcggtctagtttctcttttatccaaaccggctaaaccaatcacaataaccaccctctctccgagtctccccttcaagattctctcccggttcgaccggattcgaaatctggacgtagagcttcccggcggcgatgtaaagctcgagaaaggtgcagccgttaagtggaaagctgagtttgggaaaacactcaaaagctgcgtcatcgtcgcgttccgttccgccggtaccgtgtcttctcccgtcgccgtagaaggtgagtcagacgccgagttcgtgactggactgaagacgcgcgtggtgtggactataagcgcgttgatggctgcttcgtctcgtcattacttgatgagagaagtcgtgaaggagcatgaggagatagaaagtttagttatgcgtgacaaagaaagagaagggacggtggtgatgaacgaggaagggcttaaagagttaagaaatacggaggcgcgtgtggaagacgaggagcgcgtggtaaaaaataagaggagtgttgtcccgagcgtgaggatgagtatgagacacgcgccgtctcttaaacttaagagtggtatctgtttagaatcagctactctcgtgattgttcgacctagcggagcggattttgaagttggagatgacgctgagttggcgacggaggctttcgtcggagattgtatgtacggtgaagcggtcgtcgctttgttaaagtgcaagaagaacgctttagagatgaattcgttt

SEQ ID NO: 164578 - DNA, 676 bp, Arabidopsis thaliana landsberg
atggaaagtgaacttgggttcttggtttctgttgtgatcatatgtgcagacattacagctacagtcctcgggatcgaagccgagattgctcaaagcaaggttctgttttatattaagagtgaaatgtagtttattttattttaactaccaataatcttttcttgtatttgatgtttatccttcaggcacctcatcatcatcatcaacaacattcaagacattcaggttctggatgtcgaagaagccccagcgatggagcatttgctgagggagtagctgcaatggtgcttctgtttattgtccatgtcctagctaatgtgcttggaggctgcacttacattcgctctaagcaagatttcaaaagagcaacggcgaacaagatactcgctgtggctttccttgttctctcctggtaatggaaaagataataggtttttggatttcattcaaaagacaaatttgaattatgtcagctgtttttgtttttgacatacctttgtttgtcttaggatcttttttgttgtcagctactcaacgctaatgataggaacattagccaactcgagaacgaatcgactctgcagcttgccacatcgtccgttttttcttattggaggcatattatgtcaaggacatggagtggtgacttcagcatattatgtttcagcaagtgctg

SEQ ID NO: 164579 - DNA, 491 bp, Arabidopsis thaliana landsberg
ccggcgttatgatcttttccatatcggtcatctcaattgcttcgtaatgcgcgcgccatgtgcgataaactggtagtaggtgtaactactgataaattggttagctacaaaaacaagcgatcagttattccgttctctgagcgtatggaaatcgtcaggaatataaagtgtgtcgatgccgttgttccgcagtcggatatggataagtttgctgcatgggagcggcttaaatttgatgtaatgtttgtcggtgatgattggtataacagtgacaaatggaagaccctggacaagaagtttgaggatgttggtgtgcgcatcgtatattttccttatacgcagggaacttcgtccactttgcttaatgaaaccctgttgaaactacgcaatgataagttgtgattggtgagctgatatgtgcggaatactcgcggcgtggggtgattttgaacgagggcaattcaaagcggcgctcgatacagaaatacatc

SEQ ID NO: 164580 - DNA, 4057 bp, Arabidopsis thaliana landsberg
  unsure (1)..(4057): unsure at all n locations
ctctctctcaccgtccaaccaacggtgtcccgcgccgctacctctgctgatatttgggccactcttgctggtacctatgccaaaccaagtcgtggccatatcaaacagctccaacaccaaatcaaacaatggaagaaagacacccgcaccatcgacgagtacgttcaaggctttatcaatcgatttgatcagttggcattaattggcaaaatcattgaccatgaagatcaagttgattacattctcggggtctgccagaagactacaaacccattgttgatcagatggaaggacgtggcacaccaccaagcctcagcgaaattcatgagaagctcctcaaccatgaagcaaaactcatcaccttcgctgcatttgccaatgttcctatcaccgcaaactacgctaatagccggaaccagaatcgctcctcatccaagcctgctgcaaatcaaactcaaccatggaaacaacaagctgctcgtggtcaagacacacggacttcacgaccttaccttggtaagtgtcaaatctgtggagttcaaggtcactccgcaaaacggtgtaaccaactgcagtcattcgcttctcaaccatcaccaactcaaggcttgctaccaacaccaccatatcctccatccaaatggtttcccagagccaatctagccaccactacacctccggctctcagctacaatccttgggttctcgattcaggttccacacatcacatcacaaccgatctcaacaatctctctcttcatcagccttacaatggaggagaggaggttttggtcggagatggctccggtttaaggatcactcacactggttctgcttctttaccctctttcaccaaagatttaaagcttaatgatgtgctttatgtaccctcaatacagaaaaatcttctctctgtatatcggctttgtaacgctaacaaagtttcggttgaatttttcccggctcattttcaggtgaaggatctcagaacgggggcccaattactccaaggtcgaactaacgcggagctatacgagtggcctatacacaatccatcagtcgcatcatatctcacttccaccaccacaaagcctactctacaagagtggcactctcgtctaggccacccctctcttcgcattctaaaaaccattgtttcccaattttctttaccgttttcgcaatcacaaataaactctctttgcagagattgttccattaataaaagtcacaaattacctttctctcaaacctccattctttcttctcgtcctcttgaaattttgtttagtgatgtgtggacatctcccatcatgtcaattgacaattataaatattatgttataattgttgatcattacacacgctacacttggttctatcctctcaaactaaagtctcatgtcaaagaaacatttatcaaattcaaagctctagtcgaaaataggtttcaaacaaaaattggaactttattttctgacaatggtggagaatacatagctcttcgggagtttctatcaacaaatggcataagtcatctcactactcctccacacactccagaacacaatggcctctccgaaagacgtcatcgacatattgtcgaaactgggctatctctccttactcatgcctcaatgccaaccatttattggtcctatgcactatccactgccgtttatctcatcaatagaatgccaagcgaagtcattggtggcacatctccatataagcggctctttgaaaaactccgaattatctgaaactccgtgtgtttggttgtctctgcttcccgtggctccgaccgtataccacacacaagctggatgatcgttctgctccatgtgtgttcctcggctattcgctaacacagagtgcgtatctctgcttgaatagaaccactggccgtgtctacacatcccgacacgtncagtttgtcgagaatgcctatccgtttgccaatcccaaactagatcaaatcacaatctttgaagaaacagtcccacaaatcatcaataatcaaccttgagccattccactcccgtcgtcaccgctcatacagattccgtcgtcatcaaccccgaccggagatcctcacccaccgtcgttgccctcaacgccattgaatccgacatcaccaatcacgacatcgtcgaccaatcgtgaatcttgcacaacgtcacatgaagcaaattcacctacaagtccaacaagcctaaattcacctacaattccaacaggcccaaattcacctacaattccaacaggcccaaattcacctactaccacctccaaaagcccacctacgtccaccactagcccatctcactcaagtcagcccaacaacactccaccaacctcaccatcgtcttcttcctctgttccgaatccaactccctctccctcgccatcaccacccccaccactccaaaatcaacactccatgcgaacccgagccaaaaataacataaccaaacctatcaaaaagctaaccctagccgcctctctcaaagccaaatcaaaaatcccatccactgtggctaaagctcttcgtgatccaaactggagaaatgctatgtccgaagaatttaatgctgttcttcgtaatggcacatatgagctagtcccgtcagaaccacaccaaaatattgttggtagtcgctggatttttacaattaaatataatcctgatggctctattgataggtacaaagcacgtttcgttgcaaagggcttcaatcaacaacaaggcgttgattacacagagacattcagtcccgttgtcaaatccacgacggttcggacggtccttgacattgcggttaaccgttcatgggatataagacaacttgatatcaacaacgctttcttgcaaggtcgcctcacggacgatgtttacgttgcacaaccaccaggattcatagatccagacagacccaaccatgtgtgtcacctctacaaagctctctatggtctcaaacaagctccacgtgcgtggtaccaagaattgcgctcgtatcttcttacacaaggcttcgtcaactctgtcgccgacacgtctctattcactcttcgtcacgagcgcaccatactctatgttctagtttatgtggacgatatgctcatcactggcagtgacacaaacatcatcacgcggtttattgctaatcttgcagctcggttttcacttaaggatctaggggaaatgagttattttctcgggattgaagcaactcgcacatccaaaggacttcacctaatgcaaaaacggtatgttcttgatctgttggagaaaactaatatgcttgctgcacatccggttctcactccgatgtccccgactccaaagctatcgcttacctcaggcaaaccacttgacaaaccaagtgaatatcgggccgtgcttggtagtctccaatatctcttgtttacaagaccggacattgcctatgcggtgaatcgcttgtcacaatatatgcactgtccaaccgatcttcattggcaggccgccaagcgcattcttcgatatcttgctggaacaccatctcatgggatcttcatccgagctgatacgcctctcacactacatgcttactctgatgcggattgggccggtgatattgacaactacaactctaccaatgcttacattttgtatcttgggagtaatccgatttcatggtcatccaagaagcagaaaggtgttgctcgatcatccaccgaagcagaatatcgagcagttgcgaatgccacttccgagattcgttgggtatgctccctcctcactgaacttggcatcacattgtcgtcaccgccggttgtttactgtgacaatgtaggtgctacatacctatctgctaatccggtattccactcacgaatgaaacatatagcacttgatttccactttgttcgtgaaagtgtccaagctggagctctccgtgttactcatgtctctaccaaagatcaactcgcagatgccttgacgaagcctctaccacgacaaccgttcactactctgatttccaagattggtgttgctaaagcacctccatct

SEQ ID NO: 164581 - DNA, 1230 bp, Arabidopsis thaliana landsberg
ctcaacaacagcaatcatcatccaacacgcaactatcactctcccctgacttcacctacttttaccagctttctctagaagacaggttgctgttagacagagtccaaagtatatgatatggtccaaatctaagtaagagtcaagagttagtcggcttgaagaagaacaagaaaggattcaagatttgggcactgaatataagtacaggaaactctccaaaagttgatctttcagatcagaactcttctagtgatttggatgtccttgatggtatggatttcgctttccaataggcgcaacacgtccggtttgagaaccggttattgatcaaattcttctgtatttatagataaattctatcattcttgtatataaacacagcatataagcacaaaacagtgatgtaatagttgatacagaaacaaagacactatatggaggtttagttggattttgtgtttcaggtcaacaactttcttttttctctccatcaactcctcagacaatcttaaagaagctaacaactccaggtttgtctgtctataagttctgctgtttagtaaaccggaaaatacactgggaaaactcaagaaaatggacatgaaattcgccaaaaccgggagatgtatgctcacaatcattttctgccttctggtatcatcaatttcagaggctgcacaagtaaccaaaatcaccacaccattagaaccaacaggaggagtaagcgtgaaccagaaccaaccaattcttggtcaaccttcttcttcttcacctgtaaaccagcctttaaccgggttaagccaaccattaatcggattcaatcaaccttcatcaactggtttgaagcaaccaattcttggtcagccatctacttcttcttcggtaaaccagcctttaaccgggataaatcaaccattaaccggatttaatcagccatcatcaactggactcaacaatccaattcttggtcagccatctacttcttcttcccttaaccaacctttaaccgggtttaatcaaccatcatcaactggattcaaccaaccgatttcttcgtcttcttcttcatcatcatctgctcaaaatcaaccctttacgaatcgactcaaccagaacaatctctctggcgttccatttcttaatggaaattcaaagttgaaggtctccggcacaaagattatctttatctggattggtcttttccttgctttgcacggtactgacaggaac

SEQ ID NO: 164582 - DNA, 3430 bp, Arabidopsis thaliana landsberg; identical to SEQ ID NO: 6025

SEQ ID NO: 164583 - DNA, 1770 bp, Arabidopsis thaliana landsberg
gtggttttctggttgataattggtatccatgtaacctttttggtgttcgctcaagacggagatcaatttgtgtactacgacttcaggaatgcagacctgaaccttgatggaatggcaaatacagaccatggtccattgcatctaacaaataatacaaacacgggcaccggtcacgctttctacaatattcccatcaagttcacagcgtcttcactcaagtcaatttcctttttaacaaaatttgtctttggcatctttcccgggggaaaaatctaccaacggtcacggaatggcatttgtggtatctccaaccaaagatctcaggtctgacggcagtgcaaattcaaatttaggtattttcaatagaggaaatgataacaagactacaacccatatccttgctgtagaacttgacactactaaaaactcggagtcatttgacaaaggtagggacgatgtgggtattgatattaacagtatagtctcagttgaatctgcggacgctagttactttaatgctagaaaaggaaagaatataagtctgccgcttgctagtggtaaaagtattctagtctggatagattatgatggaatagagaaagtactcaacgtaacgttagctccagtacaaactccaaagccagattcgccttacttttcaagcttcattaaaccaaaagtgccactcttgtcaagatccatcaacctttcagaaattttcactgagacgatgtatgtaggtttttctggttctacaggctcagtcaaaagtaaccagtatatccttggatggagtttcaagcaaggcggaaaagcggaaagccttgacatttcacgactttcgaatccaccaccatcgcctaaaaggtttccattaaaagaggttctaggcgctaccatatcaacaattgcttttctaactctgggaggaattgtgtatctttacaagaaaaagaagtatgcagaggtgcttgaacaatgggaaaaggaatatagtcctcaaaggtactcctttaggatcctttacaaagcaaccaaaggtttcagggagaatcagctacttggagcaggaggttttggaaaagtctataaaggaatacttccttctggtacacaaatcgcggttaagagagtctaccatgatgcagagcaaggaatgaaacagtatgtggcagagattgctagtatgggaaggctaaggcacaagaacttagttcatctccttggttactgcagaaggaaaggtgaattgcttttggtctatgattacatgccaaatggaagccttgatgactatttgttccataaaaacaagctaaaagacctcacttggtctcagagagtcaatataatcaagggagttgcctctgcccttctgtatcttcatgaagaatgggaacaagttgtactacatcgagatataaaagctagcaacattcttttagatgcggatctaaatggaaagttgggagactttgggttagccaggttccatgatcgtggtgtgaatctcgaagccacacgggtagtaggtaccattggctacatggcaccagagcttactgcaatgggagtcaccactacttgtaccgatgtctatgcttttggagcttttatccttgaagtggtatgtggaaggagaccagtagacccagatgcaccacgtgagcaggtgattttgagttaagtgggttgcgagctgcgggaaaagagatgctttaactgatactgttgacagcaaactaatagactttaaagttgaggaggcca

SEQ ID NO: 164584 - DNA, 580 bp, Arabidopsis thaliana landsberg
agacagtacgtagagtttgagctgtaagaaatgattagggtttgtttttcgtctgcacttcagtccaatgttttcaccgaaccccactactacgtgaaacccggagcctcacgtgctcttgagatctttttaccactaaattaaccagttcgtatgtaactatgtctatatatatgtataaccatatcatgtaacagttataaaccacgacaatcacaatggatgatttcaatcttcgtagcgaaaaccctaactcatcatccaccacttcctcatcctcttcctctttccaccgtcacaagagcgaaaccggaaacacaaaacggtcaaggtcaacgtccacgttatcgacggaccctcagagcgtggcggctcgcgacagacggcaccgaattagcgaccgtttcaagattttacaaagcatggtccctggtggtgcgaagatggacactgtatctatgcttgacgaagccattagctacgtcaagttcttgaaggctcagatctggtatcaccaaaacatgcttctcttcataaacgaccacgaaactacatcatcttgtacttactctcccggcgc

SEQ ID NO: 164585 - DNA, 365 bp, Arabidopsis thaliana landsberg
ttctcttctccaacgcaaagcggcgccgttcacaaaccctagatttagagctcgtgccgtcaacaaatcctccgaggtcctcttccatgtacacttccctcaaagacatcctcccttcctcctccaccaccgtcgttcccccgccatatccttccgtgtcgctccgtgctatcagtcccaccatcacgatccgcaatcgccttgtaaagcaagctgcttgctcctaccttcagccttctactccaactccttcctccaacccttcattcctccgccgtgtctcctcctccttcatccgcctcgtctccgccttctttgatgctctcctccgcatcttcccatctcctcagaaaatctttagggct

SEQ ID NO: 164586 - DNA, 3183 bp, Arabidopsis thaliana landsberg; identical to SEQ ID NO: 38456

SEQ ID NO: 164587 - DNA, 506 bp, Arabidopsis thaliana landsberg
  unsure (1)..(506): unsure at all n locations
cgaaaaaanacacgcagaggaacacgcaaaaatgaacccagaagaggaaaagcagccaaacaagaccaagcaagccggagcaacaccaaagaaaccgccacagaagcacggggacgggagaaacccaggcccaccgcaggaacaagaggaaacccgggggaacaagaagaggaacacccaaagccgcccaaaccgcagcaggaaacgctacaccgagcagaagcggancaaggcaagcaacgagccgaagaaaggagaaaaggccccggacacggaagagatgcggcacaacgagctaaacgaagaagcggcaaaccacaaagagacgaacgagagggaaccccgatgccacacaagggcagaagaccccccaaaaaaagacgcgaaaagaaccaaaaaaaggcagaaagggacacaagagaaaaaaaagaaccaacgacccgagcaaacaaaacaaccatggatcgagagaaagacaaagcaacaacccggacaccacagcggaa

SEQ ID NO: 164588 - DNA, 441 bp, Arabidopsis thaliana landsberg
  unsure (1)..(441): unsure at all n locations
gatctcaagctcgccgccaacggcggcaggaccatcgcgctgcgttcttacaagaagccgctggtggtctacttctacccgaaggacaacacgccgggctgcacgcaggaaggccaggacttccgcgatctgtatccgcaattcgtgaagaccggcgcggacgtgctcggcgtgtcgcgcgacagtgtgaaatcgcacgacaacttcatcgccaaacacgaattcccgttcgcgttgctgtcggacggcgacgaggcgctgtgcaatgccttcgacgtcatcaaggaaannnnnnnnnnnnnnnnnnnnnnnnnnnnnnnnnnnnnnnnnnnnnnnnnnnnnnnnnnnnnnggcgtgctgcggcgcgaatggcgcggcgtgaaagtgaagaaccacgccgccgaagtgcttgccgcgctgcgcgaaatctgaacaattccg

SEQ ID NO: 164589 - DNA, 1862 bp, Arabidopsis thaliana landsberg
cttgttttgagttcttaattattgtcttttgacgtggttgtgtttttttgtgtgtgtagtggctcttgcctgctgaggcaggttacttggagactgaaggtctagagaagacatggcgagtaaagcagacagatattgccaacgaagtagatatattaagttcaagaaaccaatatgacatagtgctcccaggtatatatgctcaatagctttttctgaaagacaatcatatcttatctatgtaaaattttaagtttggttagtctgtgggagaaatatcctcattgcagtttgtgcttctaattcattttactgacaccggtgaacatatgtagattttggcccgtacaaacttgattttactgcaagtggtcggcatatgttagctggtggtcgcaaaggtcaccttgctcttttagacatgatgaatatgagcttaattaaagagattcaggtctgcttttctattttatcataatttttatcagtgcttgttatttgtaaaattttatttggttctcaacagaaattgatgatatctgcaggtaagagaaacagtacgcgatgttgcattcctgcacaatgatcaattctttgcagctgcacagaaaaagtatgtatttcaatgctaatacaataaacatttttgggccttgtgatttggaggtgcatggtctaatatcttatcttgtcgaattttggcaggtatgcttatatttatgggagagatggaactgagctgcattgtttgaaggtgagattatacatttcggttgaacaaaagaaacatatgcctagtgttcttggttattgactctaaactttgtctatcccaggaacgtggtccagtggccagacttcggttcctaaagaaccatttcctgcttgcatcagtaaacatgtctgggcagctacattatcaagatgtaacccatggaggcatggtcgctagtatccgaacaggtaaaggccgaacagatgtaatggaagtgaatccttacaatagtgttgttggcttgggacattccggtggaactgtcacaatgtggaaacccactagccaagcacctcttgtccagatgcagtgtcaccctgggccagtgtcatctgtcgcatttcatccaaatggtcatctcatggctacatccggtaaagagcgtaaaatcaagatctgggatttacgtaaattcgaggaagttcagactattcacagttttcatgcaaaaacgctgagtttcagtcagaaaggtttgctagcagctggaactggatcgtttgttcagattttaggagattcgagtggtggttcttcacataactacactagatacatgaaccactcgatggtgaaaggttatcaaatcgagaaggttatgttcagaccatatgaggatgttattggaattggtcactcgatgggttggtctagcattctaattccagggtctggagaacccaatttcgattcttgggtggctaatccatttgaaacatcgaaacagagacgggagaaggaagtccattcgcttcttgataaacttccacctgagacaatcatgctggacccttcaaagattggtgcgatgagaccctctaggaggaaagacaagccatcaagaggagagatagaagctgagaaggaggtggccatagaagcagcaaagagcactgagctgaagaacaagacgaaaggaaggaataagccgagcaagcggactaagaagaagaaagagatggtggagaatgcaaagcgaacattcccggagcaagagcacaatgccgcgattaagaagagaagaatcgtagaagatgctgctgctgagctaccaacgagtttaaaaaggtttgccaggaaaaactga

SEQ ID NO: 164590 - DNA, 480 bp, Arabidopsis thaliana landsberg
  unsure (1)..(480): unsure at all n locations
gagaacgccgtcgagcnnnnnnnnnnnnnnnnnnnnnagtccctcggcatggaggggaagatctcgaggtggttcgtcccgaccgagaagaagatacgcgtgaagggcggcaagcgcgtcgtcgaggaggagaagatctatcccggctacatcctcgtgcgcatgctcgtcgacgaggactcgtggttcgtcgtccgcaacaccccgcgcgtgacgggcttcgtgggttccggcgtcaccccggtccccatggacccggcggaggtccagggcctcatgaagcgcatgaacgcggaggcgccgaagcaccgcatcgacctcatgaaggacgatccnnnnnnnnnnnnnnnnnncccgttcaaggacctcgagggcaaggtgggcgaggtggacgaggatcgcggcaaggtgaaggtcatggtcgccatgttcggacgcgagacccccgtcgagctcgactttttgcaggttaggaccatg

SEQ ID NO: 164591 - DNA, 439 bp, Arabidopsis thaliana landsberg
aaaaaaggaaaaataatgtctagacaaattggttttgctgtagagcagcaagcacgtcaatttttaaccaacgaaggattgcaatttatccaaagtaattatacttgccgctggggagaaattgatttagtcatgattgataaaaactatttggtttttattgaggttagagctcgagtctcgttagaatatggcaatgctttagaaacaataaccaaacaaaaacaaaaaaaaattatcaaaacggccaaacattatttattgataaataagaaatatacgcattatccttgtcgttttgatgtaattagtgttcaaggaaatacgctatctattttatggataaaagatgcgtttcagtaagttgtggcaatacgtcattccgaaataccgtgagcgattgccgtttaggcgatgggtccgagatgatgttaccacc

SEQ ID NO: 164592 - DNA, 1001 bp, Arabidopsis thaliana landsberg
atgaaggtaagttaatataacaagggtaacttctcaagttctctatttaaccctcatctcccagatctcttttcaagaagacaacaatggagtgctctctctcatccatcctccttctccttgtactctgcttcactcatcccattccttctctaaccttcgagccactaatctcttctcttgatcttcatgaagaagaaagctgcccttacactgtaattgttaccacaagctgtttctctcctgattggtctagagatcaggtcactatcgctttgggtgacgccgacgataaccaggtttgatatacaaaaactctttggttgttttgttctatttgtgggtccaaatatttgttatgttcgtattatttcaaaccctgaagttatacatattccatcttgtttgatggattcacgtaagaagtttgttaaactccggataaaccaaagccattagaaccttaatgaaacttattttgaatataacagtcttattttgatggattttagtgacgatgcatgtgttatgtgtatcttattaataaatacgtatatcattgagttttgcttttaatttattaggtggtcgcaccgagactagacaaaccgctaagtggaggaggtggttttgagaaatgttcatcggacacattccaagtcaaaggtaaatgtctcaacactatctgctccgtctacatctaccgttccggtaccgacggctggatcccggagaccgtcgagatatacaaggaaggttccaaatccgtgaaattcgatttcaacaagaacgtccctgaaaacatttggtacggaaacaactattgtaacaacaccgatttgccaccgccttccccggatttccctccgttttctccatccatcccaccgccttcaccaccttattttcctcctgaatcaccttcaatcccgccgccaccaccaccatcaccgccgtctgctgcctctggacgtggaagtggtcagagtttggttgttgcg

SEQ ID NO: 164593 - DNA, 1582 bp, Arabidopsis thaliana landsberg
tttctccggaaggtggccgatacatcagcattcccggaaaaaaatcgtgcataagttacagaccgacccgagtcaaacccgtatccacacttggatcgaagccatgagggcttcttccccaacccgtacccgaccggggaaccatatctcccctcccggagtccgatgaggaggatgaatactcttcttggatggctcaacacccgtcagctttaaccatgtttgaagagatagctgaagcttcaaaagggaaacaaatcgtgatgtttctcgactatgacggtacattatcccccattgttgaaaaccctgatcgagcttacatgtctgaagaggtttgcttcccttcttacttcttcattcccttgttttaggttttttttggttttctgacaacttttgattctcagatgagagaggcagtgaaaggcgtggctagatatttcccgaccgcgattgtcactggaagatgccgtgataaggtacgttttaatatttgaataaaacatttgtttcggtttaggatctttttggttataaaaagacataactaacgtgttttttttcgtttttatatttggtaggttcgtagatttggaaacttcccggactttactatgcaggtagccatggaatggacatcaaaggaccttccaaaagatacaaacataataaggtataatcataaaaccttatatattaaagtatgttgattcataaagagactaacaagggtttaatgttttttggaacaatatagaacaataaaggagttcttttccaagcggcgaatgagtttttgcctatgattgacaaggtctcctacctttttctatttctatatttataatctatgcgtcaaattcaagctacttagtataacaacatattggtctctaactaaggaaaaaaatacgaatctcttaatcaggtctctaagtgtctagtagagaaaatgagagacatagaaggagcaaacgtcgagaacaacaagttttgtgtctccgtacattaccgttgtgttgatcaaaaggtaagaaaataaatcaagattacaaatattttcttcatagtcaaaaaagtaattataacgtatggttcatttgttttgataggactggggattggtagcgggagacgtgggatcgatattgagtgagtatccgaaactgaggttgacacaaggaagaaaagtcttagagattcgaccaaccatcaaatgggataaaggcaaagctctcgagttcttgctcgaatccttaggattcgctaactctaacgatgttttgcccatctatataggagatgatcgtacggacgaggatgctttcaaggtaaatttaccatctgcaaaattactataaaaccttaattaaatattttcattatttagaacttaattttgtagataaattaattaaaattttggttgggttcaggttttgagaaacaaaggacaaggctttggtatacttgtgtccaaaattccaaaggaaacgagtgctacatattctctacaagaaccttccgaggtaatataatattgtcttgagtttggttatactctctaatgtctgaggct

SEQ ID NO: 164594 - DNA, 2436 bp, Arabidopsis thaliana landsberg
tcggtatgatactggaccttgacaacgttgttaaaacctatatgaacactcaccagtttcagaagtctgtttgtagggagtgtgtttagcggaggagggagtgtgccgaagccatatatcagtcctgaagcttgggtgaacatggtgaatgaggtccaaaagaaagctctttcaacccgcttaggtattcccataatttacgggatcgatgctgttcatggtcacaacaccgtgtacaacgccaccattttcccgcataacgtaggcctcggagtcaccaggcaagttcttacaaaatatcccatttcaaatgaatggatagacccaaaacattgtttctttactgttgtattcatctgttagggatcctggtcttgtgaagagaattggtgaagcaactgcgcttgaagttagagcaacaggaatccaatatgtctttgctccatgcattgcagtaagtaaaatctaatctgaacataagcggaaacatcagtttttgtaattaatcactttgaacaggtgtgtagggaccctagatggggaagatgctatgagagctatagtgaggatcacaaaatagttcaacagatgactgagatcatacctggtttgcaaggtgaccttcccaccggtcaaaagggtgttcctttcgtcgctgggaagtaagtacactttactgaatctctagagaagcaaagattcatggagttagacagatgactgggtaaacttacaggaccaaagtcgcagcctgtgctaaacacttcgttggagatggaggtacattaagagggatgaacgcgaacaacacggttattaatacaaatggattgctggggattcacatgccagcttatcacgatgcggtaaacaagggcgttgcaacagttatggtatcctactcgtccataaacgggttgaaaatgcatgctaataagaaacttatcacgggtttcctcaagaacaaactcaagttcagggtaactataatcatagaaaattccagattaagcaaagcatctagaagcagccatttcagtattgacatgagaaagattttaaatctctctgcagggcattgtcatctccgactatttaggtgttgatcagatcaacacacctcttggtgctaattattcacactctgtgtatgctgctaccactgcgggactcgatatggtcagtctcaaaaatggttcttaatttcaaagatatagaaagtgattcaaattttccaatgcagttcatgggctcatcaaacttgaccaaattaatcgacgagctaaccagtcaggtgaagcgaaaattcatcccgatgagcagaatcgacgatgctgtaaagagaatcttaagagtcaaattcacaatggggctctttgagaatcccattgctgatcatagcttggccaagaagctcggtagtaaggtctgtaagataaaaaaacagttttaagatagaccccaacttaacattgaacaaactcaacaggaacacagggaactggcaagggaagcagtgaggaaatctctcgtgttgttgaagaatggtgaaaacgcagataagccgttgcttcctctgccaaagaaagccaataagatccttgtcgcaggaacacatgctgataacttgggataccaatgtggtggctggacaatcacatggcaaggccttaatggcaacaatctcaccattggtacacacacctttcctcactctattccaatgaatcatcatcatatagaagaacattagggtttctcagaacaagtgacatactctaagattcattttcataccattttttgtgtgttgtgatttcaatatgcaacactaatgaagaacatatatttaccagtctgaaattgaatgttgcaggaacaacgatcctcgccgcagtgaagaagacggtggatccgaagacgcaagttatctacaatcaaaaccccgacaccaatttcgtcaaggccggtgacttcgattacgcaatcgtggccgtcggagagaaaccgtacgcggagggattcggagacagtacgaacttaaccatatcggaaccaggtccgagcacgatcgggaacgtgtgcgcatcggtgaaatgtgtggtggtggttgtatcgggacgtccggtggtgatgcagccgtacatttcgaacatcgatgctctagtggcggcgtggcttccgggaacggaaggtcaaggagtggctgatgttttgttcggagattatggattcaccgggaaattggctcggacgtggtttaagacagtggatcagttgccgatgaacgttggtgacccgcattacgacccgttgtacccgtttggattcgggttgatcactaaaccaaattaacggttttcgattcggtaatttcggttcattaataagattgttgcgccaaaacttaaaatggcaaaatgttaaaataataat

SEQ ID NO: 164595 - DNA, 2299 bp, Arabidopsis thaliana landsberg
ctagaataagacgtcaaggaacatgaaagcaatttactcttacttgatcaaacccacgaagaagatttatcggagtagaaggagaggtccgaactggaagctgctttaaaggaaaaacgaactcgcttagctgcccttccaacttcatccttcaatccccagcactttgaagagttctttaccgaatctcctcctttgagtgaatcaggcttagattgggatgttaagcttttatatcttaaaccttattacctattattattgtaatcacgtttgctaatttgcaaaactcgcttcaggttctagcgaacccacagaacccgaggtgtttgccacaccgataaaaacaaccgagctagtcaccactctacctgaggtcccgtcgtctataaacaatgagacggtggtcattccggatgacaagaatgaatatggtcccgagccgggggcctccaccgagcaacctcttgccgacgaaccgaccgagcccgagcatgcttccatcgaccatcaatcctgagctagttcacgttgggtccgagttgactgaagactcatagtggctgtatccacttaatgtgggttgtcccaaaaactttgaagttattttttgaactaatttgtttatcgctattcataggaggcttcttattttcgaacaagtatttgcctgaagaggcttttaaacctttatgactatgatcccgaggggattattttatatagaaagcggatttacaaagtccgttcttttaagtatattatggccatgtggctaagtttcaagatttttgggttgatcagacctttctcttaaaacgcgagaaccgagctcgtttttagttgcgaatttcccaactcgggtttaatcaatttggctttttactgggcttgggcctcaactattcttctttgtatttaatgagtcttttgtctttaatgcgacggttgccatttcctttctcgaaaaacaggaaaaagcttcacgcctttgaggctataattgctttttctggatttcaaaaaatggtttaaaccattcggacacgccacaattattaaatttgtggttccaaggaaaaccctaattcactataaataagagtacaatttgccattaaattttttcaagcatgatctcagagatttacttggtaaacacttcaaggatggaaaacgaaggagcttccaccgtttgtcctctcgatcctgacagcctattgtttttattcggtgacggtttcgaaccggccgacattttctttccgcacgccgcctttcattttcctctgaaggataagaaagagacgtaggacttcatgtataaggtagtgatttatccttctttctcttaaaaatctctcttttcttctcatactaaacgattcttgtgctaggtcgtcgacaaacatcgccgtttgtgcaatgagaggcagcgtttaggccttaagaggcaaacgctgaggctcgcatcgctcgagtagaaaggaaggtgagggccatggagagtgatccctttcaatgggagtggaggaacttcgactgcgtagccatgatcccgactatgctccggatgtacctccgcgcttgtggtcaagtttccggtcccgtaaatgctcctgtcgaggtgatcccatccgacagtgaggaggacgacgacgaggaggaggatagcaacccctggaagcgtgtcaagaatgacttcgaggcggacgacaaaaatgaagcgtccacttcgaaccccgaaccggcgttgaaggagcctgttcgtgagcctcttccataaatgtcctttgaactcgctacttactttattgttttttatttatttccttttgaacttgctatgggctccggcccatttttaattcatggaaactttcctattttcttgatttcaaaatatttgttttggagatatgttataaatgctgggaagacttgaaggcgtgagtctttccacgaatcactcagatctcgaatggaattgcgatcttaaaatccctataaatttcaactcttaagttctctttatttttcatctaaactttcttttctttttgcagctatggagtttaaccttcgatgtttaaaatccatgccatacttttcgagggtcgggatgatggacgaagacatcccaaacgtgcctggaagagggccttctccacctcgtggcttcttcaggtccctaatccgaactcaatgtgcactgatcaagggacttttggatagagaccaaaagatcacgatggctttcataacagctcttacgggtcagaaagataagcgtgcttag

SEQ ID NO: 164596 - DNA, 4543 bp, Arabidopsis thaliana landsberg
  unsure (1)..(4543): unsure at all n locations
ggcagcctaaagcctaaacctggtgattatgctcagtattcacaactttacatagttgatatagaaaacaaagttgaaattagagctactgtcaccaagtaatcattttcgtctactatttttttttcctacaaccgctcaaatctttaacaatattaacattgcctctcacgttttctgtattttgtagcaagggaaaaggtggtcagaatacagtggcaaagcagaagctaaagaaagaagttattgaagccctaattgaaatgctaaacaacgtcaacccttatgttgaaaaattcagacaatctagagagagaattcaagctgataatgatgaactgtttcacatgcggattgttgcatatcgaaagggtgttgataggaggacatacaatatgcctacatcatctaaggttgccgctttgatacctggaggttttgacccgaagatgtacgaccgagatatatatagttcttgaagaaaagactacaggtcatctaaagcggataagtcagattcatatctcctatttggcattgcaatttcctcttattttgtgctatggcaaagatggtttcactcctgatatagagaaatgcttgccaatttcatccaagaagaaaaaaaaagtgtataagcatgcgtcaatggtttgcattcaggatacaagagaggccaaacgagtgcaaaaccttgacacgctcaaagaggttgtttcaacaatttctctgtgatgcttatacaactattgaatctaactgcgtttcttatatcatgtttaatcaatctaagttacgatgtgagaactacagcagtttgaaaaaggcctctgaagctggaactacctctataaatgaagaaggtaacaaggttctaattccaacttcgttcactggaggaccacgctatatggtccagagctactacgatgcaatggctatatacaaacactatgggtttcntgatttattcatcacatttacatgtaaccctaagtggcctgagataacaagagatgttaaggaaagaggattgactgctgaacataggcctgatattgttgttaggattttcaagatcaaattagattctctcatgcatgatctaactgagaagaaaatgcttgggaagactgtcgcatgtaagttaatttaattctgtgtcattctgtacttaaactgttgatggcatttacttataataaatattgttttcttatcgcagcaatgtatgtaagttaatttaattctgtgtcattctgtacttaaactgttgatggcatttacttataataaatattgttttcttatcgcagcaatgtatacagttgaattccagaaaaaggccttctacatgcacacatccttttgtttatggactctaaaagtaaactgccaacagctgacgatattgacaagatgatttttgcggagattccggataaagaaaaggaacctgggctctatgaggttgttaagaactgcatgattcatgggccatgtggtgcagctaataagaattctccatgtatggtcgatgcaagtgtttgaaaaattatccaaaaaagtttgaggatattaccaaagttggtaaggatggttatcccatctatcgaaggaggatgacagaaggctatattgagaagggtggttttaaatgtgataatggttatgttgtcccttataataagaagctgtcacttcgatatcaagctcatatcaacgtggaatggtgtaaccagagtggttctatcaaatacttatttaagtatatcaacaaaggagcagatcgtgttgtatttattgtagagccagtcaaccaggacaaaacaacagagaatgcgacctctggagaacctccaaattctactgagaaaaaaaaggatgagatcaaagattggtttgactgcaggtaattgtttaaaccgtcacccatttcatagattggcattgttaatatgcgatatttaaacttaattttattatgtttaggtacgtatccgcgtcggaagctgtttggaggatttacaaatttccacttcaggatcgatctacagcagttcaaagactatctttccatgatgaagggaagcaacctgtttatgccaaaccagatgctgatattgaagatgtcctcgaacgtataagcaatgaagattcaatgttcatggcttggttgactttgaataagaataatgatgttggaaaaaatggtaaacgtgctagagaacttctatattctcaaatccctgcctattttacttgggatggaaagaataagcagtgggttaagagaattagaggattttctttgggtcgtattaactacgtgtgtaggaaaatggaagttgaatactatcttcgagtgcttctcaacatagtcaaagggcctatgagttnnnnnnnnnnnnnnnnnnntaatggtgtcgtatatccatcattcaaagaagcatgttttgcaagaggaattctggatgatgatcaagtttatatagatggtctacatgaagccagtcagttctgttttggagattacttgagaaatttttttgctatgttgtttttatcagattctctcgcaagacccgagtacgtatggtcagaaacatggcaccttttggcagaggatattgagaacaagaaaagagaagactttaagaatccaggtaatattttaaaatacgcaaaacgtgattcattatattagatgaacgtgaaaacgtaaatcattattcttttgtttcaaaacctaacaaagtttttctatttattattaataaacacgtgcagatctgaaacttacactggctgaaattaggaactacactctgcaagaaattgagaagattatgttacgtaacggtgcaacactcaaagaaattcaggattttccacagccttctagagaaggtattgataactccaaccgtttagttgttgatgagctgagatataacatagattctaacttgaaagaaaagcatgatgagtggtttcaaatgctaaatacggagcatagaggcatatatgatgagataaccggtgctgttttcaatgatttgggaggtgttttttttgtttatggttttggaggaactggaaaaacttttatctggaagacattagcagctgctgttagatctagaggacagattgtgcttaatgtagcctccagcggcattgcgtctttgttgttagaaggtggacggacagcacattcaaggtttgctatcccactaaatcctgacgagttttctgtttgcaagatcacaccaaaatctgatcttgctaatttgattaaagaagcatctcttattatttgggatgaagcgccaatgatgagcaaattctgttttgagtctttagataaaagcttctgcgatatactcaataacaaagacaacaaagtttttggtggaaaggtagttgtttttggcggtgattttagacaagtacttcccgttattaatggtgcagggagagcagaaattgtgatgtcttcactcaatgcctcatacctttgggaccactgcaaggttctgaaattaacaaagaacatgcgactcctatcaggcggtttaagtagcgaggaagctaaagagatacaacagttttctgattggttattggctgtcggtgatggtaggattaatgagcctaatgatggagaggcacttattgatattccagaggaattgttgattaaagaagcaggaaacccaatagaagctatcagtaaggaaatttatggggatccgtcagaactacatatgataaatgatcctaagtttttccaaaggagagctattttagcaccaaccaatgaagacgtcaatactataaaccagtatatgctggaacatttgaaaagtaagtcagccaactaccttagatttttacggtttaaactaattgaaaactttaacggtttatgcttattacacgttgcttttgtttttttgtaggtgaagaacggatctatttaagtgctgatagcattgacccaacagattcggactcactcgccaatcctgtaattactccagattttttgaacagtatacagctgacaggtatgcctcaccacgctttacggttgaaggttggtgctcctgttatgttgcttaggaatcttgatccaaaaggaggcctttgtaatgggactaggctacagattacacaacttgccaaacaagttgttcaagccaaagtaataactggagatagaattggtgacatcgtgttgattcctctaattaaccttacaccttcagatacaaagctgccattcaagatgcgcagaaggcaatttccactgtcagttgcttttgctatgaccatcaataagagtcagggtcaatcactcgagcaagttggactctacttgcctaaacctgtattctcccatggccaactctatgttgctttgtccagggttacctccaaaacaggtttgaaaatcctaatactagacaaagacggaaacatgcaaaaacaaacaacaaatgttgttttcaaggaggttttccaaaacatagtttga

SEQ ID NO: 164597 - DNA, 3038 bp, Arabidopsis thaliana landsberg
  unsure (1)..(3038): unsure at all n locations
cctcggaagagccaatacccacttcccaatttctaaaatcagaaaacgagagctaaattctgccaaaaatctcaaaatcatcatcaaccaaagagctcaaaaacagctcaagcttaacacagattacgaaattcccagataaaacccaatcctataacacaataacaacggaagattcgaacaatataacaactccaaaacttgattcagcaaaagacccaaaaccccactctttccctcaatatcaaaggttcaaactttcaagcaaacaaaattagtaagaattagatgaacctctaaaaatggatcggagaggaagaagaattgagagacagaggaagaagacgactaattagagctgtaaagcaaaaaaaaaactataagaagaagggaaaaaaaaaaaaaaaaaaaggaatcgacttttatttttgtttgtgtgatttatggtaagagtgaagagagagaaaactagagtgagagagagagagagagagtgtgtgaagaagaagaagatgctttcttctccaaagcatacgaccaatgagaagaaacgaagtgggtctcgcacgtgccgatcttgacctcccacacgtgtcaaccgacgctttcttcataaaacccaattattattgccagctagaccttagctaagcctaatctctacaatggtagaaatcattgggcccatttttaaggcccatttacggtataagcccaccggtttgattgaaccggtttgagattagaagccattgttgtccgttgtttcaccatcgcgtttttatcgatggctacggcggcgattctttccgtgaaaccgccggcgagcttctactgcggaggaaaccgacgcgacggaggaaggggaatcaccattgcacgagtttctcgagacgaacggtttcatgagaggatcgttggtctctctgcctcgaccgtgttgttcatcggtttaagtagcctccgcgtctgttctccggcctccgctcgaatactaccaccgccgattgtcgttacagagaatgaaatcaacacagaaactgtagctggtgcgtgaaattgaacattttcgtcactcttgggatttcgatggatttgaattttgtgttccaatggaatgtttttgcaggtgaagagaatctaaatgaagttgaagatgaagaaaaactggaagctgatttcgaagcgtacaagtctaaagtgtattctcttactgtcccgctaaaactcgttgccttgcgtggctcagtgccaccatcatggatcaaggttttagtttcactgtctgtgtttccatttctattttgaatcttaagcttatagttgaaaatgtatgttgttggattctgtgaatggaatttaggagtttatgagctcacaagggaagagagtgaggttaaagactcagtttcgaggaaatcttgaagagatctttttcgatctatcgaaaccaagtaagaatggaaaaaagggggctgcttcaactgcagcagctgatatgatcagcattggtgattcttggcttagttttgctattaaggaaaagctaattgagccaatgaaagggatagaagatcaagactggtataaaggcttgagtgataaatggaaggtgagaatttaaatcagtggtttaacaatatgaatatgagtctttttgaaagaacactagcttgagagattttaataggcataatctttcatgtgttttgttttcgtactctgctagcttgggaatgttcatagggttcatttcatgacttagaaagtctcagatttatctccgcaggaactatgcgggagaaaaagctcctgacggtgaaacgtgggctgtgccataccgctggggcaccatggttatagcatacaaaaagagcaaatttcagaattataaattggcaccgatagaggttggtatactttgttgttgctaaatgctgtcttagtgttttcctatttaaaagaagtgaatatcactgaacattttgctgaatttaggactgggctgatctgtggcgacccgagcttgcagnnnnnnnnnnnnnnnnnnnnnnnnnnnnnnnnnttgttggtgctgttctcaaatacatgagagcatcatacaatacgacagacctggattcacaagttcctggcgaaagattagcagtggagaaaaatctggcatcactcatgaaacaggttattacctctttactatctctccataccctaaagagaacagatgagtttaggctgacgtgtttcactcaacctctatagttattgagaaaaaatgacaatggtggctgatcttgtttccccttttgcttatagattagactatttgatagtaacaactatttaaaagctttcaatgtcggagatgtctgggtcactgttggttggagcagcgatgttatccctgtcgcaaaacgtatgtctaatgttacagtgattgttcccaaatccggtgccaccttatgggctgatctatgggtaagttaccgtcgtaaaatcacttaacccttcatctgatatcttgaatgcttcttgttctaaagacgatataacatatctggacactaaaccgtgaagcataattgtttttcaaggcgatcccggctgtttctgactctggtaaagaagcagaacaaagaggaggacgagtccgaggcccatctccattaatcaaccagtggatagaattctgcttgcaacctgcaagatcgttaccattcacacgggaagtaattcctggtgcatctccttcagctcttgatggtcctctggttacagaacccgaaaaaacaaagaaagacagaacacaactggacacaaacctggtcacaggtgttcctcctccggagatcttgtctaagtgtgagttcttggaacctttaccagaggctacgctatcggaatatcggcttctgattgaaactgtaaggaagcaaagccaaagacctggccttgtggagaaactaaaggacattgtttcaattaaggttcgaggatttagggcaaagcttgactccgagatgaataagaacatttga

SEQ ID NO: 164598 - DNA, 268 bp, Arabidopsis thaliana landsberg
atataaggggacttagagtgaacaagtcggaactgattgatgctatcgctgcatccgctgatatcccgaaagctgctgctggccgtgcgctggacgctgtaatcgaatccgtcactggtgctctgaaggctggcgactctgttgttctggttggtttcggcaccttctccgggaccgatcgtcctgctcgtatcggtcgcaacccgcaaaccggtaagaagctggaaatcgctgctgcccaaaagccaagctttaaagctgggaaaag

SEQ ID NO: 164599 - DNA, 835 bp, Arabidopsis thaliana landsberg
atgtcgtcgagatcgagttcgtggatgttagacccgatcaccttacgaaaacttggctgtctcggccaaggcgagcatggctacatctctctcgttcaaaccaccgatggtttactcatggctaagaaaacatctctccgcaaatactcagagaatctcgagaaagaacagaggatcttacatcacttcaactcgatcaatttcaacatcgtaagacccacaagccctatcgtctattacgaaaccatgccgttcaatgtcaagatctgctcaatttacatggaaatcgcaccacatggttcactcggagacatgataatcaaagccggtgggagattaccggagaacgtgagtcgggtactgcactctcttgattcttgaatgactcaaggatcttcacaaagatggttacgttcactgtgagctcgggccagagaacatgcttatcttcccgacctacactcatggagagctttgtgaactcaaactcgctgatttcggcttagcaaaagagcctaatggacctaatccattggatggatctctcttcgagggatgtcctgcatatttggctccagaggcggtcgggccatgtcgaattatttcgtctgcggttgatatttggtctttaggtgttatggtaatcgagatgttgggggttaatggaggaggaagaaatgattacttgtcacagacgctatcatcgatggcttgggactttgtgaggaaatgcaaagtgcatgactgggagagtagagccaccgcagaggagctgctgagccatcctttcgttaaccaaagtattggggttccaccgtttgagatgctttctgtt

SEQ ID NO: 164600 - DNA, 1299 bp, Arabidopsis thaliana landsberg
gagaggaatggcgaaataacagacttatacatgcctaaggtactctatcattatctaattgtttgcctgataattctggtcagatctggtctcttggatttgatatcatttctctattttctatgttaggactacaactcgaagcagcaccgaggaatagggtttatcacattctctagtgctggttagtttttggttaaatcttctccaaacccgaattgagtttttatattttgatatcagaaccttctttacatgtttgactgtcaaactcatgggaaagaaaacataagaaactgatgaatgcgatcctggtaatatttattgtcacctgtttgtaaaaatttggatttagaagaaactttctattttctgattttagattcagtggaggatctgatggaggacactcatgatctgggaggtacaacagttgctgttgatcgggcaacaccaaaagaggatgatcatccgcctaggccaccgccagtggctagaatgtcgcgcccacccgtggctattgcaggtggatttggagctccaggtggttatggagcttatgatgcttacatttctgcagctacaagatacgcagcgcttggtgcccctactttgtatgataatcccgccacgttttatggaagtaagacgactcactatataataccaacatactagaaacaaatgaatttcagctcattaagagaattctcactttgtcttaggaggggaaccaaccacaaggggaataggaaacaagatctttgttggacggcttcctcaagaagcatccgttgatgatcttcgcgattattttgggagatttggccatattcaagatgcttatattccaaaggtgagttatataagttacattgttacactgagaacattttcagatatttttgtatatgtattgaacattcatccttttttaattaggacccaaagagaagtggacatagaggttttggatttgttacctttgctgaaaatggtgttgcagatcgtgtagcccgaagatctcatgaaatctgtggacaagaggtaaaaaaacaagcttgatacttgatgctttagacaaaaacttatctaagatgtataaagaagctacactgttttgattttcgggtttaggtagcaatagattcagcaacgcctcttgatgaagctggacctagcgttggcgcaagttccatgttaagttcttctcgtcctgaatattttggtggctatggaggtcctatgcgcgcatttggtcgaatgtatggaggcatgagcttggacgatgtgagtata

SEQ ID NO: 164601 - DNA, 529 bp, Arabidopsis thaliana landsberg
accggccaagatcctggcggccgccgtgcgcgtgttcagcgagcagggtctcgacgcgcacttcgagcgcatcgccagggaagccggcgtgggcagcggcacgctgtaccgcaacttccccacccgggaggcgctgatcgaggcggcgtaccgcagcgaggtggcgcggctgtgcgacgccgcccccggcctgctggcgacgatgcccccgcgtgccgccatgcgcgcctggatgacgctgttcatcgactacgcggtggcgaagaccggcatggcggacgcgctgcgcgccgtcgtcgcctccgggaccgacctccacggacccagccacgagatgatcagcgccgccatcaccacgctgatggacgccgggacggccgccggcgtcttccgccccgacatcctcccggccgacctgggcgccgcgctggccggcatcgccctcacctcggccggccccgaccagcgtgaccgggccgagcgcctgctcgacctgaccctcgacgggctgacgaccatgccgtcgtga

SEQ ID NO: 164602 - DNA, 507 bp, Arabidopsis thaliana landsberg; identical to SEQ ID NO: 55896
  unsure (1)..(507): unsure at all n locations

SEQ ID NO: 164603 - DNA, 2801 bp, Arabidopsis thaliana landsberg
  unsure (1)..(2801): unsure at all n locations
tggacatgaaggtacgttaccacaccttccaccgtcccgcataagaaaaacatgaggtttccattacgcctctcgaaattctgcaaaagcgagaccgagcacctcttcccgtaacgcatcgatttcatcatgggagggtctcagctctgcaacgacttaatcaattcgatcaaaactcatcagaggaaggcagattcctacacaaaaggcaagagcccgatgatgggacctgaccaccagatcatattctgggaaagcgaaaccaccgacctcgataaacctcacgatgacgctctcgttattcgaatcgatgtaggcaactacgaactctcccgtataatgatcgacacgagaagctcagttgacgtactcttttacgacgccatcaaaaaaatggggcacctcgattccgagctgcaaggcagaaaaacgccacttaccgggttcgctggagatacgaccacttctctaggaaccatccagctcccaaccgtcgcacgaggagtgaggcgactcacgaactttctcgaggtcaataagaaagcttctttcaacgcaatattgcgaagaccatggctacacgccatgaaagccgtcccttcaacctaccaccaatgcattaaattcccttccgacaagaggatagcagtcgtatacgacagccaacacagctcccgaaaatgctatatgggtggctacgagcatatcaaaaaagccaacccagtagtactaatgataaaggacaaactcgcagaaatgaaaacagtcagatccttagacccttctcaacgtggacctcgaaaatcaatgataacgcaggtctccatagatgaatcagatcttaagcgatgcgttgggatacgtcacgacctcgacccagcaatacgagaggatctcataacctttctcaaggaaaacaaannnnnnnnnnnnnnnnnaagtgcgaacctccgaggaataagcctcgaggtaacctcacacgaactcaacgtcgatccgacctaccgatctataaagcagaaacgttgcaagctaggtcctgaaagggctaaagctgtgaacgatgaggtcgacccgttgctcaagatcggatcgataagggaagtaaaataccatgattggctcaccaacccagtcgtcgttaaaaagaaaaatgggaagtagagagtatgcatcgactttacggacctgaataaggcatgtcctaaagacagtttcccactcccgcatatcgacagagtggtcgaggccactacaggacacgaaatattgtccttcatggatgcattatccgggtccaaccaaatacttatgcgcccagatgaccaagaaaaaacagccttaattaccgaccgaggtacctactgttataaagtaatgccctttggtttaagaaatgctggagctacctaccaacgattggtgaacaaaatgttcgctgaccagctaggtaaaatgatggaggtttatatcaacgacatcctggtcaagtcagctcacaaaaaagaccacgtcccgcaattaagggaatgcttcaaaatcctaaacaaattcgaaatgaagcaaaaccgaaagaggcatcgaggccaatcctaagcagattgcagccctcatcgaaatgccatcaccaaaaacggcacgggaggtccaacgactaactggtcatatcgccgccctcaacaggttcatatcaaggtccaccgacaaatgcgtccctttctatccgctcttccgaaaggataaaaagttcgactggaatgaggactgcgaacaagccttcaagcaatggaaagcatacctgtccgaaccacccatactcgcaaaatccgtagaaggagaaccgctgtacctatacacggcagtctcccgaactgcgataagcagtgtcttggtgagagaagatcacgaaggacaaaaaccgatctattacgttagtaaaacgttgatagacgctgaaactcgttatccaacaatggaaaaactggcattggccgtagtcatgtcagctcaaaaaatgagaccatatttccaatcacaccccatcgtagtgatgacgtcccaaccaatctgaactattctgcatagtctgacccaatcaggacgacttgcaaaatgggacatagagttaagcgagtacgatatagaatatcgcaccagaaccagcttgaaagcacaagtcctagccgactttgtaatcgagctcccgttagccgacctggatggaaccaactctaataagaaatggctcctccacgtcgatggctcatccaaccgacaaggatctagagtaggaatacaactcacctcccccaccggggaagtcatcgaacaatcgttccgacttggattcaacgcatcaaacaacgagtctgagtacgaagccctcattggtggcattaaactagctcaaggaatgaggatccgcaaaataaactcttatagcgactcctaacccgtcgccagtaccacggggaattcgaagctaaagacgagcgcatggaagcgtacctcgaactagtcaaaaccttggcctagcagttcgaatcgtttgaactaaccatgattcccagaggagaaaacacctcggcagacgccttggaagctctcgcttccacgtcagatcattttgtcaaaagaattattccggtcaaaggaatagaatacccaagcatcgacctaacagtcaaacacgctgggactgaacccccggcaacttcacacgagtaacctgaagcaccaccgccgcagctagagcccttgtggcagttgcagaggcaaagtgcgacggaaaaggagccaaa

SEQ ID NO: 164604 - DNA, 1353 bp, Arabidopsis thaliana landsberg
atgtccggaagaaacgagtctcaatgcgtctttgtgaagactagtattgacactcgtctggcgctcctccttgatagtgatgatagtgtagatgctttcaaaggtaactcttcataatctcttccttttttttaccttggtaactttttgtagtaactaaactctagaactcatgtttattgttgcttgtctattttacagacaaaatctgcaaagagcatgaacagtgtttcccaagtgttggcaacatcactatttctgccttgaaggtaacaacacgtttttgttttgcaaacaacaacaacaacaacttaaagaaggagtacttgtttttggtttgtaggttaacttgggtggtaatgattatcacttgtccgattgtatgattttgaaaaccgctcttcaaggcttgagtaacaaggactggtttctatcagtcgacctcgtacgtgtcgaggagaaaggtgagctgcagattggtgaagttgttgagaagaaagcgagtaagagaaaatcgaaaagtgacaacaaaagtagaaagaaaccctccatagagacaccaacagaagcaaaaggtaacctccgttatgaatagtatatcttgttgaagagtatcagtttatttaccgttgtgttgttatatctgtttttttttaaggccttgaaagtggtgagggaaatgtcactaggatgggagagaatcagcaaatttgtgatgcagatgaagaggaacctgtcgaaggtcatgccattgatggtgaggccaagcttgatcttccaaggacaatggaacaaggtaaaatagtttataatatatgtagagtgctgtgttcatttataagatgttatagactaatatgtatgatttatgtgttcaatagacgaccttcaaaaggaggtagcaaatgctgatttagtcatgagtgaccaagacaaggatcttgaaaagggtaaacttttgttctttttattttttgttatattagtagaagtttctgattcttatttctagaatctagatgttacttgtgtacacactagtaagccttgattagctttaagtgttgtagataatcttctagctgaattacaccaaactactgatgatgctaagaaagaagagatcataggtcttgttaatgctactccggaagctattgagaacggtaacttcagttcttggttgtatatacatactttttcttctgtggcataataggcaatggatcatttccattgagtcgtaattgctgaattttgtgtagaaactgagatgagtgccaaggaaaaagatggtgatgaggaggctaaatctgagaagcctaaaaagaaaaaaagagcaaagaaagtcac

SEQ ID NO: 164605 - DNA, 5634 bp, Arabidopsis thaliana landsberg
atctactttcacaacttaaagataaacggaaatcttccgagaatatcgcgagaggcgatattttcgagctctataaaaagcacctcgaaggaaaacaaaatgacacaaacaaaaacgctctcaacttcaggctatcaaaaacgctctgattttaaaggcaaaaacacttattttcatactctagaacatttgtacgatcaaatcgatactttctcattaatacaataaagaacaccgtcagtggtaattgagaattctgttgttctttgagaatctcacaaagattcgttctttgaagaaacccttaaaataaattctattgtgcaagtttcgactctcacaatttggcgctagaaggaggggagagatttctcttactcccggaacacagaaccaaccacccaattcacggtggtcaataatcaaatccccggtaacacagttgatgtagaggggaacccaatccctccgatccagacaaacgttcctgaagccgctgctctcgtgaccctagcggaactgagaagtatgatggctcaacttcaacagaaggtgaacgatcaagaacaggcaaatcaatccttggcgcaacaactcgaagcagctacctcccaaggacagatcaggattactcgtttcggcgcgaggcatcttcacgatcgacgagcagcagcagatctcaaccccacacgactcgtattcacacacctgacaatactacaaggcccatccgcagaaccgcaccggaaatcggaagagaccgaaccgagccaacgattttgggaaatcgggaaacgaatcgaacagatagaaacgaaccacagctccctcctccccgagcagaggttgccgaggccgatcagatcggggtctcggacgatgaagattcggaagagaacattaggtgggctgaggaatacgccagagaacaggaaataagcgccatcaagctctccctagccaaggcagagaacgagatgaagctcttaagatcccaaatgcataacgcagtctcctcggccccgaacatcgaccgcattctggaagagtcccacaacacaccgttcacacacaggatctccaacgcgataatctcagatccaggaaaactaagaatcgagtacttcaacggatcttccgacccgaaaggacacttgaagtcattcatcatctctgtggcccgagccaaattcagaccagaagaaagagatgccggcatctgtcacctgttcgtcgagcacttgaaagggccagccctgcattggttctcgagactcgaagggaactctgtgaatagttttcaggagctatcgacacttttcctaaagcagtattcggtgctaatcgatcccggcacatcagacgccgatctatggtcactatctcagcagcctaatgagccacttcgagatttcctcgcaaaattctgatccaccctagccaaagtagaaggaatcaacgacgtggcggctctctcggctctgaagaaagcactatggtacaaatctgaatttaaaaaggaactaaacttgtccaaactactgacaatccgagacgccctgcaccgagcctcggattatgtatcccacaaagatttagaggcagaaaaaggtaaaaccgagcaggtcaatgctgtggccaatcccgagcagaccgccctcgcggcgaaccccgaaggacctaaaagaagccggggtaatcgcgaaacagacgacgatgaaccagaagctgctcggggaaggatcttcacaattttaggggattcggctttctgtcaagacacggtagcatcaatcaaggcataccaaaggaaagccgacgcaaatcgtaactggacgcggccatttaatggatcaaatgacgaagtaacctttcacgaaagcgataccaacggtttagaccgtccacacaacgatcccttagtcattacattaaccatcggtgatttcaacgtcgaacgagtcctagtcgacacgggaagcacactggacatcattttccttacaactctgcgagaaatgaagatcgatatgacgcaaatcgtgccaactccacgacctgtgctcgggttctcaggtgaaaccactatgactctcggaaccatcaaactaccagtccgagccaaaggagtaacaaaaatcgtcgatttttctattaccgaccaaccaaccgtgtacaacgcgattttcggcaccccatggctaaatcagttccgagctgtcgcctcgacgtatcacctatgcctaaaatttcccacaaacgacggcgtgaaaaccatctagggaaaccagaaaaatgctcgcatctgcttcatggcagcgcacaagcttaggaaccccgtcactgaatcgacggccgacgcgaatcataagaaggccaaacttggccgagccaaagaaaagtcgatctccgagcagttatagcaattaaagaacgaagaagctcgggaatctaagataccaactcccgatccggtcatctcaatttgccttgacgatgcaaagcccgagcgatgcgtagaaatcggcggagatctaggagaagaactaacagctgaactcaccgctttcctcaaagagaacgtcaatactttcgcgtggtccccagaggatttgcccggagtaagtgttaacatcgtatcacacgagctcaacatcgatccaacttttaaacccatcaagcagaagaggacaaaattgggtcgggaacgagcagaagccgtaaaggccgaggtagaaaaattattgaagatcagatccatcaccgaggcgaagtaccccgactagatcgcaaacccagtcgtggtaaaaaagaaaaacggcaaatggagagtctgcgtagatttcacggacttaaacaaagcttgcccaaaggatagtttcccattaccacacatcgatcgcctcgtagaatcaacttctggaaacaagctactgtcgttcatggatgcttttgctggttacaaccagattatgatgaaccccgaagatcaagaaaaaaccgctttttacacagagcaaggaattttttgctatcgagtgatgcccttcggactcaagaacgccggggcgacctatcaacgcttcgttaacaaaattttcgccttacagatcgggaagaccacatagcccacctgcgcgaatgtttcaaacaactaaacttatacaacgtcaaacttaaccccacaaagtgtcgctttgatgtaagatccggcgagttcctcgagtacctggtcacccaccgcggcatcgaggcgaatccaaagcaaatcgaggcattgttgggaatggcatcgcctcaaaacaagcgagaggtgcggccctcaaccgtttcatctcttgatcaacagacaaatgcttagccttttacgatgtgctacggggaaacaaaaagttctagtggacgatccgatgtgaagaagcttttcaagaactcataaagtgcctagcggctccgcccatcctcgccaaacccgtaatcggagagccattgtatttgtatattccggtatcagatactgcagtcagcggagtgttagtccgagaagacagagccgaacagaagaagattttttacgtctcgcagactttcaccggcgcggaatctcgctatccgcaaatggagaaacttgctttagcagtcataatgtcggctcagaagctgcgaccctactttcaatcccattccatcatagtaaagggatccatgccactccacgccatcttacacagtccaagccaatcaggaagcctggctaaatgggcaatcgagctcatcgaataggacatcgaatatcggaacaaaacatgtgcaaaatcccaggtcctagctgattttatcgttgaactgcccactaaggaggcccaggaaaatccactcgacacaacttggctactgcacgtagacggctcgtcatcaaagcaaggctcgggtgtgggcatccacctcacctcgccaagaggagaggtcctcgagcagtcatttagattaaacttcgaggctaccaacaatgtggccgagtaagaagcgctcgttgccggacttaatctagctcggggactaaagataggaaaaatccgagctttttgcgactcccagctcgtcgcgaatcaattcaacggagaatacacagctcgggacgaaaagatggaagcctacctgattcatgttcaaaatctagcgaagaatttcgatgaattcgagttgacaaggattccacgaggagaaaatacatcggctaatgccctggctgctctagcctcgacatctgacctgagcctgaaaagagttatcccggtggaattcattgagaagccaagtattgagctcggcaaagaagaacacgtcctcccaatacaaatcagcgcggatcaagacgacccagatgactgcaactcagaatggatggaacccatcataagctacatatccgaagggaaattgccctcggacaaatggaaagctcggaaatttaaagctcaggctgcacgtttcgttctagtagatgcaaaactttacaagtggcgattatccgggcccttgatgacatgcgtggaaggagtagcgatttgcaagatcatgaaggaaattcacggtggctcgtgcgaaaatcattccgggggaagggctttagccattaaaataaaacgccaaggatttttctggccgacaatgatcaaagactgcaaaaatttttcaaaacgatgcgaaaaatgtcaaaggcatgcgccaacaatccatcagccgaccgagctctagtcatcaatcgcctcgccatatccattcatgtgttggtcgatggacataatcagacctatgcatgcctcgaagcagaaaaagttagttctcgtcttaaccaattatttctctaagtcgatagaggccgaatcttatgccagcatcaaggacactcaagtcgagagcttcgtgtggaaacatatcttatgtggccacgggataccttacgagattgttatagataacggctcacaatttatatcaacccacttccaaggcttctgcgataaatggggaatttgacttcgcaaatcaacaccgcgatatccccaaggaaacggccaagccaaggccgcaaacaaaacaatcctcgatggtttgaagaaacgtctcgccgctaaaaagggctcgtggtccgacgaactcgacggtgttctatggtcgcatctaacgacgccgcgtcgagccacgggagaaaccccattcgccttagtttacggaacggaatgtgtaattccagccgaaatgacggtaccgagcctgctgcgaagcctatctcctgagcacgaaccagataatactcgaaggttactcgacgaactcgatctaatcaatgaacgaagagattcacccttggtgtgaatacaaaattatcagaatgaaatggctcggtattacaattcgaacgtccgatagtgaattttcacgaaggggaccgagttctccgaaaagtcttccaaaacaccgtcgaaccgaacgctgggaagctaggggcgaatctggaaggaccgttcttgatctctaagttcgtccgacccagagtatatgaacttgccgacttaagcggcaaacccgttccaccatccttgaacgcaatgcacctaaaaaaatactaca

SEQ ID NO: 164606 - DNA, 5205 bp, Arabidopsis thaliana landsberg; identical to SEQ ID NO: 5636

SEQ ID NO: 164607 - DNA, 2942 bp, Arabidopsis thaliana landsberg
  unsure (1)..(2942): unsure at all n locations
tgggatataattgtctattcacaaatgtagatgtgtctgtctttagaaggtgtgatggttcactagcttttaagggtgtactagacgacaaactttatttagttgattttgcaaaagaggaggccggtatagatgcatgcttaattgctaagactagcatgggctggctgtggcatcgcgcttagcacatgtagggatgaagaaccttcacaagcttctaaagggagaacacgtgataggtttaactaatgttcaattcaaaaaagatagaccttgtgcagcttgtcaagcaggtaaacaagtggaaatgctcatcacagcaagaacgtgatgaccacatcaagacccctggagctgctgcatatggacctcttcggacccgtcgcctacctcagcatcgggggaagtaagtatggtcttgttatagttgatgatttttcccgcttcacttgggtattcttcttgcaggataaaacagaaacccaagggacccttaagcgcttcctaaggagggctcaaaacgaatttgagctcaaggtgaaaagataagaagcgacaacgggtccgagttcaagaatctttaagtggaggagtaccttgaggaggaaggaatcaagcacgagttctccgctccctagacaccacagcaaaacggtgtggtagagaggaagaacaggacgctcatagacatggtgaggacaatgcttggagagttcaagactcccgagcggttttggtcggaagccgtgaacacggcttgccacgccataaaccgagtctaccttcatcgcctcctcaagaagacttcgtatgagctactaaccggtaacaaacccaatgtatcttactttcgtgtatttgggagcaagtgctacattctagtaaagaaaggtagaaattctaagtttgctcccaaagctgtagaagggtttttgttaggttatgactcaaatacaaaggcgtatagagtcttcaacaaatcatcgggtttggttgaagtctctagcgatgttgtatttgatgagactaatggctctccaagagagcaagttgttgattatgatgatgtagatgaagaagatgttccaacagccgctatacgaaccatggcgactggagaagtgcggccacaggaacaagatgaacgagatcaaccttcctcctcaattatggtgcatctcccaaccgaagatgacgaacaggttcatcaaaaggaggcgtgtgatcaagggggagcacaagataatcacgtgatggaggaagaagcgcaaccggcacctccaaaccaagttcgagtgacgatccaaagggatcatcccgttgaccaaattctgggtgacattagcaagggagtaactactcgatctcgattagttaatttttgtgaacattactcctttgtctcttctattgagcctttcagggtagaagaggccttgctagatccggactgggtgttggccatgcaagaggagctcaacaacttcaagcgcaatgaagtttggacactggtgcctcgtccgaagcaaaatgttgtgggaaccaagtgggtgttccgcaacaaacaggacgatcacggggtggtgacgaggaacaaggctcgacttgtggcaaaaggttatgcccaagtcgcaggtttggactttgaggagacttttgctcctgtggctaggctagagtctatttgcatcttgctagcatatgccgctcaccattctttcaggttgtaccaaatggatgtgaagagcgctttcctcaatgggccgatcaaggaggaggtgtacatggagcaaccccctggcttcgaggatgaacggtaccccaaccacgtgtgtaagctctctaaggcgctctatggacttaagcaagccccaagagcatggtatgaatgccttagagactttctaattgctaatgctttcaaggttgggaaagccgatccaactctttttactaagacttgcgatggtgatctttttgtgtgccaaatttatgtcgatgacataatatttggttctactaatcaaatgtcttgtgaagagtttagcagggtgatgacacagaaatttgagatgtcgatgatgggcgagttgaactacttccttgggttccaagtgaagcaactcaaggacggcactttcatctcccaaacgaagtacacacaagatttgctaaagaggtttgggatgaaggacgccaagcccgcgaagacgccaatgggaactgacggacacactgacctcaacaaaggaggtaagtccgttgatcaaaaagcatatcggtctatgatagggtccttactttatttgtgtgctagtagaccagatattatgcttagcgtatgcatgtgtgctagatttcaatctgatccaaaggagtgtcacttagtggctgtgaagcgaattttgagatatttagtcgctacgccttgcttcgggatctggtatccaaaggggtctaactttgacttgattggatattcagactccgactatgctggatgtaaggtcgataggaagagtacatcggggacgtgccaattcttaggaaggtccctggtgtcatggaactctaagaaacaaacttccgttgccctatccatcgctgaggccgagtatnnnnnnnnnnnnnnnnnnnnngcgcaactactttggatgaggcaaaccctcagggactttggctacaatctgagcaaagtcccactcctatgtgataatgagagtgctatccgcatggcggaaaatcctgttgagcacagccgcacaaagcacatagacatccggcatcactttttgagagaccaccagcaaaagggagatatcaaagtgtttcatgttagcaccgagaaccagctagccgatatctttaccaagcctctagatgagaagaccttttgtaggttgcgtagtgagctaaatgtcttagattcgcgaaacttggat

SEQ ID NO: 164608 - DNA, 3308 bp, Arabidopsis thaliana landsberg
ggatcgatgatgatgtccctattaacgatttcttgcctgaggagaacatatacatgattgatacagctggagaagatgactgcaaatgtgataagttgcagaatcgaactttagtgtcgatcgacactccttctatgtcgatcgacactcacaattcagaggaagttgatattcgtagttgcgcaatggtgtcgatcgacaccactgaaaatgtcgatcgacaccctcctgcctcgacaccaaattggtcaccaactgagaattgagccaccacaggggtcgagaaggactacccatggtatgctgacattgttaattacctagctatagatgtggaactggataatttcacagattacaacaagaagagattcctaagagagattaggcgatattatagggaagaaccttatctttataagcattgttctgatggagtttataggagatgcatggctgcaacagaggttcctgatatactattgcattgtcacaactctagctatggtggtcattttgcaaccttcaagacagtatccaaagttcttcaagcaggcttttggtagcctataatattttgggatgctcagaagttcatatcgtaatgtgatccttgttagagaaggggaaagatcagcaagcgtaatgagatgcctcagaaatttatcctcggagttgaagtcttcgattgttgggatatagatttcatgggacccttcccaccttccaataagaatctctacatcctagtagctgtcgattatgtctccaagtgggtagaggctatagctagtccgaagaacgattcagcaatggtcataaaactcttcaaatctatcatcttccctcgttttggagtgccacgcatagtcattagtgacggaggtaagcatttcattaacaagattcttgcgaaattgcttcttcgatatggagttcagcattgagttgctactccataccatccacaaacgagtggacatgttgaagtttccaacaggcagatcaaagagattcttgagatgacagtgggaaaatcgaaaaaagagtggtcctataagttagataatgcactatgggcttacagaacagctttcaaaactccgcttgggaccacaatttttcatcttctctatggtaaagcttgtcatcttccagtggaattagagcacaaagcagcttgggcagttaagataatgaatttcgacatcaaatcagctggagaaaggagacatatacagttgaatgagcttgatgagatacgaattcatgcatatgacaactcaaagctctacaaggaatgcacaaaggcttaccacgacaagaagatcctcactcgaacctttgagcctaatgactaggtacttctttatgattctagattgacattgtttcctgcaaaattgtcttctcgttggtcaggtctatacatagtccatttggttaggccatatggaacagtcgttcttacatatacaatggatgatcatttgcaatgaatggacagaaagtcaaacactactgggctgaagccgagattccagtagaaaagcctttggatcttaaggacccacatgttgattaagcaactgcaaagtcaagctattgactataaacaagcgcttagtgggaagcaacccactaataagtatttctcttcttcatcatttcattcatttaatttttaacttaggatttttggttttataggatttatgaaagaaaaaaaaaagaaaaaaaaaagctctggtgtcgatcgacatcctcattttccaggtaagtcgatttaacctaaaacttcatcttcttcatttcagttttttccaaaccgccaaaatcactcttttctttctatatccttcgattttttaccgtttctagtgatttcaggctctaatctcattagaatttcattctctatcttccccaagtgtcaactccatcgatctgcaagatgacagggcagaaaaagaaggcgaggaagagcgttggaccttcctcctcatcagtcgcccctcacccagcatgcgcttatccactgctgtcggtctccgcccatcccaaccgatatcccaagttgcagctcctcaacctcctgttgatcaatttccatggccaaagcttccaaaagagaaaattccttctcaaagggtttgggagaaagatgtcaacagggaattcactaaaggtgactttatcaatcgccatttttctccagattaggatgattatgatactctgttctataatgcatagatgagtgtagaaattttgcctactcggtttgtggatttcggtttgatgcagcgtttgcagatagagaaatctgttttaggacttctagatgacataggtttggaatcatctattgtaggttgtactttttgtattatgagctggttaaacaattcatggcttctgttagggtatcttatgtgaatgacaggaaacacaacgctcaggaaggagctcttatcttcttcattcgcagtgtcagatacagtttaccagtgcgagatttgtgtgacatctatgggtttgacaatgatctcactggagtttccctgcctggtcagtttaaggattctcagattttctggagctggtttggtaatggaatctatgattccaaagacgcagtacattcagagatccgtcaccctgttctgggatattttgttaggctgattagtagcacactgttgtgcaagatggagcctggcaagatgagactttctgagttattattgctctataacgctcttcatgacttctttctagacagccttggatttgagcaggttgaccgtaatgtcaactttggggctgtgttcgctcatcacttggtttctctcaataccaagccctttataggtagaggacagaaatctgagagagttggcagtcttctcactcccatattcaagcatttctgcatcaactttaagggcgaagaagtcaacaccacgtgtgtcattatggatgaggcttaccggaagaactctcactggcttaaaggcaacttaatgtggtgcttcagagatgatacatgtcagcacatgattcggttacctcgccctgcacttacagatattacaggagagcatgaggagataggctttcatcctgatccttctcgtctgcatgccgcaccacgcacaaggcgatagagagtttcagcttcaggatgtgcgcctacacagaccgaggacgagttcattgaccctgctgggggtccgaaggttggatcttcctcatccgctcttccatatgagctgccttctcctccacccatcccattggagcca

SEQ ID NO: 164609 - DNA, 1884 bp, Arabidopsis thaliana landsberg
atttagtgccaccttgttggcgaattgggtcgacaatttcgataactcgctagaattggaaggtttcaagttttcactttcaaggtacccatatatagcatcgttgttgaaatttccgaatcagaagttcttaaagcttaaatctttttgttttattgtgtgtgaaagaggtgtaatgagcagacattggtgcttgtggaagccgaacaaacgaatcagcacaaaaccgaagacgtgactccaattttttttttaaaaaatcagagctttcaaattcttaacttgagtcatgcggggattgattcagacacgtcttctcgagacaggtactctaagaactgctttattcttgtcttgctatggacgagtcttttctagtgtcagcgctgggaaagggaaagtctcctatagagagagattgagaagtgggattgctgatatcaaggaagatgatgctgttgatctgtttcaagaaatgactaggtctcgtcctcgtcctagtcttattgatttcagtagattgtttagtgttgttgccagaacaaagcaatatgatcttgtgttagatctctgcacgcaaatggaattaaagggaatcgcgcataacctctacactctgagtattatgattaattgcttttgtcgatgtcgtaaactctgtttggctttttctgctatggggaagatcattaaacttgggtatgagcctgatacagtcacattttcaactttgataaacggattatgtctcgagggtagagtttccgaagctctggaattagttgatcgaatggttgaaatgggacataaacccactctcataacgcttaacactctggtcaatggactttgtctcaacggtaaagtctctgatgctgtgcttttgattgatcgaatggttgagactggctttcaacccaatgaagtaacttatggaccggttttaaatgtaatgtgtaagtccggccaaactgcccttgccatggagttgctcagaaagatggaagaaagaaagatcaagctcgatgcagtcaaatacagtatcatcattgatggtctgtgcaaagacgggagcctcgacaatgcattcaaccttttcaatgaaatggaaatcaaagggttcaaagcaaatattattatctacaccactctcattagaggcttttgtaacgctggtaaatgggatgatggtgcaaagatgttgagggagatgattggaaggaatatcattcccgatgttgtcacatttagtgctttgattgatgtttttgtgaaagaggggaagcttctataggctaaagagttgtacaatgagatgatcacaagaggtatatcacctaatattattacttataataccttgatggatgggtattgtatgcagaaccgtcttagtgaggccaacaatatgttggatcttatggttaggaataagtgcagtcctgatatcgtgacttttacaagtctcatcaaaggatattgtatggtgaaaagagttgacgatggtatgaaggtcttccgcaatatttctaagagaggcttggttgccaatgcagttacttatagcattcttgtccaagggttttgtcaatccgggaaaataaagctcgcagaggaacttttccaagaaatggtttcacacggtgttcttcctgatgttatgacgtatggtattttgcttgatggcttgtgtgacaatgggaagcttgaaaaggcattggaaatttttgaggatttacaaaagagtaagatggatcttggtattgttatgtatacaaccatcatcgaggggatgtgcaagggtggaaaagtggaagatgcctggaatttattctgtagcaaacctaataaaggagtgaagcctaatgttatgacatacaccgt

SEQ ID NO: 164610 - DNA, 1452 bp, Arabidopsis thaliana landsberg
  unsure (1)..(1452): unsure at all n locations
ttctcagatcaatcttctttttttctttctctnaagcattatgtgaaatggtttaggtggttggaagaagagttgggaagcaggagcaactccatgggacttaggaaaaccaactccggttattgcgcatctcgtcgagactggttctttgcctaatggcagagctctagttcctggttgtggaactgtatgttcttcaatactcttttgtctctttttaataagtcaacacttgaaaatccaacttccttcagcttctttgcttgatataaagttaaagtactcagctttcttgttattgaagccattttgttctttgagtttttgcttcctgctagagtactgtggccattgagtagtagtactgttagatctgttctgttgtacatacacctgccttgtgtcgttggtttttgcaggacttgctgattgtcttactaagtgtaagatgttatggtttttgtagggttatgatgtggtggcaatggcctcccctgatcgtcatgttgttggattggatatatctaaaactgcggttgagcgatcaacaaaggtttgaatagttctgatttggaaatgagatggacatgctcatgtcctcatatatgtagccttgcattgttggttttttaacaatgcttgttttgagtcggagtattgcctctgatacctatttcaaacttagtacgttttaacacattttgtttaatctcaatgcagaagttttctacattgccaaatgcaaaatacttctccttcttgagtgaagactttttcacttgggagccagctgaaaaattcgatctcattttcgattatacgtatgtaaacagtctagatgtgtgtttctggttcatacaaatgtaactttagcttatatatcactgcattttgactattctcgcagcttcttctgtnnnnnnnnnnnnnnnnnnngacctctatgggcacaacgaatggaaaaacttctgaaacctggtggagagcttataacattgatgtttcctgtgagaatcataacatctctcttttctctgatccgtttccttacatttcagtagtttctgaaaaacaatgtgtccttctgcagattgatgaacgttctggaggtcctccttatgaagtatctgtgtctgagtaagaatctactgttatctcttttactaagagcaacattactgaaatattctgcttaatattcactttgtaatctctcaatatgtagatacgagaaggttctgattccactggggtttgaggcaatctccattgttgataacgaacttgctgtaggaccacgtaaggtaaaacactaacatgaactttcaaatatgcctttagatataactcaatggagaatttcagtttcggtttaataattggaagataatgttacattggaatcaatttcagggaatggagaagcttggaagatggaagaaatcttccaca

SEQ ID NO: 164611 - DNA, 2808 bp, Arabidopsis thaliana landsberg
  unsure (1)..(2808): unsure at all n locations
gctgaatacttcaaggatcgaactgatgtccagtgcctccacaggtggcaaaaggtccttaatcctgaacttgttaaagggccctggacgaaggaggtgacatagttttttcctccactatttctataacatgtgcatcttgcactgtttgctttgaatttgcaaacatctctgatgactgtttattgctctcgtttgacatgtgtgtaggaagatgaaatgatcgttcagttaatcgaaaaatatgggccgaagaagtggtccactattgctcgatttttacctggccgtattggaaagcaatgtatagagaggtatgcttatagagacagctatttctctaacaacagtgttttactagcactatatagtttttgtcctcttttcaagattttaactgtgaaggctgttactgatataggtggcacaatcatctcaatcctgccataaacaaagaagcttggactcaagaagaagagctgcttctgattcgtgctcatcaaatatatggtaatagatgggctgagttaacaaagttcttgcctggaaggtactcatttctattgttatttgaaaaatcatcgtacatatttattcaatcttaaaggtattcttctatttgttctagcaatatagttttctgctatgttatcaacaggtcggataatggaattaaaaatcactggcacagttcagtcaagaagaaacttgattcctacatgtcgtctggccttttggatcagtaccaagccatgcctctagctccttatgagaagaagntctacattacaatcaactnttatgcaagtaatatagatggaaatggctgcctaaatggacaggcagagaacgaaatagacagccgtcaaaattcaagcatggttggctgctcactatctgcaagagactttcaaaatggaactatcaatattgggcatgatttccacccctgtggaaactctcaagagaatgagcaaactgcgtatcattcagagcagttttactatccggaattggaggatatctcagtctccatctccgaagtctcttatgacatggaagactgttcacagtttcctgatcataatgtctcgacttctccaagccaggattaccaatttgattttcaggaactatcagatatatcactcgagatgagacataatatgtcagaaataccaatgccatacaccagggagagcaaggaatctactctgggagctccaaactccacattaaatattgatgtggctacttacaccaactcagcaaacgttttgacacctgaaacggaatgttgcagggtacttttccctgatcaagagagtgaagggcacagtgtttctagatctttgacccaagagccaaacgagtttaaccaggtagaccgtcgagatcctatcttgtattcatcagcttcagacagacagatatcagaagctacaaaatctcctacgcagagctcttcttcaaggttcactgcaacggccgcctcaggaaaaggaactcttcggccagctcccttaatcatatcaccagacaagtatagcaagaagtcatctggattgatatgtcatccctttgaggtagaaccaaagtgcacaacaaatggaaatggtagcttcatatgcatcggtgatccatcaagctccacttgtgttgatgaagggaccaataactccagcgaagaagatcaatcatatcatgtgaatgatcccaaaaagttggttccagtgaatgattttgcttctctggcagaagataggccacactctctacctaagcatgagccaaacatgacaaacgagcagcatcatgaggatatgggggcatcatcaagtcttggtttcccaagcttggacttacctgtttttaactgtgatcttctacaatctaaaaatgatcctctacacgattatagcccacttggcatacgcaagctactgatgtccaccatgacgtgcatgagtccccttcgactgtgggaatctcccactgggaaaaagacgttggttggtgcacagtcaatccttaggaaacggacccgtgatctgctgacaccgttatctgagaaaagaagtgataaaaagcttgaaattgatatagcagccagtctggcaaaagacttttcacgtttagatgtgatgtttgatgagactgagaatcggcaatctaattttggaaatagcactggtgtcatccatggagatagagaaaaccactttcacattttgaatggagacggtgaagaatggagtggcaagccttcttcactctttagtcacagaatgccagaagaaaccatgcatatcagaaaatcgcttgagaaagtagaccaaatttgcatggaggcaaatgtcagggaaaaggatgattctgaacaagatgttgagaatgtaagtctctttctttcctttaaccatttgaatataagttgtgctactggtttacacaaactcagttcctttagattttgtcgccaatcatgtcattttgtcacctgtgttaaaatcttcattgttttggtgagttttaatcgtcattgtagcaatagattgtagatgtaactgacatacataacctttatgatggatcaaatcttatgcaggttgaatttttctctggtattctttctgagcacaataccggtaagccagtcctgtctactcctggtcagtcagttactaaagcagagaaggcgcaagtttcaaccccaagaaatcagttgcaaagaactctcatggctacgtctaacaaagaacatcattccccttcaagtgtttgtttagtgattaattggccatctcg

SEQ ID NO: 164612 - DNA, 1643 bp, Arabidopsis thaliana landsberg
atggaagagacagagtcgtcatcttcgaggccagagagagaacagagagaatatgatagcttcagaagaaaggctgagatagctctagggaagagagcaatgacagagaggtatgagctaatagatgaggatctggaagacaagtacatgcctgagcatactcggagagccaccaaacttctgcacaaacctgatgtattgcctgctaaggaatatattaggctcttcaagctaaacgagttctgctcgactacgctggcacagcttggattactagaggatgttcatcacatgcaccagagttgtcacctggacactctgatggcttacccataaggagcctatgaagaagaaacgattcaattcctctccacactgtggagctttaccagggtatgacctctgatgatttggaaagtgaaggattgggattcttgcgattctctgtgtatggtcaggattatatgctatcaatcaagcccttagaaggattgtttggttttcctagtggaacagatactacgctcaagtttgacagagaagagttaaaagatttatggatcaccattggcagctctgtaacgctgaattcctcaagatcctaaagcaatcagatacacagtcctgtcatcaggtacttccagtgttctgtggccaatgtcctttactcccgagagataacagggactgtcaccaattccgatatggagatgatcgctatggctctcaatggcactctccgccaaaccaagaacggtatgtctctccaaggtgaaaccaatgacacacctctctatatacctcttctgattcacttgtgtggatataagagctgggctgtcagcaataaccacaagagagcacgaggcgctctttgcataggaggtgttgcgacaccgattgtgatcgcttgtggaatcccaatcacatctgatggacttgagccacgggcaatggatatcgagcacctacatcactgcaaaatcatgtagttcgcaatggttggtgaaatgcatcgtttcaagtttgagcactctatagataagaaagccaacatccttctcctcaatcctgaggttacgttacacgcataatagagagagataacattgatttcaagcctgatcttgagaatctctattctgagaatactcaaccaacatatgaggatgttcatacagaaaaagctactgagcatgagatcggtgagatagatgaggagaagtatgactcggacatgaactatttcagtgagcatgtagctctagcgagggagagtatgagcttgggtgaagctcacaaaaacaacagcatgttgcagaagtggtgcaagtaacaagataagttactccttatgtgcctaaagactatcaagtttctgaaagacaagctaatctactccacttccactactgctattccgcagggacaacctcctcaggacatgccatcaaggagatttgatgagcctaaggcaagtcaccacaggcctgagcctagtgagaagagagtctcacatgtccctgctagacattcgtcgttcgatctagcagaagataatgccttatccacgcgaggagatcactcgaccgcggtgctggccgcagcagaagaagggaggtcgagtatactcatggcggtgc

SEQ ID NO: 164613 - DNA, 5468 bp, Arabidopsis thaliana landsberg
  unsure (1)..(5468): unsure at all n locations
atgtcccctgcgatccacgaaaccaaagacgacatgacagacacatcgagcgaaaacggatctgacgccagccaacaacagccggcacctgacgcaatgcaactgccaccggagaacccagcacccgctcaagcttgcctgaatcccgcacgcgccgaaccacgtcctgccggggtagcagccgcagtgggagacaccgcgcttggcggtgacgctgcacctgcaaaccaaggttcccatctggatgacctcgtgcaaaccatcttagatcgactcgacggtcaagacgcacgaacaaccgaacgaatcgatgcccttgttgcagcgcaagttgcttcgcaaagtcagatagaacggttacgacgccgaagacgtgactctcagcctcgcgacgatcacgaacgcctgccatctccccgaactctcgctgcggaacgttccgaaaaccggcgacaaagaccgacattagttatcgtaggatctgttgacgggcaactccgtgagaatctaccgaacgaccgcatcctaccgagcagcagaagtttaccgaaccgatcttccgacaacgtcaaccaaacacgcgacatggaaatcgaacgcatgaacacggtcatcaaagccatgtcatccaaaatgcaccgtgccattagctctgccccgaaactggagaaagtattggaagaaacacaaagatcacctttcacggcacgcatttcagaagttcgcgtccgacacataacgaaggttaagctggttccctacaacggtctcaccgacccgaagatttttctaaagtctgttagcctcgcaatcaaccgcaatcatttctctccgaagaacgcgacgcgggcagctgccagatattcgtagaaaatctgatcgacgacgcgttaaactggttttcgcgacttgaggccaatatgattgacaactatcaccaacttatggtcgtcttcttgcagcaccattcgatatttatgattaagggtgcctctaatgctgacttgtggactatgtcccaaaaagacaaggagccgttgcgagagttcaacgaacgattcaacaaggttgtttccaatattgctataaccaatgatgccgcaatcgatgccctgcagaacgctgtgtcatacgaatcgcgattcagggaagacttggtaatcacccaaccggcaacactagaggatgccctacatcgcgctaaccgatttatcaaagtcgaagaagaaaaagccgtgatggcaagacgccaacccaaagcctcgcattcaaaggacaaatcatacgacgaacactacgaacctcgtcagcattatgataaggattatagtaaatgagataagggcaagaaagcagcaacttacgcaattggtagttcagaagggcaaccttctaaaccgtggaacaagtattatcgggaaactgataccaaacgtaacccggcctactgcgagttccataaaatctccggtcattcgactgatgattgtcgacaacttcagctcctactcctctcaaaattcaagaaaggcgacctcgatgttgagtacgaacgacgtcaggtagcaacgcacaaggacaacatgtatcacttagttcagagagatgattataaccaacgtaacgagcgtcagcggacagaagagcctcggcaaaacgaatgtgcccgagatgatgattggcgaactaataccccgaaacgaaaccgcgacgagcaacggaatgataacgcccccatccctcagaacaagatccacatgatcatgggtggactaacgacttgccgcgattccgtcagatccatcagaaattatcgccgacaagctgaagtaacacgggattggctcgccaacagtactccaacttttgataacactgaaccgataatcttcactgaagccgacgcagaaggcttgacaggcccgcataatgatccgttagttgtcgagttgataatcgctgaaagcacagtcaccaaagtcctcattgacactggtagctcagtcaacgtcatcttcaaggacgttctgatgcaaatggtggtcgacttgcgctcaaccgaacacaacgttcaacctttaacggggtcgacggcgatattgttatgaccgttggaacaataatgctgtcaatctacgtcggcagaacaatgcattatttcaatttcgccgtcgtcgataaaccgatcgtttataacgttattctcgggaccccttggttacataaaatgaaagcagttgcgtctacctaccatcagtgtgtgaaattccctacaacgcatggaatttatactctaagaggcgacccgcttgttgctcgtatgtgtttcatagtcgagcgtcaactcagaaatgctaaagcttttatgataactgaacccactccttcacttgatgaacgcatagtaccaaggactgaatcggtaatccaagttaacattgacgcaattaaccctcttcgatgtgttggtattcgcgctgatttaccgcaacaattgaaggacgagctcgtacagtttttaagtcataatgtcatgaccttcgcatagtcaatggaagatatgactgttgtcgcaccatatattacttgccatgaacttaacgttgactccacgttcaaaccgatcaaacaaaaacgacgcatacttggtccggaacgcgcaaatgccgtcaatgaagaggttcagaaactactcgaagcaagatcgattgttgaagtgcgatatcccgattggctaatcaatcctgtcgttgtaaagaaaaagaacggctaatggcgagtctgcatcgacttcacagatctcaacaaagcttgtctaaaagatagtttcccactcccatatatagatcgtctcgtggaatcaacttgccggaaacgaattgctatcctttatggatgccttttcgggatacaaccaaatcatgatgaatccagaagatcaagagaaaactttatttatcacggataggggcatctattgttacaaagttatgccattctggttgaagaacgcgggagcgacctatcaacggctgtttaacaagatgttcaacgagcatctcgggaaaacaatggaagtctacatcgatgatatgctagtcaaatcattgaaaaaggaagaccatgttaagcatctagaagagtgtttcgcaatccttaaccaatatcaaatgaagctgaacccagcaaaatgtacatttggagtcccgtccggggaatttctcggttatattgtcacaaagagaggaattgaggcaaacccaaatcaaatcagcgcttttctcaacatgccatctcccaagaatttcaaggaagtacaacgattaaccggtcagattgcagcattgaatcgttttatttcgagatcgaccgataaatctttacccttttatcaaatcttaaagggtaacaaggaatttctttgggattaaaagtgcgaggaagcgtttggacagctaaaagagtatctaacttcgccacctgtattgtccaaacctgaggtagacgaaaaactctatctatatgtctcagtttcgaaccatgcgggtagcggagtcctaatctgagaaggccggtgggaacaaaaaccaatttattacataagtaaatccatgacggatcctgagaccaggtatatcgatgatggagaagcttgcacttgcagtagtaacctcagcttaggaaaacttcgtccatggttttcaatcccatccaatgcgaagtgttatcaaatcagccacttcggactattctccataccccgaaccagtccggtagattagcaaaatgggcggtggagttaagtgaatatgatatagagtacaagaaccgagtcgccatgaaagctcaagtcctagccgattttttaacggaattatccggtatcccggaggggcaagaaccagccgcaaaatcagacttggaagttgcatgttgatggatcgtcatcaaaacatggatccggggtgggaatcaagttagaatctcccacttcggaaatccttgagtagtcatttcgattgttattcaccgcatctaataatgaagcnnnnnnnnnnnnnnnnnnnnnnnnacttaggttggcacaaggagttagggccgatgaagtggtcgcctactgtgattcccaactagttgttaaccagtttaatggtgattatgaagcaaaagactcacgaatggaggcatatcttgaggtggtcaaagacttggctagaaactttaggaaattcgaactcattcgcataccacagggagaaaacaataccgcagatgcactcgcagtcctgacatcaacatccgatcatgaagtcaaaagaatcattccagtagagtgtatttcggaaaggagtattatggacaaaaaggagacattcgtcatcccaagatccctagctgcagcccgagatcgcggcgaacctactattgaattaccacctgtcaaaaggcgaaagtcaaaagaaacaactgtacctaagcctactgtgcagaaagatattgggctcgaaccagtagaagaaatcactcccgataccacagtcgaagctgaaaccgaaccgtgggttgaagaagatatactagcgccaaatgaacatcctgaatcagaagctcgagtatttcacgaaatcgaccgaattccggctaaagattggggggctgattggagggagccaataaagcattacatcgttacaggcgagctcccaaagaacagatggcaagctaggaaaatgagaatcgttagcgcgaaattttgtctatcaaagaattctttgtatagacgaggtgtaagtgatccctacttactttgcatttttgggcccgaagtcgagattgttatgagcgaagtacatgaaggcttgtgtggaagtcattcctcgggaagggctatggctttcaagataaagagaatgggttactactggcctactatgatcacggactgcgttaagtatgcccaacgatgcaaacgttgccaactccatgcaccactcattcaccaaccttcggagttattctcttcgatctccgccccataccctttcatgagatggtcaatggatatcattggaccattacataggtcgacccgaggtgtacaatatctattggttctaactgattatttttcgaagtggattgaagccgaagcgtatgtgaatattaaagattcggcagtaaagactttcatttggaagaacatcatatgcaagcacggcgttccatacgaaatagttactgacaatgggccacaatttatttcacacgagtttgaagcattttgctcggactgggggattaaagtcagttattccactccgcggtatccacaagggaacggtcaggccgaagctgcaaacaagacaattctaagcaaccttaagaaacgtttgaatcatttgaaagggggctggtatgatgaacttcagccagtcttatgggcatatcgcacaactcctaggcgttcg

SEQ ID NO: 164614 - DNA, 492 bp, Arabidopsis thaliana landsberg
gcggccgccgccgctggcctgccgcaatcgctcgccaccggctccgtcgtcgcgtccgacgcgttctttcccttccccgacgggcttatagccgccgcggaagcaggagccacggcaatcatccagcccggcggctcgacaaagactccgacgtcatcgcgccgccgacgagcgcgggcttgcgatggtgttcaccggcatgcgccatttcagacactaggatttttacaaatgaataaagacgaagccttcagctggatatcgcacaacccgatccgcctttacgccgtggcgttcgccgccggtttcctcgtcgatctgctggcgccgctcaatattttcagctacacgctgcaattcgcgatcggcatgccggttctcgttatcggtatcgcgctgatggtgtggacgagcgaagcggtgaaacgcaagccggtggtgcctgagccgccgcccgcgaattcaacgatgccggcgaagcgaagcttgtga

SEQ ID NO: 164615 - DNA, 766 bp, Arabidopsis thaliana landsberg
aaggccggcgcgttcacggtgcaggacggccgggcacaggtcgccgccgacctcgccgacgtgctccacgggcaaacgcgtgctcgacgcatgcgccgcgccgggcggcaaggcctgccacttgctggaacgcgcggccatcgacctcaccgcactgaaatccgatccgcagcgcgtggaccgcatccgccagaatttgcagcgactgcgactggacgcacgcctgctgagcggcgacgccggcgcgccgaaagggtggtggaaccgccagcttttcgatcgcattctgatcgacgcgccctgctcggccaccggcgtgctgcgccgccgccccgacgtgcgcctgcaccgtcgcgccagcgacatcgccgcgctgcaggcgcagcagcggcgcatcctcgccgcgctgtggccgctgctggccccgggcgggcggttgctctacatcacctgttcgctgctgcgcgcggagaacgaggtgatcgtgggcgagttgctggcggcacagccggatgcgcatgccgtcgcgttcgagctgcccgtcggccaagccgccgccacgggttggcagatcctgcccggcgacggcgatctcgacggcatgtactacgctgtgctggaaaaatccgcctgagcccgcccgtcatgtcgccgcccgaacctgcccgtatccagttgctcggtcgcgacaacggcgccgggctgtcgcgcgacctcagcctgctcgccgacgcgctgcgcgacagcggcgccacggtggatgcac

SEQ ID NO: 164616 - DNA, 954 bp, Arabidopsis thaliana landsberg
aattcatgttgtctctgcgtctcagccgccttgtgaaacctgcgaccgtgagatcatctcttcttctgagtctcactagtagtggcttctcaactacttcctcggtgcaaactcctcctttttccatcctccacgctagaccttgtggagcggatctcggcaaactcatcattttgactgctactgaggatctcaccactttggataagacagtgccactcgagttgatgaaggaaatggtaatgataggggcatctcatggctggatagctactttgaaggaagatggaataatgcgtctccaagacgatctcaacccagttgcatctgattcagatcccaaacacattcccctgccccctcttgtgactctgcctcattgccaaacccaagttgtcaccaacgtcgccatgtcctcctcttctcctgagcatgaagactgtgttgtcgctgtcaagttcttaggacctcagctgagcttatgtagaccagctcaaagaaactccgagtggaccaacatcagaatcgaaaacccctgcttcttctcctcccgtgtcatgttttcccagaaatacgacatgtttcgtattcctggatctggaggccacatcatcggatcatgggatctccgcagacacaagcacgatcccgtattgcagagattgcgattccgaaaactccccgagcttcccaagaccaaacgggagcttttggatttttgctgcatcaccgaacacttagtggagtccccagctggtgaaacattcttggttaagtggtacaggaaaactgcacccgcacgcaagactatcaatggtatggtgaaaatgcaaacaaaaactgtgatggtgttcaaacttgatgaaaaaggaaacgctgtatacagtcaagacattggggatctctacattttcctctcaaagtctgaacctttctgtgtccctgctagctctt

SEQ ID NO: 164617 - DNA, 1640 bp, Arabidopsis thaliana landsberg
gagatggatattccctctagcaatggcttctctcatgttcatattccttatagctgcatccttcaacatgggtctcctctcttctgtccgttctattaactcactcatcttctcctacaatctatcgaccaccaacgagacacgagtcgaatttgcagagtcaaagatcaatcagtcctcgcatcctcctccagtacagcctagtcttcctcgctttggttatctagtttcagggtcaagaggtgacttagagagtctgtggagagtgttacgaacattataccatcctaggaatcagtacgttgttcatcttgatctcgagtctcctgctgaagagaggcttgagctggctaaacgtgtgagccaagatcctgtttttagcgatgttggaaatgttcacatgatcacaaaggctaaccttgttacgtatcgaggacccacaatggtggctaacacgctccacgcttgcgctattctcttgaagcagagtaaagaatgggattggttcatcaatctcagtgcctcggattatcctctagtcactcaagatggtaatatagttatgtatctagtctctctttcttcgtttcaaataatctctgcccggattatcaatgccccttgcttgcagatctgattgatacattctcgggactggaccggaacctcaactttatcgaccacagtagcaaactaggctggaaagagtaatgattatttctctgtatagtacatttgagacatttttagttctgttttcatccaaatgcggttttttcgcagagaaaaacgagcaaagccgctgatcatagacccggggctttactccacaaagaagtcagatgtcttctgggttacacctcgcagaacaatgccaactgcattcaaactatttaccggtaattcagtgattagtgagtaatgattatgaaaaatggtgactaatctgtgaaactgcaggttccgcttggatggtcttatctcggtcgttcgtagaatattgcatttggggatgggacaatcttccacggactcttctaatgtattacaccaatttcctctctacaccggaaggatatttccatactgtcatctgcaacgctccagagtactcttccactgtgctgaaccacgacctgcatttcatctcatgggaccgccctcctaaacagcatcctcgggcgctcaccatcaacgatacagagaggatgattgcaagtggaagtgcgttttcccgcaagttcagacacaatgatcctgccttggataagatcgataaagagctgctcggtagaggtaacggaaacttcacgcctggtggttggtgtgcaggggaaccaaaatgctcgagggttggtgatccgtcgaagatcaagcccggtcctggagctaacaggcttcgtgtgcttgttagcagacttgttttgacatctaaattgactcaaaggcaatgtagataggcttcatatgcgctttagagatccatgtccaattagtctatataattctttctgcaaactgacaaacattatggaaatttctcactattttctaagccagaataataatccaattcccttcatctttccctctagcgtttctacctcttcgtcacgaaactcagggtcatcttttgttag

SEQ ID NO: 164618 - DNA, 4541 bp, Arabidopsis thaliana landsberg
  unsure (1)..(4541): unsure at all n locations
tactcaatccgcttgttccgcaccgctcgatccactgtcaccattcggtgcctacagcggattgaacggtgcagaacataaagcggtgaagaacataaagcggtacggtttagatgtggttagtgagagagaaaattattatgcggatcaagtgtgtttcgtacggaacaaacaatgcttgaatgatgactattacaagtgtggtataataataataagttattaaattttaattttaaaaaaaataatttttaagtaaaagaaacaaattattttttgaacaagattatgttatttgataagattaatacataaaataaatttcataattttctaaacttaaaaatatacatatattatatattatatatgtatatacacatatatacatacaaaactgaaaccacacctaaaccacatcataattggggtaaatcaaagcatgtgcggtttagatattcaattgaaaaaaagaagatgtcaagtgtggttccactaattaatacgcactttgcatttatcgtatgcttgaatggagacatttatttactttttcatgttccgctgaaaaatcgtgttgcacactcacaacctatatatatgcactacaaaaaaagtcttcattgatagcataccattatagcacggattactcaattgctattgaagatgtcatgtaattttcgttattatattacaacagttgataaacactaagatatagttttaatattacagcactttataaacgctgatataaagttttaatgagcgggaatacaaaatacttattccgccaaataacacttagtcattttcgagaaagaaacccaaacacaaaacaacttttcgaaaaccctaaaaaagaaaactctctcagtcctcagtcgtcagtccgacgaactcattatgccggccaccgattaaaccctccgttgcctctccgtcgccgtcgtgaatgctcttcgtgcaactggaacctctgccggcactcaatccgctctatatctgtccacttcgagatcgaatcgaaggcaagtcattttctatgttttttttttctcttttgacactcaattcgttaccctagatctgtttccatcaatctctgagactcaataaccgatgtttgtgtgattttagaattcgttaccctagatctgttttctttatcgattcttaaaattttgtctactttgcatgcctttgtttattgcgaattcatatgaatttcgtcttagtaatgttaacctgaactgctctaggtgtttgtgaacaattttgcattcgaaattgtgtatttatttgggcattagagttgcaacttttggattttggctctgtaatgtttgattttttattgagtgataaaacttgagaatttcattgtcagattgattaagcttcgtctgttgtctgaatcgtgttgttattgtcacatcgatttagtattttgttatgtcaaactatcattgattcactttcttgaatataaaacattttgctcattctatatattttgtttaatttgcaagtgttgctgagcgaatcaatggacatttggaagcttatcaattctctcttttcataggaaaggttagtatcattgtctcccttttgtgaattgttttctcttgtcatagttagtatataagtttgagttatttgtgaatgttgtctgcttgttctaagattgtttacttagaagaattcttttcagttttatttattttaaaacatgctaatataatctagtaactgtacttatctactgaattattttgatagagtgatttgtaaatgttgtattttgtgtttgtttatattgaagattcttttgagttacatttgtttaaaacctgcaactataatcgagtagcacgtacttaaaacctgaattgctttgattgattacgtttataagtttgaattatttgtgaatgttgtctacttattgtgtgattgcttatttaggagattcttttctttacacaatatggtatgctgcttaggttactaaaggtttatattacggttagcacatagaatggtggccaaggattgggtgcatcttggtaggtaaggaatataattataattataattatattccttaggtttcagtaagggttttgggcagtttacttcttttttttctctctttctacttctacaacaaagagctgatcctgcttatggagagaggggctatcaagtttgtacgggatgtggctgcggctttgggagatgatatgattgtatgtccttgcattgattgtcgtaacatagatcgtcactcaggctgtatagttgttgatcatcttgtgacaggaggaatggatgaggctattaagatgcgttgtgattggtatcatcaaggagaattggtgtctggtggtgaaagtgaaagcaaattcagtcagttgaatgatgaagtagttgagttgtatcaggctgcagagtatttggacgaagagtttgctggtatggttcacttgggcgagattgtagagcgtgacgacaagaaagaagacgagttccttgcaaagcttgcagatgctgagacacctctatatccaagttgtgttaaccatagcaagctgtccgcgattatgtctctgtttacactgaagaccaaaaatggctggtctgacaagagtcacaacgatcttctagagacattgccggagatgctatcagaggataatgtgctacactcatcactgtatgaggtgaaaaagtttttgaaatcttttgatatgggctagcaggagattcatgcatgtgttaatgattgctgcttattcagaaagaagttcaagctgcttgagaactgtcctaaatgcaatgcttcaagatggcaaactaacatgtacactggtgaattaaagaaaggagtcccacagaaagtattacactattttccaataattccgagacttaaaaggatgtttaggtctgagcaaatggctaaggatttaaggtggcatttcagtaacaagagcgaagatggcaaactccgtcaccctgtggattcagtcttgggatcagatgaatcacaaatacccatcatttgcagtagaagaaaagaatctgagacttggactttctactgatggatttaatccattcaatatgaagaatacaaggtatagttgttggctagttttgctagtaaactacaatctgccacttgacttatgcatgaagaaggagaacatcatgcttaccttgttaattcatgggcctcaccaaccgggcaatagtattgatgtctacttagagccactcatagaggatttatgccagctgtggaattatggtgattgacttatgacgctttcagtaaaacgacttttactctcaaggcaatgctgctatggaccataagtgattttcctgcttatgggaatcttgctggctgcaaagtaaagggtaaaataggctgtcttttatgtgggaaaaatacagactcgaggtggttgaagttcagcagaaaacatgtgtatatgtgccacataaaaggtcttccaccaacacatacttataggggaaagaagtcatggtttgatggaaaagctgaacacgggagaagggaaaggatactaagtggtcgtgaaatttttcataacctgaaaaacttcaaaaacaactttcgaaatctgaaacaagctgcaagaaagagaaaaaagagggaaactgttgaattagatggaaaaaaggtcgattttattcaagttgccatattgggaagaattccctgttagacataacatcgatgtaatgcatgtggagaaaaatgtggctgcgagtattgtgtcaacattgttgcattgtgggaaattaaaagatggtttaaatgctcgtagagatttggaggatcttggtattagaaaggaattgcatccttaacttagaggaaaaagaacatcttacccgcagcagtttggtctttatccaaggcagagaagaagattttttgtaggcgactttttgagttcataggcccagacgggtactgctccaatatatccagaggcgtctcattagaagaatgcaagatcacaagactgaaatcacatgattatcatgtgattatgcagcagtttcttcccattgctcttagaggtttgctgcctaaaggtcgtagggtagcaattgtacgcttatgctcgtatttcaacaagttgtgtcaacgagtaattgatagggagcaaatattggctatggaggctgagattgttgaaactctctgcatgtttgaaagatatttccctccaagtttctttgatataatggtacacttgacggttcatctaggaagggaagctcgtcttggaggaccgattcattttagatggatgtatctgttcgagaggtacatgaaagtccnnnnnnnnnnnnnnnnnnnnnnnnnnnnnnnnnnnnggtgcattgctgagtgttatcttgcagaagaatgcatccaaatttgtaatgaatttttgaagaagacgacacattttcaagagaaagcagaccgaaacatgagtacgagaaca

SEQ ID NO: 164619 - DNA, 1122 bp, Arabidopsis thaliana landsberg
  unsure (1)..(1122): unsure at all n locations
cttttttgggcatattcacactgataaatgaacacataattgaaaatgctccaacacctcgtggccatgttggatcttccgggaatgatccatccctttcttatccactactcatcgccatcctcaaggatttggaaactgttgtgnaagtggcagctgaacacttctatggagacaaaaaatggaactacattattctcactgaagctatgaagtaagcttgctttcttctgatcacttggatctacacaacctacttagttggcattttgatatcttgaaaactttgaattttcagggctgtcattaggttagccttgttccggaatagtgggtataagatgcttcttcaaggaggggaaacacctaatgaggagaaagattctaaccaatccgagtcgcaaaatagagctggtaattcgggtagaaatctcgggcctcatggtcttggaaaccaaaatcatcataatccatggaacttggaaggacgggcgatgtctgctttaagttcatttggtcagaatgcaagaacaacaacatcttctacccccggttggtctcgaagaattcaacatcagcaagcagttatagagcctccaatgatcaaggagaggcgaagaacgatgtccgagctacttactgagaagggtgttaatggagcgttgtttgcgattggtgaggttctttacataacgagaccgctcatttacgttcttttcatcagaaaatatggagtccgatcttggattccttgggctatatcgctttctgtggacacactggggatgggtcttcttgcaaattcgaagtggtggggagagaagagcaagcaagtccatttctcaggacctgaaaaggatgaggttagaaatctcttggacctcaatacaacagtaatgttgaaccgatttaactcatattcttgttacttcttcagctgaggagacgaaaactgatatgggcattgtacctcatgagagatccattcttcaccaagtacacaaggtgagtgttcttatggtttcaattatggcattttctgaaatgggaaaaattgaaaccgaattggttcatttcctcttggctcttatgttaatattagatttgagtatcctgggtttt

SEQ ID NO: 164620 - DNA, 660 bp, Arabidopsis thaliana landsberg
ggagttgatcgcctttgggatattttactcagtacgggtttggtgagcccggtaatcggttttggtcattccgggcagttgtcaattaccaatcagggttatcagttgatgagtcagtttggaagttatactaactttatcaaaaagagggaagaagcggtgcatcaagaatctggaggtgatattgctcagtttatccaaaaaaagaatgaagaggagcccgataccgaggtgcaggaaggtaatggtgatataaaaaaatcaaataacaaaaagggagaagaagggaatcaaaaaggaactgattctattgctgctcggaagaaaaaagaatgaccatgaaaatacttgataacgtgacagctggtcctgttacatttacagataatgcgctgaatgaaataaaaaaggtgctggaaggaaatgaaaatgagcaattgcacctgcgtattggtgtaaaggggggaggttgttccggcctgagctatgtattaggattagatcaacaaactgatgaagatatggaatatcaaatccaaggggttccggtgattatgaatgtagcccacggattatatttattagggatgcaaatagattatggagagggattggatgcacgtggatttatttttgaaaaccccaatgccagcagtaccc

SEQ ID NO: 164621 - DNA, 1207 bp, Arabidopsis thaliana landsberg
aaaacaaaacccgcaccagttgctctttcaaatctcaaggtccatgagcatacactcaatctcatgccaagattgatctccttcgttagagatgcttgcgggacaaaaggtgaccggcctccttatgtgtgtcatcaatgtgatttcatgattcaccaaaaatgcgctcatggaccccaggaaagtaacaccaaacgccatgaccaccgagcgtcgttcaagaatcctcttggactcggagaatggcgatgtggagtatgctttgaagagattgattggtcacgtggggcttattcttgctctgtttgtccccaatatgctattcattcactatgtgcaacaagaagagacgtatgggatgggaaagagcttaatggagtacctgaaaaggttgaatatatcgaaccattcaagagaaatgatgacaacacaatcactcattttgctcatgaacataacctcacgagcctcggtcaaggtggtgaagaaagtagcttgtgtggaggatgtgtttgtcccataggttcttgcacattctacaagtgtttagaatcgaaatgcagtttcattctccatgaaacgtgtgctaatctacgtaagaagaaacggcattttctgagcccacaacctttgacgctttgcctcgaaagttacctcctcccatattcttgcgaagcttgtcatcaagtttttttccacggatttagttactctacatatttaagaaaacgcttggacatattttgcagttcgattacagtgccatttatccatggaagtcatgatcatcatttactctacctccaacaacgatccggtgacgtgaagacttgccagagctgcggcatggatgaaacagaagttgtcataggttgtatgaaatgcgactactttttggattttcgttgtgccactctaccgttaacggtaacgcttcccaggtacgatgatcatccactcactctatgttatggtgatgaaaagccaagcggaaaatattggtgtgatatttgcgaaagagaaacaaatccaaagacttggttctacacttgtaaagattgcggagtcactttacatgtcttttgcgtagttggggatatcatatacgccaaagaagggaaacatattacctatgataataacagtttgctgtctaacaatagctcttcacgaccactttgccacaactgccataaccgttgcttta

SEQ ID NO: 164622 - DNA, 3857 bp, Arabidopsis thaliana landsberg
cgcaattccgcagcttaatcaaatgcgaatatggctcaaatgcattggcaaatgcatctagcagtgagcgatgctcccgacatggatcgcgtgatcgaagaaaccacgcgcacccctttcagggataggatcgctcattttcgcgtctaagacgtcgggagactccgtttcccggagtacgacggaacgagcgacccaaagactcacctgaaatccttccgtttcgctataactcgagcgtacctgacagacgaagaaaacgaagcaggtcattgccgtttcttcgtagaaaacctcgtaggtcacgccctcgaatggtttgctagcctcgaacggaactccattgataccttcgatcagctcgcttccgctttcttaaaacaatattcggtacttatcaaacacaggacgtctgaagccgacctctggagtctcactcaacttcagaacaaatccctgcgatcttacgtcgcaaaattcaaagcaatcaaatcgaagattgcgaacctaaacgaggaggtagccatagcagcccttcgtaacggtctgtggttttcctctaggtttcgtgaggaactcattgttaggcaaccagtctctttagctgatgcccttcacaaagctctccacttcgccaaagccgaaaaggagctcgctgtgctggccttaagattcaaagaatctaaaacgcaaaacgcttcccttgcaattaaaaaacccttcaaaaaggaaaaccaaacgcaagggcagcataccttattcgcaatagagcagctgaggacgagagtccagaacttgacctcggaaaatattgcaagtaccacaaaaaaagaggacattccactgaggagtgtcgcgccgtcaaataattaatcgcagctgggggcaaaactaaaaaaggttcaaccccaaagttgaaacccctcctcccgacgaacaggaggaggagcaaactcccaagcaaaagaaacgggaacgaacaccggatggaagtgattctcccccacctgctatgagagaacgcatagacctagtctttgcagcactcgatttaggtggcgggacaggaaggtacgtcaccacacctcccaccgccccgcataagaaaaacatgaggtttccattacgcctctcgaaattctgcagaagcgcaaccgagcacctctcccctaaacgcatcgatttcatcatgggagggtctcagctctgcaacgactcaatcaattcgatcaaaactcatcagaggaaggcagatttttacacaaaaggcaagagcccgatgatgggacctgaccaccagatcacattctgggaaagcgaaaccaccgacctcgataaacctcacgatgacgctcccgtataatgatcgacacgggaagctcagttgacgtactcttttacgacgccttcaaaagaatggggcacctcgattctgagctgcaaggcaggaaaacgtcacttaccgggttcgctggagatacgaccttttctctaggaaccatccagctcccgaccgtcgcacgaggagtgaggcgactcacaagtttcctcgcagtcaacaagaaagctcctttcaacgcaatactgggaagaccatggctacacgccatgaaagccgtcccatcaacctactaccaatgcattaaattcccctcggacaagggaatagcagtcgtgcacggcagccaacgcagctcccaaaaatgctatatgggcagctaccaccttatcagagaggctaaccccgtagtactaatgatagaagacaaactcgcggaaatgaaaacagtcagatcctctgatccttctcaacgcggacatcgaaagtcattgataacacaggtctgcatagacgaatcagatcccaaacgatgcgttgggataggtcaagacctctacccagcgatacgagatgatctcatatcctttctcaaagaaaacaaagactgctttgcctggttaagtgcgaacctccgaggaataagcctcgaggtaacctcacacgaactcaacgtcgatccgacctaccgacctataaagcagaaacatcgcaagctaggtcccgagagggctaaagctgtgcacgatgaggtcgatcgattgctcaagattggatcgataagagaagtaaaataccctgactggctcgccaacccggtcgtcgttaaaaagaaaaacgagaagtggagagtatgcattgactttatggacctgaataacgcatgtcctaaagacagtttcccactcccacatatcgaccgactggttgaggccactgcgggacacgaattgttgtccttcatggatgcattctccgggtacaaccaaatacttatgcgcccagatgaccaagaaaaaacagcttttataactgaacgaggcacctactgttataaagtaatgccctttggtttaaaaaacgctggagctacttaccaaagattggtgaatagaatgtttgccgaccagctaggtaaaatgatggaggtctatatcgacgatatgctggtcaagtcagctcgcgaaaaagaccacgtcccgtaattaagagaatgcttcaaaatcctaaacaaattcgaaatgaaggtaaaccccgagaaatgctcttccggagttccctcaggagaattcctcggatacctagtaaccaaaagaggcatcgaggccaatcctaagcagattgcagacttcatcgacatgccatcgccaaagacagtatgggaggtctaacgactaaccagccgtatcgccgcactcaacagataaatgcctccctttctatcagctcctccgaaaggataaaaagttcgattggaatgaggactgtgagcaagccttcaaacaattgaaagcgtacctgtccgaaccacccatactcgcaaaacccaaagaaggagaaccgttgtactgtacatggcagtctcccgaactgcgataagcggcgtcctggtgagagaagatcacgaaggacagaaaccgatctattacgttagtaaaacgttgatagacgctgaaactctttatccagcaatggaaaaactggcactggccgtagtcatgtcacctcgaaaactgagaccatatttccaatcacaccccatcgtggtgatgacgtcccaaccaatcagaaccattctgcatagtccaacccaatcaggacgacttgcgaaatgggccatagaattaagcgagtacgatatagaatatcgcactagaaccagcttgaaagcacaagtcctagcggactttgtaatcgagctccctgtagtggacctggatggaaccaactctaataagaaatggctcctccacgtcgatggctcctacaaccgacagggatccggagtaggaatacaactcacctcccccaccggggaagttatcgaacaatcgttccgactcggattcaacgcattaaacaacgagtctaagtacgaagccctcattgctggcattaagctagctcaaggaatggggatccgcgatatacacgcccatagcgactcccaactcgtcaccagccacttcaacggggaatatgaagctaaagacgagcgcatggaagcgtacctcgaactagtcaaaaccttgacccaacagtttgaatcgttcaaactgaccaggatccccagaggagaaaacacctctacagacgccttgacagctctcgcctccacgtcagatcctttcgtcaaaagaattataccggtcgaaggaatagaacacccgagcatcgacctaacggtcaaacatgctgggatggaaacctcggcaacttgcaacttcacacgagtaacccgaagcaccaccgccgcggctagagctctcgcagcagccgcggaggcaagtgtagcgga

SEQ ID NO: 164623 - DNA, 405 bp, Arabidopsis thaliana landsberg
ccatggtatgatgagatgaagagcgcttagaggataatgcaacaactagaagtagtctcattgatttgtggaattccggcaatttgtccttgtggtggatgcatccttgacattatctctgagaaagatggtgacaaaagaaaacgatactatgagtgcaccgattaaaaggtaaattaaagatatcatcaatcttgttttagaataattgattaagcaataagaattcatgttttgtagaatgatgggttacacattcggaaactttgggataaagctatggtagaagaggtgaataggttaagagagcaagttgataaccatcaccaaaagattcaaagcttggagtactctaaccaagaaatgcgttcggagttggatgagatccaaaaaaagatggggact

SEQ ID NO: 164624 - DNA, 700 bp, Arabidopsis thaliana landsberg
  unsure (1)..(700): unsure at all n locations
atgttgttccggtctgttcatcatattgtggctaggttcagcaactccacgagcactccgattcatcgatttttctattctccttcccttcttcgtcgtcgttcgtcttttaatgcttctttgatatctcgttgttgttcttctgtgagcgatgttgatgtggctcgagacgcggtggtgaagatcttctccttttctagagagccaaatgttgttcaaccttggcaaacaactgagaaagaatactcaagctctggtattcataaacatctctctttctctctctctcgtgtgatttctttattagacttccaaattttaaaaaatcgtatggtattgttcggctttggaatatctatgttaggatttgcaatctccgggaggaggattcttacaaacgctcatgttgtgggtgatcacttatacctgcaagtgagaaaacatggttcacccactaaatacaaagctgaagttaaagcgtttaggtatggatgtgacttagctatcttaggtattgatagtgaagagttttgggaggatataaatcctttggagcnnnnnnnnnnnnnnnnnnnnggtgaaactgtctacgctttaggttatcctcgtggtacgtcttgacccctgctcaatttttttcgcactgagtacaaataaactgaacaagaaaaaagctttgacatatgtggtattgagaaaa

SEQ ID NO: 164625 - DNA, 173 bp, Arabidopsis thaliana landsberg
tctgcatctccctactacttgcatccatcggatcatcctcatcatgttctcacacccatgttgttgaacggggagaactatgaacgatgggctaaacttactcgcaacaacttgcaagccaaacaaaagcttggcttcatccgatggcacccttacaaagccattattctgac

SEQ ID NO: 164626 - DNA, 292 bp, Arabidopsis thaliana landsberg
  unsure (1)..(292): unsure at all n locations
atcggttacgctctcgccnnnnnnnnnnnnnnnnnnnnnnnnnccgacgagagtcgacgtaccgtcctggagatcctccgggaccacccggcgaccgccggcgagctcgccgatgctctgcccatcgcccggcccggggtctcgcgtcacctgaaggtcctgcgcgaagcgggcctggtggagcgtgcgtctcgacgcgcagcgcaggatctacagcctgcggcccgaaccgctaaacagcctcgacacctggctggagagctatcgcgcgttgtggcaggcgcgcctcggg

SEQ ID NO: 164627 - DNA, 1674 bp, Arabidopsis thaliana landsberg
gcggtaaatgtgcagacatagcactggaagttcagagggaaactcaatccctctaaaccagacagacgttcctgaagacgttgctcccgtggccctagcagaactaagaagtatgatggctcaacttcagaagaaggtgaacgatcaagaacaggcaaatcgatccttggcgcaacaactcgaagcagctacctcccaaggacagatcagggctactcgtttcggcgcgaggcatcttcaggatcgacgagcggcagcagacctaaacccaacacggctcgtgttatacacgcctggcaacactcacgaggcccatctcgcgaaccatgccggagattggaagagaccgagcagagtcgacaatcttggtaaatcgggacactacgtaccgaacagaaggaaacgatccgcagctccctcttccccgagcagaaattgcttaggccgatcagatcagggtcttggacgatgaagattcagaagagaacgttcgatgggctgaggaatacgccagagaataggaaataagcgctatcatgctctccctagccaaggcagaaaacgagatgaagcttgtgagatcccaaatgcttaacgcagtctcctcggccccaaatatcgaccgcattctggaggagtcccacaacactcctttcactcgcaggatctccaacacaatatctcagatccaggaaagctaaggatcgaatacttcaatggatcctccgacccaaaaggacacttgaagtcattcataatctctgtggcccgagccaaattcagacccgacgaaagagtcgccggtctctgtcacctgttcgtcgaacacttgaaaggaccagccctggattggttctcaagactcgagggaaattccgtggacagtttttaggagctatcgacgctcttcctaaaggaatattcggtgctaatcgatcctggcacattagacgccgatcttttgtcattgtctcagccaccgaacgagccagtttgagatttcctcgcaaaattccgatctactctagccagagtcgaaggaatcaacgacgtagcggctctctctgctctgagaaggcgctgtggtacaagtaagaattccgaaaggaattaaatttgtccaaaccacaaacaatccgagatgcattacaccgagcatcggactatgttgcccatgaagaagaaatggaactgctataaaaaaggcacgagccgccgaagcaaacgcctcgtagcgaaaaatcctaacttagtgctctgaaccacaaaaagggcgctcaaggcggaacgtttgttcaccatgaaggacggaattttcccggagcccacaattaccaagctgatacacctgaggccaaggaagaggccgcgacagatgacgcggacgagaatcctacacctggacgaaggatcaacccgcaggaaacgagcaggaatactgcgacttacataagagttacgaccatcatacttctagatgtcgtagcctcggggcgaagttggcagctaagttcctagccggaaaaatcggtggaggcctaaccatcgaggacttagaagcggaaaaagccaaaaccgagcatgtcaacgctatggccaatattgagcaggcagcccccgaggcgaacctcgaaggatccaagagaggccaaggcaatcgcaaaacagacgacg

SEQ ID NO: 164628 - DNA, 396 bp, Arabidopsis thaliana landsberg
gtagtgattatagcaatgttgtgcttacacatcaagcgcaacaggtgtactatctaacatatcctcatgaaaacttgaagtcttgttgggttgtatacaaaattaatcctgaagtccatccgttacgatatgattattacaacacaaataacgaagatgatgaatttggtaaatatttatcaagaagaaggcgatcagtcagaaaatagagaatttattatatctgaggatttagggctcaatgaagtagctagtctcaccatagatttgatggaagaagaaccaggtccttctagcgcaaggactcgtaagtcacagagaattcttgaaaaacaacaaagacttgaaataattgagcagcgcgttgctgaagcagattctgatgccgatgatttt

SEQ ID NO: 164629 - DNA, 1179 bp, Arabidopsis thaliana landsberg
atggagactggagatatgaaaatcgatatcactacgaagatattcagtcaaaccacatatttacccttgagcctaaacaacactgtttgcatcatcaatctccgtcaacaattcaagagatatgtgattgacaaatccaatggaagtatcacttttaatggattgtatccaggacctcctctccatctctcaaatccgtttgaatctcttaaactacaaattcactccgtttcatctctttccgcttcttgattctagtctccatgatccttccttgtccgaatatatcgctgaggtaatcactggtcaagcgagtttaagcgttgggtttctacaacggttgttcatgttcgttaacgtcgttttaacgcaagaagtgttctcagtgattcctgtttcttgtcttcctaaagaagaaactcaagaagtagaaggcgaatcgacatgtcctatatgtttggagaattttttgatcgattacgtcccccgatggtaagagaataaaaaagttggcacattgctcacatcgatttcataaagaatgtatctctgagtggttaaggaggtgtaattcttgccctatctgccgtagaattgtgctcgaagagagtcaacaatcatataatagattctgaatagtctatgcttacccttgtttttattaatgtaatgcaattgaaactgcttatgctgcctaggcatgtaataatgaaacaatttagattcgtttaagtttgtttcctttagtagaaacttaatgaaaaatcaaattttaaagtctccttgtttctattatagtatgttacctataatatcaacaatcgcttgtctttttgtatctcaacatcttcttctgacgatttcatctctctcttgtttctctgcttgaatttgttgacaatgaagactagagctggtaaagtaaacatcaatgcaaagatcagtcaaacctcatcatctcatagttctctcttgccaaatttcggagatgcttaatagacgaaatcaatggaagtgtcactttacgcagttctccttcccgtccctctaacccttttccgctcatcaattcctgtctccatgatcctcccttgtcccaagaggtgttctccgtgattccaaaatgtgcggtggagaaattgttgaacgacaatgacaagaatcaaataaccacaaact

SEQ ID NO: 164630 - DNA, 1258 bp, Arabidopsis thaliana landsberg
atccaaagaccgcaagagtgtctcagaagaagaagaagaaaagaagacgagattcagtattttggtggatctcgtgggtaggttatgtgatcaagaggaacgtcgtactcttaaatcatctcctacaaaaaccaacactctttttgagggtagtgaaaagagccacttggatcatcacttggatcatctcccacaaaaaccaaggtcttcccttgagtgtttttttactagagtatacacgcgacgaaaccataataacgtttctacttcttcatcgctcttcaacacggatgagtttgagaggacggagactaaaagccctacaatccgtaattcccaatcttcaccgtcttcgtgtctaatggagaacacaaaacgcaagaggtatcaaagtagtggtaaatccaagaaaccaaagtttgatcctttctcactgactgcggcgagagagacgccagagtggcttttagatgtgatgagaaagatgaagggagccgaaggaccgatcaaactgatctacgagaagactttgaccgcaactgacgtcaagccaagcgagagtcgtctcttaatacctttcaataagttactcagaaacgacttcttgactcctgaggagtctcgagccatagccatagataaagaagaagaagaagaagaagacaccaagaaaattggtgtgaaaacgattatcgtgaatcaattctctaaagaatggagtttacgttttctgatatgggtgatgaagaagaaaaaatctggaaatggaaccttgtactacactttgaatcgggggtggaatggtgtcgtctcgggtaacaagctcaaagccaacgacaatattagtctttggactttcaggtgtggtggagtcctctgacctgcccttgagaaagagtagctctttccttttaactctgaatctgatatgtttcatttctacttggaacatttaaacttgattttatcaagttttccattggcagagtagaggtttttggtctatagactatagtagcatagaaacttcctcttttcttttggatttagtagtagcaatttcttgcaagtaaacttaaggttttcctacgatgtgcatgtgatcttacactttattattggcagttaacttgctctttgtatcttgtgtactctactttagttactacatgtgatatcttctttaatctagtacaaagatcaatcaggagcgagggaacggaaccaattgtgcaagggtttttggtgaaatccataa

SEQ ID NO: 164631 - DNA, 460 bp, Arabidopsis thaliana landsberg
atgggcaagagtaacaaacgcaaacgcgagctgactcctccgtctgaggacttcggcgactcggaatactcggaggaggagttctcctccgagtccgaggggtctccggctcccgtctctcccccggcgtcgtctgatgattcagacgactcccaggggattgccgcggaagtctggacgtacatctgggccatcgagcgctccgggctcgagggctcggatgagtcggagtactcctcggatgaggaggactcggacggcggcgaggacgaggatgatgacgacgacgacggcgacgacgacgacggtggcgacggcgacggtgacggcagcggcacggcgtggggcagcagcggcggcgacgggagcaagggcagcatcagaggcggcacagcaagggcagcaccaggggcggcggcggtggcagcagcagcaaggccagggcctaaacgccactggt

SEQ ID NO: 164632 - DNA, 432 bp, Arabidopsis thaliana landsberg
ccacaaccttcttcttcgtacttgacaagagatcaagagcacgagatcatggtctctgctctgcgacaagtgatatctaactccggagctgacgacgcgtcatcatcaaacttgatcatcacaagcgttccgcctccagacgctggcccttgtcctctctgtggcgtcgccggttgctacggctgcacattacaacggccgcaccgagaggtaaagaaggagaagaaatacaaaggagtaaggaaaaaaccatcgggtaaatgggcggcggagatatgggatccgagatcgaaatcaagaggtggcttggaacgtttttacggcggagatggcggcacaatcttacaatgatgcggcggctgggtatcgagcaagacgtggtaaaacaaacggagaaggaattaaacggcggcggagatgactgagaaggac

SEQ ID NO: 164633 - DNA, 428 bp, Arabidopsis thaliana landsberg
agaaacgagaactgtagctgacccacatgtcggatgtgtcaatgtgttgatattgaacgttaatgagtatccccccggaccaacaacgcttgatctttctcggaaagcagctcgaggatggccgctctctttcggattacaatatccagaacgagacgaccttgcacttggtgctacgtctccgtggaggagctaagaagagaaagaagaaggtgtacaacacccctaagcgcattcctcacaagcacaagactgtgaagttggcgatcctccaattctaccaagtcggagatgagaacaaggttgtgcgccttcgcgaggagtgcccccaccctgactggggtcctggggatttaatggacaaccactcctaccgtacctactgcggtaagtgcggcatgaccaacttcttcaagaagtaagccaaa

SEQ ID NO: 164634 - DNA, 484 bp, Arabidopsis thaliana landsberg
  unsure (1)..(484): unsure at all n locations
caagggaggaaggagagaaacaaancnaggcgcgcgccagaacggaacaatnctaaaaaagaagacgaaaaaaaaaaaagaacccccaaccagggccaagcgaacaaacacaaacggatggaaaaaaaaaccaagcacccccactccaggaaaaaaaaagaaacgagcccccaccgcgaacccgaaaaaccaccccaaccaaccaaacaggaaaaacagaccagcgcccaacacgggaaagggaaggcaccccccccccgcgagccacaatcaacacccccacgaagcccaaacaacgccccaaccagcccacccggaccaggggggagcgtgcaaaaaaagcagcacactgacaaaaaacacacacacccccaaaaccaaaagagcgaacagggaaaaaaaacaaaggcaacccaacaaccccgtgccggcgagccacaacacaacgaacagaaacccaccaaagacagagaaaccgggaagc

SEQ ID NO: 164635 - DNA, 478 bp, Arabidopsis thaliana landsberg
ggctatataataattatatacaaaaaagcgtaataaatcgaagtgtattgtacatggattgtcaggcatcttcatgatgctcatatatgtggcatcatgatgatgctcatatatgtggcatcatcatgatgctcttatgcgggagaaatgtttttagcaacagcaaatcgtattgctgcggagttgagagggatcttatgggtactacagtctatgtgatctacacttctataatattgagatttggtccgactatggtgctgctatggaagccattagtgacccattaaattggccgcggtatttatcttattttgataggatttattggtttctcccgaattttgataagatcgtatttaaggtttcatcgcacgagatatagccacaagcgtaatgagagaaggtcgatgcagatcttatttagctcgtggaagtccgatgtggttacactcgcattgaagaagacaagcggcgt

SEQ ID NO: 164636 - DNA, 1817 bp, Arabidopsis thaliana landsberg
atggattctgagggagtgttattgcggttgatccacgagcattctatgatcccttgtaatcatctgaggaaaggtgattgttgtggacgctttgaagctataagcgatggctactactgcaaaacatgcgattttttcgtccacaagaaatgtgtcgatgaggcctctgaatctatcgagcatccatctcatcccggtcacactcttcagcttctaagtaaacaaaaatatcgttattgtaatttatgtggaagggacattaaggatctatgctatcattttggtaacttcgacgtggatctatattgtgcaaagtacccaccaccagaggttattgaaagttctgagacaccatgccacaagcgcacccttctcaaggagaagatcgagtttcattgtgatgctaaatgtgaggagattggttatggctttccttacaaatgtcttgaatgtggtttgacctttcatatcgactgtgttttgcatccatccggggtaaaacacctgccagaggtaatccacccgctagacgtaaagaatcactcttgccaccccttgcaccctcttaagcttgttctcacaagtcaactaccagactattctgatgaaaaatgtcgtctttgcacaagaaagattgagggattgttttatcattgttcttcttgcaacttcagcttagatatgcgttgtgttataaatccaccaccacaatttgttatggatttgaaagttcatgatcacgaactcacccttctcccaagactcgactcttttacatgtaatgcttgcgggctgaagggagatcgaagcccttacatatgtgttcaatgtggtttcataatccaccaagactgtctttcccttccacgcctcataaacatcaatcggcatgctcatcgtgtttctcgcacttctgttcttggtgttgtgaactctgtatgtggtgtttgtcaccagaaggtagattggacttggggtgggtattcttgtcagaggtgtcctcaatatgtcgttcattcgaaatgtgctactagaaaggatgtgtggaacgggaaagaactcgaaggagtgcctgaagagatagaagatatagagccatatgtggtaattgatgacaacacaatacaacatttcagccacaaagaacattacctaagattccatgttaatggtcttctctgggaagaaaacaagcgttgcagtgcttgcacccatcccgttcgtctccaatcgttctatgcctgtaaagattgtgatttcattcttcaccaacactgcgctgaatctcctaaaaaagaatggcacgtgctacacaatgaccggcttactttagttacaagcgtggccaacttcttctcgtgtacagcttgtagtagattgtctaatggcttcatgtatcagtgtgattttatgaagttagatgttttgtgcggttcagtctcggagccgtatatccatccaggccatccccatcatcctttatattacatcccacaagtggaagaaaaacaatgcaatggttgcaacaatcgggaggttcgtgtgcttacgtgcatcgaaagtggttgtggatatgtcttatgcttcgattgcgccactttaccacaagtggtaaagcatagagtagacgatcaccctctctcactatgctacggcgaagaggcaagtggcaaatactggtgtgacatttgtgagaaagaaacgtatccaagacatggttttacacgtgtaaagatcaccgagctagtttgcatacaaagtgcgtgctgggagacttagtaggactcatgccaagaagcacaatagagttgtttaga

SEQ ID NO: 164637 - DNA, 1007 bp, Arabidopsis thaliana landsberg
atcacccagaaaagcgtatctccatggataatgcttttccttgacgacggttgtgtgatgtacaacccgaaagaaggcaaaattgaaaggagtctgatagaattctcagtgatttggttcctgacaaactcagataaatggtgtctaatgttatattctggatgcaatttagctattatagatgtgtttagccaggataggaggatcaattttccgcctctagagtcgctccaatcagatacatatactctcaagcgtgtggtagataaggaatactgttttgaattacctagtggcgattattacaacgagaacgccgatgatctgagaggccgtttgtgggtagacaagaagacgggagagttcgttgtagtgtggttctttaacccttatacctatttattctattgaaagaagggggatactcataacactgtcattcccttgtctgaccaggtccccaaggttgtaaatggcttaactgatctagtactccggggttaccgtctttacatcgcaaccaaacgtcgtttcgctcgagttattgatttgtctggacatcaaaggtttcgaggatgtcaccgggagtaacccaaagccaatgttttcccctctcggagaacataattcttttagcattgcagatataatagcaggagaggttttgttggttgagggcataacctttgaaaactagaggatcttttgtctcttcaaaggatcctaacaacttagacgacccacatgtctacccccccccccaagcttcttgaggtagattctcttggtgatgaagcccttcttgttgacttggtattaccatgcctactaaccatacccttggtatcaagccaaactctatctattttactcgtcatgaccgtaaccgttttaaaatcccttttgatctggacatatatgtgttcaatcttgcaaccaagaccctcaaacgcttccctcaactcgccaacatgaatctcaaggatgctcaatggtttcaccccatg

SEQ ID NO: 164638 - DNA, 453 bp, Arabidopsis thaliana landsberg
  unsure (1)..(453): unsure at all n locations
atgtctcgnnnnnnnnnnnnnnnnnnnnnnnntctcttcctctcttcacgcgccgtcgccgtcactgccgtagaatccgatactccgacggcgtattcactcctccaaagctacaacttccccgtcggaatccttccaaaaggagtcgtagcttatgatttagacacaacgacaggcaaattccatgcgtatttcaacgattcatgtagcttcaatcttgttggttcttaccaattgaattacaaatcaacaatcagtggttacatctccgagaacaagctcaagaaattgactggtgttaaagttcaagtttgttcttgtggcttaacatcgtcgaggttattagaacggtgacgagatggagtttccgttgggatacatcggcgaattcgcgatcaagagtttttgaacgctcagtgtggtgtgctttagtcaagatcgaattgcatgatg

SEQ ID NO: 164639 - DNA, 469 bp, Arabidopsis thaliana landsberg
atgggtgatcgattaagagaattttttaagaattgtcgatgtggagaacctacagtgatgaagacgtcaaatactgctaaaatccctgggagactgtttcatgcttgtccttttggagaaattataagtggctcaattatatatatcgttgtgttttttttttttatcttaaaagatatgcatttagttgcttataaatatgatagaataagaggtctcagatgttcaaatggatggatacttgtatggttgaggagagtgaagacttgataaagaaattcgagaacttagaatgaactttgattacaacgcaaaaaggctttaatgcttgtgaatctaagattggcaacctgacgatggagacgcgtgtgtatgctatgattgaaaaggatgttggagagtagaaaatcagggatttttttaacacttatgccactatatcctaaaaaataattgtgtatgccacctt

SEQ ID NO: 164640 - DNA, 2034 bp, Arabidopsis thaliana landsberg
attttgtatcagttaagccttatattccttatagaacatttatcatcaactttgccctgtttaaaatagaatatagtactttgtctccaaagatcatggactctttcttcttttagatttttgtggtagttggtttctttaaatagcacttggtctcatgtgagattctttgtcttcttctgatgatctttctttctttttttttcctactttcttaaacagcagacttgctctatatgcttgaacaagatgaaagaaggttgtggacatgcaattttcacagcggagtgctcgcacatgtttcattttcattgcattgcttcgaatgtgaaacatggcaaccaagtttgcccagtgtgccgagctaaatggaaggaaatccctatacagaagccgagtttggatcttccttattacccctttgacaggtgcaataatgatgcagccattagccttttccgctgcttacctccttctcaacgagctataacccaagggcatcccgagccagctactttcgatgatgatgaacggttagaagagcagattgtttttgatggtgaaactgaagtcttgaagaaggagaaccgtgattatgtgcgaatgatggacatgaaaatgtatccagaggtctcagctgtaccacaatccaagtcttgtgagaattttgatgtactagtgcatctcaaagcagttactggtgatcagatttctcagtatcgccgagcgccaattgatttagttacagtgctagacatcagtggtagtatgggaggaactaagctagcacttctgaaacgagcaatgggttttgtgattcaaaatcttgggtccagtgataggctctcagtgattgctttctcttcaacagatcgacgtctcttccctttaacccgaatgtctgatgctggaagacagctagcccttcaagctgttaactcactggttgcaaatggtgggaccaatattgtcgatggtcttagaaaaggtgccaaggttatggaagataggctagaaagaaattctgttgccagcattatccttttgtctgacgggcgagatacatatactacgaaccatcctgatccaagttacaaggtgatgcttcctcagatttctgttcactcttttggttttggatcagatcatgatgcttcagtgatgcactcagtctctgaagtctctggtggaaccttttctttcattgaaagtgagtctgtgatccaggatgctcttgcacagtgcattggtggacttttaagcgttgcagtgcaggagctacgagtagaaattgaaggtgtgagcccaaatgttcgacttagctcgataaaagctgggagttactctagccttgtaactggtgatggccactcagggttggttgatcttggtgatctttatgctgatgaagagagggatttcttggtttctatcaacatccctgttgaggaagatggacatacaccattgctaaagctgagatgtctctacattaatcccttgacaaaggagattacaacgcttgaaagtcacgtgcttcagattcgaagaccagaatatgttgctgaagaaaaagttgttcccatcgaagtggtcaggcaaagaaacagattcctagctgcagaggcaatggcccaagcaagaactttagcagagcatggagatttagaggcagccgttaaagccattgagaattttagattggttttggcagagacggttgcagcaaaatcatgtgacaggttttgtgttgctttggactcggaactgaaggaaatgcaaggtagaatgaggagtagtcacatgtacgaggcatcgggaagagcttatattctttctggacttagctcacactcatggcaaagagcaacagcgaggggaaattcaagggacagttcgagctttgtccaggcttatcagactccatcaatggctgagatgctgcgtcgatcacaggccatgtttctagttagtccatcacatcatagactcattcagcccttgctctcttttgcttcacaaccaaagccaagg

SEQ ID NO: 164641 - DNA, 850 bp, Arabidopsis thaliana landsberg
tccgactgcggtgccactcgacagagtgaggctgacaggcagtcaggcccggtcgaaggcaccataggaagctccgcttcgcccgacccagggctcggactcgggctaagtcccggaagacggcgaactccgcccaacccagggctcggactcaggctaagtgccggaagacggcgaactccgcccgacccagggctcggactcgggctaagtcccggaagacggcgaactccgcccgacccagggctcggacttgggctaagtcctggaagacggcgaactccgcccgacccagggctcggactcgggctaagtcccgaaagacggcgaactccgcccgacccaaggctcggactcgggctaagtcccggaagacggcgaactccgcccgaccccagggctcggactcgggctaggacccggaagacggcgaactccgctccgcccgaccccagggctcggactcgggctaggacccagaagacggcgaactccgctccgcccgaccccagggctcggactcgggctaggacccggaagacggcgaactccgctccgcccgaccccagggctcgaactcgggctaggacccggaagacggcgaactccgctccgcccgaccccagggctcggactcgggctaagacccggaagacggcgaactccgctccgcccaaccccagggctcggactcgggctaagacccggaagacggcgaactccgctccgcccgaccccagggctcggactcgggctaagacccggaagacggcgaactccgctccgcccgaccccagggctcggactcgggctaagacccggaagacgacgaaactccgcctcgcccgac

SEQ ID NO: 164642 - DNA, 4278 bp, Arabidopsis thaliana landsberg
  unsure (1)..(4278): unsure at all n locations
tggaggtcgactctagaggatccccgcgcgataccgcgggtaaggaaattccgcccccccctcccctgcaaaactgggattcctgcccagatccccacagatctgacaggtaccgtctccccgacatatcctactccgaggactcgtctagacttcgcctcgatagacgtctcacctcctatcaactggcaggtcgcctttttacaggcacctgcgaacactctcgtcgaaaacccagcaacaggaaacgagacaagcacaacgactgcctttccaaggccaccgctcccacctttgctaccgatgggcgttcccgggaactcaacgcaacaacggacctctatcactaatccgccattcattccctggataccaggaagcaacctccttaacggtctaaccgatccccgagcaccagtcgatccgcgtaacgtcgtggatattgaaacattccgcatatacgaatgcacctaggagtgagcgatgctcccgacatagattgcgagatcgaagaaaacaggtgcaccccattcacggataggatcgctcgttttcgcatccgagacgtcgagagcctctgtttcccggaatacgacggaacgagcgacccaaagactcacctgagattcttccgtacctgacagactaagaaaacgaagcaggtcattgccgtttcttcgcagaaaacctcgtaggtcacgccctcgaatggtttgctagcctagaagggaactttattgataccttcgaccagctcgccgccgctttcttaaaacagtattcggtacttatcgaacacaggacgtctgaagccgacctctgaagtcttactcaacttcagaacgaatccctgcgatcttacgtcgaaaaattcaaaacaatcaaatcaaagtttgcaaacctaaacgacgaggtagccatagcagcccttcgcaacggcttgtggttttcctctagattctgtgaggaactcactagtaggcaacctgtctctttagacgatgcccttcacaaagcttttcaattcgccaaagtcgaagaggaggtctctgtgctagccttaagattcaaagaatctaaaacacaaagcgctccccttgcaactaaaaaacccttcaaaaaggaaaaccaaacgcaagggcagcataccctattcgcaatagaagaggcaaccgaggacgagagtccagaaattgacctcggaaaatattacaagttccacaaaaaagaggacattccaccgagaaatgttgcgccgttaaaacattaatcgaagctgggggcaaaactaaaaaaggttcaaaccccaaagccgaaacccctcctcccgacgagcaggaggaggagcaaactcccaaacgaaaaaaacgggaccgaacaccggagggaggtgactctcctccacctgctaggaaagagcgtatagacctagtctttgcagtactagacctgagtggcaggacaggatggtcagtcactacacctcctcccgccccgcaaaagaaaaacaggaggttcccactaggcctctcaaaattctgtagaaacgcaaccgagcacctcttcccgaaacgcatcgatttcatcatgggaggatctcagctctgcaacgactcaatcaattcgatcaaaactcatcagaggagggcagattcctacacaaaagggaaaagcccgatgatgggacctgatcaccagatcacattttgggaaagtgagaccaccgacctcgataaacttcacgatgacgctctcgttatccgaatcgacgtaggcaactacgaactctcctgtataatgatcgacacaggaagctcagttgacgtactcttttacgatgccttcaaaaaaatggggcacctcaattacgagttgcaaggcagaaaaacgccacttaccgggtttgctggagatacgaccttttctccaagaaccatccagctcccaaccgtcgcacgaggaatgagacaactcatgaactttctcgtggtcgataagaaagctcctttcaacgcaatactgggaagaccatggctacacgccatgaaagccgtcccatcaacctaccaccaatgcattaaattcccctcaaacaaggggatagcagtcgtatacggcagccaacgcatctcccgaaaatgctatatgggtggctacgagcatatcaaaaaagccgaccccgtggtactaatgttagaggacaaactcgcagaaatgaaaacagtcaggtcctccgacccttctcaacgtggacctcaaaaatcgctgataacgcaggtctgcatagacgaatcggatcctaaatggtgcgttaggataggtcaagacctcgactcagcaatacgagaggatctcgtaacctttctcaaggaaaacaaagacagcttcgcctggtcaagtgcgaacctccgaggaataagcctcgaggtaacctcacacgaactcaacgtcgatccgacctaccgacctataaagcagaaacgtcgcaagctaggtcccgaaagggccaaaggtgtgcacgatgaggtcgacctgttgctcaagatcagatcgataagggaagaaaaataccctgactggctcgccaacccggtcgtcgttaaaaagaaaaatgggaagtatagagtatgcatcgactttacggaccttaataaggcatgtcctaaagacagtttcccactcccacatattgaccgactggtcgaagccaccgcaggacacgaactattgtnnnnnnnnnnnnnnnnnnnnnnnnnnnnnnnnnnnnnnnnnnnnntgatgaccaagaaaaaatagctttcatcaccgaccgaggcacctactgttataaagtaatgccctttggttaaaaaatgctggagctacctaccaacgattggtgaacagattgttcgctgtctagataggtaaaccgatgggggtctacatggacgacatgctggtcaaatcagctcacgaaaaagaccacgtcccacaattaagagaatgcttcaaaatccaaaacagattcgaaatgaagctaatccccgagaaatgctctttcggagttccatcaggagaattcctcagatacctagtaagcgaaagaggcaacaaggccaatcctaagcagattgcagccttcatcgaaatgccatcaccaaaaacggcacgggaggtccaacgactaacttgccgtatcgccgccctcaataggttcatatccaggtccaccgacaagtgcgtccctttctctcagctcctctgaaaggagaaaaagtttgactggaatgaggactgcgaacaagcctttaaacaattgaaagcatacctgaccgaaccacccatactcgcaaaaccggaagaaggagaaccgttgtacctgtacacgacagtctcccgaacctcgataagcagtgtcctggtgagagaaaatcacgaaggacaaaaaccgatctattacgtgagtaaaacgttgatagacgctgaaacccattatccagcaatggaaaaactggcactggccgtagtcatgtcagctcgaaaactgagaccatattttcaatcacatcccatcgtagtgatgacgtctcaaccaatcagaaccattctgcacagtccaactcaatcaggttgacttgcaaaattggctatataactaagtgagtacgatatagaatatcgcaccagaaccagcctgaaagcacaggtcctagccgactttgtaatcgagctcccgttagcggacctggatggaaccaactccaataagaaatggctcctctacgtcgatggctcctccaaccgacagggatccggagtaggaatacaactcacctcccccaccgtggaagtcatcgaacaatcgttccgactcggattcaacgcatcaaataacgagtctcagtacaaagccctcattgctggcattaagctagctcaaggaatgggaatctgcgatatacacgcccatggaagctaaagacgagcgcatggaagcgtacctcaaactagtcaaaaccttgatcaaacagttcgaatagtttgaactgaccaggatccccagaggggaaaacacctctgtagacgccttggcaactcttgcctccacgtcagatcctttcgtcaaaagaattatcccagttgaaggaatagaacacccgagcatcgacctaacggtcaaacacgctgggacggaaacctcggcaacttgcaactttacgcgagtaacccgaagcaccaccgtcgcgctagagcccttgcagcggccgcggaggcagttgcaatggaggaagagcc

SEQ ID NO: 164643 - DNA, 327 bp, Arabidopsis thaliana landsberg
acgatgcgatgcatggtgatggtgaaggccacgacggattccgaagcaggcgcgatgccgagcgaggcgctgctggcggcgatggggcagttcaatgaagagctggtcaaggcgggggtgatgttggctggggaagggctgaagcccagttctcaaggtgcgcgggtgcgcttctctggcagcgagcggcaggtgatcgatgggccgtttgcggagacgaaggagttggtggccggcttctggttgtggcaagtgaagtcgatggacgaggcgattgcctgggtcaggcgctgtccgccgccgatggagagcgagtgagaaatcgag

SEQ ID NO: 164644 - DNA, 499 bp, Arabidopsis thaliana landsberg
gtttattagtaacagatggtcaaaacctcccttcaatgtgatgaaatgtaatatgcatatttcatggataaacgattctcagcggatgtggtggtgcttggattatcagagatcactttggtgatgcggtttttcacgcgcgtgatatgtcttaccggtttcgaaccgcattgctggagaactgcgtggatttatatgggtgttgcaaagcttaagagacctacacttggataacattgaaatctggtctgattgtaatgctgccatcaaagctatcctggagcctttacattggccacggtacgcgtcttatcttaacaagattcatcatcttgtcccgagctttggtaaagtatcttttcagttatcttccccaaaagcaaatcggattgcaagggatatagctactagcgtcacgcgagatgggcggagtagatctcacttccctcggggaggaccctcgtggttattatcgcgtatggaggaagaaaagagaaga

SEQ ID NO: 164645 - DNA, 2446 bp, Arabidopsis thaliana landsberg; identical to SEQ ID NO: 37856
  unsure (1)..(2446): unsure at all n locations

SEQ ID NO: 164646 - DNA, 450 bp, Arabidopsis thaliana landsberg
atctacactaaaatcagtgagctttctattctctgtggtgttgaagttgcgtttatcgggtattcttgctctggaaaaccatacacttttggcagtccatccttccaagccgtggcggacggtattctcaacggcgaggcctcgtcgtcttcttcatcatcattggtcatgaatgctcacaagcaagcgaagattcaagagctttgcaaagtatacaatagattggtggaggagataacggtggaagaagtcaaattaaagaaggcggctgcattggcggagatgatgcccatgaatgaggatgcgtggtggaaagtggatccaaatgacgtgaaggatcgcgaagaggtgaagaagatgatggagaagcatcaagagctctatgagaaactgtgcgaggaagctgcttcaaggatcaagagaggacatgatgagaataataacaaatga

SEQ ID NO: 164647 - DNA, 1496 bp, Arabidopsis thaliana landsberg
acactcaaaatcgtaacgctattctcgttagccatcgacaggtgaggagacttaaacctccatgattcaatttccatcttctttggaattcgtctgacttatatttgttggataacattgatggtagaaaggaaacccgcttcttaaacatatcaggaatgtgaaatgggttttctcagatatcattccagattacgtgcttggtcaaaactcttgcgctttgtatttaaggtgaaactctgcaacttcaattttccatcaatgtgttaaaattcacaaaattttcacactagatacatctgatttactgcagcttgcggtatcatctcctacatccggattacctctatttccgcattagggaactacaaaagaatttcaagctaagtgttgttctttgccatgtcgacgtggtaagtcttaaaaccatattttgatgctaaatttctctctttttcagttacattgcatccagtgttttcgtttatgtactatgatacttatgcacaggaagatacggtgaaaccgttgcttgaagtcacaaaaaccgctctacttcatgattgcactctattgtgtgcctggaggtctctgtctatacatcaatctagttatttgcatctcatatgaaaacacatttcaagcactctgcttctcgttgataccactttctgtgtgaattctcttgcagcatgacagaatgtgcccgttatttggaaacgataaaagtctatgaaaacaaacctgcagatctcatccaaggccaaatggatacagattacctttcacgggtatggaaactctttaggctggcatattgattttttttgtcacttttgtaaattctcactgagtttatgatgtttgcagctaaaccattctcttacaagcattcgacatgtaaacaagagcgatgtagttacacttggttctacattcggggttgagctaaaaagaccttatgtccagttattgtgaatttatgatttttatgtttcaaactaaaattggaaacctcaaaaatcatggtttatgcagtctcttgctcatataatcgatgcatccatggaagatttagcacgttgtcccgggattggcgaacgtaaggtacattctcctctgtctataattggaaaactcaataatcttgtgatagaagtctgaaaatcactgtaaaacctcaggtgaagcggttgtatgatacattccacgagcctttcaagcgtgcaacttcgagctacccgtctgttgtagaaccaccaatcccggaagctccagttgagaaggatgtgaactcagaggaacctgttgaagaagacgaggattttgtggaggactcgagaaaacgcaagaagaaggagcccgagcccgagaaaactgtgaagaccgcactctctgctgtttttgctcgttactctgatagacttagcaagaaaaaggagaaacaggagaaagatacaacaacggcgtcagatgctgaaacccaccaaaattaa

SEQ ID NO: 164648 - DNA, 1014 bp, Arabidopsis thaliana landsberg
ctctcttcttgttttgcaaaaaacacatacaattgggatccctcacttactagtgtgattgaagccaaatactataagatttgtcaactgcgtatgaaagacatggtttgtaagtgagggaggttacgagagcaacctctttggattgagaacacattgtgggaagaaatgtgtaactattgggacacagaagaagccaaagcaaagattttaactacatcatctactcgaatgtctgaccgtaatggtcttggtcctcacaagcatgtatcgggcatgaagttgttcttacaaatcaaacaagaggtggtaagttcaaacactgtgaacatttgttttgtttacttatataatatccatcctaagaagttgatttgttttgtttacaacatttcaggaagttgacctactattggtgaagttttccttagaactcataccaaaaaagatgggacttttgtcgataggaaggcggaggaagttcatgagtcataaaagaagaacaaggcaactaagttggttgcccttgaaaatgatgaagggtatgaaggtacttcaggtaattggttaattctattttcttttgatattatcgctttgattaactgataaggactaatcttcttttcttttgtttatgaaatcaactgtcacaaacgatagaggagaatactatggaattggaagcttagagagctacatcagcaggaagcggaagtacccaggaaggagttcttctctcacaaccatgcaatcacagcttgagaaagtcaaccgcaagatagaggaacaagcaactctacaagcacagtgtgaggcagcggctttacgagttacatttgagcaagaagagatcaagctagttgcaaatgagaaacaagcagagatcaagcacttgaagatggtgaagagtacttgagtgaaactgacccaaagtttctcgccttcttcgagtttgctactgcttcagaatatcaagcagagtagtttcagtctactactgcttcaaaaaat

SEQ ID NO: 164649 - DNA, 2965 bp, Arabidopsis thaliana landsberg
  unsure (1)..(2965): unsure at all n locations
atggccttcgggaggggacgtggcaacaaacgcacttcgacgtcgtcctatgcgtcgaccattacaatggtcatctttgtggctctgtgtgtcttcggtgtgtggatgctttcttccaattccgttattccaccgcagatcacacaaggctccactcgagcggctgtcgcagagacagagaggagtgatgtgtctgcctcttcaaacggtaatgatgagcccgaacccacgaaacaagagtctgatgagcaacaggcatttgaagacaatccgggaaagcttccagacgatgccgtaaagtctgaagacgagcaacggaagtcagcgaaagagaagagtgaaacgacgagctcaaagactcaaacacaagagacccaacaaaacaacgatgacaaaatttccgaggaaaaagagaaagataacggcaaggagaaccagacggtgcaagagagtgaggagggtcagatgaaaaaagtcgtcaaggagtttgaaaaggaacagaaacaacagcgggacgaggacgctgggactcagcccaaagggactcaagggcaagagcagggacaagggaaggaacagccggatgtggaacaaggaaataaacaagggcaagaaccggattcgaatacggatgtgacattcacagatgcgaccaaacaagaacaacctatggaaacggggcagggggaaacatcagagacctcaaagaatgaagaaaacggacaaccagaggaacaaaactcagggaatgaggaaaccggacaacaaaacgaggagaagacaacagctagtgaagaaaacgggaagggagagaagagcatgaaagatgagaatggccaacaggaagaacataccacagcagaggaagaaagcggaaacaaagaagaagagagcacatcaaaggacgaaaacatggagcaacaagaagagcggaaggatgagaaaaaacacgaacagggttcagaagccagtggttttggctctggaataccgaaagaatctgcagaatcacagaagtcatggaagagtcaggcaacagagtctaaggacgagaaacaaagacagacatctgaatcaaacaccgtagagaggattatggatggaaatgcatgggtgctgtgcaatgcaactgcaggaactgactatataccatgcctagacaacgaagaagctataatgaaactaaggagtagaagacattttgagcacagagagagacattgcccagaagacccaccaacgtgtctcgtccccctcccagaaggttataaggaggccatcaagtggcctgaaagcagagataaggtaaaaatttctatccaaaaaaagagagatttccttgaggtgatataatgtaaaattggatagaagttaactcacatgtgatctagtagatatggtaccacaatgtcccacacacaaagctagctgaggtaaaaggacatcagaactgggtgaaggtcactggcgagttcttgacgtttcctggtggtggaacacagttcatccatggagctcttcattatatcgattttcttcagcaggtgaacactcatttcttgatttcagtatagtgttaaaactgcaacaagtaaaagatagaaaatttttgcagaatataatggttccttttttctactatggcagtctttgaaaaacattgcgtggggtaaacgtactcgggtcatattggatgttggatgtggagtggcgagctttggcggtttcctctttgaaagagatgttatagcaatgtctcttgcaccaaaagatgaacacgaggctcaagtccagtttgctcttgaaagaaagattccagccatctctgcagttatgggctctaagcgactgccattcccgagcagagtgtttgatcttatccactgtgcacgttgtagagtcccatggcataatgagggtggtatgcttcttctggaacttaatcggatgcttaggcctggaggttattttgtctggtcagcaacaccagtctaccagaagcttgaagaagatgttcaaatctggaaaggtaatgactaaagtaaaatgcttgaacttaactagagttcctccttcttttgtttgtttcactgaacctgagatgttttgagtgatgtagaaatgtccgcgttgacaaaatccttgtgctgggaacttgtgacaatcaacaaggataaactcaatggtattggtgctgcaatctaccagaaacctgccaccaatgactgttacgagaaaagaaagcacaacaagcctccactgtgcaaaaacaacggcgatgcaaatgcagcctggtatgattgtttccacaatatgcataaggaatgaataaccataaggttttaacagaacaaagaaagtcaaaacttgaatggaaatttcaggtatgtacccctacaagcatgtatgcataaagttcctaccaatgtggtcgagagaggaagcaagtggcccgtgaactggccccgtcggcttcaaacaccgccttactggttaaacagctctcaaatggggatatatgggaaaccagctcctcgagatttcactacagattatgaacactggaaacatgttgtaagcaaagtatacatgaatgaaataggaatcagctggtcaaatgtgaggaatgtaatggacatgcgagctgtctacggagggtgagcatcaacgaaaacaaatcaaactaaaatctcacttaccaaaactaaacctttttttacgannnnnnnnnnnnnnnnnnnnnnnnnnnnntctgaaggacccacaggtgtgggtaatgaatgtagtaaacataaattcaccagatacacgaccgataatctacgagagaggcctattcggaatatatcatggctggtgtgaatcatttagcacataccctcgaagctatgatctcttacatgcagatcatcttttctcaaagttgagaacaaggtataagcgtaactcataatatccacacgtt

SEQ ID NO: 164650 - DNA, 582 bp, Arabidopsis thaliana landsberg
taacctcggtcgttagggttcttaagtacggtagtaatcagtcaatacagagaagtagaggaatttctcatcaacgacaaggatgattgtgtcacgagtctcggatcttacccggatgattcttctacttgtcacgacccactaatctctctgacactcccaagtttcaaaccaaacgacgtctatcaacatctccagacccaactccacgatcatgacttgtccgagcaaatatcttgtaagattgtcgaagcccaacaacggcaaacaagtcaaagtgtttacttgccacaacaaccacctttattcataatcgtctctgtcaaattgacacacaaggtttacgtcgttgtgcctccgttggcaacagatttggaccaagagatgagccaaggagaagaagaagaatcgaagacttgtgccatctgtttggaggaattgtcgacatccgatgattactgcgagatgcctaattgcacgcattgttttcatgaaccatgtctcactcagtggttgatccgagataataactcatgccctctctgtcgcaaacctgttgacaaacaaccggaatctaattag

SEQ ID NO: 164651 - DNA, 811 bp, Arabidopsis thaliana landsberg
atgcattgcttgattcacgttccagaactaatgaatgttaaagggattggtagatttgaaagcatgtgtaggtcgagtataagagacggattgattgataacaaggcatggctaacgtttttgagtaaaattcaatcatatcgcatcttagaactaccaacttggacattgattttatttgctctatcatatgctttggttctgagtccccgccttcaaacctctccttcaactatgtcttcttatttgcttgagggcaagcaaagactaagtttgggggagttgatatgtctataatttgcatgttttcattgtccattcatcatcgttttgagtccagtttcgtatcattcatcactgttttatatcatttctcatcattcttgcatactgtgtatgattaggatagcttcgcatacatattgcatttctgagttgttttcaggtgatttggagctgtttgcgagtaaattggaagaaacgagccagaaccagaagacatactcgacccccaggtcgagtgactttggagccattcttcccatccactcgaccaccaggtcgagtaacctcagctcaggccactcgatgacattactcgaccccctggtcgagtatcacttcgccacactacctgaccacactcgaccattcactctaccacgttactcgaccccctggtcgagctcaccaccattaccatcactcgaccggacactcgatcacgtcttcatagtctactcaaattccgtactcaaccagacaagttgagcacacggaagagaagaggtgaagacaaagtgttcggaag

SEQ ID NO: 164652 - DNA, 541 bp, Arabidopsis thaliana landsberg
  unsure (1)..(541): unsure at all n locations
gtctcgcacgctggtcacatggcagatgacagcaagatttcaccgaacgccacaggcaatctctttaccagtcccgggtcctggtcctgaatggccagctcaccgacgacaacggcacgctgctggccacgcaactgctggcgctggccgaagacgacccggacaaggacgtcgccatgtggatcaactcccccggcggctcgatgtactcgatgctggccatccgagacatcatgcggctggtgccgtgcgacgnnnnnnnnnnnnnnnnnnnnnnnnnnnnnngcgccgggcagttcctgctgtcgtcggggactcccgggaagcggtacgcgctgtcgcactcacggatcctgatgcaccaggggtcggccgggatcggcgggtcggcggtcgaggtcaagctgcaggcggctgacctgcggcagatgatggacaccgtgctccgcctgatctcagaagaccccggccccccgctggaccgcatcgtcgaggagacaagaacgatcattggtacaccgccgcggaggctatcgcctcg

SEQ ID NO: 164653 - DNA, 3149 bp, Arabidopsis thaliana landsberg
actcagtggatctttaggttaccagcttggaaacttgaaatcgctcacttacctgtgagaatgttttttctcttcgatacatctccttaatctctacttcttgatcaaattcagttaattgatgatatcagctacatgttctgttttgtcattgtaacagtgatgtaagcaagaacaatcttaacggaaacttaccctaccagcttcctgacaagcttacttatctgtaagtatcttcgaattacaaagccataatatatgatgttcattagtacacaatttcaatgtgttggtattgcagagatggctctgagaatgacttcaacggtaatgtgccatattcggtatctctcatgaacgacctcagttacctgtaagccaaagacatttaatttgactcattcgcataatcttttcccacgtatcaccccgcccttttagtcatacctgttcttgtatttactcagaaaccttggccgtaacaacctcaatggtgaactcagtgacatgtttcaaaagcttccaaaacttgaaacaatgtaagccacatacttctttttttgcagcagatttggaaagatttcattaacttcattgagtatatgttttgcagtgatctttcttccaatcaactcacgggaaaactaccgcagagttttgccaatctaacaggtcttaaaacactgtaagagaagaaagcacttcgaagtagttgttcaaatttaactcctttgtactgttactcaccttaccattctaattataggcatttgcaagaaaaccaattcaaaggctctataaatgctctcagggacctccctcagattgatgatgtgttagtatttttcatgctatatacataacacatcgtttaaatccttgaaatatgaactttctttcattaatgttgtttatgaatcttgcgttgacagaaacgtagcaaacaatcaatttactggttggatcccaaacgagttgaagaatattggaaaccttgagtaagttttattatctctctcattctcccttaaacacaatcaaaagatgcaaaagcattaatgtgtttttcttcatttcttggttagaactggaggaaacaagtggtcaagcggtagagctccttcaccacctccgggaacccgtcacatagacagaaactcatcaggaggcggtggaggaagcagcaaggctctgacactaggagttataatagcggtgtcttctataggtggactcattttatttgcagggttgattgcattgatttctcgaagaaagaactctaatgattcttctcactttttcgacgacgagaaaggaaccaaccgaagcaagccactcttcacaccacaatcctctcagatgcttcaattcaataatatggaagaattcaaacaccagaagacagtggattctaatacttcactggaaacaaagccttctgttaaaagaacttcttctgtcagttacaagaactctcctacttttcatctcataccttctacccaagtggctgctacccctgaccgttcctccacctcccaagactctcctgatacacgcggtgtgaaagcgttttcactagcggatttgcagaataccgcgtcttgtttctcgccgaatcgccttcttggtgaaggaaccattggacgtgtttataaagctaaatttcaggatggaagggtttgttttccttgttacattccacattttcttctcaagaaaactttctttagatctcttatcttgttatcctcttcttaccagaaatttgcagtcaaagagattgattcttctctgttaggaaaaggcaatccggaagagttttcacacatagtgtcgagtatctcgagtattcaccacaagaatatggcagaactcgtgggttattgttcagaacaaggaagaaatatgcttgtttatgagtatttcacaagtggatcacttcacagatttcttcacctgtctgatgatttcagcaaaccattgacgtggaacaccagaatccgaatcgctctcggaactgctaaagctatagagtaattatctaaaccatttgtttgaggagaatcatcgaactagctacttgctgctcttctttattttcattttttatcttgtgacaagaaactctcttttgtcaggtaccttcatgaaacatgttcgcctccgctagttcacaagaacatcaagtcatcaaacattttacttgataatgagctaaatccccgcctctcagactatggcttggcaaactttcaccacgtgagcttcttgtaaaaattagtgttatggagatacagagttgtttcaaatctattaaagtgtctcatctcttgaaactgtagcgcacaagtcagaatcttggagttggatacaatgccccagaatgcacagatccctccgcttacacacaaaagagcgacgtgtacagctttggtgtggtgatgcttgagctgctaactggtcgaaagccttatgacaggttccattctcaaacagtagtaatgttcgatataatatctataaagaactatacaagtatctgaaatgttttttgaatgcctctaatcttcagtgggaggccaaaagcagaacagtctttagttcgttgggcaaagccgcagcttaaagacatggatactctggatgaaatggtggatcccgcgttgtgcggactctacgctccagaatctgtatcatcattcgcggatatagtttccatctgcgtaatggtacgctcattgttgattctctattgtgttattatgttcttcagagcttctaagttcaaggtttgtgagaatggattgttatttcttgttttcagacggagcctggacttaggcctccagtgtcaaatgtggtggaggcattgaagaggctagtgtagtctagtgcctcaagtcattttgaagcccccaaagtattaaaagaagaagaataactcttctggagattgcggctaaaacctgagaaacttatgattaaaatcaagtaggaaactcaaaagctaatggattcaggtttgtatagagagatatataggtggaggaaaggagagacagagattctattatttgggtttttgtttcagatcatgtcttaacctttagattaatcttttacgcaatgagaaaagttgaaaa

SEQ ID NO: 164654 - DNA, 1727 bp, Arabidopsis thaliana landsberg
gtgttcagtttagtctcaatggctatccatattacgctaatggcttcaatgcttactggctcatgtacgaagctaccgatccgaccacaagatttaagatcactaatgtgtttcaaaacgcaactagtctcggtttgaccatcgcccgcacctgggggttccgcgatggcgccatataccgcgctctccaaacagcccctggttcctacgatgaacaaacgtttcaggtaagtgtgaagccttttcaacctaaatatatgttactttttgttaattagtttgtcttctttttttcaagggtttggattttgtgatagccgaagcaaaaagagtcggtataaaattgataatcccccttgtcaataattgggatgactacggagggaaaaaacaatacgtggattgggctagaagtaaaggcgaagtggtatcttccaatgacgatttctacagaaacccagttattaaagagttctacaagaaccacgtcaaggtaaaaaagatacaaattaaccaaaatctatatatatcttctttaatctctcaagattcgtaacaaaaataaattttacaccataatttatccctttatataagccatgatatctttatctctatttgtagactatgttgaacagagtgaatacatttactaaagttgcatacaaagatgaaccagccagtatggcttggcagcttatgaacgagccacgatgcggtgtggatagaagtggaaaaacccttatggattggattaatgaaatggctccttttgtaaaatcagttgatccaaaccatctcctctctactggtcatgaaggtttctatggtgattcatctcctgaaagaaagaattctctaaatccagtttcagccaacacagttggagctgatttcatagctaatcacaatatcgatgccattgatttcgcatcgatgcactgtggaagtgacttatggtatgaaacaatgcccatctatatataatgataatctgacatattcacactaagttttataatgtacattcatttaggacaaacaatctttcagaaataattttcttgctctttttttgttccttgtttaacacctcagcctaggaaaaacatttattttgcttttataatccacccatgctatcatttgggatttatcttcctagattttcttttgcaaaagtagcaattggtttttttttttttttatccatatcagtatgtaaaactacttattttcatctatcctaatcgtatatatgtcagagctaaaaactctaacatcgattctataaataaaaaatgttattagggtttacaaatcaacaaccactgaactttttggatttatgcacaggtttcaaaggttggatcagaactctcgactggccttcataaaaagatggcttgaaggccacatcgaagatgcgcagaacattcttaaaaaacctgtaattctagcagaatttgggttaggatcggacacaccacgttacactctggctaatagagacggcgtgttcaccacaacatatgacatcatttacgatatctgcgcaaaaaggcggctcggccgcgggagcattgttttgggaggttattagcgaaggcatgagcaactttgcaggtccctcctccattatacttagtgacaaatcgtcgacggttaatattataagtgagcagacacgaaagatgggtttgcttggtgggaccaagggaaagtaa

SEQ ID NO: 164655 - DNA, 836 bp, Arabidopsis thaliana landsberg
  unsure (1)..(836): unsure at all n locations
aaaactaaccagttttctttncttccaagtttgtattcctcgtcccgaatcttcgcattaaaaacagaaccaattccgaccaaagttttgagatctgtaatatgacgaatcccgataacatgaaacccggttgaagctactgacgtggaatctgcggcggagaagacgtcggaccgacgccggcatctggaacgtcgacgattactcagagatggaaaagagaggatttgataaagaaagcatctccgattacgagaggaatctgtcttttgttctctcttattgctttcttaattatggtctctaataaacatggttacggtagaaacttcaatgactacgaagagtacaggttcgatttccgttttttgatactggaatttgaaattgggtttgcgtaatatcgatcaaagttttgaaatttcttatattgcttcagatatgtattggcgatttcgattatttcaacattatacactgcgtggcaaacatttgcacatttctcaaaaagggaaattttcgatcgccggacttctattttggtcgatttctccggcgaccaggtaatgccacaaactgattatcaattctcagatttatatatgtaaagttatgatttttatgcaaaaaagtgaaatttgcagattgtggcgtatttgcttatatcagctgcatcatctgcaattccattgacaaacatattcagagaaggtcaagataacattttcactgattctgctgcttctgctataagtatggctatcttcgcattcattgctttagctctctatgctctcttctccggttacaaactctccactcattcttttatctga

SEQ ID NO: 164656 - DNA, 2398 bp, Arabidopsis thaliana landsberg
attcctcaaacattacagatcttcaggtaatttttcccctgatctatagttttaattacgtttgaacaataattcagtaacagtttagtttcttacattgcatagattctggaatcggtgtagttctttagattttttgttatcgtggcattattaactaaaaagttacgttttttatttgtaccctgagataaaatgtgacctttttagcttccttggttttatcagttcatatgcttaggaactgtattgatcaatgttaagttggagaaatctgattgttggattttggtaggttttttatttataagcagaacttgttctgttcttgtgtgaagctttcactggttttggaaattggtgaatgtgattaatgggtagcagtgagatggaaaaatcaggtaaagagaaagaacctaagactacaccgccttcgacttcttcatctgctcctgctactgttgtttcacaggtttgcttttggtgtaaatttggtctagcaaaatgttttttgttagtgtcatgctttgatgtttaatgttttgtgtttttaggaaccttcttctgctgtgagtgctggagtggctgttactcaagattggtctggcttccaggtctaatacgagattattctttgtttctttgttgcattttggtgttatggggttcatgtttttcttgttgaacaggcttattctcctatgccgcctcatggttatgtagcatcaagtcctcaacctcatccttatatgtggggcgttcaggtaaatcgaatttttttagatgattttaagcattctttggagcttcaggggattagttgacgagtcccaaaacttttactatagatatttgcatacttgggataaattcccttggtcacttgtgtagatttaatcgagattaatattttctaccatatatagtacgttaggttaatgaatgaatgtaacgacaacttaagacattgttatttcctttttgtagcatatgatgccgccttatggaacaccgcctcatccgtatgttacgatgtatcctccaggtggcatgtatgctcatccttcattacctccggtactgttacagtttggatgttcagttatgttactcaaaaaagtgaatgtttttgtagtttctgttaacatgttccgtgctgcaacaggggtcttatccatatagtccctatgcaatgccttctcctcatggcatggctgaagcttctgtgagtttctctgttatcactgtttttattagagtatgggtcagatgggatcttgctgaagaatgttttggattcagggtaatactgcaagtgttattgagggtgatggtaaaccatttgatgggaaggaaaaattgccaatcaaaagatcaaaaggaagcttgggaagtttgaatatgattataggaaagatcaatgaagctggaaaaaactcaggagcatcagctaatggagcttgttctaaaaggcatgtgacttcatatttgtatgaacatcatattggcatgaatacttatgattgctagctctagctatgataatgttattggataattttgttgaaattgtctgatttgttctcggtttaacagtgctgagagcggttctgatggatcaagtgacggaagtgatgcaaattcacaaaacgtaagtttctagcatttcattaaatcgttgcgttggatttcatatgaaaattaaggagcgtttatgaatatggtattgatttttgtaggactctggctctagacacaacgggaaggatggttagctaatatagctttttagttctcatctcttaacatgtaataatgacgtacatgttagaatctgcttattttgaggtttctctttcttgtttcgtaattcaaggtgaaacagcttcagagagtggtggttctgctcatggaccaccccgtaatggaagtaatctaccagtgaaccagaccgtcgctatcatgccagtgtcggctacaggtgttccaggcccaccaacaaatctaaatatcggaatggattattggagcggtcatgggaatgtttctggagcagttcctggagttgtagtagatggttcccaatcacagccatggttacaggtttctgtaagtatctcctaatcttacttctcctttacgtttatccaagcagcgtgtttgattgttttgtgaaatcaggatgagagagagattaagcgacagagacggaagcaatccaatagggaatctgctcgtagatccaggttgcgtaaacaggtaacataaacatgtttcttcaagctgatctagcatcatcatgcctatcaagtatgaatgatcaaaagcttttccttttctcttctgtgttcaggcggagtgtgatgagctagcacaacgagcagaggttttaatgaag

SEQ ID NO: 164657 - DNA, 596 bp, Arabidopsis thaliana landsberg
atgtacctcatcacctctccctggtggctccgggccctgtatcccgcctttacctggcggatgccgggagatgaaaaggtgatctatcttacgtttgatgacggcccgcacccacaggccacaccttttgtactggaacagctgaaaaagtttcatgcaaaagcgagtttcttttgcatcgggaagaatatagttgccgaaccggatatttaccggcaggtacttgcagaaggccattctgttggcaaccatacctaccatcactataatggatggaaaacagaagatgccgtatacatggaagatatacgaaagaccatggaactggtaccatcaaaactttttcgtccgccttacggcaggatcaaacgttcccaggcaaaacagctcctcgccccgcagttttcgctccgcaccatcatgtgggatgtgctgagcgccgatttcgacacaagcctgcaaccacaagcctgtttcaacaatgtaatcaaacacacccgcccaggctccatcgtcctgttaaacgacaacgaaaaagccttcccgcgcatgcagtatgcattgccgcgggtgctggagtattttagtaaaggggg

SEQ ID NO: 164658 - DNA, 1220 bp, Arabidopsis thaliana landsberg; identical to SEQ ID NO: 9590

SEQ ID NO: 164659 - DNA, 1128 bp, Arabidopsis thaliana landsberg
  unsure (1)..(1128): unsure at all n locations
attttcagggtgtttctgntgatctttatggtgacttgtggtatgtcacggatctaaccctaggtcctgttcatgaaaactcactttcttgcgccacaagtttggagataaagccacagttattcaagctcaagcacttgaaatcactcacgttcttcaactgcttcacgtcgccgataagaatacctaaagaggattggataaacttggcaagtaacttagaatcactcgagtttagatccaatcctggtttgattggtgaacttcctgaaacaattggaagtctcacaaagctgaagtctttggtggttcttgaaaacgggtttaacgggaagttaccgacgagaatctgcaatttaactaggttaaagcggttggttctggcgggaaacttgttcactgggacgattccggattgtttcaacgggtttaaggatctactgatcttggatatgagtcggaactcattctcagggatattgcctttgtctgttggagagatggtttcattgcttaagcttgacctaagcaataaccaattagaagggaggttgcctcaagaaatcgggtttttgaagaatctgacacttttggatctaaggaacaacagaatctctggagggttgttcgaaaacatcgaaaagattccatctctaacggatcttgttttatcagggaacccaatgggcagtgatgacatgatgggaataaagtgggagaatatgggcaatttggtcattttggatctgtcaaagatgggtttaagaggtgaggttcctttaggtttaacaagtttgagaagattgaggtttcttggtctcaacgacaacaacttgaccggcactgtcccatcaaaagagctcgagacattgccttgtcttggtgctctatacatcaatggaaacaatctatcaggagagctaagattctcaagaaagttctatgagaagatgggaacaaggtttaaggcttcaaagaatccaaatctttgtcaggatgttgtgtcagaatctcggcaatatgttgttggattgaagtcttgcatgatggagaaggcagaggatagtttggtaattaaacaaacttggagcaaccttaagaaggaggatgagtcaagttcatcgatgg

SEQ ID NO: 164660 - DNA, 3817 bp, Arabidopsis thaliana landsberg
atggattcatcaatccaactctattctcattcggttctacatatctcaaactgtgttacagtccaactaaatgaaagaaattaccttctttggaagatacagtttgaatcctttctctctggccaaagtctcctggggtttgtcaatggtgctattaaacctcctccagtcgccaacactctgactcacattgatggtctcaccacagaggttccgaatccagactatcaagcatggctgaggtcggatcaagtggtgcgagcttggcttctaggctctctgtctgaagatattctgcgagaggttgtccacaccaccacggctcaagatgtttggactactctagctctgcactttaacaaggtatcttcgtctcgtctctttgagctgcaaagaaaactgcaagttatagagaagttagataaatcgatggatgattatcttaagcagattaaaagaatctgtgaacaacttactgctattggtagtcctgttagtgagaaaatgaagatttttgctgcattacatggtcttggcagagactatgagccaataaaaacttcaatcgaagggtctatggatcttgaacctcagcctacctttgaatctattatccctcggttaactggttttgcggataggcttgctagctacaacacaggcatggaagtttcaccacatatggccttttatgcaaactattcaggcaaaggaagaggaagcttcaatgggaaacctggtggtaatcaaggcaaaggagggcaatactcaaccaaaggcagaggcttcctccagcaaatcacttcacgctcaagttctccgggttcctacaacacagaaaacagaatcatgtgtcaaatttgtggaaaaccaggtcatccaactttgaagtgttggcatcgttttaataacagctatcagtatgaggaactccctgctgccttgactgcaatgagaattactgatgtgactgaccacaatggaaatgaatgggtaggagacagcggtgcaacagctcacattacaagctctcatcaaaacctgtaacagtcacaaccatatggaggatcagatgcagtcatggtgggaaatagagattttctgcctatcactcacactggatcaactaccctaccaggaagctcaggtatattacctcttaaagatgttttggtttgtcctaacattggaaaatctctattgtctgtttcgaaacttaccagggattatccatgctccattaattttgactgtgattatgtctgtgtgactgataaggcaacaaagaggcttctggctcagggaaacaacagtaatggcttgtatgttctgaaggattcaccagttcatgccttttattcctctcgtcaacaaactgcgtctgaagatatctggcatatgagactaggacatccaaatcaagaagtccttcagtatctgcaaaagaacaaagctgttaatatcaacaaaagctccaaaggcatctgtgaagcatgtcagtttggtaaaagctcaaggttacctttctcaagctcttgttctactacttcaaggcctatccagaagatacactgtgatctatggggacctgcaccagtgaagtcagtacaaggcttcagtttttatgttatctttgtagacaactactctagattctgttggttttaccctctaaagaataaattagattttctaccaatattccataagttccaagctatggttgaaaatcaatatcaaaccaagattggatctttccagtgtgatggagggggagagttcacaagcagaaagctaactgatcacctacaacaatgcgggatcagacagcttatctcttgtccctacacttcacaacagaatgggttagctgaaagaaaacatagacacattattgaacttggtctctccatgatgtttcagagtacctgtcctcagaagttttcggtagaagccttctacactgcgagtttcttaatcaatctccttcctacaacaactctagatgagaagtacagtccttatgagaagctgcatggtaagcctccagaatactcagcactcagagtctttggttgtgcctgctatcccaccttgagagattatgcgtctaacaagtttgatcctagatcactcaagtgtgtgtttctaggttataatgataaatacaaggggtacaggtgcttcttaccttcaactggaagggtttacatcagtcgccatgtcatctttgatgaaactgtcttcccttttgctcagtctcattcaagaccaaattcaggaagtcttactcctttgatgctagcctggacaaagggaatcaacacagtaagtaaacctcaacctaaatcagatgacagtttattcacaagtgaagattttcctccactacctacaagagaaacacctatactaccaataccaataccaagaccgactgtagtacctgctgtggaagaggaaagaagttctgggtgtacgacgagcttagatcatgttcctataggcaacaacttctcttcttcttctcacagtcctggtattgcagaagaaacgtcatatcagtctacagaaagaatatcagatcagttatcaacaacaacaactcagaatgaaagtcaagaagaaatgttacctagtcaagaacctgtgcaagagcctgttgtaactcagtctactcaccctatgaccacaagacaaaagagtgggatcagaaagccaaacccaagatatgctttactgactcacaaagtgtcttaccctgaacctaagacagttgctgcagctctaaaagacccaggatggacaggtgccatgggagaagaaatgggaaattgcaaagaagctgaaacttggtctctggttccttatacaccagacatgcatgatttaggcagcaaatggattttcaggaccaaactaaatgcagatggatccctgcaaaagctgaaagcaaggttagtaacacaaggttataatcaagctgaagggatagattacttagaaacttacagtccagtcgtcagaacagctactgtgagaggagttctacatcttgcaatgattatggagtgggatatcaagcagatggacgcgcaaaatgcatttctccatggcgacttaacagaaacagtctatatggctcaacctgcaagttttgtcgctccagacaaaccaaaccatgtctgccatcaccataaatcctagaccgggttgaaacagccacctagagcatggtttgacaagtgcagtacacacctcttggaacttgggctccactgcagcatttcagatccatcactattcgtctacagcagaggaaaagacatcattcttcttctcctgtatgtcgatgatatgctgattactggaaacagctcagaaacacttgcctctctccttgccgaactcaacaaaagattcaagatgaaagatctgggtcagatgcattatttcttgggaattcaagctcaatttcattctgaaggtctattcctatctcagcaaaagtatgcagaggacttacccattgcagcatcgatgagtgactgtgccccaatgccgactcctctgcctctttagctaaacaaacaaaggaaacagaatcaggataccttttaaaacccaacatatttccgcagccttgctggtaagctccaatatttgactcttaccagacctgatattcagtttgcagtgaactatgtttgccaaaagatgcatgctcctactactctggatttcttgttgctgaaaaggattttaagatatgttaagggtacagttactatgggaataaacttcaggaagaagtcag

SEQ ID NO: 164661 - DNA, 2295 bp, Arabidopsis thaliana landsberg
agcatccacttgatactagctgatagattagtcagaatccgccatggagtcctcaaagaccttccttttaaagtcggaacaatagaaatccccactaattttgtaatactggagatggatgaggagccaaaagacccactgatcctaggaagaccgttcctagctactgaaggagctattatcgatgttaagaagggaaagatcgacctaaacctggggaaggagatgaaaatgaccttcgacatcaacaaggctatgaagaaaccaacaattaatggacaagtcttttggatcaaagaaatggatagattggctgacgaattactggaagaacttatagagggagaccacttagcaagtgccttaaccaacgacagagaagaagggtacctacacttagaaacttaagggtacaaaaagtatctagacgcccacatgctaatggaaggagcagaagagtttaaggaattgattgttccctcagaagaagtagtatcaggatgcaccatgagcctaatcaatgaaaaaaagaactctactgagatactcaaccatggatgagagaacataagttcagatgactggtcagaactcaaagctccaaaggttgaacttaagcctcttccaaaaggtctgaggtatgcgtttctcggtccaaatgatacttatcctgtcaatattaataatggagtaagtgatgaacaagtaaaccagttgttaaatgagcttagaaagtataggagggcaattgggtattcattagctgatattaaagaaatttcacctagtttatgtactcataggatccatcttgaaaatgaatcatatactagtattgaaccccaaaggagattaaatccaaatttgaaagatgtggttaaaaaagaaattcttaaattgcttgatgctgatattatctatcctatttctgatagcacttgggtctcgccagttcattgtgttcctaagaaaggggggatgactgtaattaaaaatgatcatgatgagctcattcctactaggacgataacaggacatagaatgtgcattgactataggaaattgaatgctgcaactagaaaagatcattttcctttgccattcattgatcaaatgttagagaggctagctaatcatgtttattactgttttcttgatggttatagtggtttctttcaaattgctattcaccctaatgatcaggaaaagactactttcacttgcccctatggaacttttgcttataggagaatgccttttggtttgtgtaatgcgcctggaactttccagcgaagcatgacttctatattctcagatttcatcaaggagataatggaggtattcatggacgatttttcagtctatggatcctctttctcctcatgtttgttaaatttatgcagggttctagaaaggtgtgaggaaaccaatttggtactcaaaggggagaagtgtcacctcatggttcaggaaggaattgtgctagggcataagatttatggtaaaggaattgaggtcgacaaggcaaaaatcgatgtcatgattcagctgcaaacccctaaaatagttaaggatatcaaaagctttctaggccacgaagggttctacaggagattcataaaagatttttcaaagattgctcgacccctcactagattgctgtgcaaggaaactgagttcaactttgatgaagattgtcttaaagctttccatttgataaaggaagcactggtgtctgcccctatcagtcaagcacccaactgggaccacccatttgaaatcatgtgtgatgcatctgattatgcagttggggctgtcttgggccaaaggattgatggcaaacttcatgttatctactatgccagtagaacaatggacgaagctcaaacaagatatgcaaccatagaaaaggagttgttagttgtggtttttatttttgagaaatttagaagctatttggttggttccaaagtgaaggtctacacggaccatgcagcactaaggcacatctatgccaagaaggaaaccaagccaagacttctaaggtggatattgttgcttcaagagtttgacatggaaatcattgacaagaaagatgttgagaatggagttgcagaccatctctccaggatgagaattgaagattcagtcccgatagatgacattatgcctgatgaacagcttatgttctacgaccttgttaacaaaagcttcgacacaaaggacatgctggaagaagcatatgtagttgaagaagaaaagttgccatggtatgcagatttagtcaattatttg

SEQ ID NO: 164662 - DNA, 4301 bp, Arabidopsis thaliana landsberg
  unsure (1)..(4301): unsure at all n locations
gcagccactaaattctatgattatgcactaagctggtgggatcaagttgttactattaaaaggcgtcttggagatgatccaattgaaacttggaatcagctaaagaatatcatgaagagaaggtttgtgcctagtcattaccatagagagctgcaccaaaggttgaggaatttagttcaaggaaatagaacagttgaggagtacttcaaagaaatggaacattgatgctaagggctgatgttcaagaagagtgtgaagcaacaatgtctagattcatgggaggcctcaatagagacattatagaccgtttggaggtgatacactatgagaaccttgaagaattgtttcacaaggcagtcatgtttaagaaacagattaagagaaggagtgctaagcctagctacaattctagcaaacctagctaccaaagagaagagaaatctggttttcaaaaggagtttaagccgtttgtgaagcctacagttgaagaaatcagttcaaaagggaaggaaaaagtagttacgaggactagagatctcaagtgtttcaaatgccacggacttgggcattatgctggtgaatgttccaacaaaagaattatgataattagggacaatggagagattgagtccgaggatgagaaactagaagattctaatgttgaaaaagcacctaaaggagagttacttgtgactatgagggtcttaagtgttctagataaagctgaagaacaagcgcaaagagagaatttgttccatacaaggtgtttgattaagggaaaagtgcgtagtttgattatcgatggtggaagctgtacaaatgttgcaagtgaggctatggtccaaaaacttggtttagaggagtttccgcatcctaaaccttataaactgcaatgtctaaatgagagtggagaaatggctgttactaagcaagttcaagtgccattagccattgggaagtatgaggatgaaatcttatgtgatattctgcctttggaagctagtcacgttttgataggaagaccttggcaatctgatcggaaagtgatgcatgatgggtttaccaacagacatagctttgagtttaaaggaagaaagaccgttttggcacctatggcacctaatgaagtctacttagatcagcttagcatgaaaaagaaaggatcttaagttgttcaatccaagacttccgagagtaaaccaaaggggagtactaaacctaatctcttgtttgtctttaaagaaaccttattgaacataacagctttggaaccggctttgccgagtagtattaagtttcttttgtaggactatcaagatgtttttcctgaggaaaacccagaaggtttaccacccattagaggcattgagcaccaaattgacttcgttccaggatcttctttgccaaacagaccatcttataggaccaatcccgtggagaccaaggagctagaaaagcaagtgaatgagctgatggagagaggccatattcgtgagagtatgagtccatgtgctgttccggtgttgcttgtacctaagaaggatggaagttggcgtatgtgtgttgattgtagagcaatcaacaatatcacggtgaagtatcgacaccctatacctagattagatgatatgttagacaaattgcatggttctagcatcttttctaaggttgatctaaaaagtggatatcatcagattaggatgaaagaaggtgatgaatggaaaaatgcatttaaaactaaacaaggattatatgaatggttagtgatgccattcgggctaacaaatgcacctagtacattcatgagactaatgaatcatgttcttagagcttatagaggacattttgttgttgtttaccttgatgacatcttagtttatagcaagagtctagaagagcatgttgagcatctaaaaccggttttagaagtgcttagaaaggaaaagctttatgccaatcttaagaaatgtacttttggaacggataaccttgtctttttaggttatgttatgagtacacatggagttaaggttgatgaagagaaaatgaaagcaattcgggaaatggacaagtccaaaatctgtaggagaagtaaggagtttacatggactatctggcttctataggaaattcgtgaaggattttagtactctagcagccccactaaccgaagttatcaagaaaaacgtgggatttaagtgggaacaagctcaagaggatgctttccaaggcttaaaagagaagcttactcatgcccgtgttttatctcttcctattttcttaaaacttttgaaatcgaatgtgatgcctccggggtaggaattggtgctgtcttaatgcaggataagaagccaatagcttatttcagtgaagagcttggaggagctactctcaactatcctacctatgacaaagagctttatgctttagtaagggcattacaaacgtggcaacattacctctggcctaaggagtttgtcattcacacagaccatgagtccttgaagcatcttaaaggacaacagaagctcaacaagaggcatgcaaggtgggttgaattcattgagacatttccttatgtcatcaaatataagaaaggtaaggacaatgtagttgctgatgcattgtcaaggaggtatgttcttctctcatctcttgatgctaagttactcggttttgagcatataaaatctctttatgcaaatgattctgattttgaaaagatatattcatcttgtgaaaagtttgcatttggaaaatattatagacatgacgggttcttgttttatgataaccgtttgtgtattcctaattcgtctttgagagagctgtttataagggaagcacatggtggaggcttaatgggacactttggagtctcaaaaactcttaaaataatgcaagatcactttcactggccgcatatgaaaagagacgtggagagaatgtgtgaaaggtgcacgacctgtaaacaagctaaggctaagtcacaaccccacggtttgtatactcctcttcctattcctttgcgttcttggaatgatatttctatggactttgtagtaggtttgccaaggactaggacaggtaaagattccatctttgtggttgtggatagattttctaaaatggcacacttcattccatgtcataaaactgatgatgccatgcatatagccaatctgttctttatggaagttgttcgtttgcatggcatgcctaagaccatagtatcagatagagacactaagtttcttagttatttttggaaaactctttggtctaagctaggaactaagttgttgttttctactacttgtcatccgcaaactgatgggcaaactgaggtcgttaataggacattgtctacactcttgcgtgcattgattaaaaagaatttaaagacttgggaggactgtctatctcatgttgaatttgcatataatcactctatgcattctgcctctaaattttcgccttttcaaatcgtttatgggttcaatcctactactcctttggatttaatgcctttgcctttgagtgaaagagtcagtctagatggaaagaagaaggcagaattggtgcaacagattcatgagcaggccaagaagaacattgaagagaaaacaaaacagtatgctaagcacgccaacaagagtagaaaggaagtcatcttcaacgagggagacttggtttggattcatctccgaaaagaacgttttcctaaagagagaaagtccaaacttatgtcgaggatagacggaccctttaaagtgctcaagaggatcaacaacaatgcctactctttggatttgcaaggtaagtataatgtgagtaatagttttaatgttgctgaccttattccttttattgcagacaacacagatttgaggtcaaatccttttcaactgggagaggatgatgtgataatgacaagcttggatcatggagctgatgagataatgacaagcttggatcatggagctgatgagataatgacaagcttggatcatggagctaaggagcagtttgaaggagggaaagttatcaaccactcgatcaagcatgctgttgaagacttgagggagcttgaatctaatgactcgatggactactcgacccaacatgaagatgaactgcttggagctacaaaaaaggaagcaatgcatgttcttaatggtccaatgaaaagatcgaagactagactactaaatcaagatatcactacacttctacaacacattgagggcagtcttaaacaagatgcttgtcaaaccacgttggttgtgnnnnnnnnnnnn

SEQ ID NO: 164663 - DNA, 498 bp, Arabidopsis thaliana landsberg
  unsure (1)..(498): unsure at all n locations
atggaaggagatgtgtattctggatttggagagagataccaattggatggtaagttgttgcagaatttccagaagaggtttgttcaagttcaagacattcttgatcagaaccggctttnnnnnnnnnnnnnnnnnnagaaccatgagtcgaaacaagctgatcacttgggaagaaatgttggtttgataagagagctcaataacaatatcagaactgttgcaagtctttatggagatctctctcattcttttgctagatcggttgatgcttcatcggaaggcgaatctaccgggacattgaaatctgacggtaaggccaacaaccagaagagatttagatccggataatataaccaaaaacatcttgattttgtagattcaaagctaatttgattgtggattaaggtgtgtcatgtctttgttgttgttgttgtggaacagttatgacattaatattgcgtttcttcttaagggtcttcaacagttttgcttatgtaa

SEQ ID NO: 164664 - DNA, 905 bp, Arabidopsis thaliana landsberg
aacacttgggatgacagatttcaggccaatcaatataaaactcatctcttagcggatcgatccaagagaatttctgaaggtatcttagaagatgttccagtgaaaattggagaatgcttgattcctacagacttcatggttttggaatttgaagaagaacctccagatcctcttatactgggtagatctttcttatctattgctagtgctcatatttatgtgaaaaggtcgaatcactttaaatgtatgtgatgtggttatgacttttgacatgggcaagctgaggaagccacccaccattgatggttagacattctctatagagacccataaacactgttgttgagactgggaaggtattggatccaagcgagcattcacatgaagagagttgcaagacagttgtcgagaaacaagctgcagcatgagtgtcgatcgacaccatctcctaagttgatggacaccaaggacaagcagagacaaggttgtccaaaagagctaattttcgagttggaatcactcctacaagtctaggattagttgtcacaataactactgcacctctactatttcatccacctcttgaccagccaaggtactcatgttctccacctaaacctcttgatttcatcaataagagtttaaaatttgcaaaaattatttcacggttgtagcaagccacgagtttctcgtcgatcgcttgtttgttctttggatattgtgcaggtaaaaggagtattccacccatacctgagtcccaccctgctgatgctcctctcttcctagataggcctcatgcactaactgcttatacgccagcatggatgatgagagtgtctttctttgcgatatatactaccgccttctgatccacctgatctccaaactccgccaagtcaagctat

SEQ ID NO: 164665 - DNA, 832 bp, Arabidopsis thaliana landsberg
atggcttatcagattgatcggaagatgattcacgatcaagaaccaatggctgagatcatgccaaatgtcgtaacggctatgtcatctcttctacaaagggtgtcggagacgaacgacgatttgagccgtccgttcagggagcaccagaggatctcagcattcaatgcagtgaccaaaccttctatatcaatcagaagctatatggagaggatatacaagtacgcagattgcagcgactcgtgttacatagtcgcgtatatatatttggatcggttcatacaaaagcaaccattgttgcccattgattcctttaatgtccatagactcatcatcaccagcgtcttggtctctgctaagttcatggatgacttgtaagttctcgtctttgttagaaaaacaagttatgattctttttaattggagtgaaaattgttctcgttttgttcatttcattaattaacgttaaaactttgtttaaattgaagtttttatagaattgttttgttcttcttgacaattttctaacaaatattatctgaatttttataaaatataggtgttacaataatgcattctatgcgaaagttggaggaataaccacagaggagatgaacttgttagagctggacttcttatttggaattggattccaattgaatgtgacaatttctacttataatgactattgttcttcacttcaaagagaaatggttatgaggacgatgtactctccacttttggaacctgcttttttagttaaaagttttcataagaatcttctaaagaatttgtcgacgaagatcatcgtaatagtcaagtcaccagtgctgtc

SEQ ID NO: 164666 - DNA, 497 bp, Arabidopsis thaliana landsberg
atgttttattgtgcatcgcaagcatcgaccgctacggctaacggcgaacgtaccgtcaccgctcgagccatcgaccgtcataacccgattatcaaagatggtcgtagatctttcacggcaccgtgttcctccggagacgactacgttgctccctaccgtcagctttcgaaaattacgagagtaccctcctcctccggcgatggaaagagtgttcaggtagataaaggacggagaagcaattcagggtcgttgatgaagctgattagctatgacgtcagcttagcgaggaagagttttggctgtgttgttgcaacacccaaaactcctcctggttcaactaggtatcttctgggatccgaccctgtttctttagccgggtctacgggtcaggatacggttgcaacggaggaaagtgaagcttctgcgccaaaaagaggctcttctggtcccgtagaagagaagaagaagtcttctggttcaggttcagaccaggcaag

SEQ ID NO: 164667 - DNA, 5325 bp, Arabidopsis thaliana landsberg
atggggagtgaggcggttactcggcggttacccggacggttgccgaacggttctcccggcaggtaccttgagcggttaccgggccataaggacgcgccacgtgtgtggttgggaaggaagcgccctgaaggatccagaaggacctagaggcgcccgttcgcaagggcggttactcgccccttccttattaataatttgcccttcggccaaggaaagaacacaagtccatacaccgaaactctcaccaaactcagaaaaaaacgtgatctttctaagggtgcgagcgaacggaacaagatggccgagttagagaccatgggcactcccggcggccttgggctgacggaggccgaggaagcgaatagtcgaacgaccaaggtgaggcataaccgtaccgaccttaggccgaacggtcttaaaagggctcgggaattcggttgatgtgatctatccttctaatattctgttctaacgattgagttatgtgtgggggtgaaacatggggagcatcatagcatatgcatgatcactaagtgtaaaccacggcatactcatgattcgttaatttcaggatttgaccaaatttgtgggaaggatttggcttagctgcaaggatggttgttcgggcaagtgggtggtgtttcagtcaaattattggatcgaatgattgtaatagcctatagtgcaaacactcatgtcgttcgaaaccttatatgaataaagttggcttgtttctttatgtgaattcgtcactttttacttatgaatctcagaatttccgctgccaattacacttagagcgaattcagataggacccgaggacacttgagttgtcctcggatgggaacaacctcaccggacggacagcccaggatgggacgttttaagtctctcctgagtttaattgttgttagaatcaatttattaagtgagtgcgtgaccatgtgcttatctgagcgattgggttgtatgatttattttgtgggatgatatgtaggtgtggtgaatgtgtttttgggtgaattgttcaataactggttcgttatgttgtatttgtgattatagagcttttttttgcttgtgtgtatagctcgtagatgggaggatcacctcactaagtatttatgataatacttacgcatctcatttgtgttgttgatgcaggtaaagataatgtgatcgtggaatcatggcaaggaagagaggatgatttaggaactcgtttgttttatttttggtgtttttggttattggaaaccggttaggattgtcagttattcttggttttgttggtcgaattatttatttattcataaaatggtatttttgacttgctgtttaattattatgttattggttggtttaattagatatttatggaaatatttaattatattttaaaaaaaaaaaaaaaaatggggtcgggttgtttcacttactaagaaaaagtatgagttttggacagtttttggtggacacccaatgagattttcactactagaatttgcttccatgacaggcttgccttgtggggagtttcgtgacgagtatgaccctgaagattctccggtttatgatgatggcaagaagagctactagaatgagttaattggtccagacaagacggttaccttaggggatatatctgccatgctaaccaagaaacgcagtaaattgtcttctgaccacaaactgaagctcgctttcctactcattgtagatggtgtcctcatagcatcgaaccaaactggtaggcctacatttaaatatgtagagatgttggcagatctagagaaatttctttcgtttccttggggtagagagtcgtttatgaagacggttgaagcgatgacacccgagaaacagattctcgctaagtgcaccggtaaaagatagctcactgacaatcctattcagaatttggtgaatcagcttcagcagatcacattctgtcttaaaggtttgctgcatgccctgcagctcttagcatttcgtaacatacttggaatggtagatctgctcaagtttgacgactcctccttgacaatccttcattggaagaatttaactcatccaacacaactaattacccttccgcagattcactctttagaaagcaaccttaaggtatttttctaacccaaaagtttttatatgggttagaaactataatattctctttctataacaatataatattcagtcttatttactaataataaccttctatttttcaatagagaccagtggatccgcttataggtgaagatattaatgttgaccaaagttgggcagagtgggatgacgaggtgaaagacaggaaagttgcttacatgaatgatttgatacggaaagctcatcaattcaaaaaaagcgattggccaggaggtgatgctacattgccatcaattaaaattccaaagaagaagtcttctgttgttcacaaaaagcatattgtggatcgtaagaagagactacgggtgaagtctgaccctcccaaatccaagcataggtattcaactcgttttaatcaaaatgtaaggctatctgatgatgagaagtctaggttgctcgttgatctacaaaacaagatggaagagctatcaaatcgtgtaatgaagcttgaaaagaaaagaaaaactgtcagattcaagcggtccagaaatttggctttcggttttgttccatttgtttctagttcaaagcgcaagaagtcattggaggtacctactcaatctcaagcctctgaggtaatcaagatttcaaacagtttataatatttgaaccttatcatctacttatacattttccaagttttaacgcataacaaaacttttattttcctcatagaatccatctcattcacacacgatgtctaatcatgtatttggacaacaagaagttggacagcaagtcccaaacgataatttagatcaagctaaagactctagtgatagtaccccattgacaaacacggttagtgtaatagttaacttcaactatatccaaacttggtagaattaacgacgtcaacacatcttattgcaagagattactgatgaccccatggatgtctttgttaccccactacaatcagagcactctaataaggctgatgcaaatgaaggcaaccctatttatgacactgatgtcaaagatccaaatgccaatgaagaagatgttgatagcaaaatgcaggtacttttataaatacaaacacaacaaatcaaagcctttctttaaccatcaaaactacatattcttttgtgatgtctttaatgttaatcctgagtggacaggttttcttggacacccataatgacttatatataagagacattgactattgtaatttccaatcaggttgatccaagttcaaaccaaagcgtcgaaaaactacttcctctcaaccaagaccatattattgatgtaagataatttagtatttgttggacctactgcgcagaccaatggttatgtgtttttttgaccaaatccattctacaatttctttcaggactcatcagagagagttcctgcaatacattctggtttagatctgccaaaagaacacaactctgaagaacatcaaccgaatgccaatgaagcagatgttgatagcaaaaggccggtacttttataaatacaaacacaataaatcaaagcctttatttaaccattgaaaatacataatctattttactctctgtatctttaccacaacaaattcattctacaattactttcaggactcattggacagggatcctgcatcacaatctgatttagatctgccaatagaacagagctctgaagaacagcaagcttagcttggactctaagattatgtctgaactatgaatgaactaattatttatgtttaaaaaagtcaagattatgtctgaactaattatgttctttaaaaagaagggcaaccatatgttgaactaaatattgctcgcaagttaaatttttatattggacaggtgtttgatgatacgttataatatgcaaataatatttgctaatgttgttctcaccatatttttgagtactttaacattcaggacaacatggaggcggatcagcatctcatacattggtaggggttgcaaagttcgcaaaaaagaaggtaaaccttatgtctatactaaagtaggctcgctttaattggacaagagtttgtggatacgttataatttgcagctaatattttcttatgtttttctcaccatcttattggcacttctacatttaggtcaccttggggtcggttgcggtatctcagtcattgtaacagacgcaaccagaagtcaacttcgatggtgattctatgaaggtatactgcaacaatcattatcatgttttatgtgttgcggctcttgagcaattggacatgattttcttgttacttcttaatttgtaggcaatatttcttttatttattctaactagctacatgtgtacatcaacattcaggttactttggagatacttgcagcatcgcattcagtgtcggaggcacaacccgaagtaaagattggcaatgatgctatgggggtataaatttctaactagtttcagctaatgatttacattcattcatttattggagattgtagaggtttgctgcatctctcaggcattatgcaacaaacatttatagaaaaaatgttccacatggtaaagttatctaaaaataaggtcaacattaggtttgaactaaattatgataccatgttcacttttatatttgacaggagtttgtggatcccttaacatttgcagataatattatcttatgttttctcaccatctttttgtgtacttcaacttttaggacaccatggagacgcctccaacatctcattcattgttagggtttgcaatgttctctgaaaagaaggtcatccttatgtctaaactaaattaggcttgcatgttcacttttatattggataggagtttgtggattcgttataacttgcaagtaatatattcttatgtttttctcaccatctctttgtgaaccctaaacattcaggtcaccgtggatatggctgcagcaattcattcaggagtttgtgaagtcaactctgatcctatgaaggtatacattaataacaagtatcataattttctgatatgttttattggacaacactgtttggattgcttttaaaattatcttcttattccaggcaatggttgtgtttggaagcctatatttgatacaagttccaaagctgacaaagagccccaatcatctctcacacatagttccaatagtgtgggtacaagaaacgaggtattgcttaacaata

SEQ ID NO: 164668 - DNA, 907 bp, Arabidopsis thaliana landsberg
atgattaagttttttgatttgttttcaagtgatttttggacttcactttgtctcttttgcaaggtatgggacaaacaaacgactcttaagaacggcgaatacaaaggagaagcggttgagttttcgaagttgtctcctacggttgctgacgacttttggaacactatagctacatgaacacgatagctaggcacctactccgatcttccagctcccgacactaatgtagatgcggttttgtgtgacacattggtaaagatgaagaatattgttcctacatcagtcgcgcagaggattttagctggtactgcacttactgaattgttccttggctgcgatctagacctctctagttgtgagtcatccattaaacgagagcgaatggacttggactacctgattcataccagctcccttaagctaagaagtcgagtgtacttatttctgggcagagacgataacaattatttctgcgggatacccaaccagcatattacttcacttctctccatgataaacctagtgttcgaacctaacgagcagtaccttgttcctgacccttctaaggccgttcctcgacgacgccggactgcagaggctcagcctacagatgagcatgttgtcggtaacgatgagatttatgaggattatgcttatccggcacctctcgcgcacgctcagccatatttgttgctctctgaggatccagcaccgtaccgcctttcaccaccaccagcaggtgacgatatctcacagccgatggcatggatgatagcatcgacaaagaagaacaacagtatgatgcaaaagatgtagagagccatatctaggatcaggcttgaaaatgcactcgcagaggaggagtagatgatgcagatcgtgagaaccagtctgagactattgagga

SEQ ID NO: 164669 - DNA, 1611 bp, Arabidopsis thaliana landsberg
atgaccaacaatcaggtccccgctaacacagtggacatggagggaaacccgattcctccagtccagacaaacactcctgaggttgcgactcccgcagtcctagcagaaatgaaaagcatgatggcacaacttcagaagaaggtggactatcatgaacaagcgaaccggtctttggcccagcagctcgaggcggctacctcccaagggcagatcatgaccacccgctctaacgcgcgacattttcatgatcggcaagtagcggcagacctcaatccaacgaggctcgtgatcaatacgcctgataacacgacgaggcaattccgatgaactgtgccagcgctcaatggaatccgagcaaaaccaacagctttgggagagccgaacgcgacaaaccaagtgaaggaaaccgatccgcagtttcctattccttgagccgaggctgccaagggctgaggaatatgataggaacaagaaataaacgccatcaaactctccctaaccaaggaaaaaaccgagatgaagcttgttcgatcgcagctgcatagcgcagtctcctcggctctaaacatcgatcgcattctagaagagtcccacaacacacctttcactcgtaagatctccaacgcaataattttagacccgaggaagctcaatatcgagtacttcaatgggttgtccgacacaaaggggcatttaaagtcatttataatctctatggcccgagccaagttcaagccagaggagagggacgctggtctctatcatgtattgtcgagcacctgaaggggccggccttggattagttctcaaaacttgaagggaattctgttgacagtttccaagagctgtcaacgcttttcctcaagcaatactcagtgttgattgatccaggcacatcagacgctgacctttgatcgctatcttagcagccaaatgatccactcaaaggattcctcacgaagtttaggttcaccctagccaaggtcgagggaatcaacgacgtcgcagagctctctcccttgaagaaggcattgtggtacaagttagaatttcgaaaagaattaaatctgtcaaaaccacaaacgatccgagacgccatgcaccgagcctcagattacgtttcccatgatgaggagatagagttgttttcaaaaaggcacgagccgtcaaagcaaacacctcaggctgataaatcccaatctagcactatgagccagaaaaagggtgctctagacaaaaccttcgtgcatcacgaggggcgaaacttctcctgggcccatgattaccaagctgatacaccccgcgctcgaggacgcggccgcggccgaggccgaggacgaaagtctttcacatggactaaggaccaacttttgggaaacgaataggaatactacgagttacacaaaaactacggtcatcatcgaagactctgggcgaaattggctgccaagtttgtagctggtgaaatcggtggaggtctgaccatcgaagacttagaagcggagaaggccaaagccgaacaagtaaacgcagtggctaactccaagctggcagcccctacggaaaaccccgaacggctcaagagaggttggggtaaccgcgaggcagatg

SEQ ID NO: 164670 - DNA, 2736 bp, Arabidopsis thaliana landsberg
  unsure (1)..(2736): unsure at all n locations
tcttggcatgcgtacatatatataaagggattcatatatattttcttgtggtattgtttacataagtttaaatgtaattgtggtatattgtggacaatgcatccttcagtactgcattttcatggcaatgaatttatttcggctctaaactatatagaacttgatagttttcagctccacaaagatatagtcatcactaccttccatttggtcttctgttttcaagtttctcatataacaccacatgtcttatgtttgtttccgcagctcttgatcttataaagaacaaggaagtgaaagcaattctggggccaagaacgacgatgcaagcttctttcgtgatcgaggtaggccaaaaatctcaggtgccaattatttcattttctgcaacgagccctttccttgactctggccgtagtccatacttctttcgctctacttacgacgactcatcacaagtgcaagccataagtgagatcataaaggtgtttggttggagagaggtcgtacctgtgtatgagaacaatgcgtttggagaaggtataatgcctggtcttactgatgcattacaagcgattaacatccgtataccttataggacggtgatttctcccaatgcaacggatgatgaaatctctgtggaccttctcaaattgatgaccagacccacaagagtgttcatagtccacatgtattcttcttttgcctcaagattttttattaaagctaagnagatgggattgatgaaaccaggatatgtttggatccttaccaatgcagttaccgatgacttaagttctatagatgagacgggtattgaggctatggacggggtattgggtatcaaaacttatattcgaaaatccgaagatctagacaagtttagatctcgatggaggaagatatttccacggatggagctcaatgtctacggattgtgggcttatgatgcaatcaccgcgctggcaatggctattgaagaagctggaatagataacatgactttcagtaatgcagatcctgggaaaaatgtatctgaacttgaagctcttggtttatctcagtttggtccaaagcttctccagacgctctcaacaattcagttcagaggacttgcaggagatttctgttttgtcaatgggcaactgcaaccatcggtgtttgagattgttaatgtgatcggtaccggagtaaggtcagtaggattctggacggaggaaaatggtcttgtgaagaaacttgaccaagaacaacgaaacatatgtgctggcaagatcatcttaaacagataatatggcctggagaggctaactctgttcccaaaggatgggagatcccaatgaacgggatgaggttgcgcattagagttccaaagagaaaaggtttccccgatcttgtgaaagtcacaagggatactatcaccaattcaccagtagttacaggtttctgcatagatttctttgaggttgtgattcgagcaatgccttataacatctcctacgatttcattccttttgaaaataccgatggtaaaccagctggggattacaacgctctagtataccaagtgtacgtcggggtgagtaacacactataccattaagaagatcatctcagagagtattaattaaatatggttttctttgtctctaccgcagagatatgatgcggttgtgggagatacaaccatattggtgaacaggtcttcttatgtggacttcacattcccatttattaaatcaggtgtcggattgatcgttgaaatgacagacccagtgaaaagagacaaattcagcttcatgaaacctttgtcaatcgaattatggttgacttcctttatctttttcttcctagttggaattagtgtatggactcttgaacatagggtcaatccggacttccgtggaccggctagattatcaagctagtaccatcttctggtttgccttctctaccatggtttttgctccaagtacattctatctccaccttttacatgtcatcttatatatgtttctatttattactttgtttgattcttactcttgagttgctgccagcaggagaaagagtgcttagcttcggggcaagggcccttgttgtcacatggtacttcgtccttctcgtgttaactcagagttacacagccagtttggcatcgcttttgacatcacaacaactaaatccaaccataaccagcatgagtagcttgcttcatagaggagaaacagtgggttatcagagaacatcattcattcttgggaatcttaaagatacagggttcccgcaatctagccttgtgccttttgatactgcagaagaatgcgacgagcttctgagcaaaggatcaaaaaaaggcggtgtctctgcagctttcttagaaatcccttacttgagaatctttcttagtaattattgcaacacttataagattgttgaagtacccttcaaggttgatggattcggctttgtaagtttccatatcaaaacttcttctaaagttgcattatatggtgatcataagtccctttttcgcaggtttttccaatcgggtcacctctggtggctgatatttcaagggccatcttaaaagtagaagagtcaccaaaggcgaaggagcttgagcatgcatggttccggaagaaagaagagagttgttcagcttcagatcgtttttattttttaatcccgaaacagcacggtgtacaaagtttctggggtctgtttgttattgcg

SEQ ID NO: 164671 - DNA, 1434 bp, Arabidopsis thaliana landsberg
  unsure (1)..(1434): unsure at all n locations
tatcatatattgcgatgatgaaggtaagtccttcatgaccttcgtctgaagatcattatatcctaagggagataatgtttcgaaggacgaagggctttaaccattcatattttgtgttgccttgttcttgattcatagcatttgagaaaacattggcgctatctccggtgtactcacttccacaaccttcggcaaagcatcaaccttcgtcatgccgccgaagaggacaacagcgccaggggctgcactgcagcgactggacacgaactaggagactctctttctctctccgagaggccagaagccaaaagagaaaggccaccagtccaacacttcaggaggaggagttggaccaggagatcagggacctagaaatcattcaccagcaggtgcaaaggaaaaaggagaagatggcccggctagccgaccttcagaagaagatcgaagaagctgctgaggaagtgcgtcatcttacccaagatgatcatgaccgagggcccaacacaggagcttcgtcaagaggctcattcaacgaagatgaatggtacgttgattttaatcatggtagctttacttttgatgatgcttctcccctagcagcagaattgcaggctatcccatggccacatacaagccacctcagctacccatgtacgatgggcactcggacccaaaacaattcttgatgagctatgaagcaacaatatcctcatatggaggcaacacagctgtcatggcaaagtccttcgtcatggcagtccgaaatgtggcccagacatggtactcctctcttcggccagggacaatcacgtcatggcagaagctcaaggacatgctggttaccagttttcaaagctttcatacgaagccagtcacagctcaggccttgttccagtgtacacaagaccatgaggaataccttcaggcgtatgtccgaaggtttctgtgtctcagggcctaggcgccaatggtgccaaatgagattgttattgtttctatgatcaaagggatccgaccaggaccaacannnnnnnnnnnnnnnnnnnnntcaccacaaactttggagaagcttctacagaagatggacgaatacatcaggaccgataatgactttcggcagagaagggaagatgcctatagatacttcgagatgaccaggggctttggaggaagactccaccctaggcatgttaggacaatccataatccgaactcaagcgacgacaggggaaatcacactcaaggccatcatcaaagctcccagtcatcagggacacaacaaagctccttcagaccaccagctccaagaggtagaggaggaagaagcttcggtgcaagattcagctcccaaccaagatggttgttttgtttattctgtggagaagacaagggacatacaacaaggacatgccaagtcacgatctagaaacaaaa

SEQ ID NO: 164672 - DNA, 2654 bp, Arabidopsis thaliana landsberg
atgattttgtgcttgcagacaggaaagaaggacgatgttgtcgaagcgggtgtctctaaaactgaagcaatcattgctcccgtcaatgagaaagagaagaaaagtgtaagacggagagttaccttctccgatgacaccaaaaatgatgataaaaaagatcctgatgtaacatttgttgaggagagagaggcaggcccggaggttttggttaaggctggcgattcgttgtacaatcctttggagaaggttgacgaagctaaattccagaaattatgtactataactcaaggagaaaaaaggtatgcatctgtgcattcacacaattatctgattgtttgtcaatcttatatcaatcataactatttaatatgtcttactaatttcaggtgtcatactcttttcggctttcggaaagtggacaacgaattcttcacaactctagccgaggctaatgattgtgttggctcatacgtaagtgaccattaattacgtacactattgtaattgtacgtatatgtaataatatgtttttgaaagtacgtacataacatcagacttttatgtacttttcagcacatggaaatgatggcactcttgatgtggcataagaacggggagcatatgaagagaaatcggtatgtcgtggtggatctcagactcactttccttctgtcaagctgtgccactgcattcagatcctgtcgtaaacccgacactttcaaatgggacaaacttctcacacggtttcccaagggagaatgccttaatcgtgaaccacagctgcattggatcagagatgtggacgtcatatttgttcccatgaactggaaagatgagaagcattgggttgggttggctatatgcctgcaacgtcgtgatattgaaatcatggatcctttgagttcgcttacgcgggagtctgtggttaggtcacgtattcttccaataatgggagatgctaccgtacctagtcagagcgacatgcaaagattatctcgataagccttataccgtgactccttttacatacataaggaatcaacgtctagctcagaatccaactaccggagattgcggtccgtacgcgatgaagtttattgagttgtacatgcttaacactcctgttgaggacaggttttcgattgaagaagatgatatgtacaacttccgtaagggttacgcagtcgagctctacgagcatggaattgggccattaacctagttattcgaagttggaactaaaccaaacttatgtgttttgtatgccttttggaacttgtgtttggttgtgtttacatttacttgtttgttttctaaacaatttattacttttggatgctatgcaacattttatgtagtaattaacaacgtacaaaaacaagatatcttaccaaagtacatacaaactacgtgtccacgtgtacatagtacacgactgttgtgtatacaggcggtaccattgatttgacatccatcaatgtaaaattaaatttctcattgaatgtaactgtaatttccccaacaatatctccatccgtggttattaaatgggaggaagaatttgacctcttcggagtatctcatttctaagatggtcaatcccactatttcagacgacttgctcgctatgatagctaagaaagtggcagacaaaagctggttggaccttaagccactgatacgatccggcactcgtggaagagacattgtctaccgaccggatgtccttaaagacgctaacatctacagcttgtgccgtgttcccgatgacttccaagtaggaggtggccataatccaaccggaccccaaggagaaggccgcaatcgaccatttttcaaaaggtgccttctcgctaacaatccgacggctgtgtataacgaagcaatacgtgttctaattcatgaaactgacatcaatggagcacttaagctcatgcagcgtcatgcacccgtccgagctgatgcaaccatcgtctgcgccatcatattcatatgcgcggggtatgaatggaactaaatttgtttacattatacatagagtacacctatttgaacgtacacaaacataaatgtacgtccatggaaggtcattacaattaggctgtatttgtaataagtaaactgtagcaattagaaggtaaaactttagcataaaagtagggatatgtttaaattcggttacaaatctgtagttatttagaataaaagaaacaagaaataaactaatagacaacgactctgatttcttccacttccggtatatccggattagcaatgaatttggagatggggccattggtcacagccttcagtttatggatcccggttagacgccaggatacgagtgcgataatgttttgaggaccagttagccgctggaagaatctttgaaattcgaaagcttgatcattttgtgcttcacattgaagaacttccttgctacagagaatatatattatacacaggatataacaaacatatagccaaaaacattaaaaataaacaacttactgtttatccattatcttaaaaggagcttccgcccacggtagtcttcggtcaaattgccaacctcaatgagcgcaccaataacatctggtgtacgtaatggaagataaaagcattatgtgtacgtcatattacaaaaatgaata

SEQ ID NO: 164673 - DNA, 1345 bp, Arabidopsis thaliana landsberg
gcgtcttccttgaatcttactaatgagtatctgaaccacaaatgtcgcgttgatcaaggaaaataccaaccaggaagtgagtacgagaaagaactcaacactctcagccgtagagttgctacccttgactttacagatggtttcacacaccggtccaatagtagagataccaaatctgtcaccatcatattccaatgtcgtggtgactcttacaggtccaagtgcaactcctgctatgctaccgccctcgccggggtaatgccactttaacatgtttgcatatgtgtagtctatatcttgtcgttcgctataaaccactaccttaactaaagccaaaagaaaattgactataagaaaccaaaattcaggttagagttagaattacctagctgaaacaaatgtgagttggtttatacacatcaaccgataacaattaacataactgttatatacactatacaaccaaatttgtggtgtgctaggtgttggcttggtgttggcaagattatttacccatttggaaaagattatttacgtccaaaactttcttgttaatatatatttatatattaagtcatctctctttaagtcacaactatttgatttttcgttaggtgaaaacaacaaaggtgcaaggttatcttgtattgaaatgttaagattgctttttaacttgattttatttatcaaaacatttattatgattggtatttagtatttacatatcatccagttagacatatcttctatatcatatcatttggtagattattacgggacaacttttaggtacatatgtcaaaaaaaacttttaggtacatttcgccattttgcatacaactgatctcgtgtacatctcacggttcctacaaaaacatttatgaatatgtatatgtatattacagtttcgtagtaggtgtccgagaaacaaaggtggaataataggtatgaccaatgttttctcgatgttagtatgattaatgacaattccccaagacggatgaactacgataatattttttctatgcacaacccaaacaacgtgagagggaatgtaaactcattcaacaaaaagacgacggaattcctctacaaactgattggaaaagctgatagactcgacgtggacgggatcaactttctatattacgcggcaggggaaatgaggcttgggaagcaaacattgtttgcaatggtgcaatgtgcgaaggacatattgagttgtaaggattgtttggaatggagtatcaaggagctttctaagtgctgtgatggtaaacaaggagcgagagttgtaggtacaatttgtaatcttaggtatgagctatacccttttcttaggact

SEQ ID NO: 164674 - DNA, 2031 bp, Arabidopsis thaliana landsberg
cttccccaaggacaacgacgacgagaaaagcaatcgttaactcaaacttttcatttgttattctcgtattccggtaactccaatgctcatttacgttcaattccacttgggaacctccgcactttgatggagaagactactcattttggagtcacaaaatgcgtagtcgcctattctctctccatccaagtatttgggagattgttgaaaacggaatgctttttgatagtactgacaaccccgttttcattaatgagcaaatccataaaaatgcacaagctaccactgttttgctagcatcgttgtgcagggacgagtaccacaaggtgagcggcttggataacgccaagcaaatttgggataccctcaagatttctcatgaggggaacgacgccaccatgatcaccaagatggagttggtggaaggcaaactgggaaggttcgcaatgatcaggggagaggagccaacgcaaacgtacaacaggctcaagaccctggtcaacaaaataaggagctacagaagcactagatggacggaccacgacgtcgtccgcctaatgctaaggtcatttaccgttcttgatcctcatctcgtgaacaatattcgtgagaatcccaggtacacgaagatgacgcccgaggaggtactcggaaaattcgtaagcgggcggatgatgatcaaggaggcaagatacgtggacgacgccttgaatggaccgatcaacgagcctcaaccccttgctctcaaggcaacaagaagcaaggaggcgctacctagcagggtggcacaaattgaggcggctggacttaatgatgaagagatggccctcatcatcaaaagattcaagacggcgcttaaaggtcgcaagggacagccaagcaagaccaaagccaaggggaagcgttcgtgcttcaaatgtggtaagcttggtcattttattgctaactgtcccgacaatgatagtgatcaggaccaagggaacaagagggagaagaagaagcattacaagaaggcaaagggcgaggcgcatctaggcaaggagtgggactcggattgctcctcttccgactccgacaatgaaggactcgccgccaccgccttcaacaaatcggccctcttccccaacgagcgtcacacgtgtctcatggctaaggagaagaaagtaagtactcgaaactctacttatgcttcttctagtggtgatgattctagtgacaatgatgaaatagactattctagtttatttaaaggtctagatagaattacgattggcaaaattaatgaattaattgatgcattgaatgagaaggataaactcttagagaaacaagaggatttattgtatgaagagcatgataaatttttagaagctcaaaaatctcatgctctagaagttaaaagaaatgaaatgcttacttgtgaattatcttcatgccatgagacaatttcaaaattaaagagcattaacgatgagttgaatgctaagatagaaatagctagtaaatcaacatcgtgtgtagaaaatgttgtaacttgcactagatgtaaagatgttaacattgatgcttgtagtgaacacctagctcgcatttctaaattaaatgatgaagtggctagtcttaatgcccaacttaagactagcaagagtgattttgataaactaaaatttgctagggatgcctacatggttggtagacacccctcaattaaggatgggcttggcttcaagagggaagccaagaacttgacaagccataaggcacccatctccatcaaggagaaagggaaggcccctatggcaaatagtgtgcaaaagaaccatgctttcttatacaatgataggaaatattctaggaatgttcattgcaataatgttgtttcatatgctatgactgcttctagttcccatgttgtgcatgatagaaatttagcgaggagaaatgttattaatcacatgcctagaagaaatgttgttcatgtttctaggaaaacaagtagtgaaccggggatcctctagagtcgacctgcaa

SEQ ID NO: 164675 - DNA, 854 bp, Arabidopsis thaliana landsberg
atggggtcagagggaaatatgaagaagtcggttgtgacacaagtaaccattggtggatttggggaatccactactgcaaaagaactcacagattaccttgaagatgaagtaggactactcgtttggcgatgcagattaaaaacttcttggactcctcctgggtcttatcctaattttgagatcacagacacttcaaacatccccaaatttgattcttacgagagagtggtgcctcacgcatttgtccattgcgaggcccgtaaatcattaatggatgctgtagagcaatccaaactcatcctcggtggccagccattaaattcagcttgtggtcctaagaacccatatacacttaatcaaagaagaagaacgactgtaccttataagttgactggtgtttcgcttgagattgggacattggtttctcgggatgatttttttgtttcttggagagctgaaggggttgatttcctggtggatccttttgacaacacgtgcaagttttgtttcagaaagagcactgccttctctttgaaggatgcagtgatgcatgctgtgatcaattgtgattataagttggagttattggtgagagatatacaaacagtcaggcagtataaaaccttgcatggctttgtgcttattttgcagctggcttcttcaccccgtgtctggtacagaactgctgatgatgatatttacgatactgtccctggcgatctcttggatgatgatgatccttggatccgtaccactgattttacccaagttgccgcaattggtcgatgtcattcatatcgagtgctcatatctccgcggtatgaaaataaactgagaacagccttagattgttt

SEQ ID NO: 164676 - DNA, 1874 bp, Arabidopsis thaliana landsberg
atggtgggaaactataattatccgagtagcggtgtttttaatcgagattgaatgtacaagaggttcgatgaaatgacggggaatttgtcagtagaatacgtcgcaggagtggaggagttcttgatatttgctaatagccagcctatagtacaaagttgtcgaggtaaattccactgtccttgtgctgtgtgcaagaataaaaaacatatcgttataggttttaaagttagtagtcatttgtttagtggaggattgaggtctgattattatgtttggcataagcatggagaagatttcaacatgaatgtagaaacgagtaattatgttgatagtacgtatctaagagagaattataaaagtgtgggtaatgttgtagaagatccatatgtggatatgatgaacgatgcatctcgttataacgtggggtttgatgataactatcatcaagacggtacttatcagaatgtggaggatcaggtacgtaaccattctaagaaactctacgacttgttagaaggttctcaaaatccattgtacgatggttgtcgtgaaggccaatcacagttatcgttagcagcttgagtcatgcagaacaagacggatcataatatgagtgaaaagtgtgtggattcggtatgtcaaatgttgacagattttttaccagaagtaaaccaagctactgattcgcattacaagacaaaaaaattgatgcgcaatttaggccttccttattatacaatcgatgtttgtattaacaattgtatgcttttctagaaagaagacgaaaaggaagatcaatgtcggttttgtagtgctcaaagatggaagcctatggatgactaccgtcgaagaaccaaagtgccatatagtcgtatgtggtatctacctattggtgaccgattgaagagaatgtatcagagccacaagacagcagctgcaatgcgttagcatgccgagcaccaaacaaaagaagaagaaatgaatcatccttcatatgcgacggagtggagatatttccaagagctacatcccatgtttgccgaagaaccccataacgtttatctcggattatgtactgatggatttaatccatttggcatgtcgcgaaatcattctttgtggcatgtcatcctgactccatataatttaccaccgggtatgtgcatgaatacatagtacttgtttcttacatttctgaattctgggccaaatcacccgcgaggtagtctcgatgtcttcctccaacctcttattgaggagctaaaagagttatggtctactggaatcgatgcatatgatgtgtctttgaatcaaaattttaatccaaaattagtagtcaaatatgactagatgctttgtgtatcattcagcataagaactaaaaccgcaaccgcgattccagaagcctaaagtaggatttaggttttaaagtttcgggtctatggtttagggtttagggtttaggggttagggtttaggggtgtgatcctaggttgtgggatttagggtttagagtttaggcttatagttcaggatcaaatatagtatgatccttacagaagtaggacatatggtggttagcgcttcgtagttgtgtatcaatatatgtcatgtgtatgtttgtatatctataatgtagcgacctcatacgagatcccgaactgtaaagtagtgattccttgctatccgattcaattgccaatatactcataagtatctttgtgcttagaccgtcatagctcttaatgaatcaagtaagctgcccttcctttatctggcagtgactagcccgctcagatctaatttgttgagtgatttcatagtagtaagcagagaagttaagagcgagccccagtcgattgcatgtgtcatat

SEQ ID NO: 164677 - DNA, 2005 bp, Arabidopsis thaliana landsberg
atgccgataaaagggtttcagcttcagcttccaagggtgatattcttgtaacaagatatgatgctccctaacttagtgactgtaacgcccgcgggcatgatcatggccggtctaaccacggccatcccgggggtggggtggggggggggggggtcatagatggagagaaccagtcgcaattcggctaaggtcccagggttccggatcttcggccgattcgtatccggtcatctccccactagattcactgcgtaggcttgccaacccttgcggtgaacccggtgttgtgcggttcggacaaagccttatatcattacgtaacattcccgatttgtaaaactgattgtacttgtatatgtactagatattatatgaataaaacatcaccaaatccatacatatatatttatattcggatccaagttttccaaaatacttagtacaaaaacggttttacaaaagcaacataaaacaataccctagttcggcggtcttaacgttcgtcttccctctactggttgattgcgacgggttacctgtaagacaagtagaatcatgagtaatctagtattactcagtgagccgggaccatgtaacaaagaacctattgcaactctaagccgatctaatgcaattctaaaaacctagaggggttaacaaacgaatgaaaagtaaacatgcgacaaacaaatcagagaaacacgcagcaagcaagcaaacatgcaaagataaacaaacaagcaaagagactcgacaatactctagacgcgaacctatgggtcctgagctccattcctcctccctaaatattggaagttgagttctcctatatggatctatcaacccgacaacaactcattgaatccacacatgaaaccaacaagatcacgacttattgaacccacccagtataccaataagcccaatgcatcgtcatgcactcttggcttaggttccaagactaaccggcgagtgattccttgggaccaaaactcactggcttccacacacacaggcaggaatcggcagtgcactaaactagactcacctatgacacccggatcccgcatccaaggtatcctacaacaagaaagctcatctctcatgaacagactcagcctgattgctaaacctttgaacatgttctcggtaatagcttccttacctagatcttagggattaaatgaacgagtccatgggagggttttagatggtacttatgtacaattcctctttcaatatgaacttgatcttttatcatttcaaagaagagagccttggctctttaataattggtttgtagttaatcaaagatgggaaatctttcttgccatagattttcttactaccatagaattgtgggttcagattaggggaataccaatgccttatgtctgtgtggaaactgttagtgacattgctcatgatcttggtcatattatccatatagacttccatgaggccactactaatcaaattgcctatatccgagtaagagttagatttggaataaatgatcgcctaaggttctttcaaaggattaggtttgactctgggaaactgctatacttcgttttcagtatgaaaagttaagaagaatatgcagtcactgtcttcgttttacgcatcaaaggaatccttctccctactcattaccattacttgcaccaagacatgaagacagagttcagatctctgctgagagggtaagaagggtattacatgatgaattgtgtaggtcggatatgaactctcaatcccaattatcagatgattcgtttccggcacctttaacaccacctcttacagttcctactctgcctctgaatcttgcagaacttgcagctacaagacttgagctatttccaccaacaacagtaacaagttctcagaagttgatggttcatcgtcctcaggttggaattccagcccaccaaagcaggccaaatgttcgactgtatccattaacggaagaggaggacgcttcatggttctcgtggatagt

SEQ ID NO: 164678 - DNA, 3209 bp, Arabidopsis thaliana landsberg
atggacgtaaaatcggtcacaaaggtggctgatctgatagccgcagacatgcatctttggggtacagtcaggacgtgcttgtcgcagaaaaacagtaataactcttgttagacgtaggcaattgaggcaaggacgaatctgttagaaagataagccttgtagcttcaaaatgatgtgcagatcggctccaggttccttttagatcgtcgggaaatcgatctgaaagcagatagatcgggtgtagacggatttgtgtctcgataaacaacgcatgcttgagagaaaaacctataactctcggaagacagcaccaaatggagcaaaatcgatcttgttggaaagataagcctcaaagctttaagatgggctcttgatgttttctgaatcgttgggagtttgctttctaatccagttgctcccacagttcgaatctgcgatttgacaggtgtcatatgttttattgaaaaagtgataacgcttagtaaacagctcggaattggatgaggtcggtctctattgaaagataagcctcggggctcagttgatacttaggtcgcctcgtgatgccttttagatcgctgggaatttgattccgaggtcaacagatcggatacagatcgatctgtattttgtcagactcttctgcagataaacggcagtatctccgagaaaacagaccctaacgaagtgagctcgggcttgttaaaaagaggagcctcagggctgtaaattgatctgtagatcgtcttctgagtctctctagatcactgggaaattgagcctgagttcggctggtcggatagagacgaatctcggatcgaagcgaggtcgatggtaactcctaatagacatctcggatcgaggcgaggtcggcttctttagaaagctgactcttggggcgatctgtagataggtatatcattgcctagttcatcaggattttcaaggaaaacgatcccgaagctgactggttttatagagttgggtcctatgactggctgcgcttgcttgaggtaaacgtttatatctctcagcatatatcttcgattaaggcgaggtcaacttcttcgaaaagacgactctttgggcgatccgtagatgtattaacccttacgagattccctgtgatttgccgggaaatcggccccgaggcgaactggtctattcggacggatctgttaagaaacagacagcatcgacttcagaaaaacggcgataactctgagcagagatatccgatggagttacggttagattccctggaacgctgatctccggggcaatccgtggaatggttgtacgtcatctggttcattgtatcttgacgggaaatccccccgcaagtagaatgatatgcgaagagagttctttgtcgtccccacagacggcgccaattgttgaaccaaggattcacacaatagatttgtttagagagggaaaacaaatctagtaatttctcttcattaggtattctatccaagactcgattacaaaagatgttctaatctcttatgaaatacattagggttttaaaaaggtatagctgcatccatgatagattgcctacgtaccctgtgaagggatcaagccattcgtagttctcactaggtataaagttatgtgtttcttctgagtatccaaagatccccttttgtgaagtccctgagacactttatatagggtcgttaaaccgcctctctagcgatattcttcggaagattcttatttatccttaggtcggttctagaggataatcgtcctaaggatattctccttattcttcggaggttttggggagatttcctgatttcgacattatcttcaaagattctcctttatcatttccgaaagtcccataaaagatcctattttaccggaaatgatccttggagaatgaacggtttttacaagtctttgcctcgcgtgttcttcacggctcggtggtcgtttgagaggtggcttcggggcaaacggtatgggcttggtacctatatttacacacagtgtgcacaacttaacccttgctcaattttttcagcacgagataatcgatctccgtcccgataatgcaaaggtctactacgctaacgcttgactctgctaaggttctgcgttcgaatttgattcagcggccaaaagccagatctccattgctgatgctttctgcagaaaaggatggttgtcgtagtaatagtgtgtataacccatacaatgatagggtttacgagacgaagagtgacttttcagggtatcgattcctgggaaactcaggtaagtggtttctggtggtagattcccgaatgaaactctatattatagatgtatttagcgagaagaggatcgatcttccaccactagaatcatttaagggtagccattttaagattttgcgtgacggagaggagaatgtcaagcatatgcaaatggctgataacgatccatttcgtgatgaatttcctcatgctgccgaagatctgagaggtcgtttgtgggttgaagacaagaatggaaactacgttgttgtctggcagtttgaaaagaaccaatttctagggttttgcaggacaggggatgatcattaccgcgagattccaacacagctcgaggttcagagggagttacgaggtttatacgatatggtacttaaaggttacaatctttacgtctttgccacccgtgagttcattcgacacttggatttgtctggacaagatgaagatggtttcaaggatgtgtccgagaaacataggcttccaatgtggatgccacgtctgactatgaaggaacgtgaaagtaggaaccaattgaagtgtatcccatctaacaaaggcattgctgttacaagagcaggtcaagttttgcttgtctatacgttcgatttaggtacctctgaaagtcataggatgttccgtttgtacaagagggatcctaaagatcttgacccgaaaaccctcgacacctggcttcttgaggtgcattctctaggtgatgaggccctctttcttgatttgggtattactgtgcctgctgaccatacccttggtattgagcctaactccatttatttcacccgtggtgatcgtatccgtcacaaagaatcgtcatgcctcgacatctgtgtcttcaatcttataacaaagaccatcaaacgctttcacggtctctccaacttcaacttctacgatgctcagtggtttcatccttcttga

SEQ ID NO: 164679 - DNA, 4885 bp, Arabidopsis thaliana landsberg
  unsure (1)..(4885): unsure at all n locations
agctcactcatatctagatgttaggttctacttcagattaaaaaaagaccttcactctgtttctacactgactttggttttataaaatggatgaacatggagtctctctttcatcaagctttagcgactcctcctgcatttctgatcttcttcgtcctccacttggtaagcttctcttcccttcgacttggtatgtttaacttttgttttgttatttcaaacaatttgtgggatgactttaggttttagatggattgttctggttctttttcatgaacaaaggagacaaggatacttctcgatgaataagataaacaatggctttcgcacactcagttcacgaggtttccttcgaaccagaggagaagccacactgcagcctatggaagacactcagtctgtatcgaagttccttattaatctcagatggtcggatcttttcgatctccctggtgaatatgtggtgatgaatgcggagacgcttaggacactgagtgatgggaacgaagaatggctggagaaattgagaagccttggaacaccactggcatgtctcaagaacgatcgaggagaatctgttcttcatcttgctgctacatgaagtcatctagaactagtgaagagcattatctctgaatggccatgccttttaattgagccaaacttgaaggatcagcttccgtctcatgtagcggctcgtgctggacgtctagctgttgttaaggctcttgttgcatcagtaacatttttttcagctagactggctgaagaagatagagagatactgaatccatatcttgtaaaggacataaatgaagatactgctctaaatttggccttgaaaggacgctataggaaggttgctctccgtttggtgaaggcgaacaaacaagcttcctttcttgcaagtaaagacggaatatctcccttgtatttggcagtagaagcaggggatgtgtcccttgtgaaagcaatgttgggaaatgatggtcctgaagggagaagttttaacttagaagggagacaagatcttgcacacgcagctttgaattccatgagtacaggtttgttttgttttttgaccaatttgcaggatcgtaaagtttaaacctgaatcttcttatgtatggtaattgatattcctacttgtttaagcagatatccttgatgttattcttaatgaatacccaagtcttgttgatgagcgagatgaagaaggaaattcctgtctttcgtttggagcatccatagggttttataaaggagtatgcaacctgttagaccgatcaacatcaagtgcctttgaatgcaacgatgatggatcatttccaatccatgtggcagtagagaaaggtcatattgaagttgtcaaagagattttaaaacgttgtccatactcaaagcacttgcttaacaaaaaaggtcagaacattcttcacattgcagctgaaagtgggaagttcgaaattctacgccacttgacgagatatgaacaaacaaaccttctagcttctgagcaagatgtggatgggaatacacctctgcatctagccaccatcaagtggcgccctcgagctgttagcaaccttactagttttacttccagaaaaatcctagaaatacagaacaatgatggcttgacagctatggatattgcagaagccagtctgcaatctagatatgtcttccgggaggtatatcaaatctctctatgtaccacaacattttatcaaatatcaaagcatttagagcttatcgctattttttgttgcactttctttggataaacagagaatgacgttgatggtcttactgtgtgcgtgctcacgaaggggttttcaagtgatacccactagtggaatgactctaagaagcagatcagagcatcatctaagtggtggtgacaaatataaagacaatgtcaatgctnnnnnnnnnnnnnnnnnnnnnnnnnnnnnnnnnnnnnnnnnnnnnnnnnnnnnnnnnccaggtggctttagcagctctcctccgaacttgggcatggccattttggccaatgagctcgacttttgctatttnnnnnnnnnnnnnnnnnnnnnnnngcaatgctcagttgtagcaatagttgctcttatctgggcacaattaggggatccagaactcattcacaaagcctttcacttggccttaccatctctctttgttgctctagcctccatgtcttcagcatttcttttcggcgtggttgctacaaggaggtctcaggatagctttcttttcaatgtcatcttcaacactataactgccatcttctttcatgtgatggttttgttgctgggcccttatgttatcccacagcttcctggcgttccttttcttcaacccgtaactggtctttatctccatctgctattgttgtttgttaatgaagacgatcatgtctttggctctggtcacacctgtgagaagaagagggtaaattctgagggatcctcaggcatggatcaagtgcaaaactcgaaggttacttaaaaagatatcttaagatatgtgtttatattagttcctcagttgtttcatgtcactatttgaatcattagaagacccgttggtcccatttacactaaaaagcagatgagagcataatacaaaaaccttggtctcttcttgtagacactgtccctttttctgcaggttttacactaccaggtgggtttaatagctctgcttcaaacatgaatatgtccattttggcttacaaattggattggtattcaacaccttggcgctgcaaagctctattgtagcataattgctgttatttgtgcacaattgagagatcatgcactcgttcaccgagcttttcaatttgatcttgcccgtctttgttcgttactataatctcaatgtcataggcagtctcttgtggtgttcttgctacgttacctaacaatggagggggtattaccttgccataggttcctttcaatcctttttctaagaggcttcactagggcttaccgcaatattcttgtgtcgatgagacgatgaccggtaacagttctgttgcgaaggtgtccatggaatcttcaggtgcagatcagactgaattcgttaaatgttgacggtctgggttgatcattgtatgcttgaagcgtggctgactggctgtagtaataagcaagaaataatcacactctaacgaagcttcaggaggctcacatagactctatannnnnnnnnnnnnnnnnnnnnnagctttgattggaaactgggccatctgtaaactttataggcccaatattacacaccttaaagagtgcgacttttgacttgtgtgagcctacaacgtcgttcaaatgaaatcgtcggtgtgacaaaacgcggcggagacggctaatcggccggagttatattccagatgtttcgacctccctcagtatcacaggtaaaatggtggaacaatcaatatcagaaaaagagaggcggaaacgcagaggtggaggattgaggacggctttgatagtgtgcactactcttagtctcataacagcgtcctgacagcgttaattggataatatctgatatggactaaccgacaagagatcggtcttgtcgccgtttgtttttctaattcgttgaccgaaaagtctgcgtttttgatagctaattagcctattattgcgtccgcttttcttcaagactttcgagagtaatggaatttttggatagtagcttggagagatgttgaattgggttaagatagttgacattagaagttgaagaaacccacaagtcgttggatttctatatattttagtatcccactgaatgctttcttcttttggaccatgacttgttttctctgtaataaacaaataaggtagacttgaaaaacccttacacattataaggtttgatctgatgaattattgataaacatatatacatgcaaaggcaacaaacggtatctcttttttttctgatgagaaaggaaaaacaaagaaggtacgcgtctgtttccttttagttgaccatttcttcttccttgatggacaatattaaaacctgaagacttctatttctgtagataccacttaccaatctatatctcaagcattgtggagttggttctgcaagcatttggaaatattgaagttgggaaaagccttccctgagccctccagcatcaagtcgttgcttcggctgacgaataaggtgagaaacctcaagcttactttttactctgttttcattgttttcttgcttggttattagttattactatgttttcattgttttctttctctttgagattctgttgtatgaagattcaggcaactatgttagtgcatgatatacaattaccttgcggttcaatcattaaatataaaacctttgagtctcaatgatttaagcatatttgtttctacttcatcaattcatcgtatgtagttttttttaaaaaatttattccttattgtttaggcgccaaattatcaatatgggaaggtctgatctggactttgaccgtcagaagaaagacgcaagctctaggatgttttatgcagacgaaaccgggcgtacgcactctctcgatttgtcaactctcttcaatgacacaagtgaaactgtgccaatgggtccaaagaccatcgccgctgtaagagcaggtgatgaaacttacctgagagatatgaaaattgatgttaacattgctttaagctcagtgaacgatcatgggaatacaatgcttcatcttgctgcagccgcgggtcacaccgacttagtgtgttatatactcaatgcgtacccaggtctgcttatgaagtcaaattccatgggggaagttgctctccatgttgcagcaggtgcaggccatctcgctgttgttgaggctctg

SEQ ID NO: 164680 - DNA, 528 bp, Arabidopsis thaliana landsberg
tgtgttataaatgtttatatatacttagtttttggtatacatgttcatgatggccatgttaaagcaaatatacaggtgagactgaatgacgatgagtatgtgactgggttgagtggaatattatgggagagaaaggtcacgtctttgacatttcacactaatcaggggaaacacgggccgttttgtaatggaactggatattcatcaagttatatggcagattataagaaggaaattgatgtgaagatacgtgatcgtcgtgagtttggtggtttctttgggtcttttgatgacgaatttgacggtctgacatccattggcatttatgtttatcccacgtaagataacaagcccactctcaatcaagcatgggatcctctatatgcattcgcccataatcaaatcccgacgatcgcggatggtattcctgttatgcacatccgttataagcccaaactcaaagaccggctattttccaagttggatttcaaaagagctatgaagtgcctgataaaagttttcttggat

SEQ ID NO: 164681 - DNA, 468 bp, Arabidopsis thaliana landsberg
atcactcgaccgcgaaactctatccaccactcgaccacgaggtcgagtagatgacttccccacttcacaacaccactcgaccccctggtcgattagctgcctgcaccacttcgattcaccactcgactactaggcaacatggccgagtatcaccatcatcattcactcgaccaatcactctaccaccaagtcgagttccaccatcatccaccactcgacataatactcgactgccagcttcagagtcttctcgattccccactcaaccagacactccaccataaggaagagcagaagactccagctgatcactcgaccagtcactcgaccacctgggtcgagtaccgttcttaatccgtcccaatactgtgtcatttttagtattagggtttcagaacattttgctataagtagcttgtactttatattttcgaaaacaagtttttttccgtagacactgtgtgttct

SEQ ID NO: 164682 - DNA, 204 bp, Arabidopsis thaliana landsberg
  unsure (1)..(204): unsure at all n locations
ttttgaatnnnnnnnnnnnnnnnnnnnnnnnnnnnnnnnnnnnnnnnnnnnnnnnnnnnnnnnnnnnnnnnnnnnnnnnnnnnnnnnnnnnnnnnnnnntatccagctaaaggattttctcttttttccattcattattattctatttattctgacctccatacctcgatcgagatagtggacataggatgccactctttnnnn

SEQ ID NO: 164683 - DNA, 2008 bp, Arabidopsis thaliana landsberg
atggctgatgaaatttggcaagacatacagtatatggttctaggccgagatgatccagaactctttgtccctcaggcagcttatgctagtgttgttgcgggtaaccgtctcagtcttatcaccagaccactcaactctcatgcacaacatctccgacgtgttctaagagctttgcctcgcagctggggtatggcctcaagagtccatggacgcatcattgatgataggtgtatccaatttcgatttcgctctagtctagacttggcttcagtcatgctgcgaggtccgtggttatttaatcagtggtttgttgctttacaaagatgggaagatttttcccgtgctgactttctcacctatattgatctatgggttcaagttaggggaattccagttctctatgtctcttctatgattgtcaggtttattactagtactttgggaccaatcatgggacttgattttgatgatgagacctcttctcagatagcttttatacgtgtgaaagtgagaatctctatatcagaccggctgcgtttctttagacgggtccgttttgaatcacgagaggaagctatgattggttttgaatatgagagacttcataggatctgttccaactgctgtcgtattactcatgatgttgaccactacccttatttagctcctcaggggaatgatcataatgaggctattccagtggctgagaatgaagcagaagtgctacctgtttgggcagaagatgagggatctaacaatcctactccacccccgcttgttaatcattcttctagctctgctatctcttctcacagacctatttctcaaccaccaagtcctgcttcaccaatcttcgatctgaatgaaccagctgaggaacatcatcagtcttgtatccccacgctgagccctaaatcactctttgatggctctatcactccaagtgctcttcatgacaaagggagatatgagattggtgaagggtcaaaacgcagaaagggcaagcagctggctatcactcttgttaagaaaaagaaacaatatcgcaaagactttggagtaaggttttactctgactcggataacactccatagtactactgttccttgctgtccagagtataagggtgaatttcactttttggtgtaaggtctgttttttgaaatgtttatagatgcttaccccacttagtgcctatcaggtttaatgctattggctgaacaatctctcttagattgcttcaagttacagtcttttttagatttcaatgttgcagtttgttggttctcaagttggcagatttctaggataggatcaatcttcttttactaggttcaggtctcttcacactttggtaagcaagaagctctcttaacacaggcataagatgcaagctttaagttcagttacgaagctttgttttcatttgctgttcttattgagaagttaagaagattgactttcaaacactgctaccatggtttggcctcttctctgatggttgatcatcgagcatccagacttttcccttttgatgtttatagtcttgattcagttctttttaatttctttctttagacgtctttggattgtataatatgctctctatatcatgaatggtttgtacgatatgtttcatataaataataacaccctttagaaaaaaaacaaaataaaatataactgattaaaaccatgggggtagggacttaatatattgatggtcatcaatataaaaacaagagtgcaaaagagtcaaaataaaacataattaaaccccatcacaatcaacataaagacaactaattttctgtgtatctttaacaatcatagctttattaatgtaaaagatgtttcacacagacattcaacatagaacacatacatacaatttttaacaaaagggaaagtaaatacaaacaaatacatagaacaaatataattgtttaattagccgacaaaaacttaataattggccttcatttcaaataaaaaaaccacttcaat

SEQ ID NO: 164684 - DNA, 1669 bp, Arabidopsis thaliana landsberg
ttccttgtccgttcctggtgcgcttaagtatgcacacaagttgttcgactataattcctaaaccagacgtatctatttgtaaccgtgttttgcgtggctctgctcagagcatgaaacctgaaaaaacggtttctttgtatactgagatggagaaacgaggtgtgtcgcctgataggtatacgtttacgtttgttctcaaggcgtgttcgaagcttgagtggagaagtaatggttttgcgtttcatgggaaagtggtgagacatgggtttgtgtggaatgaatatgttaagaatgctttgattctttttcatgctaattgtggagatttggggattgcaagcgagctttttgatgattctgctaaagctcataaggttgcttggtcttctatgacttctgggtatgcgaagagagggaagatagatgaggcgatgaggcttttcgatgaaatgcctgacaaagatcaggtagcttggaatgtgatgattactggttggttgaaatgtaaggagatggagtcagcaagagagctatttgataggtttacagagaaagatgttgtgacttggaatgcaatgatctctggatatgtgaattgtgggtaccctaaggaggcactaagtatattcaaggagatgagggatgctggtgaacacccagatgttgtgacgatactgagtttgttatctgcttgtgcagttttgggagatttggaaactgggaagagacttcatatctacatcttggaaacggcttcggtttcaagctccatatatgtaggcactcctatttggaatgctttaattgacatgtatgcaaagtgtggaagcatagatagagcaattgaagtgttcagaggagtgaaagatcgggacttgtcaacatggaatactttgatagttggtttggccttgcatcatgcagagggatcaattgaaatgttcgaagaaatgcaaagattgaaagtctggccaaatgaggtgactttcattggagttatattagcttgcagccattcggggagagttgatgaagggcgtaagtatttcagccttatgagggatatgtataatattgaaccaaacataaagcattatggttgtatggtagacatgttgggacgagcagggctattagacgaggcatttatgtttgtggagtcgatgaagattgagcctaacgctattgtatggcgaacgctattatgtgcttgtaagatttatgggaatgtcgagttagggaagtctgcaaatgagaaactgctcagtatgagaaaggacgagagtggtgattatgtgttactatccaacatatatgcttccacaggtcagtgggacggggtgcagaaagtaaggaagatgtttgatgatacaagagtgaaaaaaccgactggagttagcttgatcgaggaagatgatgacaaattgatgatgagatatttactttcgtcagaacctgagtcaagatcaagaggtcggattagttaaggtgaaaaaccaacgcttcattggcgaactatggacagtaagattgcataactcaatgcaatgatgataactttgatagattctttccttttgtgttctcttgagtttatgagttcttaacttcgaactctgagcaccacattttatagaaagttgtgacattgatgtttatgctcttaact

SEQ ID NO: 164685 - DNA, 871 bp, Arabidopsis thaliana landsberg
tgtgtgtaaagtgtataaaggaggaacaaagtctatcattcatattcttcgggactgcccgaccatagctagagtgtggaatatattaatccctgtgaggaagagacatgcgttcttctctaagtccctataagaatgaatgtatgagaatttaaccgagggagggatgattgatgagattccatggtctacactgtttactatgacagtctggtgaggatggaagtggagatgtggtaatgtttttggggaagataaaaaatatcgagacagactatggttcatcagagatttggctaaagaggtatcgttggctatttctgcgagtgaagaaccatgctctaagaggtctcatgtggaaaacatggtaggctgggagcctccacatgttggatggatgaagttgaatacagatggtgcttctcatggcaaccctgggcctaccatggcgggtggggttctacaagacagcaagggaagatggtgcgatggtttcgatgttcatataggtagatgttcggctcctttggcagaactatggggtgtatactatggtctatttgttgcctaggagtatagagtgtcacatgtaatgttggaggtggactcggaattggtaggtggttttcttaagacaaggactgatgattcacatatgatgtcctcctggtacgcttgtgtcatgactttattggaaaggactggtcagtccgtatttctcacgtgtatagggaagttaatcgtctcgtagatggattgagtaactatatatttttatttgtctttaagtttttcattcttttagttttcttcctactactttagatttgattttgagggagaatatatacacccgagacaaattcttatg

SEQ ID NO: 164686 - DNA, 2324 bp, Arabidopsis thaliana landsberg
caagacagcatcactggcttcagagaattccaacgacaaagttttcaacaacttcgtcctggtgcttttgaccaagatgattacgatgaatttaaaaaagcggaagcgatatttatcgcgctagatcttccctagcacactagatttcattgggcatgcattaatgcacttaaaaagctagtattttggcgtaagtatttcattgatatagctgcaagcactgacgaggataaggtacaactgttagaagctatgagtggtgttttacgcaacaaccaagatatgccaaaacagttatgttcagaccattcatttgggagtccagattcaggaggtatatcatctggaagtccatcctcagtgggtaataatttgggagggcaaaattcacccgggttttggggtcccatttatccatagtggagaacaccaccaaacgttgtacagtggggaacaccaccaaacgttgcacagtgcggaacaccatcaaatgctccacattggggaacaccaccaaatgcacagtagggcacgccaccaaatgttccacaatggggaatatcaccaaatgctccacaattgcggcaaacagaaaattttcaacaaggtggttcaagcggaacgactccaacaaatgttcaatatggattttcagttggatgccaacaagatggtgcaacaactgaaactccaccaatcattcaacaaacatcatcatctggtctcggtttcacaaattattttgaaactggacaaatgccacaaacacctagaccatgaggtctctttaatatttggggaactccgcaaggatctaatgcaagtcatcacagtgatgtaggagatgaagattagtttgtgttatttgtggtttatcaatctcatttatgttttgaaatgatttatgtttttttttagtttaatgttgaatttatatttgtaaaataatctatgtataatgtaagaaatcgtttgtattgaatttcaggcattttgtatatgtcagttgcgatcataagaccttaacaatctaagttacgaagaaagaattgaattgtggaatttggaaaatgaacaaattgaagagttagtaattcaaccagctttgaattattatgaccgatattttcaaagagcacggtccaaactgatagaggtttgggatggagaaatatatggcgtcgactacaccaagatgatgctgcttgtcttcaattattacggatgtcatttccatgtttcacgatattgtgtaatatgttgcatacaaattatagtcttcagccaacattgaatataagtattgaagaaagtgttgcgatgtttctacgaatatgtgggcacaataagtttcaaataaatgttggtttaagatttggacaaaatcaagaaactgtgcaaagaaaatttagagaagttcttacggaaactgaattattagcatgtgattatattaaaactccgacaagacaagaactttatcgaattcctgaaagacttcaagtagaccgaagatgttggccttattttagtggattcgttggagctatggatgggacacaggtgtgcgtaaaagtaaagcctgagttacagggaatgtattggaatcgacacgataatgcatccttgaacatcatggcaatatgtgatttgaatatgttattcacatatatctggaatggagcaccaggttcttgccacgatacagctgttctgcaaatagcacaacaaagtgattccgagtttcctttgcctccgtctcagaagtattatctggttgattcttgctacccaaacaaacaaggatttctagctctttatagatcgtcacgaaattgagttgtgagatatcatatgtctcaattctatcctggtcctcctcctataaacaaacatgaactgtttaaccaatgtcacacatctttacgttctgttatcgagagaactgttggagtttgaaaaaaaatggaggattctttctgattttccaagatataatgtttttttttttttgtcaaccgatataaattagaactcaaaagagccaatcccgagggatattgtttacatacgtgacaagatataatgttcatgttcaaaaaagagtggtaattgctacagtgggattacataatttcatcagaatttcaaacttctcagatgcagattttgcagatgtaatgacagaggcaaatataaacaacatagattttgatcatgatttagatgacatagaagcaacagatatagcagatggagaacatatgacgcaaataagagacaatattgcaaatatgttatgggaaaatcaaagtaatagataa

SEQ ID NO: 164687 - DNA, 2759 bp, Arabidopsis thaliana landsberg
tcctagctgacagatctgttagaattccccatggtatgctggacgacttaccagtcatgataggcgtggtcgaagtacctacagactttgtggttttagaaatggatgaagaacccaaagaccctttgatactgggaagaccatttttagctacagctggagctatcattgatgttaagaagggaaagattgatctcaacctcgggagagatctcaagatgaccttcgatatcaccaacaccatgaagaagcctacgatagaaggaaatgttttctggattgaagagatggatatgttagctcatgaaatgctagaagagctgggagaaacagatcatctacagagtgctctaacaaaggatagcaaggaaggagatttacatttggagactttggggtaccagaagctgatagatgaacacaaagcagttgagaatccaggagagtatgaagatttgggtgaaagagcaagggaggaatatatactcgaccacatcactcgaccaacagcccattcggtgtactcgaccgagctactcgaccacaacaccttctctgaagccaacttagtatccgatgactggtctgaactcaaggcacccaaagtagatttgaaaccgctaccaaaagagctaaggtacgtttttcttggactaaactctacatatcgtgtcatagtgaatgatgagctaactgctgatcaagtaaacctgctgataactgagctcaagaagtataggaaaactataggatattcgttagatgatattaaggggatttcacccaccttatgcacccatagaatccatcttgaaaatgaatcctactctagcattgaacctcaaaggagattaaaccctaacttgaaagaggttgtgaaaaaggagatacttaaactattagatgttggggttatctaccctatctctgatagcacttgggtatctccagttcattgcgttcctaaaaaaggaggtatgacagttgttaaaaattctaaagatgaactgatacccactaggactataactggacataggatgtgtattgactataggaagttaaatgctgcctctagaaaagaccatttcccattgccattcattgatcagatgctagaaagattagcaaaccatccttactattgctttttgtatggttatagcggattttttcaaatccctattcaccaaaatgaccaagaaaaaaccactttcacttgtccttatgggacctttgcttacaagcgtatgcctttcggtctatgtaatgcacctgctacttttcagcggtgtatgacttcaattttctcggatttgatagaggagatggtagaggtattcatggatgatttttctgtgtatggctgttccttctcctcgtgtttgttgaacctgtgcagggtacttaaaagatgtgaagagacaaacatggtgctgaactgggagaaatgccatttcatggttagagaaggcatcgttttgggccacaaaatttctaaggagggaatagaggttgataaggctaaggttgacgtgatgatgcagttacagccaccaaaaactgtcaaagacatcaggagttttcttggtcatgcaggattttacagaagattcatcaaggatttctccaagttggcaagaccgctcaccagactgctgtgcaaggaaaccgagtttgcatttgatgatgaatgtttgaaatcctttcaaaccattaaggatgctttggtatctgctccgtttgtttgagcgcctaattgggactatccatttgagatcatgtgtgatgcatcagattacgcagtaggagctgttttaggccagaaaatagacaagaagcttcatgtcatatattacgccagccgaacgttggatgacgctcaagaaagatatgcaacaactgagaaggagcttctagctgttgtattcgcatttgagaagttcagaagctatttggttggatcaaaggtaactgtctatacagaccatgcaactttgaggcatctgtatgccaagaaggatagtaaaccaagactgttaagatggatacttttattgcaagagtttgacatggagatagtagataagaaaggcattgaaaatggtgcagcggaccatctgtcaaggatgagaattgaagaaccccttccgatagacgattcaatgccagaagagtagctcatggttgtagagttcttcggaaagagctagtgggaaagagttccaccaactgaatgctgttgaaggagaatctccatggtatgctgatcacgtcaattacttggcgtgcggagtagagcctcccaacctgacaagttatgaaaggaagaagtttttcagagacatacaccattactactgggatgagccttatctttacactctctataaagataagatctacaggagatgtgtctcagaagatgaagtggaaggtatcctgctgcattgccatggctcagcatatggtggtcacttcgcgacgttcaagacagtgtccaagattcttcaagcaggcttttggtggccaacaatgtttatgaacgctcaggagtttgtttcaaagtgtgattcaggctatggagcagtcactctagctggtaagagtggagattttactgtaaatggtcaaaggctcaagaaatacttagcagaccaaatccttccagaggtgacatcggttcatctccaggaacttcttgatgattaaaggagtaaaggagtcaagctaatgactttaaacaagctcacttggga

SEQ ID NO: 164688 - DNA, 840 bp, Arabidopsis thaliana landsberg
cttgttcttatcttattccctatataactcatccttcaatgtagttttcatagggaatccaaattgaagctatgatcggaagtcgtttttctcaacgttacttcgacatgctcaaagagaatcagcggaaagaaagcagaacttttggtgtcattgaaaactgtggttttgtctgatcaacaacccacaaatacatgattgagttcatgaatgcaactgagataactcattccgacccaagggaaactgtattatttaacagattcaaacattttgactacattcttgaagacaccgctcatactgaaaatttggtcggtaagtaatacgtatctaatgcagatttcatactttcacaaatcacatgcctgtttttaatctttatttcatactcccatatttggttggtgcactcgtcgatgtcggatgtctgacaaatattacagaaaatggtttcaagattacggattcacacttaccttcgagattatgtacaaatagtacaatgttttttgatcaattacttctaaatttctttcttttcatcatatatttttcctgagaggggtataattataaaactgttttatatgtttcagcaaggaaaggttgaaatgtgaggcttttggccaaatggcggttgacttgcatagcaaatttcgatcttttcgcaatgacagtattgttattgacaatatttttattgcactcacatggtggaagatctttaggtatcatactgaccccaaacacgtgaagatccaaaattatgcagagatatcagatgtgactgtcgaccccaatatcgaagaagtgcaagagttaaaaatggtcctcgag

SEQ ID NO: 164689 - DNA, 435 bp, Arabidopsis thaliana landsberg
tcgaaggcaaagaacattgtcacatatgtgaaaaagaaatacttggtaatccatggaaatgcgtgacttgcagctttgtgacacataacttctgtgtggagctagggaaaccatcaagacatcggtttcattggaaccatcttttgacactcatgccaaaaccacttgctacggatatgacgagttgtaaaagctgcagagaggatataaaagggttcaatctattttgtcgaatatgcaattttatcatccacgtcagttgcgccatgaaaggtaaacgttttcttgggatgacaggaccgaaagtcgttggaacttggagaggacgttgtttgggaggcaagcatagaatggtccaagttatgttcccgaggtcatatcaaaaagtttgtattatttgtcatgagagggtgcttgggaaagctgtgtcatgta

SEQ ID NO: 164690 - DNA, 914 bp, Arabidopsis thaliana landsberg
acccataaaaaaaaagaaaataaatggatgagccaaagttccaaagaaactgcaaaacaatgacgaagaaaacataagtttgattttttcacttcccttagacgtagatttcgacagcacgaagctcttcaaataccaaggatgttggtacgacgacaaaactctgcaaggagtcctcaattttcaaagaggtttcgagccacaagacaccgatataattattgcttcgttccccaaatctggcactacttggcttaaagctctcacggtagctctcctcaagagatctaaacagaaacactcttctgatgatcatcctcttctacttgataatcctcatggacttgtaccattcctcgagctcaggctgttcactgagacctcgaaaccagatctgaccagtatctcatcgtcgccgaggttaaaatagactcatgtggcgttccaaacgctgcgagaggctctcaagaactctcctgtaagatcgtttacgtgttgaggaacgtgaaagacgtactggtgtcgttttggtatttcaacagcgcaaaactaaagatagaagaggagagaagcattttggattcaatgttcgagtccttttgcagaggagttatcaattacggaccatcctgggaacatgtcttgaactattggagagcaagcttggaagactccaagaatgtgcttttcttgaagtacgaggagttaaaaacagaacctcgcgtgcagctgaagagacttgccgagttcttggattgtccttttacggtggaagaagaagagaggggatcagtggaagagatcttggacctttgctcattgcgtaacttgaagaatttggagatcaacaagaccggaaaaacgcttaggggggccgatcacaagatttttggccgtaaaggggaagtcggtga

SEQ ID NO: 164691 - DNA, 2090 bp, Arabidopsis thaliana landsberg
agaaggggaaacgaaaaaggctggaattcaagagaacaagttcatcaagctcttagaatggaaacatctattgaggaggttacttattctgctttggtgaacaaaatatgtagaaaggctaaggttgatgaagcgactactgagctaaaacttagttacattccaaaattagtggatcctaaaaaaccgatatatccaatgatgatgatgttatgtgttatttggaaatgaatgaagttctattccaagttttgcatgtggaaattgtaaatgatgaaaattaagggcatgagcagcatcaagcatgtggtagagaagatcgaggaagtattggttgtgaaagtaatgaggagctgatttcaagtagtagagcgacatataggaacatgattcttgatgaaggtgagccatctcaaggtgatgagatggtagaaaatagtgaacagagagatctgaacatgattgtttatgaagaaaggtttgaagaacaagaagtggtagataacggtgatatgagtgaaggtgctgaagttacacctattgcaaagcgtgaatgggaagacggtatgaatgtgaccatacgtcaagaatttgaaagcaagcaagcggttaaagatttagttgaaaaacttgcacataagaaccgttttcagtttgttatagtgaagtcggatacagtgttgtttgtggttaaatgctctgaagtagaaagggctgcaagtggtctttaggagctgcgaggaatgggaactcatacagcttctcggtcagaacttacaacaagattcatacgtgcttacggtcagatacagttacaatgagaaacagaaggagaggcacaccacatctagttgcatcagttttgcgtgaagattttccatttttgatagacactccaactcccaaaaatctcatccctttggttgagtcaagagttggcgttaaagtgtcatactcaacggcgaacagagggaaaaagatagctgcttatgatctacgtggtaatccagatgatggttttaagatggtgtattgttatatgcacatgttggagaaaatgaatccaggaacagttcatatgttgaattggatgaagctaagaggtttaagtacttattcctcgcattgggagcgtgcattcaaggcttcaaagccatgagaaaggtgatcattgtggatgcaactagtattaaaactgtatatggcggagtactaatcattgctacagctcaagatccagatcaccaccattacctgattgcatttagttgacggtgaaaaagatgcaagttggacttggtttttcagttagttaaaatcagttatacttgattgtcctgaactggtgttctgttctgatagaaatcaaagctttatcaaggcaataaggtaggtatacccgttgtctgaccatggatattgtatatatcatttatcccagaatgtgaaactcagctatacaaaacgtgaacggagagttagttgaaaccaagttcatggaatgcgctaaggcttatccagaggttgagttcaagaaactgtatgctgcttttatcaaaagatattcttctgcaggtgcttatcttgatagaattgttggacagaacaaatgggcgcgatgttattttccaggagcaagatacaacatagactccactaatacagttgaatctattaatggtgtcttctgatatataagggcatacccgctattaccaatgattgatgcgatggtggctaaactgacggaatggtttaacaaatacagaaagatatccttagagacaccaaagatgcaaaagttaataccgtttgttgaggatttgttgcacataagatgtgaagaagcaacactcttaccggtcactgaactaaacagcttttttcttgagtatgatgttattggagttggtggtagtagttatgtggttgatctggttgagaaaacttgctcttgcaagctatttgacattgacaagtatccgtgtgtgcatgctattgccgctgccattgaagcagcaaaaaaaacaggaactgaggtttgtgcagtaaatattattggatggagcagtggtcgttggcatattcta

SEQ ID NO: 164692 - DNA, 333 bp, Arabidopsis thaliana landsberg
cctcactatagggaacaaaggctggttccggtcccccactttaggtcgatgagattagctaagcttgttattttaatatctgcagcccgggggagacactagttctatagctggcgcgcctaccatagaggagctccaaatcgtcctatagagagttcagaatacaacgcactgggcgacagattacaacgaacagactgggaaaaccgtgtcgttacccaacttaagagtcttgcagcacatacccctttagggaggtggcgcattagcgaataggcccacacggatcggcctaaacaacagatgcgcacactgagaggtgaaaggtacgcg

SEQ ID NO: 164693 - DNA, 710 bp, Arabidopsis thaliana landsberg
acgatgaagacggcgaaacgctggctcttccgcctgctgccgctgctcatggtggtgctgttcttcgccgcctgggaattctatgtcgtctatttcaaagtctccgccttcatcctgccgccgcccgaccgcatcgtcaccgcgatgatccgcctgctgcagcagcgcaacgtcttcatgcacgtcgaggtgacgctggtcgagacgctcggcggcttcggcgcggcgatcgtcaccggcgtcgcgctcggcacggtgatggcgaagtcgccgtggaccgagcgggcgctcaggcccttcgtcgtcgcgacgcagatcatccccaaggtggcgctggcgccgctcttcatcctgtggttcggcttcggcctcgaatccaagatcgtcatcgccgccgtgctggccttcttcccgatcttctcgaacaccttcatcggcgtccgctcggtcgaccgcggcctgcgcgaggtgatgacgacgatgaacgccagtgcctggcccattttctggctgctcgagatccgcgccgccatgccctttatcctgaccgggatggaggtcggcatcgtgctcgccatcatcggcgcgatcgtcggcgagttcatgggcggcagcgtcggcctcggcaatctcgcgatcctgacgctgcaggaaatgcagggtcaccagctcttcgccgtcgggctgctgctgacgctgatcggcgtcat

SEQ ID NO: 164694 - DNA, 445 bp, Arabidopsis thaliana landsberg
cccgaactgcccgcagtgcgacatgaccaagaaggtgctggaccgcctcggggcgagctacacccccgtggacgtcagcactgacgccgacgcactggccaaggtgcgcagcctcgggtactcggcggcaccggtcgtggtggcgggggacactcacttctacggattccgtcccgacgcactgaaccggctggcagccgatcgcgagaccgcggccgccgctgcgtagtttcgcggtcgcgccgcgtccgtggcatgtcgcccacccctgctagtctctgttaccgagacagtgaggagtgttcgatgaaggttttggactcagcaattcctcccgccacggctgcggccgaccgcgtctacgtcgtcgccttcatcgacgatgactgggatcactgggccgctcccgacgaagtggccacctaccgaggacgccgcacgccga

SEQ ID NO: 164695 - DNA, 541 bp, Arabidopsis thaliana landsberg
  unsure (1)..(541): unsure at all n locations
gtggccatagtcatataaaaagcgttccattttactggaaaatgctcaatgatagcaatagaacacgtcattctcgttgacgaaaatgacaatgccaccggcacagccgaaaaacttgaagcgcataaggcgaatttacgccatagggctttttccgtctttgtttttcgacaaggcactcagttggagttattgctgcagcaacgcgctgacgataaataccattctgccggcttatggactaacacttgttgctctcatccacgccctgaggaagacattattcacgcgggggagcgtcgtttgcaagaagaaatgaacttggatgtgagattaaagtcattagggtggtttcattatattgcgcattttgacaatggcttggtggaaaatgagattgatcatgtattggtcgggacgactacagctgaaaatattacgccgaatgccttggaagtgcaggcgtatcggtgggtaagcattccagagctaanaaaagaattagagaaagagtncgttaaatttacgccatggttgaagc

SEQ ID NO: 164696 - DNA, 578 bp, Arabidopsis thaliana landsberg
  unsure (1)..(578): unsure at all n locations
atgagcccacttttgactacgttaatgcttgcccgtatgaggacgctantaagcctttcccaaagcagccatgtttgaattggctgagagaggctacacttctcatttgagcaactgatttcctgtattatctcaatccggacatttgatgaaactactattcctgtctccttaaggctttttgaaattgcccggatacctcaggaaatactaaaactaagtcctgaaagactgagtgaattattgtttggcagttcatatccggaacaaaaggcttatacgatgttaggcattgcacggacagcaattgaacgatacaatggtgaattacctgctgatttcgataagttaacagaaatgaaaggtgtagggccaaaatgtgcgaatctggcattgggagtagcagcaggacaagcggctattagtgtagatatccatgtgcacagggtggtcaatcgatggggatttatacaaaccagtcagccggcacacacattgaaagcattagaagccaaagaaccagttgaacaatggattgatattaatcgttttctaatgccttttggtgaacgtatctg

SEQ ID NO: 164697 - DNA, 1858 bp, Arabidopsis thaliana landsberg
aacaccttagaaacttttacattttcataatattttatgcggttttgttgtgtttgcttttagttttctcatagagtttaaggagtgactcatgtgttagtcactggtggtgctggttatattgggtcacatgcggctttaagacttcttagagattcataccgcgtaaccattgtggtaacttagactactttcaaaattgtcaataactatttgatgaaatttgaatacattaatttaactattgttatcgcaacaggacaatctttcgcgtggaaatcttggtgcggttaagactttacagcgattgttcccgcaaacaggaagacttcaattcatttatgctgacctaggagatcccttagcggtatctttttataaccttttgatatttttcatcctttgaaggttaaaagttttggtttctgtttttttacttttcttttgaatatattttcaggtcgaaaaaatcttctcggagaatgcttttgacgctgtaatgcattttgctgcggtagcttatgttggagaaagcactctttatcctctaaagtagagttcttattcgtgctatatatctaaacatagctgcaagagtttagtttttttcggtcttattgtttacatatttgtttattgcagatattaccataacattacatcaaacacattaggagttcttgaagccatggctagacataaagtaaagaaactaatatattctagcacttgtgctacatatggagagcctgaaaaaatgccgattactgaagacactccacaggtaaataaccttagaattcgcgagtgatgaaacccctttctccgtgtctttttaatggaaaataatgtatctaggtaccgattaatccatacggaaaagctaaaaagatggcagaggatatgatcttggatttctcaaagaactctgacatggcggttatgatcttaaggtttggtttggttctgttcattgagtactttttgttcttactctatgatcaatgaaacaattatgcaaatattgctgatgaaccttataaacttttgtagatacttcaatgtgattggttcagatccaggaggtagattaggagaagcgccaagacccgagcttcgcgagcaaggaaggatttctggtgcttgtttcgatgcagctcgtggtttcattcccggactacaagtaaaaaccattattaaaaaaaactataacctataatcatatattgcaacatcctttatatgatatggtttgtgtaggtgaaaggaacagattacaaaacatctgacggtacttgcattagagactatatagatgttactgacctcgtggatgctcacgtgaaggctctcgagaaagctcagcatcgaaaagtcggtatctacaatgttggaaccggaaaaggtcttgacttttaacattttcactacacaataactctgttttacttcttcttataaccgaaagattcttaagtccaaactaatctccaaaacatccagcttccatgtagtcatcaagaagctgatttgtctacttccataatttgaattcattgcacaagatttgagttacaatctgacattaaccgttttgtggtttggttaaacagggagatcggttaaagaattcgttgaggcatgtaagaaggcgacaggagttgagatcaaagtagatttcttgcctcgacgaccgggagattacgcagaggtttacagtgatccaacaaagattttgaaagatttgaattggactgctcgattcactaatcttcaagatagtcttcaagttgcttggagatggcaaaaaattcatcctcatggatataattcttattaaactaaaaaacagagcaaa

SEQ ID NO: 164698 - DNA, 1975 bp, Arabidopsis thaliana landsberg
  unsure (1)..(1975): unsure at all n locations
catttatctcgaattaggaatcttgccagaccatcgccaccaccatttcacatctggagaaacaatagagttgttgtaaaaactaatgtttgatattgtttacctaaactatttgtcttgatccgccaaagaaacgatccattttctaaggtcacttaactcccaacatacaacaaccattaacagttttaaataaagtatttttgatgatacacttaacatttgcaaaatcagaaccttctcgtattaaaatatgagtatcagtgatagaaaattaatgctaatatttttattgtgttttgtacggtaatctttaagtatctacctcagtcctttttaaattgagggagtgagtgtgatacggaatcctgtatttaatacaagatatgtatctcataagtcataactatagcttttttcattgccagcaaacataataaatatgagctagatggcatatctaattactactagtagtatttagtatttttcttctagattctttctaaaaataaatctgatatcaaatcatcaatgatttatccaaaattattttgcattaatacacacagatatcacaagaagatcggcctgacacaaaaaagttttattattagtctctctaaacacaattttactcatccaatttatttataagcatccaatttacatattaaaatactcattttctttgtctttcttctaccatttagctttttgtacatactaaattatttatctaaaatgattccaaaacttgagcataattggatgtttcccactggtcttcggaacttcacctctctaccaatgtgtatataaatagactcagggatgtgtgtatctactattcaattccactttaagcttcaaaagctccctctcatcacttctttccatctgtacttctctcacaaaaaaatctgccatgcctgcccaagtgatcgctgagcagaccacctttcactccgtccacgacaccattatggaggagacgaatacaactttatatcctaagaggtacattgtttgtcccacgaacttgaaattaattaacaagaatgaactatagtccatgtcacttatatactatagtgttggttaattctcaaaaagtatacgacctataataatagtgtttacaccgtatataggttggaaggaaaagtagccatcataaccggaggcgcacatggaataggcaaagcaaccgtcatgttattcgctagacacggtgccacagtggtgattgctgacgtggacaacgtagctggctcttccctggctaagtcactctcatcccacaaaacctcccncgatggtggcattcattagctgcgatgtctccgtagaagccgacgtggaaaaccttgtgaacgtaaccgttgcacggtacggtaggcttgacattctattcaacaacgcgggagttctcggagatcagaagaaacacaaaagcatattagacttcgacgcggacgagtttgaccacgtgatgcgtgtgaacgtacgtggcgtaggactcggcatgaaacacggggcacgcgctatgatcaagagaggattcaaaggctgcataatctccacggcgagtgtagccggtgtgatgggtggaatgggaccacacgcttacacagcctcgaaacatgcgatcgttggtttgaccaagaacgcagcgtgtgagctaggcaagtatgggattagggttaattgtatatcaccgtttggagttgccacgtcgatgctggttaacgcgtggcgaaagacgagtggtggtgacgtggaagatgatgacgtggaggagatggaggagtttgtgaggagtttggctaatttgaaaggagagacattgagagcgaatgatatagctgaagcagcgttatatttggcgagtgatgagtctaagtatgtgaacggacataatcttgtcgttgacggtggtgttacgactgcaagaaactgtgttggtttgtga

SEQ ID NO: 164699 - DNA, 1272 bp, Arabidopsis thaliana landsberg
atcttataagttactaagagtttttgtcttacaaatggtaacgtgtcataaaggcgttcacaaatgcatggaaagatgcatgcacatggaatggaccaagcaaaatgtacataccactaggaacattctatcttggtggtgtaacgtttgtaggaccatgcaatggtaagatctcgtttgtcatcgatggaactttgttggctcctccgaacaacgacgacattaaaaaggaaatatggataaacttccgctacatcaactatctcacggtcttcggggatggcaccctcgacggccaaggaaaaaagtcatggtcactaaatgattgccagaaggacaataattgtcccaaactcgctatagtacgtacgctttcttgaactttctttttatagctatttttttttgggatcaaactgaatttttatgcctttatatatatatatatatatatatatatatatatataagttttaaaaagagaatcttgaaacataaacttgatttaatcatattttcatggtgttttgatacatttgcagaatatggggttcgatttcgtaaaaaactcaagcatgaatgggataacatcactcaacagtaaagctggacacttcaatttcttatccgttgaccacttcagcatcactagagtcaacataatagctcccggcaatagtcccaacactgacgggatcaaaatagctttatcaagtaacatgcaaatctcaaacactcacatcagcaccggagacgattgtatcgcaatgctctctggaaacacaaattttgatatctataatgtcaagtgcggaccgggacatgggattagtattggaagcttaggaaaaaacaaagacgagaagaatgttaatggtttaatggttagaaattcggtctttacctgtacgaccaacggtatacgaattaagacatgggaatcttcagcttcaacaatccgaattaccaatttagtgtatgagaatctacagatgatagatgttgaaaatcctatcagcattgatcaaaaatattgtccttacccgccatgcagtaatatggtaacttactatgcaagaaacaaatttcgatcttcttagaatcttaatcgactttaaaattaatatgttggatcatgtttttttgcagggagattctcacattcagatccgaaacgtgacactaaagaacatttggggaacgtcaaagaataaagtggctgtgaaatttcaatgtagcaaaagaaacccctgcaaagatgttcaattaatc

SEQ ID NO: 164700 - DNA, 633 bp, Arabidopsis thaliana landsberg
  unsure (1)..(633): unsure at all n locations
atagcgaagtggctcgggcttctcaaacggctaggcgcgagaccttaaggccgccgagcagaaggtgtcgctccttgacgggatcaacggtcagtttatgtacttatcccaggcgctggctaatgcgcaactgatcaagacacttgaggaaggtggagtgttggcgaccgagaaggaccaagttgaggaatggctgaaacacttcgccaatgccgaggtcgatttcaccaattttatcgccgagctgaaagaggaactcaaggctcctactctcgaccccacttctttaagtccgggcggccacaggtcggttgagactcttgccgacgaggcgggggtcaccgatcagtctaggtcgcttctgcctgccgaagatattcgcccgtctgnnnnnnnnnnnnnnnnnnnnnnnnnnnnnnnnnnnnnnnnnnnttattatttttttgttttgttaatttgttcgattattgtacttgtgcctggatggctttatccatttttaaattctgaaacacttagttcgattctgaaaaacctgaaccgttttattgcctgatgtgattcagtttgagtattttgggtgaaacttctcggttgcgacccgatctgattcaccctttgaccagcatttag

SEQ ID NO: 164701 - DNA, 982 bp, Arabidopsis thaliana landsberg
atggcggatgaattttgggatgaaatccaaaacctggaacttggtcaagaggacccggctttatttattcctcatgaagcttatgtcatggttgaagctactaatcgtttgagcttgattgatagaccccggaatccaagagttcagaatctaaactcggttattgctgtcttaccaagggtttggggattgacaattcgaattcatgaaagaatcttggatgcaacctatgttcaattcctgttccaaaatgaagttgatttgctgacggtgcaaagaaggaaccatggctctttaacaactggtttgttgctactcatagatgggaggctgctcctattttgaattttgtcactactattgatctttgggtgcagattcgtggagttcctcttctatatgtgtgtgaagagactactttggagatagctcaagaattgggagagatcatcatgatggattatcatgatgctacctcaactcaaatagtctatattagagtaaggattcgttttggtatcactcacaaactcagatttttccagaggatcatctttgaatatggtgaaactgcaatcataagattccagtatgaacgtctcaagcgaatatgtaacatgtgtttctggtttactcagagactattgtccctatcgtcagtgtcctcacaacatagcaagagaaagggctctcttccgagatagtgttttcagatcaagtttgaattctcagtctcatatgacttagactttgtttccagctcccttgacaccgcctccaagagtagctcctcctccgctgaatcatgaagaattggcggctgcaattccatattttgccacaacaagagatgctcataacatatatggtgggagtctagtactacaagacaacaagggtcatcaaactctaacaacactccaccacgagaagcggcaaacttatctggtagtagcagagtctattgagttgtcaatcatca

SEQ ID NO: 164702 - DNA, 3019 bp, Arabidopsis thaliana landsberg
gcatgttgctttgagtttacactcttctttagggattttcattatcatgaaatatcataaacttttttcacaggtttacctttaagttgtgtttaacattgtgcaattgtgttttgcagttaactttgtcggcttcaaacttgttggactgtgacataacgtctaaggtattcctagaattgaatcatctctaatattactactagattaaactttttggacatggtcgtatgagatttagagccatttactttagttacatgtgaagctgatgagttttcgatttattgtagagtgatccgatggctgtcatgtatttgaggaaaaaggatgggagacttgaggaaattggccgtactgaagtcatacttaacaacttgaatcctaagtggattgagaagataacagtctcttttcagtttgaagctgtccagacattagtgtatgcaactgttaactattcttttctgataaattgcacatgttgaactcatctttaaacttgtatgaatctttttcttttcagttttcacgtgtatgatgttgataccagatatcataatgtgccagtgaaggtaatattttcattgatagtaacatcaagaagtttgcatatcgataataaatgctacacatcaaaagtggtttcaatatactgtataactttgcagacattaaagctaaaggatcaggatttcttgggagaaggcacatgtgttctatccgaggtaaatttattcagtaatcagacactgctacttgtgatggcttcattgttgtttggccattagtcagtgttactgctctttgtgtacgacatatctaatacttacaatttacattcctctttcaatcaccagattatgacaagacaaaaccggacactgacattaactcttactggcaacgttagagctggtgtgaatagaaatttgggaacactctctatccaagctgaagaaacagttgcttctaaaactgtcgctgagattaattttcgctgtgtcaatttggataacaaggacttgttctctaagagtgtacgtacaaacttatgcattcttgtccttctaggtaacaatattaagatttcttgcagaagctttaacttgttatcttattttctctttctaggatcctttcttaagaatatcaagagttgttgagacaagtgctgcagtcccaatttgtcggactgaggtcgtggacaacaacctcaaccccatgtggaggcctgtgtgcttgactatgcaacaatttggaagcaaagtaagctagttgtttcactgtaattcaatgtatacatttgaaataatcattatgttaaattgattgttttgtttatgcaggacaccccattggttatcgagtgcttagattttaacaccagtgggaatcatgaacttattgggtaacatgttaacctttaacattctaccgggtctcaccatttttgatttttgttactgacaattatactgaaccttgcagaaagacagagaaatctgtagcagaattggagagactttgtctccagaaagaggctgcaaactttgtctatccatctctaagtcacggtagaaacaaggtgcctagtcgtaccacttgattgaaatcttaatacagttattttcatttattttcgttaagattttattgggtttctgtaggttctgaaaggccagctcattgtggatcgttatgtggagaaagtccagtacagttttcttgattacatatccagtggctttgaacttaatttcatggttgcagttgacttcactggtgattcaccttcttctacttcatatatatcttatctttacttagaaaccttgatcattaagattgatggtctgtctttcagcttcaaatggcgatccccgaactccaagttctttgcactacattgatccatcaggcagattaaactcatatcaacaggtactattgttaccccttcgtttcttttgtttgtgatctgtatcctcaataccaatacattgcttggactagaatggttagttctctcacagcggctaatgaaatagcatagatttggccatttaactatatgcttattctcagtataaaaccatcgtctcattactttttctttcagtgtcgtgattcccttgatctattgtatgtataaacataatttggcttctgtttttttccaggctattatggaagtaggagaggtcatccagttttatgattctgataagcggtttcctgcctgggggtttggaggaagaacatcggatggttctgtgtcccatgcttttaacttgaatggagcatcatatggcgacgaggtaacttacgagacagaaactgttatctccctttattattggagctgatattgtgtgcatactggtgtccattatttgaaaaccatgaaacattgcattctcaaaactgcatgttaagtttcacattgcttcatattctcttttcgttttcaggttgttggagttgaaggaatcatggtagcttatgcgagtgctcttcgcaatgtttctctagcaggaccaactctatttagcaatgtggtcgacaaggctgctcatactgcttcacagtcactctcacaaaacagtcccaagtactttgttctgctcatcattacggtaagagactgaacattcagatacgtaatgactttggcccagttcagatcgaatgtgcatctgttactagtaaatctatagcttcaatgacaaaaaaaatggatgtgtgaacaggatggagtccttacagacatggcgggtacagtagatgcattagtgagagcttctgatctcccgttgtcagttcttatcgtcggtgtgggaaacacagacttcaaacaaatggaggtacaagttttgttttgtcaagttaggttttatatctgtctctttgcaaatagtaaacatgcagtgacttgaccttgtaaatatttcagatgcttgatgctgataatggtcggcggttagagagttctactggtcgaatagctacacgggac

SEQ ID NO: 164703 - DNA, 1336 bp, Arabidopsis thaliana landsberg
gctgatatctttccagagggtgattgcgatcctagtgtcttggattatattccgaccatccggtctggaagctttgctgatattgggccaaagagaaacatggaagatgaacacattcgcatagacgatttatcttctcaagttggttccctttttgagttgccgaagcctagtgctttctatgcggtatgtatcgttgcttccttataatctgatgctcttttaagtatacattctgacttgactttcctctgcttaggtttttgacgggcatggaggaccagaagcagcagcatacgtacgggaaaatgccattaggtttttctttgaagatgagcagtttccacagacatcggaagtgagtagtgtttatgtggaagaagttgagacttcattgagaaatgcgtttcttcaagctgatatagctttggcagaggattgcagtatcagcgattcttgtggtaccaccgctctgactgctcttatttgtggaaggtacgtgtttcattcagttttgtttagttctcaatctatctttagaatcttaagagatctcttgcgcatatacgaagatgtgcacaaaggtaaataaatctattgttaggatcttaagagagctcttacatatactagattgtaagtatataacctgtgacatgagcaatattggctatggttttatacttttgattactctttctgttgttgtctttggggtttaactgtgattttctcatgggatacttatgttcttgtcttttgcagactcttaatggttgcaaatgccggagactgcagagcggttctatgcaggaaaggcagagcgatagacatgtctgaagaccataaaccgattaatctacttgagagaagaagagtggaggaatccggcggtttcatcactaatgacggttacctaaatgaagtcctagctgtaacccgagctctgggcgactgggatttaaaactgccacacggctctcaatctccactgatctcggaaccagaaatcaagcagataactctgcctgaagacgatgagtttcttgtgattgggtgcgatgggatttgggatgtcttgacgagccaaaaagcggttagcattgttaggcgtggcttaaaccgccactacgatcccccaagatgtgcgcgagagctggtgatggaggctttggggcggaactcatttgattatttatctgcggtggtggtatgtttcatggcaatggacagaggggactagccggtggtcccattggagaagagaaggtgttttagtctttcgccctaagctttctgtagcttgaggtatctgttggatggctgacactagtgt

SEQ ID NO: 164704 - DNA, 2275 bp, Arabidopsis thaliana landsberg
ggactcccgaggccgaggaagccctcgaaaacttaaaggcgctccttactaatgcgcccatcttggtgccccccgctgagggagaagctctcttggtctacgtagccgcaaccactcaggtggtcagcgtcgatcgtagtcgagagacaagaagaagggcatgcactgctcatccagaggtcggtctacttcatcagcgaggtgctatccaagaccaagatccgctacccacaaatctagaagctactgtacgcagtaattctgacacgacgaaagttgcgacactacttcgagtctcatccggtgactgtggtgtcatccttccccctgggagagatcatccagtgccgagagcgctcgggtaggatagcaaaatgggcagtggaactcatgggcgaaacactttcatttgcccctcggaaggccataaaatcccaaatcttggccgacttcctggctgaatggactgacacccagttgccaacagctccaatctagcccgaactttggaccatgtactttgatgggtcgcttatgaaaataggagcaggcgctggcttgctcttcatctcaccctcgggaaacatgtgcgttatgtaatacgcctccattttccggcgtcaaacaacgtggccgaatacgaggccttggtgaatcggttgcgcatcgccatcgagcttggggttcgacgcctcgacgctcgtggcgactcgcaactcattattgaccaagtcatgaagaactctcactaccgtgatcaaaaaatagaggcctagtgtgatgaagttcggcgtttggaagataagttctatgggttggaactcaaccatgttgctcgacggtacaactagattgcagatgagctggctaagatagcctcgggacggacgacggttcccccgaatgtcttctccagggacatatatcaaccatccgtaaaactcaacgacgcgcccgaacccgagtaccctcgtcgccgaggtgaggccttgcgcgtcgaggagagcaaaatgggttgcgccaaaccaaaactggcagaccctgtacctgcaatatctcctccgaggagagctgctcctcgacaaggccgaagctcggcgactggctcggcgcaccaagtcgttcgttttgctgggagatgaaaaagagttgtaccactgcagcccctcaggcattctccaacgatgcatatccgtcgcccaaggacaagagctattacaagaaatacactcgggggcttgcggtcaccatgcagcacctcggaccctcgtcggaaacgctttccgacaaggtttctactggccgaccgcggtggccgacgccactaggattgtacgctcctgccgagggtgtcaattatacgcgagatagacgcacctgtccgctcaagccctgcagacaatacctatcacttggctgtttgtcgtatggggtctggacctcattggtcccttgtagaaggcgcccgggggcttcacacacctgctggtcgccatcgacaaattctccaagtggatcgaagtccgacccttaaccagcatcaggtccgagcaggcggtggcgttctttacaaatatcatccaccacttcggggtcgcaaactccatcatcaccgacaatggcacacaattcactaggaaaaagttcctagacttctgcgaagaccaccacatccgtgtggactgggccaccgtagctcacccaatgataaaatgggcaggtggagcgcgccaatgacatgattttgcagggactaaaaccgaggatctacaacgacctcaacaagtttggcaagcggtggataaaagaactcccctcggtggtttggagtctgaggacgacaccgagccgagccacgagtttcacgccgttcttcctagtctacggggccgaggctgtcttgcccacagacctggaatacggctccccgaggacgagggcctacaacgatcaaagcaaccaagctagccgagaagactcgctggaccagctggaggaggctcgggacaaggccttactacactcggcacggtaccagcagtccctgcgacgctaccacgtccgaggggtccgatcccgagacctccaggtgggcgacctggtgcttcagctgcgacaagacgctcgagggaggcacatactcacgcccccctgggagggaccattcgtcatcgccaaggttctgaagcccggaacgtacaagctggccaacagtcaaggcgaggtctacgacaacgcttggaacatccaacagctacgtcgcttctacccttaa

SEQ ID NO: 164705 - DNA, 4479 bp, Arabidopsis thaliana landsberg
agttgcaattttctctacatctgtccatatcaccaaaaacaacaaaaccatataaatacataatcttagtaatctgcaatcatcatataaattaagattgtagcggcgccacagagaagttgcatatgagaattaaaataggaaaaacggtcatttcataccccagctaaagtagtatgttcaattcatacccaacgtttgttgttgtgcaaatccatacattaacaaaccaaattttcaaattcaaatcccaaactcacatcattcatgtcaatacatgcctaagccgtgacggtgttacgaaaccgttaacggttgctcacgtggatgccacgtatgacacgacgtcgttttagatgaaagaagagacaaacaaatttttgtaaaacgacgtcgtttttgtcatcttaaatcaccttcttcttttttctttctttttctttcacgacgacaatgttccataagcatctatcgtgaagagcttatattagtggaataggagttccagctcataatctctattgtgaggaaggaaaatgaggtaattttcattcaaatttatggtttataaaatttagtttttttttatcaaatcatcaaattgcgagtgtattgttataaaatgtaatgaattcctttggtatttttatagtttagatgagattgtggagtgtttttagttgataagcgatatgtcattttatgaacaccaagtgttcgatataatgtcacaaccaaaaactcactttatttctttcttattcagcactgaagatgcagtttttcaatgcttctacagtaagaactttgttgtagagaatgggattaaagttagttatgttgtaggaggtattctcagccttgaaagcaaaccacaagtagtattgactaatttgatggagtcattgatcgaatgtatttggcagcaccgaatttggtataagcttccatatgaggaatattcaaagcttaagcaattgtgcaatggagatcaaaactttcaaagaatgtgtcttgccgcagtttggacaaaagttgtcgatatttttttggagaaagaagaaaatggtgatgctggagatggttctcatgttgatagagttgttggtgatggttctcatgtggatagagctgttggtgatggttctattggtgatggagctgctggtgatggagctgttggggatggttctgagtgtgatagagtttttattgacatggaagcaagagttgagcagaacttagcaggctttgttgatgaagaagagcatgataatgatgaaagtacccctctgaactcagattgtgaggaaggtgaaagacgatatgttagatgcaagaaaggtagtggcgatattagaatagagcaagtctttgacagtatagctgagtttaaggaagctgtgattgactatgctcttaaggaaggagtcaatattaagttcacaagatggggatcagagaaatctgaagtaaggtgttctattggaggtaactgcaaattcagaatttattgtgcttatgatgaaaaaattggagtgtacatggctgaaaacattcattgatgagcatgcatgtacaaaggacgggttttgtaaagttctcaagagtcggatcatcgcagatatgttcttgaatgacattaggcaagatccaacattcaaagtgaaagcaatgcacaaagctattgaggagcggtactcattaattgcctccagtgaccactgtcggaaagctagaggaaaagcattgaaaatgattcaagatgaatatgatgagcagtttgctagaatacatgattacaaggaacaacttttggagtaagtaaaatatctttaaatcgattttgaatttgattcttgtttttgtttacaagcttatctaactttgaaatttgttgttgtagaacaaatcttggttcaacagtggaagttgagacaatcactattgatggtatagtcaagtttgataaattctatgtatgctttgatgctctccggaaaacttggcttgcgtattgtcgcccaataattggcatagatggatgttttttaaaaaataatatgaaaggacaactcttagcagctgtaggaagagatgccaacaaccaattctatccggttgcgtgggcagtcgtggaaactgaaaacatagattcttggttgtggtttattaggaagctgaaaagtgatttaaaactgcaagatggagatggttttactcttatttcagataggcaaaaggttagtttactatatctaatgttcttctcattttgagactatttttaacattgttataacaagtgccatttaacatgtcagggtttactcaatgctgttgatcaagagttgcctaaggtggaacaccggatgtgtgcacgccatatatatggaaatcttagaagagtttatcctggaaaagatttgccaaagaaattgttctgggctgttgcaaagagctttaacgattatgagtataatagagccattgacgaattgaagcagtttgatcaaggtgtgtacgatgcagtaatgatgaggaatccacgcaattgtagtcgtgctttttttggctgcaaatcaagttgtgaagatgtttctaataacttctctgaatcttacaacaatgctattaataaagcaagggagatgccactagtggagatgttggagacaataagacgacaaactatgattcgtattgatatgaggttgagaaaggcgattaaacatcaaggaaagttcactttgaaagtggccaacaccatcaaagaggaaacaatctatcgtaagtattgtcaagtggttccttgtggaaatggacagtttgaggttcttgaaaataatcatggctttagggttgatatgaatgcaaaaacatgtgcatgtcgaaggtggaatatgacatggattccttgccgccatgtcttgcgaatcatattgaacaaaaaggttaatcctgaggaactcgtcaactctgattggtacttggcatcaaaaaatttgaagatatattctgagtcaatctcaggagttaatggtattggattttggataagatcaggtgaacctaggattcaaccaccaccacgaccaacaagtaccaaaaagaaagaaaaaagaaagaagggcaagaatgagtctccaaagaagaagaagaaaggaaaaggagtacaagagcctccagaaaagaggaccaaagtttcaaaagaaggacggagcattcgttgtggacgttgtagtaccgaaggtcataatacaagaagttgtcctagtgtgggagtcgttaacaaaaggtggccaaagaagacacctgatggagttagtcagtctatgagtattggtaccaatgaaggaacaagccaacgaccaagccaaccatcacagaattctcattttgactaaggtaatataggtttttttcaagataattgtgcttgtcggttgctctagttaatcatgttttttttgggattttggcagaatttaagtggaatgaagaaaagtaatgagacgtaagaatgtaggcttttgtttaagtctgaagagattgaaagtttttgttataatctcaagtgaactcttaagttgtgtccggattaaatgataattgttcgaaacttggtattgctatttaaggtttcttttggtctgttttaacaatttcgatctcattccaatttcaagtgatgaaaatactaccagacaatctcataaatattacaagttcaagacaagacaatacaatctcttaacataaatattactagatactcgtagcttaatatatagaatttagtgggttttgttaccaagccttagatgcttatggaacattgtcatcgtgaaagaaaaagaaagaaaaaagaagaaggtgatttaagacgacaaaaacgacgtcgttttacaaaaatttgtttgtctcttctttctaaaacgacgtcgtgtcatacgtggcatccacgtgagcaaccgttaacgatttcgtaacaccgtcacggcttaggcatgtattgacatgaatggtgtgagtttgagatttgaatttgaaaatttggtttgttaatgtatggatttgcacaacagtaaacgttgggtatgaattgaacatactactttagctcggatatgaaatgaccgtttttccaattatgctaacaacttttgtttgtctccccgaaaaatttcaatgctatagtcaaaattggttaacgtgattggacgaagagtcaaatttctgaggaaatatgggagttattgttttgagttttggtgtaaaactctgatttgttgtttagtagaacgattctaaagactaaacagtcatctcttggagtaggggtataactttccaaaatgtaatttttaccgtgaaaaattcaagtagaagaagaaatagaagaaataggcaacaaggccaagatgatgatctctttgacccacttatctatgattttccggattgatctttcgatga

SEQ ID NO: 164706 - DNA, 4128 bp, Arabidopsis thaliana landsberg
  unsure (1)..(4128): unsure at all n locations
aattatactttctggctggnctacagattattgcttcaggaattggtgagcctttacacactgtanaattcttcttcatcctttagcagttcatacccggatcaaggtcgagatccttctcaagaaaactcttccacaatcggtgttggtggaggatgatgatggaaatgaagttagaatttcggtagaataccctcgtcttcctccaaaatgtgactactgcaaagaatttggacatctctatcacagatgcccatcagctccagatatcgaaaggattccatcttcgtctgttaagcgtaccgctccacataattctacaccaaacttttctaatgtcacctacagagctataccacccaaacaggtcgtccgaaaagtttcacatgtcgtcccagtctcagttgtggatacttattcgtcagctgtcgtggttactaaggctggtgagtttgactttacgaagtctaatcactcatacattgattcccctgctttcgactcagcgtctgaatggaaggttgtgaagggtagctcaagaccttcactctcacatgtctcggggtccgaacatgaaccaaagttcatttctttaactggctcagaatttgcagaagaggaggaagcgaatcagaatggttagtgcaccgttaaacaaactgcagggtctccattgattcatgattcccttactaacaaagcagttacaacaaagaagactttagacattgttgctgggaaggttgtggattcgtaccacccaaaaaaggatcctccaaagaattttaagtcttcaaagatctctaatagtggacgggtgcctggaaagggacgtccccatcatcacgcttgaaagctttgctttcgcaccttttgacaatcgatgatgataaaaaaaatttgttataatattagaggtctgaatcattctagtagacaacatgagctcaagaactggcttcagtcaaataaaccttctattggaggctttttggaaactcatgtccaacaagataatgcggctttaattttggcaggtaatttcccaggttggagaagtgattttaactactctcctcatgccaagaatggcagaatttggatcatctggggtcctgcaatttccgtttttgtttacaagaaaacagatcaacttatttcctgtggagtttttgatccggttacgaaacgttctttctcggtcacattcatttatgccagaaactgtatgattgcgagaagggaattatggagttcgctggttgagcttcatcatcacagtcttcagagaagacatccttggttgcttcttggggattttaactaaatacttgtggctgaagatcattactctcttcatcctttccctcttacgattcaaggtatggctgagtttcagtcttgtattgacacttgtgagcttttagagttgccttctcgcggagcagcggatacttggtttaatggtcaaccaaccaatcccatcaatcgcaagcttgatagatgtctagctaatgagacttggttttcttgtttcctcaatctcgttctcttgttgatgctcctggaggatctgatcactccccaatccaggtaacagccggtgagcctgaagagcgaaggaaagaccaattcaaattttactctttctttactactcacccagactatcaatgccttgtggagactgcttggaatttgccgtcaatacatggctcgatcatgttttccctctgccaaaagcttagggcagttaaattggcttgtaaggtgcttaatagaagtagtttcaacaacatccaggctcgttctgctgaagcgcatgaaaacctaatttgagttcagtctactcttcttaccagtccttctcaggtcctttttgaagaagaaaaagaggctaggaataagtggtctttccttgctagtgcagatgaatcctttcttaggcaaaagtctagaattagatggtgtgatgaaggtgattctaacactcagttcttccacaatttcgttaaggcgcatatttctaggaatcgaattttctctctaaggaatgatgatgatgagagaatctctgagcaaaatcagttaaaacagatggttgtggattattatcagcagttacttggttccaagaacttaacagtccaacctctatccgttgaacaaattcgagagttgaactccttcagatgctcggttgatttggctacccagctctctgcgatccccactcctgaagaggtaactgctactctattctctcttcctagaaacaaagctcccggacccgacgggtttactgctgacttcttcatttcgtcttggacaatcgttggtccatgtctaatagaagcagttatagaattcttcaaatcggggaaattgcagaaacaagttaatgctactattttggcccttattcctaagacctcatctgctgacaaacttggagatttttgtcctatctcttgctgcaacacaatatataaggttatttctcgaatccttgccaagcgacttaaactattcatgggattggcggttcaaaggaatcaagttgcatttatcaaaggaaggctcctttgggagaatgtgttattagcttctgaacttgttgtggatttcaacactccaggtcctgtgactagaggatgcctgcaaattgatctctctaaggctttcgacaatattgattgggaatttttaataaacattctgaaggcttttgatctcccgcctctgttcataaattggttatctacttgcatcacaactgcctctttctttgtggcttttaatggagagcttattggatatttcccgggggaaaaaaggttaaggcaaggtaattcgatttctgctcctttattcaccttggttatggacattctttcaaagcagcttgatgctgctgtcactcaaggtagcttgggcactcatccattatgtgttgatccactcatcactcatttaagttttgaagatgatatattggttttctttgatggaactaaagcttccttggtggctattctggatattcttgctcattttaagtcaaactcgggtttgagtatcaaccttaccaaatcgtgcttgtttctagatggagataatctagattaattttttttgctgcaaggcataacgtgtctcatggatctttgcctgtccgttatcttggggttccacttattgccccacaaattgaatgcctcagattatcaacctctcatcgataaagtgaagtctcgcatttcgtcatggactagcagacatctttcttttgcaggaagattgcaactgcttcaatctgtgatcaatagtatcatcaatttttgggcttcaattttcatcttacctaacaagtgtttggacgttcttaagaaaatgtgtagcgcctttttgtggaatggtgatactgcatctgctcggggtgccaaagttgcttgggaagttgtttgtactcctaaagttgcgggagggcttggtttaaaaagattagtggactggaatcagatctttggtttgaaactcatttgacttcttttttcccaagctggatccttatgggtttcttgggtgaaaaagcatttagtaagaggcaggaatttttgggatgcagattttcgtttcaccggaagctggatttggagacgtcttgctaagctgcggtctattgctaggactttcattttttgttctgttgtttcaggtcataatactctcttctagcatgataattggacagacttaggaccgctcattgatgttgttggtgttgctggtccgcgtgtcactggtattggggttcttgcggtggttgctgatgctgctaatgttgggagttggcttcttcctcgtggaaggcatcccttagttatactactccgatcatatctaacttctcacgatcctcctacaactgctattggggatgatatcttcttgtggaaaacttcaccggatcaatcgcatggaaacttctcatctgctaggacttggaatcaccttcaccctgctggtccaactgttccttggtactcacaaatctggtttaaagaaagaattctcaaacttgctttcatggcttggctcacggtaaaagataggctgacaacaagc

SEQ ID NO: 164707 - DNA, 1470 bp, Arabidopsis thaliana landsberg
gccaatcttgcacgtttatgtgctgccatttgggggtttaaaaagaagagctgccatctccatgcaatcctcaaggttcactttcatgttgatgattcggagaagaaataaagaggaggtctcggttacatcactttcaaggttaaaggtgtcaagtatgccctagatatcagccaccttgatactattttcgggtttccaagcggagagggaatccgccaagactatgaccaagacgagctactctctctttgtgcaaaaatcgccgtccaaagccctactcgcccaccaagagaaagagtcattcgattcaaagtctcgtgataaggtacctccaccaatgcatcgccaacactctctttccaaattagactaccgaatttgttggtgaaggagagctatgcattatcgatcaagctttagtcttcattctgagagagaccaaggatggaacgaagatggcgggtgacagagcagacacttcgctgactgttgttcttttagaccacgtaatgagctatagagagtatgctacaaccatccatcgatcggggattcggggaagtttttgtgttggtggtctcttaacaccaatcctagtagctggcggggatacacttgggaacccttgatgtgcaccccaagtacctcgacctcgattatctcaggggaaaggattatcttgacaagaagactccgtcggatcactacatcttcaagttcaaccatccggagtttggaccttctttgttacccttaccttgctagaaccgaacatcagttaggacaaggcgcaacagtaacttcatgccatctcccttagccctgaacattgatattggaggagctagagaagaggaacaagagtatactcaagctgactatgagcaccaagagtattatcctactgagtttgagcaacaagtcaaattcgagcaacatagcgaacaacctgagaaagagaccaacgagtttgagcaagctcactctgacccaggtcctgatcaaggtagagatgagtttgctgaagttcacaagaagctcggtgtacttgaagagcttgggaaccttcacagcaagacaatgaagggtttagagaagaagatgagaacaatgaagaagtcgctcaagagtatggctgctcaactcaaggacttccagagcaacccaaggccaccatctccaaccgccgaagtaagaaggagcggttcaacgagctcagctgcaaggagagctgaaaggatcgtcaagcccgagcttcatcttttgagcctcgggaagtgatctccgagttgagagagccaaggagcaggcagagacgagcttccacacgctcgatcggacagaacgagcaacaccctcccgcctcaacttcagcccctgcctatacccaagagagtatggatgactatgtctccatctacttcacctgaaaactgaggtaacaccacctctccattgtatatacca

SEQ ID NO: 164708 - DNA, 574 bp, Arabidopsis thaliana landsberg
ctgtaggtgacttaagagtaaaaaatggaagaggcagaggttgaagtagatgtggaaatcaaatctacggctgataagtttttcatgttctctagaagatcacaacatgcctccaaagccactcgctatgtacagggatgtgatctgctcgaaggcgagtggggcgaagttggaagcatactcttgtggaaattaactgttggtaatgaaagtattatttttatatatgtactttatgcaagaagattaacccttcaactatggtatatatactagacagctgcatttcacgggaaagaaaaaaaaaacatgatatatttgatttgtaaacttttctggtgtagatggagagccaaaagtgtcaaaggatatgattgaggcgattgatatgaagatgaatatgatccagtggagggtgttagagggacctctgaaggaagagtacaggagcttcttgaaaatgttgaaagtaagccctaagcaaggagggtctggaagtgtggtgaagtggaacttgaagtatgagagaattgatgaaaaggtggctcacctagagaggctccttcagttcttc

SEQ ID NO: 164709 - DNA, 1374 bp, Arabidopsis thaliana landsberg
atgaaacgtctttttagcaaatcgctatgtacttcggccgccggagccaatctcaaaccaccgccggcagattccgccgccatagctaagcttatcctctcttctccgaacacaactcaccaagacgatcaatttctactctccaccaaaacaaccccatggaccccaaatctcgtgaactctgttctcaagcgactctggaaccacggccctaaagctctccaattcttccacttcctcgacaatcaccaccgcgaatatgtccacgacgcttcctccttcgatctcgcaatcgacattgccgcccgtcttcacctccaccccaccgtctggtcactcattcaccgtatgcgctctctccgcatcggtccttctcccaaaaccttcgcaatcgtcgccgagaggtacgcatccgctgggaagcccgataaagcggttaagctgtttctgaatatgcacgaacatggttgttttcaagatttagcttctttcaatacgattctcgatgtgttgtgtaaatctaaacgcgtagagaaagcttatgagttgtttagagctcttaggggaagatttagtgttgatacagttacttacaatgtgattcttaacggttggtgtttgattaaaaggacgcctaaggctttagaagttttgaaagagatggttgagagagggataaaccctaatttgactacttataacacaatgctcaaaggttttttcagagctgggcagattagacatgcttgggaattcttcttggagatgaagaaacgggattgtgaaatagatgttgtcacttatactactgtggttcacgggtttggtgttgcgggggagataaagtgggcgaggaatgttttcgatgagatgattagagaaggtgtgcttccttctgttgcgacgtacaatgctatgattcaagttttgtgtaagaaagataatgtggagaatgcggttgtgatgtttgaggaaatggtgaggagaggttatgagccgaatgtgacgacttataatgtgttgataagagggttgtttcacgctggagagtttagtcgtggagaggagttgatgcagagaatggagaatgaaggctgtgaaccaaacttccagacatataacatgatgatccgttattattcggaatgcagcgaggtcgagaaagcgttgggtttgtttgagaaaatggggagtggtgattgcttgccaaatctagatacttacaacatactgataagtggaatgtttgtgagaaaaagatcagaagatatggtggtcgctggtaaactattgcttgagatggttgagagagggtttataccccggaaatttacttttaatcgagttctgaacgggcttcttttgacagggaat

SEQ ID NO: 164710 - DNA, 1656 bp, Arabidopsis thaliana landsberg
atggacatggagtcgaagaaaccatatctgatggttactataatacaagtcatatatacaatcatgttcttgatctccaaagccgtcttcaatggtggaatgaacactttcgtctttgttttctatcgtcaagctttcgctaccatcttcttggctcctctggctttcttctttgagcggtacatatatgcaaatatattaatattgtaaacgttaatttttatttatgttaattgtattctctccttttttctttaggaaaagtgctccacctctttcatttgtgaccttcatcaagatcttcatgctctctttatttgggtatgtatgctatacttatactagtatactataatcagttaaattttatctatgttgaactaataataatcaataaagctttatctatatatattgggatttcagtgtgacattgagcttggacttaaacggtatcgcattatcatacacgtcggcaactttagccgccgccacaacagcttcccttccggccatcacattcttcttggctcttttatttgggtataacttactaatatgacaagtttatatatttgtatgacaagttttaactaatacctaattactcgttctaatatttatttattgtttattaaatcaaagaatggagaggcttaaggttaagagcatacaaggaacagcaaagcttgtggggattactgtgtgcatgggaggggtaattatcttagctatttacaaaggtccattactgaaattacctttatgccctcatttttaccacggccaagaacatcctcaccggaataatcccggccacgtctccggcggttccacctcgtggctcaaaggatgtgtcctcatgataacctccaacattctatggggtctctggctcgttttacaggtattcaaattgctccacacattattgagtattcactatcttaattatgctaatttgagtaattgtgataaacctattgttattaacgagttttgtttcatatttaacaaccagggtcgtgtgttgaaggtttatccttcgaagctatatttcacaactcttcattgtctattgagttccattcaatcattcgtcatcgcgattgctttagagagagatatttcagcatggaagcttggttggaacctaagactcgttgcagtcatttactgcgtaaataattagctctaatccatttcataatattatttccatatataatataaataatctcatattaatagtagaaacgtgacatatatatgcagggattcattgtaacaggcgtagcatattatttgcaatcatgggttatagaaaagagaggacctgtcttcttatcaatgtttactcctttgtctctcctcttcactctcctctcttcagcgattctcttgtgcgagatcatcagtcttggaaggttctaaacaaatcttctttaatatttcgtttttcttatctattcaaaaaattaaacttatacatgtgtacacttttgtagtattgtaggtggattattattgatcataggactttactgtgtgctgtgggggaaaagcagagaggagaaaaacagtggtgatgataagattgatttacagaaggaaaacgatgtcgtgtgcaatgaagtgaaggttgtcattagttga

SEQ ID NO: 164711 - DNA, 3416 bp, Arabidopsis thaliana landsberg
tacaaacagtcatgatgcctttcagcagataaaacaagccttgatcagcgcaccaattgttcaaccaccagattgggatctaccttttgaggtaatatgtgatgcgagtgattttgcagttagggctgttctaggacagaggaaagataagaaacttcatgccatctactatgcaagtagaacacttgatgatgctcaaaggaattatgcaactacagagaaggagttgttagctgtagtgtttgctttcgagaagttccgatcttatcttgttggatccaaggttattgtttacatagatcatgctgccttgaagtatttgatgcaaaagaaagatgttaagccaagacttttgagatggattttgcttcttcaggaatttgacatcgaggatagagataagaaaggagttgagaatggtgttgtagatcatttgtcacgtattaggatcgatgatgatgttccttttaatgatttcttgcctgaggagaacatatacatgattgatatagcggaagaagatgactgcaaatgtgataagttgcagaatcgagcttcagtgtcgatcgacacttcttttatgtcgatcggcactcactttttggatgaagttgatattcgcaattacgcgatagtgtcgatcgacaccgtcctgaatcgacaagaaattagtcaccaactgagaattgcggttccatagcggtcgagaaggactacccatggtatgctgacattgttaattacctagctctagatgtggaacaggataatttcacagattacaacaacaagagattcttgagagagattaggcgatattatttagatgaaccttacgtctataagcattgttctgatggagtttataggagatgcattgctgcaatagagtggtcattttcacattgctgatatactatcgcattgtcacagctctagctatggtggtcattttgcaaccttcaagaaagtatccaaagttcttcaagcaggcttttggtggcctacaatgtttcaggatactcagaagttcatatcgtagtgtgatccttgttagagaaggggaaagatcagcaagcgtaacgagatgcctcagaaatttatcctcgaagttgaagtcttcgattgttggggtatagatttcatgggacccttcccaccattcaacaagaatctcttcatccttctagttgtcgattatgtcgccaagtgggtagaggctatagctagtccgaagaatgattcagcagttgtcatgaaactcttcaagtctatcatcttccctcgttttggagtgccacgcatagtcatcaatgacggaggtaagcatttcaataacaagattcttgcgaaattgctctttcagtatggagtttgacatcgagttgctactccctaccatccacaaacgagcagtgaagttcaagtttccaacaggcagatcaaagagattgttgagaaaacagtgggacaatcgaaaaatgagtgatcttacaagttagatgatgcactatgggcttacagacagcttttcaaaaccccgcgtggagccacaccttttcatcatctctatggtaaagcttgtcatcttctagtggaattagaacacaaagcagcatgggcagttaagatgatgaattttgacatcaaatcagctggagaaaggagacttattcagttgaatgagcttgatgagatatggattcatgcctatgacaactcaaagctctacaaagaacgcacaaaggcttaccatgacaagaagatcctcactcgaacctttgagcctaaatgaccaggtacgtctttatgattctagattgacattatttcctggaaaattgtcttctcgttggtcaggtccctacatagagagtcaaaaactactgcgctgaagccgagattccagtagaaaagcctttagatcttcaggactcgcatgttgatcttgattataaacaggcgcttagtgggtggcaacccactagtaagtattcttctttttcgttatttcattcatttgatttttaacataggatttttggttttttaggatttttattcagatttaaaaataaaataaaaaaaaaaaatccttgtcgaccaaacgcgatggtgtctatcgataccatccgagtgtcgatcaacaccttcattttccaggtaagtccatataacctaaaacttcatctttctcatttcattttttttccaaaccgccgttttcattaaaactcgtctagatcgttcgattcttcatcgtttcttgtgattttaggctctaatctcatcagaatctcatcctatatcttccccaagtgtcattttcatcgatttgcaacatggctggacagaaaaagaaaggaaggaagaacgttccaccaccttcttcctccgccgctcatcttcgccgcagctctttcacccccgccggctcacatgctcaaccaccggaatcttccactgctgctcctcagcctccgatttaccgattttcatgtccaaaactagctagtgtgcagattccttctcaaagagtttgggaaaaggatgtcaacagagaattcactaaaggtgactatatcaatcgccttttttctccagattgggatgattattatactctgttctataatgcctggatgagtgtagaaattttgactactcgggttgcgaatttcggtttgatgtagcgtttgcagatagagaaatcttgtttaggactgctagatgatgtaggtttgggaaccatctgttgtaggcagtacgatttgtatcctgagctagttagacaaatcatggcttctgctagggtctactatgtgaatgacaggaaacgcaatgctcaggaaggagctcttatcttcttcatccgcggtgttagatatagtctaccactgagagagagttgtgtgacatctatagttttgacaatgatctcactggagttgcactacctggacagtttaaggatgctcaggttttctggagccggtttggtaatggaacttatgattccaaggacgcagtacactcaaagattcgtcaccctgttctacgatatttggttaggctgattagtagcacattgttgtgcaagatggagcctggcaagatgagactttctgagctgttgttgctctatcatgctgttcatgatttcttttctgatagtttgggatttgaggaggttgaccgcgatgtcaactttggcgctgtatttgctcatcacttggtctcagtcaagaccaagccctttacaggtaaagggaagaaatctgagagagttggcagtcttcttactcctaaatttgggcactttcgcaataactttgagggagaagaggtcaaaaccacgagattcactatggatgatagttatcttaagaactctcactggctgaaaggccaattct

SEQ ID NO: 164712 - DNA, 369 bp, Arabidopsis thaliana landsberg
aaccgaggtggtactcatgaggataaatggaccgagctatgtgggagccaatgttaaagcgagttgctatgcactcctgggattcggctgctaccccgggcactatggctgctctggacccgaatgcagacagccgttatcgctgtatgtgcgggtatatctcgggcgcctgtataggcgcagcctctgtggcaaaatcatagggtgcacgtatcaacgttacctctcagaacactgactacacaagcacaccttgcattctggggcgacggacggatcgtaccgtaacctcctcttcttcgtgccttggaaccatcgacgggaaatgcgagcatgttcgcctgaggatcatagagtgcgtctggctag

SEQ ID NO: 164713 - DNA, 365 bp, Arabidopsis thaliana landsberg
aaaaccttaaaagctttcatggaacgtatagagtcttataacacgaatgagatgaaatacagaggcgtacgaaagcgtccatggggaaaatatgcggcggagattcgcgactcagctagacacggtgctcgtgtttggcttgggacgtttaacacagcggaagacgcggctcgggcttatgatagagcagctttcggcatgagaggccaaagggccattctcaattttcctcacgagtatcaaatgatgaagaacggtccaaatggcagccacgagaatgcagtggcttcctcgtcgtcgggatatagaggaggaggtggtggtgatgatgggagggaagttattagtttagatttggataagtt

SEQ ID NO: 164714 - DNA, 1934 bp, Arabidopsis thaliana landsberg
  unsure (1)..(1934): unsure at all n locations
gtcccgctttttccgatcaagctttttcgagagagctgttgttgtcttcggcgccagaacctctgttgtgtatggtgatattcagtacacgtggcaccaaacacgtgaccgttgcgtccgccttgcatctgctctctctgaccttggtctctctcgccatgacgttgtaagtggttaaacgacttttatatattggtcatacttttttcttttgtttaaactatttcttttatcaggtggctgctttagcgccaaatgttcctgcgttatgcgagctttattttggagctccgatggctggagcagtactttgcgtgttgaacacgacattcgattctcagatgcttgcgatggcgctggagaaaacgaagccaaaagtattcttcgttgactctgagttcctctctgtcgctgaagaatctctcagtctcctctcaaacattgaagaaaaacctctcatcatcacaatcacagaaaatccaacagagcaatcaaaatatgaacaatacgaggattttctctccactggaaaccctaatttcaaaccaatacgaccagttgacgaatgtgatccaatcgccctcaacttcacatctggaaccacatcgactcccaaatgtgtcgtctatagtcatcgcggtgcctatctgaacgcaactgctgttggtgttatgaatgagatgaaaccaatgccggtttatctatgtacagttcctatgtatcattgtagcgggtggtgctatatttggacagttacggcttttggaggagtcatcgtctgtctcagggaagtcaacgacgaagttatatttgatagtatcgtgaagcacaaggtaactaactttggtggctcgcctccggttctcaacatgattgctaatgcaagagactcggtcaagaagtcgtttccatggaccgtacaggttatgagcggaggatcctctcctcctgaggtaaaactaactatcacagagttttgaattacatgtttgttcaatcaggcttatttggttgaacttccatattttgaggttatatataatcaatcccttgctttatacgttagctccgtcacagtacattaatatttaacatagaatcatagtaaagatattaatttatttggacaggtcatgttgaaactcaagaagctaggattcaaagtgatgatggcttatggatgctcggaggtgtatggactaggaacagcttgtttgtggatgcccgagtgggagactctacctgaagaggagagtttaaggctcaaggcaagagatggtctcaaccatnnnnnnnnnnnnnnnnnnnnnnnnnnngacccaaccaccatgaaatcggttccacacgacggaaagactatcggggtaattgctctccggggaaatacagtcatgagcggttacttcaaggacaaggaagccactgaagcggcttttcgaggtggatggtactggagtcgcgacatgggtgttatagatcctgatgggtaagtaaatgaatcatgcattactttgaaggtattactttgaatttatttatgcttatgatgtttccacatgcgaagctacatacaatttaaagataggtcacaagatgttataacatgcggaggagaaatcgtgggatcaaaggagatcgaagggattctctatagtcacccggcggtttatgacgcaggggtcgtgggtcgaccggacgaaactttaggagaatcgatgtgtgctttcgtgaagctcaaagaaggagctgaagcgagagaggaagagatcattgagttctgcaagagaaagcttgggaataagaacatgaagatgattccaaagacagtagtcttctcggatgttcctaagactcccactgggaagattcgaaagaatgttctgagaaagatggccaaggatatgggttatgttcaattgagagctgtggagtaa

SEQ ID NO: 164715 - DNA, 1272 bp, Arabidopsis thaliana landsberg
  unsure (1)..(1272): unsure at all n locations
atggtctataagaggtaaaatagccattgaataaaaatcgaactttaaatgcgaaaacttgctgtccaagttttctctttaaacgggggacgaacaaatcaccacaccgtcactctctctatctctctttctctcaccttttataactgcaaatccctaaaaccgccattgaaaacaaacctttctccactttctcttttctcaagaaactctctttcttcctttctaatggcggcacaagtcgacatcgaagatcaagaatcagtcaccaatttagacaacggcgaaatcatcaacccgatctccgacaacgcacctaacttctccggcgacgcaacgattcttctccgtgaagccaccttcgaacacaacctcctcaaaaactgnnnnnnnnnnnnnnnnnnnncattcgccaccgaaacaacaatcgtcaccgtacgaaaaatcttaacgcagagattaatcacaacgaaagctaaattcgctgtgttcaagcttttcacagaagctatgacaaggaagaacaacggttacgcgaatattaggtacggttggtactctggttctaaagaagagatcgatcgtgttattacgtatgggtttagtaatagagagatcaagaaagtcgaaaacgacgtcggatctcacggtgttggaattcatcttgttcatcatcgttactctctcgctgcgtaagtgttatgttttttctcagttgtctaagttcttagtttgtgattttgatgatgaaaaagtgaaaattgatgatggtttcagggctttagttggtgaaggtgatgaagaagggatcaagaatattctcttatgccgtgtgattcttggtaaaccggaacaaattgtgaccggttctaaacaatcttacccaagttcaaaccaatttgattctggtgttgataatcttgagaatccgagaaaatatgtgatttggagttgtaacatgaattcttacattcttccaacttatatcgccagtttcaaatctcatcttctcagaggtaacaacaatatacaacttcttcaagattctgattagagagtgcaattgatatttgtgtgtttttgcttctcaggtctaatcggaagagcaaggtcaccatgtgttagcttctctgttcttatgtcaattctttcaaagtcacttgacgctacaagaatgaacttgattatgactagttatgatgattgtagggtatggagttacttctattcaaatccattagtaaatgagtatggctgtctctgactgaattc

SEQ ID NO: 164716 - DNA, 2004 bp, Arabidopsis thaliana landsberg
atggctcgcccgagctctttccctaaagaatatgaagcttttacatcttccatgggtcgacctaagacagggcctatagggccttgtttggttgcaggaggaggagaaggaggtgcatgttttgattgtggtacagaagcttccgcggttggaccagtcgaattggcagcatttgaagcggaagctccgttttccaatgcgtctccgttatcggctgagtcccgtccgtgagagcaacaatttcccattgttgcataaaagggtgggggagatggaggagaggtcaaagctcaaaggaggaagagaaatagaaaggttttatttttttttgtgtttttcttctcttactttttttgcttttcttcctctggtttttgtttcttctttagcaagaaaacgttaggtgttttggttgtgaatggctatgaatagaatgtttttttttcttcgttggtattcggttcaaaggattatagggtttgttgatagggagaaagtttaggaccaaaacgtgtctgtaattttggtatttaaagtaaaaacaacatttagggatttaagacaaaggttgagaggaatttctgggattttaatttttgttacataactgtctcttcttatcttctatattccacaactactcataaaaatcaagattagaacctttgcctaaatcttatataaatatgattataaatgtatctcataagaaactacgtaatcaggtgtatgagaattttcattcatcaatctgaaacatgtgaaaaccaattttctaattcatgggattttgaatgtgttaagaaatttattgtatttaggaagaaagtaaaatataaaatacagttaattatcaaagtgaaaagcagaacatcaaaaagggaaatgtacagggttggttgtaaaccctaaaaccctaaccctatagctcccattagtgtgatgtaagcgcagacatttgatgagtgaataaaatgtctgaaaatcaagattggtccaatcttttacgtccgataatcgaaagcttgagcactatagattttcaccgtataaaaaacgtttgcttagagtggttctccgtttggaaaacatgcgtgaagcggcctctgtatccatggcaattcatattaccataatgaatcttcgatgttgttcgatcccggagaagacaagatttacaacgcgaaactctttggaatctctgacaagagctattatatatatggctagcttcggaaactgtctattgatggtagattcttatctcgacttttctatctttaacatgttaccgggcgaaagaatcaatcttccatcaatggagacgtcaatacgcggtggacaagtgagattcaaacgaaacggtggtgatgagtgaggttatttcgttgagtcttatcataaggaacgtgtgtcgaaagatatcttcggaagcgaaagagcagctgttctgtgtataaacgaaagaacaggagattatgtcgttgcttgaattttcaataagcttgagttgttcacacacaagaaaggagatgattgttggttgaattggtatacaagaggcgcaaatttgggtttttgggatctggcttataagaacagcaagctttatctgtatacttctgatgatcacatcaagattgtcgatttctctggagattttcccaaagaagaagtcgaagaaaccccatattgggatcatccgtttgagtacgtttcaaaagagtgggagtacatttggaagaggagaatagtgattcagaaaacagaagaggttttgatcatcttgagtttattagaaaagctagttgaagagaaacatttgttttacatctttaagatgaatcttgagagttgagagtaacaaatgggaaagagtagattctattggagatgatgatatttggtctgggggttacactaaaagcaccggtagaagaatttggtaaaggaatcaatagtaaatcaatctgtttagttaaagatgaccttgattagctaaat

SEQ ID NO: 164717 - DNA, 2880 bp, Arabidopsis thaliana landsberg
  unsure (1)..(2880): unsure at all n locations
ttgcaggtttatgcatccgggggctcaagctggatcatcgacagcggatgcacaaaccacatgacgggggagaagaagatgttcacctactacgtcaagaataaggattcccatgatacgattatttttggagatgggaatcaaggcaaggtaaaagggttaggtaaaattgcaatttctaatgagcactctatctctaatgtgtttttagtagagtctctagggtataatttgctatctgttagtcaattatgcaacatggggtataactgtctatttacaaatgtagatatgtctgtctttagaaggagtgatggttcactagcatttaagggtgtactagacgggcaaactttatttagttgattttgcaaaagaggaggccggtctagatgcatgcttaattgctaagactagcatgggttggctgtggcatcgccgtttagcacatgtgaggatgaagaaccttcacatgcttctaaagggagaacacgtgataggtttgactaacgtgcaattcgaaaaaaatagaccttgtgcagcttgtcaagcaggtaaacaagtgggaggagcgcatcacagcaagaatgtgatgaccacttcaagacccctggagctactacatatggacctcttcggacccgtcgcctatctaagcataggaggaagtaagtatggtctagttattgttgatgacttttctcgcttcacttgggtatactttttgcaggataaatctgaaacccaagggaccctcaagcgtttcctaaggagagctcaaaatgagtttgagctcaaggtgaagaagataaggagcgacaacgggtccgagttcaagaaccttcaagtggaggagtaccttgaggaggaagggatcaagcacgagttctccgctccctacacaccacagcaaaatggtgtggtagagaggaagaacaggacgctaatcgacatggcgaggacgatgcttggagagtttaagaccccccgagcgcttttgatcggaagccgtgaacacggcttgccacaccatcaatcgggtctaccttcatcgcctcctcaagaagacttcgtatgaactcctaaccggtacaaacccaacgtttcatattttcatgtatttgggagtaaatgttacattctagtgaagaaaggtaggaattccaaatttgctcccaaagctgtagaagggtttttattaggttatgactcaaatacaaaggcgtatagagtcttcaacaaatcatcgggtttagttgaagtctctagtgacgttgtatttgatgagactaatggctctccaagagagcaagttgttgatcttgatgatgtagatgaagaagacgttccaacggtcgcaatacacaccatggcgattggagatgtgcgaccataggaacatttggaacaannnnnnnnnnnnnnnnnnnnnnnnnnncatcccccaacccaagatgacgaacaggtacctcaagtggaggcgcatgatcaagggggagcacaggatgttcaagttgaagaggaagaagcacctcaggcacctccaacccaagttcgagcgacgatacaaaggaatcatcccgtcgaccaaattttgggtgatattagccagggagtaactactcgctctagattggtgaatttttgtgagcattactcttttgtctctcctattgagcctttcagggtagaagaggccctgctagatacggactgggtgttggccatgcaggaagagctcaacaacttcaagagaagtgaagtttggacactggtgcctcgtcccaagcaaaacgttgtgggaaccaagtgggtggttccgcaacaaacaagacgagcacggagtggtgacaaggaacaaagctagacttgtggcaaaaggttatgcccaagtcgcaggtttggactttgaggagacttttgctcctgtggctaggctagagtcaattcgtatagtgttagccgtatgctggtcagcattcttgcatgttgtgccaaatggatgtgaagagcgctttctcaatggaccaatcaaggaggaggtgtacgtgggcaaccccctggctttgaggatgaacggtaccccgaccacgtgtgtaagctctctaaggcgctctatggacttaagcaagccccaagagcatggtatgaatgccttagagattttctaattgttaattctttcaaggttgggaaagccgatccaactcttttcactaagacttgcgatggtgacttgtttgtatgccaaatttatgtcgatgacataatatttggttctactaaccaaaagtcttgtgaagagtttagcagggtgatgacgcagaaattcgagatgtcgatgatgggcgagttgaactacttccttgggttccaagtgaagcaactcaaggacggcaccttcatctcccaaacgaagtacacgcaagacttgctaaagcggtttgggatgaaggacgccaagcccgcaaagactccgatggggaccgacggacacaccgacctcaacaaaggaggtaagtccgttgatcaaaaggcataccggtccatgatagggtctttactttatttatgtgctagtagaccggatattatgcttagcgtatgcatgtgtgctagatttcaatccgatcctaaggagtgtcacttagtggcggtgaagcaaattcttagatatttagtgcgtacgccttgcttcgggatctggtatcctaagggtctaactttgacttaattggatactcagattccgactatgctggatgtaaggtcgataggaagagtacatcggggacgtgacaattcttaggaaggtccctggtgtcgtggaactctaagaaacaaacttctgttgccctatccaccgctgaggccgagtat

SEQ ID NO: 164718 - DNA, 1520 bp, Arabidopsis thaliana landsberg
  unsure (1)..(1520): unsure at all n locations
atctttaaaaggcacacgacacgatcaagaaataagactttaggaccaaccggagttaaacgtagtcaaccgcagacgattcagaggagagtttcatttccgccggaatatttcaactccggtaagttaaattttcaccttactctacggccctccggtcactgaaccatgtttgcgtttccacttcatcttttgttgatcatatatatataaagtcaatattttggtgtaaacgatcgagacaaagatctctcaagcatgcttatttcagtcagaggccaatttttgagaaactaacgtttgcaaattgtgaaattcgtttaatctggtcatttgtatttcagtcttgatacaaaaaagctatgcaaggacgagttaggggaagtggggaagacaggataagcatattacctgaaccattgctatgtcatatacttagctttcttaggactaaagattctgttaggacaagtgttctgtcttctagatggagagatctctggctatgggttcctagattagacttggacaaatccgacttctctgatgacaatccatctgccagtttcgtcgataagtttctgaattttcgaggtgaatcttacttgcgtggattcaagttaaacacnnnnnnnnnnnnnnnnnnnnnntctacactcgacgcctgtctgatgagacttgataagtgtaagattcagcattttgaaatcgagaattgttttggcttttgtatcctcctgatgcctttgataattccaatgtgtcacactttggtaagcttgaaactcagtttcgtaattctgagtaaattcgggtctctttctttaccctgtctcgagataatgcactttgaaaaggttatatttcccagtgacaagtctgcagaggtgctaattgcatgctctccggttcttagagatttgagaataagccagagtggagatgatgctgttgaagttttacgcgtctgctctgcctcactgaagagcttcactctgaaacggacggatcatgattatgttggaaatggtgaatatacagttgtgatcgatactccgagacttgagtatctgaatctcaaagattatcaatgccaaggcttcaagatagtcagtatgagtgaatatgtcagggttcatgttgatgtcgtatttgaagtgataggtggtactgtattgtcgaaaagaaatatcatttgtgattttctatcctgtgtctcaaacgtcagatatatgaccatctcaaggaggagtcttgaggtatatatactaagtactaacacacactgatccgtaaacttttccctgagaatatttacttaatttactttaccttgcagttcatctatcgtcacctggaattgaagccacgattcaaatttcatgacttggctcgtttgcgtgctactatgttctcaaactcctctccggaaatgttgccagtcattcttgagacatgcccgaatctgaaacacctcaccttggtgattcgttgcttgacttacacttctacaaagggat

SEQ ID NO: 164719 - DNA, 442 bp, Arabidopsis thaliana landsberg
aagttatcagtgttaacaaaaagcccgttttgattcggagatcgtcgatacttacgaggcggccttggttttacgggtcagtgaagtcaaatcggcgcgtgaagggtccgtgaacctgaaggatgcctatatcgcctttcgcggtgatgaagcttatatgcaaaaagcccacatcagcgtcttaaaggccgccagttacaacagccacgagcccgaacgcacccgtaagctgcttttaaaccgccacgaactcaacaagctttatggcaagatgcaggagcgcggttttacctgtgtgccgctcaagatgtattttaaagatggacgcatcaaagtggaaatcgctttggtgcgaggtaaaaaacaacatgataagcgcgagtccttgaagcaaaaggatatcgacaagcaaacccgcaacgccatgaggaaggaccgctaa

SEQ ID NO: 164720 - DNA, 911 bp, Arabidopsis thaliana landsberg
  unsure (1)..(911): unsure at all n locations
aaatacagagncaaaacgaacgacccacncacnaaggcaaacaagaagaaccaggcccaacagggggacgccgaggcaggacaagaaacgaagaaccccgaaaaacacaccgaggatgccgagaatgagaaggacgacatgaaaggagccgaggctctctataagaagcttcaagactcaaacgaggagtgcaagacggttcacaatgccaagaaggttaaagagctacgagctaagatggatggagacgtagcaatggtccttaagagggttaaaatcatcaagcagaagctcgaagccctagagaaagcgaatgctaatagccgtaatgtcccgggttgtgggcctggttcgtctacggataggactcgatcttctgtggttagcggtctcgggaagaagctcaaagacttgatggatagttttcaaggtctacgtgctcgtatgaacaatgagtataaggaaaccgtagagcgcaggtctttgtttttctttaggtttcttgtgttgcaagctatgctctgtttgggttgcaagttatatgattatgttaaaattggtgcaggtatttcacaataacaggagaaaaagcagacgagcaaacaatcgataacttgatagcgagcggtgagagcgagaattttctccaaaaagcgattcaagagcaaggaagaggtcaaatcctagacccgatatctgagatccaggagagacatgatgcagtgaaggagatagagaagaatctactggagctgcaccaggttttcttggacatggcagctctagtagaagctcaagggcaacaattaaacaacatagagagccatgtggcgaaagcaagctcgtttgtgagaagagggactgatcagctccaagatgcgagggaataccaaaagagctcgaggaaatgg

SEQ ID NO: 164721 - DNA, 663 bp, Arabidopsis thaliana landsberg
aatttagcatctcttattaacataataaattgtttgttgacatgaaaccaatagattctgccgggccatttactcgttacgtttcatataaatttctaagaaaaagaaaaaaaacttaaactatatattatgtcagcagtatatatatacgcagtcaaaaacataatcaatgtgggacacgatgtaataaaatcatatttgtaattgtaacatataatctgaaggagatttgattcagaagacaaacgtaagcatctttgtgtaaggcattaagtattaaatatttttgttgaaaacattgtgtttaattaagcttttatcttaatgctagagcaaaacatatggttaaggttaattaacctacttttggagaggtctcccgttagcatctttcacaaaagctttgcaggcttttcttctgaaagtaagaaaaaggcccaaaagggattattgggccttatcttctgtcccttgacatgtcacaacaagtaaccaaagaacctgatcctgttcgcgggaagattcagtttagcgctatcagccaataaaagacgacagctgtaataagactcgagacgagggcctcgggacttcaatatccgtaacggcaaaacggattcactctcgcagacaccttagcatgtggcaccgtcggaggtcggg

SEQ ID NO: 164722 - DNA, 4532 bp, Arabidopsis thaliana landsberg
ttcttaaagctggttatggatgatgaaggaattaagtgttcggaagtttaaaggagagcagaatactgttttagcggataagtggttgaggaacctggaaatgaattttgaaacgtcaaggtgcccgaaagactttaagggccacatagcggtatacttttaagatgaggatggtcgagcttggtgggatagtgttgtttcacgataccgcgaccagcctaacacatgggaaatgtttaagaaggagtttgagtctaagtattttccaccggaggcacgtgattgtctggagctgcagtttatgagtttggagcaagggcaaaagagtgtcttggcatacgagcaaatttttacaagacttgggagatatttgtacaacggaaaggatgctgaagctatgatggtaaggttcctaagaggtttaaggcctaaactttggggacgccttcaggctgttacttataccaatgtgagtgaattgacggaaatggccgtgaatgttgaagaagggattgagttagaaaagggagagaagttacgggagaacgaaaagtccgaaggcaagaaggaaaataatcgagaatttcagcctggtgttttgaggattaatccgccgggaggacgaaaccagaataatgaccctgtaaagcctaagttggtaaccaaggaggacgtgtaatgaccacttacgatccaagagcctgctatatgtgcggaaagccgggacattttgcacgagattgctcaacggtcgtacagacgaaagtgccaaatatggcatttgttacttgttacatttgtggggagtcagaacatgtgtcaaatgcatgctcgaataagcaagcgggactacagggtaaccgagtgggagcttgtttcatttgtagagacctagggcattatgctaacgcatgcccgaacaggcaaataaagcagtataaccaaatggttaaccacccaccgccagttcagaaagctaagggaccaccggtaaagaagcaagccactctagcaaatgtttatgccttagatgtagaacctaccaaaccttcatgacccgcaaaaggtcccgtaacaggttagtatgggttcttacttttcttatttatgcgtgtttgagtgattgatcgttgtgtgcgtagtttactagattaaatattgcatacatcattttcatttgcattagggacattaattatcggtgttaaccccacgcatgtattgttcgattcgggagcgacaaatagttttgttagttcggacgtggccgataagtttgatcacgagtatgagaaaagaaaactgaatgttttggtacatactgcgggaaaccaaccacccttgtagacccgaattatgttagtaggaattcaagtagttatccaggatacaattctaccggcaaaccttttggtaatgccgatggaaatgttcaaagttatccttgggatagattggttgtcaggatatcatgcccatttagattgcgggcgtagcagagtagtgttcaaactaaggaatcgacaacaactcacttattgtagaatcaatctaagtaaaattgcttcgttcatgtcagcattgaaggttgacagtttactaagggaaggagaagtctaccttgtcactttaaccgccattggtggagaagttgaaattgactcaaggaatgaagagatcccggtggtgaacgaatttgaagatgtgttcaagcccttagaaggattacctccgccgaggaatcatccgtttaccattaatcttgaacctggggcgactccaattgcaagggcaccatataggatggcgccagccgagcttgcagaacttaagaaacaattggaggatctacttgaaaagggatttattcgtccaaattcatcgccatggcgagctctgatattgtttgttaataagaaagagggaagtatgcggttatatattgactaccgaggtcttaacaacatgacaattaaggataagtacccattgccaagagttgatgagctgttggatcagttgaggggagcaacgtggttctcaaaattgttctggcctctcggtatcatcaaatttcaatctcggagccaaatggtaatggggactgcctttcatacgaggtatgggcaatatgaatttgtagtcatgccatttggacttacaaatgtgcctgcggccttcatgagacttatgatcgaggtattccatgattatttagatagcttcgttatcatatttatcgattatatcttggtatattcacggagtgcggaagagcatcgtgaacatctatggaaggtgttggatagacttagggaacaacggttgttcgctaagtttagcaagtgtaagttctggcaacgagaaattggatttcttggccaccgaatttcaggacaaggagttacggcagatcctgaaaagattgccgtaatacagcaatggtcgcaacctacatccattacaggagtacgaagcttcttaggattggcaggctattaccgtaagttcgtcaagggattttcatcaattactaagcctttgacccgacttactggtaaaggtgtacctttcatatggaataaggatgttgaggaagcctttgttaagttgaagaacgcattaacaaccgttccaattctagctttgccggagccaaataaaccatatgatatctacacggatgccttgagagttagcttgggatgtgtccttatgcaagaaggaaaggtgatggccgttgtaatattcgcattgaaggcatggagatcatacttgtacggggagacggtacgagtatttacggatcaccaaagttttaaatacttatttacgcagccagatctgaatctacgacaacgaagatggatggagttaatcgccgactatgatttgaagattcaatattacccgggaacagctaatgtggtggcagacgccttaagtcgccggaaaatggaagtggatgttggaaaggatctagagtcgttaactgataagttaaagaaagtgactttgttagctctagagggtgaatctagtgagcccttgggtttacaaactgtgactcaaacaaacctacttaactgaatccaagaagaaccggcacaagatgaaaagttgtagaatatcgtggaggaattaaaaacattagatggaccaaatgctagtggctaccatctggctgatgatggcaccttattacttaatgggagaattactgtgcctgaccgtaaggattacgacaagaaattttgaaagtggcacatacttctttgttgagcattcatccgggaagtacaaaaatgtacaaggatataaggaagtattaccattggcctaggatgaagagatcagtggcaaaattggtaagccaatgtgattcatgccaaagagttaaggtggaacatcaagtgccggcggggttactacggagtctaccaattcctacatggaaatgggagtcaatcctgacggatttcatcaccggattaccaacaagaccaggacgtagcaatgatgctatatgggtagtaggagatcgctagaccaagatggctatttggtatcaatgaaaagcacaaataagtcacctatcctggcagagaagtatatcgatgaaatcttaagactccatggggtacctgctaatatagtatccgatcgagatcctaagttctcatccatattttggcaagacctccaacgtgctttaggaacaaatgttcacatgagcacaacatttcatccggaaactgacgggcaaacttaaaggaccatccaaaccatagaagatatgattcgactagtgcactagagtgggctggtgattgggaagactacatgcctttggttgagttttcttataataacagctatcactcaagcatcggtatgtcgccatttgaagcaatgtatgggaggtcatgtcgaactcctctttgttggacggaaatgagggaggacgagttttagtagtcgattgatcgatgagactgaaaaagtacgctgaccgaaagaggcgtgaagtggaattccaagaaggcgacatggtttatcttaaagtaatcgcgttaaaatggaaagatcgctttggaaaagttgaaaagctcgaggtaagatttattggtccatacaaaattgagaagagaatcggggaagtagcataccgtttatatatgccggaagaaatgcaattacataaagttttccatgtgtcgcaattaaggaagcatgttccggatcctattgttatcatacccgagccgatacaagagtaaagaacgaatctcacctatcccgaagtccctcttggcattggtgaaagacgaatgcgggagctaaagaatagaaggattccgcaaattcaagtgttctgggaaggcaaaatcgtaaagttactacctggaaagatgaggaaaagttccgaacaaaatatccacagtttttcgaaccaggaaattacagaggatgaagccggaccatctaatccttaggaggagaatgtagtgacccgcttaaggacatcggcc

SEQ ID NO: 164723 - DNA, 1757 bp, Arabidopsis thaliana landsberg
gatgagacactatgggtactgtctaaccctgagctttttttaatggaggaagcgtcagaaggagctgtatgcttatccaacggaacacgtcagtcggagcagaggaagcctttaagtttctttacaagcttgggtgtctttctgccaggcaaagagagctgactatgacctgaagaggaatgtgggattgtataagggaggaggagcatcatcgtcaaagcctgcaaccaatgggtttcagaaagttactaaagctagcggctacacaaccaaagtaaagagttcaaagagaggtataaaacgggcaagtgatgcctctgctgccgctactacttctacctcggcccagaaaacaactgctgatgggaccttttggactgtatgccgtacttgcagaacacagtatgaatatcatagtgtttatctaaatcagaacctcctgtgtcccaactgtcgtaagccgtttatagctgtggaaacagatcctccaggttcaggttcgattcgcaagacctttcacgagcaccaattcgactctctccgccatacaacagacggaagaaagaaaaatgtacctggaagagacaacaatggggtgtatggtgaatatgattcctttgagtggggtgtgttcactggaactaaaacttctgctcatgctacaccgaccgggtcacgaaaagatgaggttgtgcgtagagagtataccaaaaggacggctggtccttcatcaacaattcctccaaaaagaagaaaggttatggaaaatgcagttgctggtggcaacattgcaagttgtcttgctcccaagtccactggtgtaaaagaagtttctgaggacgagctgaagaatttattgaagaagaaagctaaatcagtaatcagcagaaacctgccagagttatgcaccatcgttgctgaaactgaaactaacggaaggggaatggaaactgaggatctcaatggtttcaatgcaggttcttcagtaaacaaaaatgccattgaatcatgctgcatgaatactgacaaggaattgaattcactgggagccttgacattagatgttactgcgccggatttttgtgactttgacaaggatcgaactgaaaagtcagttaaggataaccagatatgggctttttacgattctcatgaaggtctgcctcgatcatatgccttgatacataatgttatctccgtagatccattcaaggtgcgtatgagttggcttactccagtaacaaacggtgagcctagctcaacgaattggcttggttttggtataccaaaaagttgtggaggtttcagagttaggaaaacactaatctacaggtcaccttacagtttctcacacaaagtaaacctggtcaaaggcaatcatggggaattccttatatatcctagaacaggcgatgtctgggctctgtatcggaaatggtcccctgactggaactatcttacaggagtcgaaacagttgagtacgatatagttgaagtagttgaaggatacacagaggaatattgttgggtagctggctcctctggttaaagttgctggtttcaaagccgtgtttcaccatcatttggattccaaagaaatcaaaaggttccttagggatgaaatttcgagattctctcacaagataccgtcttacttgctgacaggtcaagaagcacccggtgcacccagaggttgcagacagcttgacccggcagcaacaccgtcacagcttcttcaggctatcgatgattatcgg

SEQ ID NO: 164724 - DNA, 1193 bp, Arabidopsis thaliana landsberg
atgagtatggatttggatcaagcgattcaagagatgtcaatcaaagatgaggaaccacttgttttgtcaaaccaagctcagttttgttcgattgaaaggaatacttgcagtatcttaggaagatttttgaacaccttctaatcaaaggatgtctaattggattttagacatgccaagaatttggaggttgtatacaaaagtaagaggtgttgctttatcccaagagagatttcaattctttttcaaatcggaagatgatttttatgaaatcttaaaaactggagtctaaactcaggatgagtggtgtgttctgatggagcgttgggtggaaaaaccttcagatgattcactcatgtttcttccagtctggattagacttcaaaatatcccgatcaactattacacagaagatacaatcaaagaaattgcatgctgtgttaggaaagtgataactgtggaattagatttggaaaagtctcaagcacaggactatgtcagagttcaggttctctttgatgttcgaaatcctttgcgcaattgtaaagaggttctgattcctaccggtgaggttgtctcggttacttttgattatgaaagaatcaggaagaggtgttttctttgccaacgtctgactcatgagaaaggtgattgtccgttttctcagcaaagaaataaatctaattttgagaagattattagagatgcaagtttaaagaaaggagaattaggttcagagtctagacccaagactctatctcttcagtctccctctatggctccctttgaaagtactgaaaatatggatttgattaactttcagaaagagaaggatgctcaggataattctacttatccagcctttcctgttcctttgactgagttatctcaggagatacagagaggtccttttcctttcaaagctaacctcaagaagatccaagaatctgaagctcggtcaggatttttggacatggaattatcatctgattctcagactactttagaggaagcaagttcgtcagggctaagtattaggcagaaaaacccgataaaaaggaaagtttacacattgagaaagaagtcactcagtcgagaagacttaaaacttccaaggtgattccgaggctcaaagaagaaatcaagttgttggtaaaaggaataatcaagataataagggtgtggactctcggttg

SEQ ID NO: 164725 - DNA, 389 bp, Arabidopsis thaliana landsberg
  unsure (1)..(389): unsure at all n locations
ttaggctattgacatttgtttgtttggccttttttttttgtcgggggataaaataataatttgttttttttgctcttgtttttttttttttccttttgcccgttgtttttttcttgttgttttgtcgggttcttttttgcttcttcgggtttttggcggtggtttttttttttttttttctttttgccgctggtgcctcgtcttcttgtgttgtcttgttgtttggtatttcgtgtgtgcttttttttttttgatttttttttttctgtttctggtggtggggttgtcctgtttttttttttaaaatctccccncccccgggtgtttttggtcgccctttttaattaaatttttttttttttgaatttctcttttttttttttctcttt

SEQ ID NO: 164726 - DNA, 968 bp, Arabidopsis thaliana landsberg
aaattgctgctaccacacgatgttgttgggctcatcctcgagagacttcctgtggagtctctgctgagattcaagtgcgtatccaaccagtggaaatccacaatcgagtcccagtgttttcaagaacgacagttgatccgtcgtatggagtcccgaggtcctgatgttcttgtagtgtcctttgctgatgatgaagataagtatgggagaaaagctgtgtttggttcgtccatagtttctacgttcagattccctactctgcacaccttgatctgctatggtagttgtgaaggtctgatatgcatctactgtgtttactcaccgaatatcgtggtgaatcccgccactaaatggcatcgaagttgtcctcttttcaacttgcaacagttcctcgacgaccaatttgaaaagaaagagtatgacttcccaactcctaaacttgcattcggtaaagacaaactcaatggcacatataagcaggtttggttatataattcatccgagtttcgcctcgacgacgttacaacttgtgaagttttcgattttagcaacaatgcttggaggtacgttcaccctgcttctccttatcggataaatgattaccaagatcccgtgtattctgatggatcagttcattggctcaccgagggtaaagaatccaagattttatctttccatcttcacactgaaacttttcaagtcttatgtgaagctcccttcctccgtgaacgtgaccctgttggcgactccatgtgcatcctcgataatcgcttgtgcgtttctgagataaacggtcctgcccaactgatatggtccttggattcttcaggcggcaacaagacatggaagaaattgtgttccatagatctcacagtaaatatctcttggttcttttctttcagctacccattggctccaatagcaatcatggacggggaatagctattgcttcaaggtcgaatagctgg

SEQ ID NO: 164727 - DNA, 880 bp, Arabidopsis thaliana landsberg
gcgatatttataagagcttgattttgtgatgtagttccgaggaactttagattgtcggaagagcttgaaagaggtgagaaaggtattggagatggtactgttagctatggaatggatgatgctgatgatatttatatgcaatcttggactggcaccattcttggtcctcctaatgtatgtatctctctatcgatctctgagttttgttttagatttatctgtgtttgatagagtaaagatgcaatttttaacacttttgtgagagaattgttggtatagtgttttagtgttcaaacattttttagatatgctttggagttttcttctactttttgtctctctgttttgggtgcgtttctgaagtaactagtagttgtgtggctgtttctcgaatggatataaccgttggctgtgttatctaagaccctttactccaaatggtatgtagtgacatttcttgattactattgattagagtggactaaaaggaaggaaattgttggtttgtgcttttggattttgagaagattgatgttttttgtttggtcatgagcgaatatcagactgcatatgaagggaagatctttcagctgaagcttttctgtggtaaggagtaccctgaaagtccaccgactgtgaggttccagacccggataaacatggcttgtgttaacccagaaactggagtggtaataacctttgacatcactgctgttatatatgtgtgtgtgtgtgtggatatttgcttagtctgacaagttgtttcgaaatatgaaatcaggttgagccgagtctcttccccatgctccctaactggcggcgagaatatacaataaaggacaaactggttaagctgaaaaaagaaatgatgacttcgcat

SEQ ID NO: 164728 - DNA, 486 bp, Arabidopsis thaliana landsberg
gccgtgtcaaatcagagtattgtgctgatcggtatgatgggcgccggaaaaagcacagtgggcagagcacttgcccgtcatttgtcctgggagttttcagacacggaccacgtgattgaaaatcagaccggggtgtccattcctgtcatatttgagattgagggtgaggcgggttttcgccgacgggaaacccagtgcctggttgattttgccaaaagatcgacggtggttttggccacaggcggcggcattgtgctggccgaagaaaatcgccgtttgttgaaacagatcggcccggtcgtttacctgaaagcgtcagtgcaagagctttttcaacgcacaaaactggacaaaaaccgacccctgctgcagacgcccaacccccggcaacgcattgaagagttgctggcccagcggcgcccactttacgagtcgtgtgcagacctggtggtcgaaacggggcgtcaacctgtacacttgattgtt

SEQ ID NO: 164729 - DNA, 419 bp, Arabidopsis thaliana landsberg
aagaagaaaggagtttcttttgtcatcgcctgctctaatccagttgatgatacgatcttggagatagccacgcttgagatctttcttcaggatcgaatcaaggtcataggtatagccggtgctcttggtaactccgtctccatcacccgatataatggaaagatcaatgtcagcgccaattccaatttctcctaacggtaaacttgttttcttctctcacacgtctttagaaaccctaacttgctcttaaattgcaaaaatctggtttggaattcaggtacttgaagtatctgacaaataaatatttcaacaagtacaatctccgtgattggctacgagtgattgcatctatcaaagacaaaaatgtctctgaggtaccctacttcaggattgacgatgaagtagctagttacgaggaa

SEQ ID NO: 164730 - DNA, 1310 bp, Arabidopsis thaliana landsberg
gtttcactaagctgaaactatttgaagccgaccaaaacatcttagacgctctaattggctcagacattgaagtcatgataggaataccaaaccggtttcttaaagaaatggctcaagatacatctgtagcagcttcatgggttgaagaaaacgttactgcttattcttacaacggtggagtcaacatcaagtacatagctgttggaaacgagcctttccttcagacatataatggaacttacgttgagttcacattaccagctcttatcaacatccaacgagcactagaggaagctgatctgaaaaatgtgaaagtcactgttcctttcaacgcagacatctatttttcccctgaagcgaaccctgttccatcagctggagactttagacctgagctaagggatgcaacgattgagataatcaatttcttgtattcacatgattcgcctttcacggttaacatatacccttttcttagtctctatggaaatgcttactttcctttggattttgccttctttgatgggactaacaagtctttgagagatggaaatttggtctacaccaatgtgtttgatgcgaatctcgacactttgatttgtgctatggagagatatagcttcttggggatgaagatcattgtaggagaggtcgggtggcctacggatggagacaagaacgctaatgtaaagagtgcaaagagattcaatcagggaatggtaaagcatgctatgtctggaaatggaacgcctgcgaggaaaggagtgattatggatgtttaccttttcagccttgttgatgaggacgccaagagtatagcaccggggacttttgagaggcactgggggatctttgagtttgatgggagaccgaaatatgagcttgacttgtcaggtaaaggaaatgacaagcctttggttcctgtggaagatgtgaagtatctgcccaaaacttggtgtattcttgaccctaatgcatataacctccctgacttgcctgataatatccactatgcttgtagtttgtctgattgcacagcactcgggtatggatcctcttgtaaccatctcactgctacaggaaatgcttcatatgcctttaatatgtattatcagatgcacgatcagaaaacatgggactgcgatttcctggggttgggtttgatcacagatgaagatccatctgatgaactttgcgagttccctgtaatgattgatacaggagattcaacgaggttgcagcctggatcttcaagagtgttgaccagagtcgcagccgcggttttagttatgttggtccttcccatcttg

SEQ ID NO: 164731 - DNA, 609 bp, Arabidopsis thaliana landsberg
ctaacggacgagctaattggaagaagcggaccttatcatgcaaaaccactcaacccccaggtctagtagacgcttcacaatctcagcagaccactcgaccccctggtcgagtagaggacatcaccacttcacctcaccactcgaccccgaggtcgagtgtcttcatctccatcaccttaccatcactcgatcacctcactcgatcccacagtcgagtgtcttcacctccattaccagacaaccactcgatctcaccactctaccttgaagtcgagtatcaccatcaccaccactcgactacacactcgattgcaagcttcagagtcttcttcattccgcactcaaccagacactcgaacacaaggaagaaaagaagacccagctattcactcgacctcccactcgaccacctgggtcgagtacagttcttaatccgtcccaatactgcgtcgtcttatgtattagggtttcggaatattttgctataagtagcatgtacttcacattttcgcaaacaagtttttatctagttttattccgcagacactgtgttccagaccttttgtaatccggatttctctttatctattcagtattcagtatttgttc

SEQ ID NO: 164732 - DNA, 1220 bp, Arabidopsis thaliana landsberg
tgctctgagtttggttgggagattactcaatcccgattgtcaagagatgaagcgtctgattcgagatatgccaaggaaatggcagaaggaaggaagagtgaagggtattgctctgactagagagaagtttcagttcattttcgagaatgctcacgatctcaaagacgtgctgggaaaaggtgcccaaacctttgatgagtggtctattgcgattgacagatggtatgagaatccccctgaaaactatctgcagttcattcctatctgggttcaaatttggaatttacccattaacaacttcactgtcccagctatcaaatcccttggtaacctcataggtcaggttacggaagtagccttcgaccctgaaaggtcacaacttcaagctactgtagtccgtttccaatatgagaagatccaaaaaagatgttatgaatgtcagaggcttacccacgagaaagacgtgtgtccaatcttggttaaggcaagacaagatcaagctgctgcttgtcgtaaaggtcaggttattccaaagcctcctccgactccagttcttagtgaatctgatcctctctttggagttctcaaagaaagccaagtgggtattgatcccaatactggcagaccacgaatagctcaagaggttttagaaggtatgcgccaatatcttagagtggcgaatgaagaggagaaattaataagagtggatagagtcattcaatcagtaagggaagcggaaaaagatcctttcacgcaaaaatcggttcttcgtctcgaagctcttctagtggtccatcatgatttgtctaaagagaaaggaattgtttttgggtatgatcatgagattccttcgagtagtggggacaaaaacaagatggttgtttcatcaagtatcaccgcatctccgtcaactgctagagactggcttgtggaagctgagccttcgctgtctatcactgaagcgggtaatttccttgcactctctcaaccttttccagatagttcgacggtatatagacctggtttctttgagactggagctatcactgggactactctgaaaaaggtcaagcagaggaacagacctcctaagcatgcaaggaagccaaaaccaagggttccttctagtggtgttcaatttccaagtcaaattgaaggttctgtggtgggtactaaggataagagaaaagcagttgcgaggttcccagcaatgccaaatt

SEQ ID NO: 164733 - DNA, 482 bp, Arabidopsis thaliana landsberg
aaaacttgcgttcgcaatcggcgaggctattgcaaagagcggcaatattaccgtgtatggtgcagaaaaagatctcgattcactctcgactgccgcttcgcgtggcgccaagcaggctggtggtacgacagtcggggtgacataccaaagaggtaaggatatctgggacacagagggtaatacagacataatcattgtctccggcaatgagcgcggaggcggtcgcgagctcgtactcgtaaattcgtgcgatgtcatcatcgcgatttccggcgggtccgggacgcttaccgagatcgcaatcgcatatcaaatgaatattccggtggtcgcacttaccggtacaggcggatgggcagataagctcgcaggagcgtatctcgatggaagaaagcgtttcaagatagagccggcagcaacgccagaagaggcggtcgcgaccgcgatacgtcttgccacgggaaagtagcggcgctttggaa

SEQ ID NO: 164734 - DNA, 320 bp, Arabidopsis thaliana landsberg
actttactcccatgtcttacattctcattcctattttgactgacattgtggatcgcgttgggcatgatgggtttcgtgaacgaggccctttcattgccgtcggacctcagtggctaagcattgccttctccaacgaagtcttagctgaggtttgcctggatgagtttatatttgttagccccttaaccaatgcattatctccataccgccctttcctacttaggtgtctggcagctggaaacaagactgctacatatgttgaaggtttagggcgtgctgcacagctaggcccttcaacagaatcgcttgacatgctgggg

SEQ ID NO: 164735 - DNA, 4492 bp, Arabidopsis thaliana landsberg
tttgtggtttcttttgtgtatgcttcaaatgacgagactgttaggcagactttatgggatgagcttgtggccctttcttcagacagtcgtgttgtgggaaaggcctgggctgtgatgggtgacttcaaccaaactctgcacccaagcgatcactctgccaccattagtcagaatgtggaccgggcaacaagggtcttcagggaaactctgcttgatgcctctcttgttgacctgaactttcgtggaagcacttttacctggtggaacaagagagccaactcacctatagcaaagaagattgatcgtgtgttagtaaacgatatgtgggctgatatttttccctctgctttgggcttctttgggaagccgcacttctctgaccatgcttggtgtgggatcctgtttgattcagctgcgccaaagacaaagaagccttttcgtttttacaactttctcctgaagaacccagactttgtgcctctcatcggtttcagctggctttctctaaacgtaactgggtctgcaatgttcagagtatcctgtaagctcaaagcgctgaagcatgtaataagagagtttagccgctataactattctgatctggaaaaaagaacgcaagagtccctggattgtcttttggaggcccaaggtagagtcctcgaaaacccaaccatccacaatgctgagcgggagatagaatggcaaaggaagtggcagactctctctctggccgaggagagtttcttcttacaaagatctcgtgtcacctggttaggagagggtgataggaacaccgcctactttcacaagatggcctcttcccgtcaggctgtgaatcacatacactacctctttgatgttaacgggtcccgtctggattccctaagcgccattcagaaccattgtgttgactattttgagaaccttctgggagggattcaaggtcctaccatgtttgctcaagaagatatttctgctttgcttagtgccagttcgcaagctcctattcagcatggtcttgactcccctttcacggctgaagagattaaggctgctttcttctctctgcccaagaacaaggcaagtggccccgatgggtactccgctgaattcttctgcagctgctggtcttttgttggcgttgagatcactgcagctgttgctgagttcttctcctctggccagttgctcaagcagtggaatgcaacctccctggttctgatcccaaagatcccaaatgcgtcttctgttgctgacttcagacccatttcctgccttaacaccgtctataaggttatctcctctctgttggctggtcgtctaaaagctgtcctcccatccatcattggccactctcagtctgcctttatgccaggtcgtctcctgttagagaatgttctcctggctacagagattattcagggctactctaagaagtccactgctcctagtgcaatgcttaaagttgacctgcgaaaagcgtttgattctattagatgggactttattattgcctgcctcagagcattgaacttccctagattactcatttgttggattgagcagtgtatctctacagcgagcttctctattgtggttaatgggcagtcaggaggctatttcagaagcacccagggcctaaggcaaggtgaccctatgtccccatatctttttgtcttagccatggaggtcttttctggtctgctgcagtccaggtattcttcggggtatatctcttaccaccctagaacttctgaattagaaatctcccatcttatgttcgccgatgatgtcatgatattctttgatggtgggggctcctctcttcaaggcatttatgaaacattggatgacttcgctggctggtcagggctccatatgaacagagacaagacgcagctcttctacgcaggtctgagccaaactgaatccaatgctttggcaagctatggattcactgttgggtcgttacctattagatacttggggctcccgttgatgagtagaaagctgaaagtttcagagtatgagcctctcatagggaaaattactgcaaggtttaacgcttgggctgtgaagtctctgtccttcgcggggagagctcagctgattggctcagttatttcaggcactgtcaacttctggatatctacttttgtgttgcctaagggatgcattagacggattgaatctctctgttcccgtttcctgtggtcggggggaactgaaaaaagaggtttggttaaagtggcttgggctcatgtctgtttacctaagaaagaaggtggtttgggtctgaggcggtttgcggattggaataggaccatgtgtttgcgtctggtttggctactcttctcaaacagtggctctctgtgggttgcttggcataagcatcataatatcagcacttctaccaacttttggaaccaagttgaaagtacaggtgactcatggagttggaaatctattctgaggttgagagaacctgcttcagttttcattaagtgcagtcttgggaatgggaggcgcgccagcttctggttcgatagctggactcctttgggaccgctctacaactgctttggctcctctggtcctagctccttgcgtgttccattaaatgcgacggtttcagatgtgtgcaaccatcagggctggattattgcaaacccgagatctgaccagggggtgtctctgcaaattcacttatccaccattgccttaccttcggatgacagtgggccggatgagttcgattgggtggtcgaaaacaagatctgcaaaggcttctcctctgctaaaacttgggcagtcactcggcctagagctgccatagttgattggtgggactcagtttggttcaaagaccacattcctaagcatgctttcaacatgtggatagctactttggaccgtctcccaaccaaaaccaggctctcttcttgggggcttcagattcaggatacttgtggcctctgctctctctccccggagagtagagatcacttatttctgtcttgtgatttcgccctctacttgtggaatgcggttagtttgaagttaaatatgcagggtatccacttcactttgtgggctgagcttctttcctggctgaagtcgggtaacagaaggtcgcctcctactctcagaaagctcattgcccaatcggtcatctatgcaatctggaagcaacggaacaatctgctacacaatcttgtctatgtccttccctcggtggtctttcgcgaagtggaccgcgaagtgaagaactgcatcactgcccggcgactcaacaagcgcttctccaggctaatgagtctttggttgcactaatccgttgcctctcataacctctcttttgctttcttgtttttaagcttttttgccaagaaaccaacctttaggtttgctctgtaaaccaactctttcattattatgatatttacaagttagcaaaaaaaaaactattcactattgttgacgacttgacggtctagttgtctttgatcaaaatacattaggataatcaaatgaaaacaaccaacaacaacaaaaatatatgacaaaagttacatctcggataatgtacttcagaatcaacaagaatgagttgtgaaatctcttcttgaactatatgaatagtaagtggaagtttggaggcacacatgcgtggcgaactctgtgatatgttgttgtctatagactttcacaaactctacatacaaaataaaaaacgcaattgtagtaaaatgcttaatcttgtaattatcttctaaccagcataattcatatttgcacacacatgtgatttgggtatgcatgcaaccactatttcagtggattgatttttttatatgtcagacatattctcatgtttttttttcttctgtacgataggatacctttacatgggcactaaagcataatcaaagtcataacgttagttaacaaagctaaactagcaataacaaatatataagtcggtttaccaaaactaaactggcatcccaacaacatgatcgttgtaaacttgtaatccataacactctaacatcaaatgccttagcagacacttagctgtcggacactaagtttatgttatcatcaacgtacaagtgaactatgaacattttctattttaaaatttatttataaggacaacagagcaagaccaaaagggatcaaccatgagctaggaaggcaagaatcaagaaggaagaaaccactgagcatcgtagaagttgaagttggagagaccgtggaagcgtttgatggtctttgttataagattgaagacacagatgtcgaggcatgacgattctttgtgacggatacgatcaccacgggtgaaataaatggagttaggctcaataccaagggtatggtcagcaggcacagtaatacccaaatcaagaaagagggcctcatcacctagagaatgcacctcaagaagccaggtgtcgagggttttcgggtcaagatctttaggatc

SEQ ID NO: 164736 - DNA, 461 bp, Arabidopsis thaliana landsberg
tagtttttgtcatcaggtcttcaacacaacgcctataagctttgcccttgtaaatctgaagcctattcttcccggccatgtcctagtctcgccgcgccgagtggtcgtcagtgtctgggaccgaacgccctgggaggcagtcgatttatttttaacggtccggcatgtcggcagaatgattcagcgcgtgtacggggcgtatagtctgaatattgcgattcaggatggctctgagtcggggcagagcgtgccgcatgtgcatgcgcatattattcctaggaagaagagggatgtggatagtatcgatgagatttatgataagttagatggggaggaaggggatttggcgcggggactcaagggaaggcaaggggatgataccgcgacgttgcgggttgatgatcaagagaggaatgagacgggccctgaggagatggaggcgcaagtgatcatgttggcgt

SEQ ID NO: 164737 - DNA, 1456 bp, Arabidopsis thaliana landsberg
aatccgacaacgcttcagattcatgactcttccttagtttagctttgaatggaaaaatatcctttctgttattccttagataactcattcaaaggagcaggagaggctggataaggagaagaatcctgagcatccttctctctctgccagttaaacaaatccctattttcattacttccaacaggaaccatagagggagacggaagagatagaatcttgggtctagtttctgaaactaaatctcctgtctttaaacctgcatctctgataattttttcaaaatttgatttatttctttgctgagaaaacggacaatcacctttctcatgagtcagacgttggcaaagaaaacacctcttcctgattctttcataatcaaaagtaactgagacaacctcaccagttggaatcagaacctctttacaatttcgtaaaggatttcgaacatcaaacagtacctgaactctgacataatcctgagcttgagacttttctaagtctaattccacttttaaaaccttaccaacacaagacgcaatctccttaatcgtatcagatgtgtaatagttgacaggaatattccgcaatcgaatccaaacaggaagaaacatcagataatcctcttttggtttctccacccatcgatccattatcacacaccattcatcttgagtccaaactccagtttttaaaatttcaagtaaatcatcttccgatttaaaaagaaactgaaatctttcttgtgaaagagctctaattattattattacacctcgaacccttgagtaaagtctccaaattctcataaaattattattattttctctaaaattaaatactcataccaaatttctcaataaatagaactcaaccttggcgtgtgttctccacacttcactgatattctccactttcattttcagtctttctcatttaacaaaacaaagcaaaaccaaactatttaagtttaaccatggaatctcacaacaccttgaacctagacatggagaaagatcaagaaaaggcttttgactactccaaacgagctcaatggctaagagccgctgtgcttggtgccaacgacggtcttgtctcgacggcttcacttatgatgggtgttggtgcggtcaagcaaaacgtcaagatcatgatcttaactggttttgccggtttagtggccggagcttgtagcatggcgattggagagtttgtctctgtttactctcaatatgacatagaggtagctcagatgaagagagagaccggaggagagattgagaaagagaagcttccaagtccaacacaagcggctgcagcatctgcgttagcgttttctcttggggcgatggtgccgttattggcggctgcgtttgtgaaagagtataaagtggcagcggttacgttggcgttggtgatgtttggatggttaggggcggttttggggaaagcaccagtg

SEQ ID NO: 164738 - DNA, 283 bp, Arabidopsis thaliana landsberg
atgatcgctcggtatatgcgtcatcaactcagcattggtatagtttctcttctgcatatcagtgcttggtcctctaatgtacttcctaatggacagctagttgcaatggtggcatgaccttatactgttcctttcagtcccactttgccgccttcagatgtgtcattgtgtcaaaggcgccttgtagcctatagagagcgtattttgcgcctgtggaataagcagaagagaactcggttgatgaaaacaaggagacccaaagttctgtttcattcgtagcgat

SEQ ID NO: 164739 - DNA, 878 bp, Arabidopsis thaliana landsberg
cccttgctcggcccttcatcttttgtgatcttggttcaggcatcacagcaaaattctggcaggataattggaaagggttaggacctatcattgatctcacaggtcccatcggtccgcaagcgttgggtctccctattgatgttgtggttagagacgctatctctggcccttcttggaggattatgtcgtctagaagcaggaacccaaccatcagactcattaagagtattcttccaagccctgagaacatgattgagagtttgcatgatgatacttatctctggagtcctgatcatcatgcaccttcaaacaccttctcagctgaaaagacttggctcgctctaaatcctccttctccagttgtcccttggcatcggtcagtatggttctctggcaacatccctaaacacgtcttcatctcctggattgcaactttgaataggctgcacacaagagacagattgcgcaattggggattaaccactactgcgacttgcttgttatgcaacactcatgatgagtccagagaccacttattctttgcttgcaggttcagtagcagcatttggaactactttactgcaaaagccaacctccttcctccaacgcagtttgtgacctgtcttatttgggtgaacaatactgctaggaacaagaacattaccctcatcttaaagctaatcttccaagcctcaatctacttcatttggcgggagaggaatcaacgcctccactcttccaatccgcgtcacgctccttctatcattaaggaaatcaaaatgatagttagggcaaggctagatcctctctctcgggcgcagagacccattcctcctgctttgacgctcctcgccacttggttctctatcttccagtga

SEQ ID NO: 164740 - DNA, 324 bp, Arabidopsis thaliana landsberg
cctactaagggtcataatctggttccggtccctccctcgaggttggcggtctctaaaatctttttcttgagtgcctgcaagctgtgggatccactagttatactgcggacgccaccgggggggagcttcaacttggcctatagtgaggagtgttgccattcactggccggtgtttaacaacggttccactgggagcacctaagcggtggccaacttaattaaattgcttgacatcccgctttacgcaagtggcgtaatagcgaggacgcccgccccgatctcccttgccatcaggtggaccatctgcattgagaatgtgactcg

SEQ ID NO: 164741 - DNA, 2523 bp, Arabidopsis thaliana landsberg
atggaaagatccaatcttttccacatcccttgttttcctctcttatttcttctcttcaacatcaatggcgttcacactaccttcgtctgcggcgaccaagacttctctccaaacacaggctacgttgtaaacctcgatactaacttgccttctcttgcttcaaacgtcatgcgagaacgtggtttctgcagcgtttcgctagacgaagtttacgctcttgccctatgtcgaaaacactacgaagttcaagcttgtcgtcgctgcgtcgatagagcaagtaggactctgttaacacaatgtcgaggcaaaacagaagcatatcactgggattccgaaaacgatgcaaacgtttcttgtctagtacgctactcaaatatccatagatttggcaaactaaagcttgagccaatagggaatgttcctcactcgagtcttgacccctcttccaatctaacccgaatcagccaagagtttgccgccagggctaatcgaacagttgaggttgcgtccacagctgatgagtcttcggtattgaagtattatggagtctcaagtgcagagtttacagacactcctgaggttaatatgttgatgcaatgcacacctgatttatcttccagtgactgtaatcattgtctgagagaaaatgttaggtataatcaagaacataactgggacagagttggaggaacagttgcccgtcctagttgttatttccgatgggatgattacagattcgcaggagctttcgataacctagagagggttcccgcgcctcctcgacctcctcaacctcgacaagattctcgggtcaagaaaggtactagaattgattttcttgatgaaatcttgaattgacttaaccttaaccttttcttcaggaagagtttttcaaccatggagcgttgtggttgttgtttttcctaccgtcataaatcttgccatgtttgtcgctttcgtgcttgcttatggccggatgcggaggaggatatatgctgaaatcaatagtgagtaatagtttcaagaattttgagtaaacgtttagaaacttatggagtgttgttttgaatgaataagctttaaaatatgtgcagagaattctgattctgatggtcaagctacgttaagatttgatcttggcatgatcttaattgcaaccaatgaattctcccctgaaaacaagcttggacaaggtggatttggttctgtctacaaggtaagaaatttcatcaaaacttgtaaagtcttatcaaactttgtgatacgagactatggttaggtagattagggccattaggccaccggttaggacattttagttaactagttttggttgtggtttactttatgatttggttttcattatttcctttctatgttaagtgttattagggttttgattaagttgtattaaggcctatataaaggtctattatgatcaatgagaaagtaagctccaacaattaacctaattctctaagagagacttgggttaaagggaagcttttgctttaaaaccttttggttcataacaatttggtcagtgatcttataccgatctcaggggatattaccgagcgggcaagagatagcggtaaagagattagctggaggttcaggacaaggagaactagagtttaagaatgaagtcttactcttgacaagactccaacataggaatctagttaagcttcttggattctgtaatgaaggaaatgaagagattcttgtctacgagcatgtccctaattcaagtcttgatcactttatctttggtaagcctttacatgaccaatgtacacaaaacttgttaatcagactaaagagttctttcaaaatctgtagacgaagacaaacgttggcttcttacatgggatgtgaggtacagaatcatagaaggagttgcaagaggacttctttatctccatgaagattctcagctgaggattattcacagagatttgaaggcaagcaatatccttttagacgcggagatgaaccctaaagttgcagactttggtatggcgaggttgttcaacatggatgagactcgagcagtgacaagcagagtagttggaaccttgtaagtatcctctgtttttactgattcttttagacaaaacaagatactctgtttttttttaccctaaattttcgagattcttggaatcagaaactaatttgaatttgttttagtggctatatggctcccgagtacgttaggaacagaacattttcagtcaagacagacgtttacagcttcggagtcgtgcttctcgagatgataaccggtcgaagtaacaagaactatttcgaagccctcgggctccctgcatatgtaagcaaaatccagtcttgtttactactttagacacaaatgaatctcaaaagataatttgagtataaacttatggtgataatatataggcatggaagtgttgggttgcgggcgaggcagcgagtatcatcgatcatgtcctcagtaggagccgaagcaacgaaatcatgagattcatcgacgtc

SEQ ID NO: 164742 - DNA, 1058 bp, Arabidopsis thaliana landsberg
  unsure (1)..(1058): unsure at all n locations
tgtttaaaattacagtcgggaccccttaataagagggactgtgcagtattacttcaatgatgtctgtaaatggtgcttgaaggacatggttagcaccgcaaggagaactagagagcagcctccatggattggtgaaactctgtgggctgttatgtgcgcttactgggacaccgaaccagcacaaaaacggagtcggacctattccaaagctcgtctctctgaccgtaacggtctcggtcctnaaatccacttctctgggccaaagtcttttcaagaaatccaagacgaatttgtaagtttttctgttacctctttcagttacctcacatgtatgtttttgagtatttgagctgtgttggtttcattgcaggaggagaaattgggaagaacggtcactattggtgaggtgtttgtagagacacatactaagtcggatggtacgtatgttgatcggaaggcggagatgattgctcaaacttatgagcagaatgtgagagatagattgttacagctagaggcggaagcttctgctgtgtctgatggcacttcacgaccttgggagctgacagtagatgagtacacagccatctttctcgaggtaagatgttgtagtctaattcacagtcttgtccattgttttaaattcagtcactaattgtcttcctctctttttcttgcagtccactgatagggatgcaagaggcaatccatatggacttggatgtctgaaagatactctaggcagtgccatccgccaactccccggagactcaacatcctttcaagatttagaagaacggctgcaagaagctcaacggaaaattgaagagcagactgcgtataaaaagaagcgggatgctgagattacagcccgagaagctgagtcagcccgagtcacagctgagcaaaaggacaagcccgaacccttgtccttagtcgagaagtatctctgccaaaccgatccgcaattcttggacttcatggccactcactctgccacatccactgagcccacttactccacctactgctccatagatttacgtaccaaacactag

SEQ ID NO: 164743 - DNA, 2927 bp, Arabidopsis thaliana landsberg
aacaaataaatatattatgagccggtttaagctaagcaactcaaaaatgaataaagatttcacaatgactttttttttttttggacaaaactttttgtgattgataaataaataaaatcattgttttcgtcgagatatccaaaatcaagtaacgttggtcctaataattattattactgcgatctaaacatataactgcatcaattaattgagggaaaacaaaaagacatgtaatccattgataatcaattaaagaccaaaaaaacgttttaagtaataaggcctattcttttaacctttcaatctgcgttccaagcggcgccgtatattgaacacgattaataattcattgaactgcaccaaaggacaaagttctcttttaccatttaaaagcctaatagtatgagttttttaattcaagaatatattattaagcaggaaagacaaacctcaaatttatttgttcattcacgacaaaaagaaaatgtatgtctttacttttagtggaatttttacattatttctacacccaaaaatatattttttaatacatatattcaattgttattacttattagatagcaaagggagacatgaagcgtgcgaacacgacaatacacaaatagtatcaaatcggctttggtcggttggtcatctctctgtatttctctaatacatgttcatatatataaatcaccaacccatgagcttatgttattcaatctctcgtaatatatatattgaataccctttcatcttctaaatttattgtaaccaacgaaagaaaaagtttcgattacctatctttttccggcaataacatttctcttctaagattttgctaaaagagttaaaaatgagaacactttgtcctaatttcgatagagaagacggtttagagacggtattggaagttccgatgccggaggagttgttctgttcggacaacaacaagagcggcgcttggcgtagcgtcaaatctagtttgctccggtcaccgccggataacagtagcagccttgccacactattcggcggtcgtgactctcagattcagatgcttcttggaatcgttggagctccgtcgatacctctccctatttcttccgatcaggccaagattgatcatcccatctccaatctcattaaaaaccaatctattgtaagttattatactaatcttgcgtttgatttacggtttcatatgctagcgtctaaacaattgtatcacagatttacttgagcaacaagtttctgattttgcttttgatctgtttttgggtatcaataggaatcagccatggcgaagtacatagtaaagcaatacactgcagccgctggaggagagatggctttgaatgccgtggagagcatgtacgcgatgggaaaggtgaagatgggagtgactgagttttgtgcagcgaaaaccctaaatgggaagaggaagaagaagatggtgaggataagacacgtcaataacaacaacggaaacggaggagagatgggaggttttgtgttatggaagaaaggttcgagtcaatggagtttagagcttgtggtttcgggttgtaaagttagtgctggttgtgatggtaacgtggattggagacaaagcccttggctcgcacattctcatgcttctaatgaaccttctggacctcttagaaggttccttcaagggcttgatcctaaaaccacagcaaatttatttgcgggatccgtttgcgtgggtgaaaaggcggttaacaacgaagaatgctttgtgcttaagctcgaaacgcagccttcgggacttaaatctagaagcaagagcggtatggagacagtgaagcataccgtgtggggatgttttggtcaaagaacaggacttttggttcaattagaggatacttatctagtacggatcaagaccggtctggaagatgaagatatggtcttgtgggaaacgacgtctgagacattgatccaagattataagagcattgatgggattcagatcgctcacagaggaaaaacacgtgtctcattgttgaggcttgatgagagcttagagagccattcaaagactacaatggaagagagttgggagattgaagaagtgggttttaatgtgaagggtttgtcttcagatttcttcttgcctcctggtgacttgtgtattaaggaagaggaagaaaccgggtttagtttcggagattatactagtcctatgctgcttccattgaaggttagtaccacttcatggaaaatcaagtcctcaaaagtcacagctattgaagattttggtgaatttgagggataaaaaagtgaagacgtttcaagatatttttattgtaaattgatcttcattttgtatatatatggaaaattatggagaaaagtgcttgtaaataacattataaagaatagaaaagcaagcctttttccttcttctctctcgtttatgtactcttacatttttcctcttatctagcttcgtcttgtacttgtcacttatagtgtgctctgtttaaaaacagagtaaccaaaaaaaaaacagcaaaagaaacagagtaataacaacctctttaaaccacaaaccaaagccttttagcccatgttaagacactccatgggcctaagcccaactgcttacatttttaaccgaaccgaatttaaccagatagctattagcctattagagttcttcttaatccaagaaccaaaacttcacagtagaagaaccaaaaaaatttgttacatgaaaatatatacaagaagccgctaatttcatttgaagtttgaaacaacaaccaatgacgatatttatgatctaggatttttatataataagagacacgatacatactctgttttctatctttcttccaccaaatccgaatcaaaatgtcagaaacaacaacatccataagtaccagtctggtact

SEQ ID NO: 164744 - DNA, 675 bp, Arabidopsis thaliana landsberg
atgggtcgtagaaaaatagagataaaatttattgaagatagcatcgaaaggaaagcgacgttttcaagacgccgaaatggcatttttaagaaggctgatgaactcgcgaagttgtgtaatgtagagattgctgtcttggtcatctcccccactaatataccatacacatacggttatccatgcttcaacgatgtggttgagcgtattcaaaatcctagtgcttcgtccaaactcaggagtctcatgaaagaattggaacaaatcaaagagtttcaggaggtatgtttcccattattaatataatctcatccgttagttttccttcttttttgttctcctatagattataaagataggtttgctattatacatagattaaataatctttaatttattttatattatataatatttttttgtctttatttttttttgtcaattttaggatttgaggaagagacagcaaagaaaccttgaaaagtccaatatgaaagagaatgtagatctgaaattggaggacttacttgctttcaaggcgaaactcgaggcctatcaagcaggtttaaagaggaaacatgtagagatggaggatttgtcttctccatcgatactctcaaagaatacaaagaataagatgatgaggaccgagtattcgtctggacagagcaaaggaat

SEQ ID NO: 164745 - DNA, 1181 bp, Arabidopsis thaliana landsberg
atggagtcaggaacgaagaagaagaagatagattactacacagaagatctcgtggtaaatatattagcgagattaccactaaagagcatcacagctttcaccttggtttgcaaggaatggaaatcaatagtcgaatctcaatatctacacgaactttttatgtctcatcatcaagactcgcatccttcatggtcactcatgtgcagagaaactcataaagaagtcattgctcactacagatgcgacacttggggacttacacaatctttaggctcttacatatcttctttcctaacacaccaattcggaattcacaaggaaaaggttactgtcgaggcttacactgatgtcggattgattcttgttagtttgaaacaaacctactatgttgctaatccaatttcacgacaatgtgttgaaatacctcctcttcctcgtctgcctcgaagagctgatatattcaaaccttctggacttgcaacaagaatagaaaacggcgtagttttaggttacaaagttgttctgatgaaagataccaccgataccgacgacattagcttactcatatattcatctgagacaggcctatggagtttcaacactgtccaatctccttatcttttgaagcgtgttgcttggttcaatcctgtcagcttgaatggaaacctttactggctttgctacaacaactatcgtgatcaccttgttgtatcccacaatttatatgctactggtacggaatctgatcagtgcagagttatagagttccctcatctagaaaacgatgtgtattttagaagagctttcacaacatctcaaggatctcttatgtatatgaaaattatcaacgaagaaaaagatgatggaagtttagggcttaagttatgtgtatggaggttaaagagtggggaatgggaaatagtatctgaaatatctccggcttgtatcaagagcggattagattactttccgttggcgataaaccctttcgatgctaataaaatgtatctgtggagtgagatgcataaatgtttaatatatactagcttgctcaaaggcaagttccggcgacacaagaagttggaatataatagcgatggccgcattatgagctttgctggagactggagcccgtatgaacacctctttaacccatgtctctccaggtctgctctcccgca

SEQ ID NO: 164746 - DNA, 375 bp, Arabidopsis thaliana landsberg
ttggattgaatgtagcatttgaaatgttcccatgtccatcaaacgatatgctcatacgaacgagcttggtcctggtttggttttacagatcattgtcactcaagagacgacaatctagacgtcgcaaatttacaattcaatgaatataaagaaatcgcattcggagacaagttaggaaaaagaacaagatggagttgcattttgaaacacggcttatacatgcgatattattcagaatttatagcatacatgatggccaacgttcgtcgatgtggtgctatccgtaattggattgctagaaaagatggaatttaccttataagaaatgtaaatccgccagcagtgttccgttatacatggaataaaactaagtaa

SEQ ID NO: 164747 - DNA, 2916 bp, Arabidopsis thaliana landsberg
  unsure (1)..(2916): unsure at all n locations
tctcagactgtaaagaaccaatttctctctgaggctacttgtgcattcactgtcattgcccatttcaaaatctatccataatattattgcatactcctttactgtcttctcacttttccgtttctaggatcatccttgcaaaatggaacagtttcagctaataaaagcaagttcgacaataagatagaggcgtcatcggcaaaaatgtattttcattattatggacaacttctacatcagcaaaatatgctacaagattatgtgcggacaggtaaaatatctggcctcaatgtgttgtttgtttcaaaactgttccagttttcttgattttaaacgattcaaacccatcatacgaatatcttctgttttcttctcaccgctgtttgtcttggaataactatttatgaacctcattcatgtcttcaggtacgtactatgccgcagtcatggagaatcattcagattttgctggtcgtgttgtggtcgatgtgggtgctgggagtggcattttgtcaatgtttgcggcccaggtatttaatatttaggctataggttacagaactaagactttgcaatggtcaaacaagaagaggttgatagataggcagagctttatctgtaaagctagactatgaataaagaaagcttgtttattgcgaagtcctcaatatagttttacaaatacatctctgactcgaacctctccttgccttaatccaccgaattggtgatccataaatgcaaaaggtagtaatgccaaagtaaatgtgaactactttctagttatgtctcggtgtgagcggctgacatagctatcagatggttatggtacttatgaatttttgcttcatcttcttcatacttatctttattttctgctatattaggctggtgccaaacatgtgtatgcggttgaagcatcagaaatggctgagtatgctcgtaagctgattgctggaaacccattattcgctgaccgaatcacagtaagacttctaattcaatttggtcagtatatagagttgtgttatatgcatttgtctgatgttgttgaagcttgcacaagtgtaggtcatcaagggtaaagttgaggatatcgagttgcctgagaaagcagatattttgatttctgaaccgatgggtatgtatctcagagacgtacttttttttttgtgcgtctttttcctttgaaaattacaaaacttggaatctttagaccagaaaaaaccttggtcagagaaaaatatgcgtaaaaacatcactagtgattgaaagttccattaatcatttgaatgacaagtctttatgttttaaatcaggcaccttattggtcaacgagagaatgttagaatcgtatgtaattgctagggatcgttttatgactccaaaaggcaaaatgtttcccactgtcggaaggtaaaggcaacctttgagagcctttccttatttaatttcttactatgtcttcactctcatgtagttttatcactgtaggattcacatggcacctttttctgatgaattcgtatttattgagatggcaaataaggtacggaatgcaactggttattctaagaattacttcccagaatgttttccaaaatatgctggtttagttcagtttttctatgaagtcttaagcattcaataatatacattcctcctctatgcaggctatgttttggcaacagcagaactattatggagttgatctgacacctctatatggatcagcgcaccaaggttatttttctcaggtatattcacacacaacataatcgaaatatgtattcacacacaacataatcgaaatatgtatttgcaccaactaacatattggttattctcaacataacgggtattgatgaatcattatctatggattttacagcccgtggttgatgcatttgatccgagattattagtggcttctccgatgttccacatgatagatttcactcaaatgaaggtatacatacactagttaagactgttcctcagcgttccattatgtcaagaaatttgatctttcatggtggggtgaatgacttacaatctcattttacccctgaattcgtttccctaggaagaagatttttacgagattgatatcccgttgaagttcactgcttccatgtgcaccagaatgcatggacttgcctgctggtttgacgttctctttgacgggaggtaactcttgctttttattcttcttcattcaaaacttttcatcttcatgtttctctttgcaattgaagatttatatttcaaactcgtttcactctattttcaacagcacggtccaaagatggctcacaactgctcccggtgcacctacaacgcattggtaccaaatcagatgtgttctctcgcagcctatttacgtaatggcaggtcaagagatcactggtagacttcatttgatagcccacagtgctcagagttacaccatagatctaactttatcaggtgcagtttgcttcttctttttttctgtgttttcgtcatttgaaagcaccatgaaccaactttcaacttcttttcctgatctgataacaaaatgggtttttaacagctaaaatgtgggggcccggtgcaagtcaaggcggaattctccaatcatcgacatgcaaattcgatctgaaagaaccttattatagaatgtctcagccacaagcataccctgttgcacaagaaccacctctacaaccacaaccagagctaagtacacaggtaaaaatgcattcagcaactagaataggtatggttgctttctttntatatgtgtaccaatatatatgcatttactcttagcaggacatacaaacaccaaacgatgaattagaagaagagttactgcaacaattgccacagaacccaagtgcccagctcttaaagctaataagtgaaatgaag

SEQ ID NO: 164748 - DNA, 1868 bp, Arabidopsis thaliana landsberg
atggagttcaagctcaacattccaaatacaatcattaaaactctacagactatagtcttctttctctttgttcttcttgcattccaaatcgcggaagccgagattcaccaccacactttcaaggtattgattgtacaaaattttattttgaagatattaagactggattaaaaaaaaactgactatgccatcgtttttatctatacagataaagtcgaaagcgtacacacgactttgtaataccaacaagatattgacggtgaacggagaatttcccggaccaacgttaaaagcctaccgtggtgataagctcatcgtcaatgtcatcaacaatgcaaactacaacattactctccattggtaactactctcttgtgtttgtgtcacactttgatttcgtgttgactaatgtttatatgatgtagagaaacatgtttatcgttttaggcacggagcaagacaaatcaggaatccatggtcggacggacccgaatatgtgactcaatgtccgatccgaccaggagagagctatgtgtatagaatcgatcttaaggtcgaagagggaacgatttggtggcatgctcatagccaatgggcacgtgccaccgtccatggagctttcattgtctaccccaaacgtggctcatcttatccttttcctaagcctcatcgtgaaatcccgctcattctaggtacactagctagtatgtggatgagattagtacatgattgcgttacatgttgtgatatatagtctaacgttacgttgacaattgataggcgaatggtggaagaaggaaaacataatgcatataccaggaaaagctaataaaaccggaggagaaccggccatctctgactcatataccataaacggacaacccggttatctatacccctgctctaaaccgggtaagtttcaacactacaagctcaaatcttacaatcaaaaattcatatttttctttataattccacaacagaaacattcaaaataacggtggtgcgtggccgtcgataccttctacggattatcaacgccgtgatggacgaagaactcttctttgcaatcgcaaaccacaccttaaccgttgtagccaaagacggtttctacttaaaacatttcaaatctgattatctaatgatcactccgggacaatctatggacgtcctcctccatgcgaaccaacggcctaaccactactttgtggcggccagagcttactcctccgcatttggtgccggttttgacaaaaccaccaccacagccatattacaatacaaaggtgataccttaaaccggattaaaccgattctaccctatctgcctccttacaatcgtaccgaggcatctacccggttcactaaccaattcagaagtcagcgtccggttaacgtcccggttaaaatcaacactcgtcttctctacgcgatctccgtgaacttgatgaattgctccgacgatagaccttgtaccggtccgttcggtaagagattctcttcgagcattaacaacatcagcttcgtgaacccatcggtcgacattctccgagcttattatcgccacatcggaggcgttttccaggaggatttcccgagaaatccgccgacgaaattcaactacaccggtgagaatcttccatttccgactaggttcgggacgaaagttgtggttctcgattataactcgagcgttgagctgattctacaggggacgaacgtgttggcttcagataatcacccgattcatctgcatgggtataacttctacgtcgtgggttcgggttttgggaatttcgatcgtcgtaaagatccggtgaggtataacccaggtggtccccccggaggagacaaccgtcggtgttcct

SEQ ID NO: 164749 - DNA, 1547 bp, Arabidopsis thaliana landsberg
ttcgttttattttaaggttatttcgttaagattcacttttgcagagcgtcgccggcagctcaacgatggtgactcgcttaagactcgtttcgagatcttctcgttacgccaccgtcaagttcactgactctgtctcagcatgctcatgtcgtcgtctcttctctgcctccaccgaccccgaacccgaatctcaacccgaacaagccccgcctacgaatcccgtcaccggagacgaaaagctacggaatctccgagttcttctccagcagaatcgaatcgaaacggcgcgtggcgttctctcttcgctgcttcgatcggattctacgcctttcgcatcgccgaaagagctcttctccgccttctcgttatcatctccgtcgttgaaacacgatttctcctacttgcttctctccgtgctactaaacgaatcgaagatgatttctgaagctgcggatttgtttttcgctttgaggaatgaaggtatttatcccagctcagattcgttaacgcttttgcttgatcatcttgtgaagacgaaacaattcagagtgactataaacgtgtttttgaacattctcgaatctgattttcgtccgagtaagttcatgtatgggaaagcaattcaagctgctgtgaaattgagcgatgtaggtaaaggtttagagctgtttaaccggatgaagcacgatagaatctatcccagtgtgtttatctacaatgtccttattgatggattgtgtaaagggaaaaggatgaatgatgcagaacagttgttcgacgaaatgcttgcaagaagattgttaccttctttgataacgtataacacgttgattgatggatattgcaaagctgggaatccggaaaagagttttaaagtgagagaacgtatgaaagcggatcatatcgaaccgagtcttattacgtttaatactttgcttaaggggctgtttaaagctggaatggtggaagatgcagagaatgttttgaaggaaatgaaggatctggggtttgtaccagatgctttcaccttcagtattctgtttgatggttattcgagtaacgagaaagctgaggctgcgttgggtgtttatgagactgcggttgattctggcgtgaaaatgaatgcttatacttgtagcattttgttgaatgcgttgtgcaaagaaggaaagatcgagaaagcggaagagattttggggagagagatggctaaggggcttgtcccgaacgaggttatttataacactatgattgatggatactgtcgaaaaggtgatctggttggtgctcgtatgaaaattgaagcaatggagaaacaagggatgaagccagatcatttggcgtataattgtttgattaggagattttgtgaattgggggaaatggagaatgctgagaaagaggttaacaaaatgaaactgaagggagtttctcctagcgtggagacatataacatcctgattgggggctatgggagaaactatgcctttgataagtgcttcgacattcttaaagaaaaggaagataacgggacaatgccgaatgta

SEQ ID NO: 164750 - DNA, 1516 bp, Arabidopsis thaliana landsberg
aatgtgctttgatcctatgtttcagccttagttattacgatatctataaagaaatgcttttttgaaatataatttaaactggtgagattggagtgtaagaaatgggagagcgaaggtataaccataaagtcggaagttagaggcggttttagagagggtttcaaagcaggagctctcactgcaggaatgaagcatagttacgtggatgaatacaagtgcgagtttgttgttatatttgatgctgattttcagcctgaacctgattttcttgaacgtactgttcctttccttgtccataaccctgagatagctcttgtacaagccggctggaaatatggttagatcttacttcttcacgtccgagttagctaaagacccggtgtagtcgatttgttaaatcgattatgtttgtgtgtgcgtgacagggaatgctgatgagtgttgtatgacaagaatacaagagatgtctcttaactaccattttgcagtggagcaaaagtctggatcctccatacttggtttctttggattcaatggtgaaacatccataaacatgctctttgtgtgtcttgtattatatgatcttaatttgagttactaaaagaacatcgttgactttaggtactgctggtgtgtggagaattaaagctttgaatgaggctgaaggatggaaagaccgcacgatagtcgaggacatggatttagcggttagagcttatctacgcggctcgaagtttgtgtatgtggacgatgttaaggtttgttatcaactgaatgcaatgactcaacttgtactgaagtgatctgactaaaactttgggagttttatttaaggtgaaaaacgagcttccgagctcatttcaagcataccggtttcagcaacatcgttggtcttgcggtccagcgaaccttttcaagaaaattgcaatggagatcatcaaaaaccaggtagatagattacataaatccccaaatctaattcctttcggaacacaaatatagttcaatgacctttatctttttttgtgtgacatgtttgaaacagaatgtgtctttatggaagaaggtgtatttgatatacaacttcttctttttgaggaagattgttgtacacatcttcacattcgttttctactgcgtgattttgccagctaccgttatattcccggagatcgaagtccctaaatggacaactatctacattccagctaccatcactatcctaaacgctattgcaacacctaaatcattttacctcatactctattggatcttatttgaaaacgtaatggcgatgcataggagtataggaactctcattggattgctagagactagtagagttaaagaatggattgttacacaaaaactaggagagagtaacaatctcaggggaaacctcattcttcctgatcactatagcttccccgagaggtgtgaactttttccccgaatagatttatcgtgcgaaatggctaatcaatcaatgatatgatttcgaatttctgcagacttc

SEQ ID NO: 164751 - DNA, 458 bp, Arabidopsis thaliana landsberg
  unsure (1)..(458): unsure at all n locations
atgagataccccggcggcaagggcggtgccggcgtctaccagacgatcatcaacaacatcccgcctcacgacacgtacatcgaaacgcacttgggcggcggcaacatcctggagcgcaagcggcccgctgcccgcagcgtcggcatcgacgttgatcccgaggtgatcgaggtctggcagcagctcgacgtgcccggcctggagctgcaccacggcgacgccgtggcctggctggagtcccaccagttcaccggctccgagttcgtctacgccgatccgccctacgtgatggacagccggcgcggcggcaagctataccgccacgaatacgacgacaagggtgcggtcannnnnnnnnnnnnnnnnnnagccccgctcgtctatctgacgggtcaaacgttctaacagaaaaagagcgcacccgacacgcaggtcgtcaacgcttccaaggcggacgc

SEQ ID NO: 164752 - DNA, 3110 bp, Arabidopsis thaliana landsberg
atggcagatgggaacacaagattcacggtggatgaagctcttgtggcgatgggatttggcaagttccaaatttacgtccttgcttacgctggaatgggttgggttgcagaggccatggagatgatgcttctctctttcgttggacctgctgttcaatctctctggaatctctctgcacgccaggaaagcttaataactagcgtcgtttttgctggcatgctcattggtgcttactcttggggcattgtttctgataaacatggccgcaggtagcttttatcatacttgttgtctttgatataagtttcttggtacctcaagtagaaaggggacggctgaattgttccgtaaatgttcatattcttatgagctcttgaattgaatgatctctgaccttgtctaatgctgaatttcagactgtttagcttatgaccatcctttgttcatccgatttctgtgtgtcttgtgtcaatggtcatcaatcaatgctaaaatggactttgttttgggtcatattcttctgtttatgatgcattgtggcttcatttgattttgatgtttgtgccttgaattcctcaggaaagggtttatcataactgcggtggtgacttttgtagctggtttcttgagcgcattttcacctaactacatgtggttgatcattcttcgctgtttggttggtcttgggttgggaggaggtcctgttcttgcttcttggtatcttgaattcatacctgcaccaagccgagggacttggatggttgttttctcagctttctggaccgttggaaccatatttgaggcttcccttgcttgggtataactcatgcctttctttgtttattttccagtataatttggacgctagcttttcacatcaccatgcaatgcaatcttttgcagttagtcatgccaagattgggttggaggtggttacttgcattctcttcggtaccttcttcgttacttcttctgttctataggtggacatctgagtctcctcggtacttaattctacaaggccggaaagccgaagctcttgccatattagagaagattgcgaggatgaacaaaacccaactacctccgggtgttctcagttcagagttggagaccgagctggaagagaataaaaacattccaacagaaaatactcatcttctcaaggctggagaaagtggagaagcggttgctgtgtctaagattgtactaaaagctgataaggaaccaggtttctcattactagctcttctatctccaacgctaatgaagcggactttgctactatgggttgtgttctttggaaatgcgtttgcttactatggcgttgtccttctcaccaccgagctgaacaattcccataaccgctgctatccaaccgagaaacagttgcgaaattcaaacgatgttaactacagagacgttttcattgccagtttcgcaggtacatcaatatatttctgttatcacaagaaatccaaagcagttgttacttgttacaaataagaaaaagtctaaatcttattttttgatctgtggcgtcctcagagtttccaggtctactgatatcagcagcaatggtggatagacttggacgaaaagcttcaatggcatcaatgttgttcacatgttgcattttccttctccctctgttatcccatcagtctccattcataaccaccgttcttctcttcggcggccgtatctgcatctcggcagctttcacagtggtttacatatatgctccggagatatatccaacggcagtgagaacaaccggagtaggagtagggagctcggtaggaagaattggaggaatcttatgtccactcgtagccgttggattagttcacggatgccatcagacgatcgctgttcttctgttagaggttgtgattcttgtgtcaggaatttgcgtttgtctcttccctttcaacacaagtggtagtgacctgacagatagtatctatgcgtccaaagacccaccttcagcctctgaatagcaaaattcttctgaccatcgtagttgtttagttgttgaaggaaagaaaagaaagaaaacagagtgattacaaatagagatattcacagattagtgatatgatatgatcctgtgtaagacattatacaagcttgtaattttgtaaaacaaagtctcctatacggtacatttaaatatgataacaattttgttgatcaccataaaattcagtcacattaccgttgacactcttgagaatcaaagaagttgcaagaaacaactaaagtaatgaaaatagacctgattaataatcatcgatttctttcctgaggttggttgatttgcagttgaactaaacttggaacataagaagagcacacaagtctgcctggtttccgctgggaattcggacttactccaatgttgacagatttgaagtatccatcatctccaacgatgtaagccatttggtagcgacaggtcttgatctctttactatcaaaaagcacaacgactttcttctcctcgtcgatgaagaaactcccaaaagttaactgaagctgagggccgacgagttgttttaaactcactgataagaacaccttgctgttccacgacacagcgttgggctcaatcttagacgtcacccagatgtccaactataaataatcccacggctgatataatacaacaagctgctcttctctaacactagatacactcatagtatcttcagaaacagcaaactcaaacggaagaggcaaaggcggcccaaatgtctcgcttgtgaaatcaaaacagagtaagaaaaaatggtctgtgtccattgtttcggtataattctctctagcaaaccagtatgtatttcccttgagagacacgccacgaatataagaatctatcttccagtctggagacacatcaagaaccttccatgaatcagagttgatattgtagattttgaactcagaacaagtgggagaaaaatcaataaatctcaagattttgtagctgcggcttgatttgctgctcttcttgtatccgagagcatacgtatacatgtccaatttgtggaaattatttgtagactcgatccaccgtgtttgcccccaatacgggttccaaagaa

SEQ ID NO: 164753 - DNA, 2131 bp, Arabidopsis thaliana landsberg
agaatggattctaagtctccttcgaccccgagcgcttctctctctaactctagtgatttacaccatccggacgatcttcctcctatcttcaaacggaagatggtctggacgtcttcggatgataatgtcgtgtcgtcttcgaacgcctccgagcagacgacacctttcacggctcggaaagacaccactgctgacattgctcgggaattggacttgccagatgatcccgagccgcctcttgtccgaagaacccttgctccgggggctgacaaacctaggacgtctaactggctgggcgcatccgagccgttgatgccgtagataaagattgaggattttctttacttcggcgagaatgtgacggagaacatcatgcgaattaccgagcagagggcttttgagaaagccgagaagaaaaagaagaagcaaggcaagagggcgataatgccggatcctcctggctcaactctgggtaccgagtagtcgctttcggatctaagagcccggtttaatcttggcgaggtcactctgcgcgtaccgaggtccgatgagcgtgctgataatccccccgagggcttctacactctgtatgaggtatttttctacggttgtttcttgtggcttccgatcccgaggctggttttggagtacgtgacgtcgtaccagttcgccctctcccagatcacgatgcggtccttgagacatctgctcgggatttttattcggagttatgaatctgagactgacattccgctcgctcatctgaaaaatcttcttgagatccggcgggttcccaaatccgaagtggattggtattacatctctcctgtaggaaggttattgatgggttcccgagcaaggtcgagccgtataccgatcacttcttctttgtggtcctcgaagatgttgttcatgacgacctcctcgggacggttctgacgagatggggaactttgggtagttgtagctaacaatttatttgtgcccgacgcggttttatagtttctttttccaactgtagttttccacacgatttccttttgacttttcacgcgttatccgctcggaattacgattggttgaagcatttctctcgggattgagtcgaacgagcgctccgtcttcttcacggcgtttcttgtccttctagtttggaatctttggaacatcgtacccagttcttcgttgatatgcagtcaaccaagcttactctgacggaggtgtatgcgaagaagaaagaagataaagagagacgcttggaagaggagaaacgccttgtagaggcagggctgatttcaatgcgggcggcctctcccgatgcgactcaagaccgggaaattgttcccaatgttacggccccggttgatccgacgcctgccgaggctcaagaggtcgacccgactgctgctacccctttgctcggggcagttgtcgcattgccggcgagcgacaaggcggtgggtaagcgcactcggacggacgattctgcgtccaagaagaagaataagaagaagaaggcctcgggtgctgaggcggaaaaagagctccttgggggatgcgccggtcctttgtttcctcctacggatactcttctagagtcgcggaagtacgctgaaacggcatctcatttcctgcgggtaggcgcatatataactttttcatttttcgtccttatgtctggagttccgatcctgtaactttctttaaatttgttctccaggctgtcgccttgatgaaccggatggtgcattcgtacaattcggccatgaggactaacatggaggcattcaataggttggccgaagaagatgctcgagttcaagctgtcgagcgggaaagagatgaggcgctctcccaagccgccgcagcgaagatggcgaaggaggagggcgagagggaggccttcgtgaaccaggcgaatgccatcaaaatggccgagctcaatctgagggcgcactccgaggttgttcatctcaaacacatgttggccgaggcgaggggactccgtgatagcgaggtggctcaggtttctcaaacggctaggcacaaaacttcagaggtttttatcgccaaactcaaagccgccgagcagaaggtgtcgctccttcacgggatcaacaaccagttgatg

SEQ ID NO: 164754 - DNA, 3733 bp, Arabidopsis thaliana landsberg
  unsure (1)..(3733): unsure at all n locations
gaatttcaccggaattgcttagatctagaaacgattatggtttgaacgggtgatttctcggttggaaatccttatcgttttcgtagattttcagctgccgatttgaggaattcgccgtttcaccgctgctcttttccttctccaccgatggattcaccgtcaaccactaaattcgttgtcggaaacaaccgcaggttcccagatctccgacgaaaagcgcctccgtgttctttaggtgttcgagacagttcttcatcgagctcttgagtcttcgaggaacagttgcctctagatctttctttttccaataagactaagtctgggtgtttatcatgccgacgaagagaatcctttgctttggtttactcaatagatggtcagttcgggacgtatacctcgtctcaatcaacctcgaggagactcaccttactaaaaggagctcacgggattccaggtcggataaacctgatttcccccgaggcgactgactcgccagagactcccccgcctggtcatgcttgtgctttcgagatcttcttctcggagtgcgggctatacttcccgctccctgacattttgatagatttcatgcatgagttcgggatcgcactaccgcagctctgcccgaacgtaatccgcaccatcctaagtcttcttacactagccgaagaagacaacttccttttctctctgcccgaccttctacagctttacgcaattaagaaaggtcgaacacagggtaccttcttcttatcacctcgcaaaggattcagagtttttgaagattttcccgaaaaggatgagcaatggaggaaatcattcttcttcttccccgttaacgagctcacattcggcgagaaaacgggcctctttgtttcggaatggtctgcccgagctggtagatagtaacttaggaagacatgccatatctgtcatgcttttgttttgtcttttctgatgcgcacgaaattaccaactttgtttttgtttgcagcttcggtggacctacttcctatctccaagacattcgcttcgcacttctccagcttcgttcgtcaagacttgggttgggaatctttatcgagcgaccggatccgagcatcaggaaaaagacttcgctctcggaccgaccttgctatttcctctcctcctttcgaacccagaatcttctccgaagaagaaatgtcagccccctcatatcgtgccaagaaaaagatggaaagggagagggcaaaacaggagaaagaccgcctcaagtccgacaaggtcgtcatgacgggaacccttgaagacagcaaacttcaagctgccaacaaggccaagcagccccgagctgaagaagatggcggcanngacagaagccttccactttggcaagcaaaaacgatgcgcctgccccggattcgagactcattccaaggccacctccagcagagacccctcgaagcgatatgggataagaagaggaagcaatccgataaggatgctcgatctccagcccgctctgtccgggctcgaactgaagagagggatgtggcccgagccagcaaaaagagaaaggcaaaaaggggactctcaagatctcgtggtgctgtcatcccgagaatctgaagctcgcagctcgcagcctcatggaacaccgcctttgccaggttagaaatctattcctctaaatgccttctttctccgagatactgacaacttactcagttatggccatgtttcagctcctccactgccttttgccgacctgatcaggtcgttcacccatgcgggcgcatctatccctccattgaaggagctgaagccgaccaaccaggagaactacctccgtttcgtggagaaactgggcgaggtaaacattcttctgaagaataaaatttaagacttagtttaaattttaacccttctattgtttctttatcagaccgtgttgaagttcaactacgccttcatgagtaatgaacaccagctctcggacaaagacagggagattgagagcttcaagcagatcgagtaggagaactcccgcatggttgatcgggctaacagtgttcttagccggatgagagaagctgaagctcgcgttttagccctcgacatcgccaatactgacttcgctgccaagctggaatcgggcaagaatgcttacttggcggctattgacaacgagaatcgagcccgagctgagctccttgccttcgaggagaaactgaggaagctggaagaaggtcaagctgcgctgcttgcagatgcgaggagggaagagcggagaaaggttcgggctcagtttaaggacttcacgtctaagtatcagagcttctacgcgaaatcagaggaagttgaggcgttgaaaatccgagctgctgaaatgaaggcgaaccgggaactccttgaggagattgagaagggggagatcacaaacacggcgttatgatagttttgcattcgaactaacgcttggttgcgtcgttcgtcgataatatcaatcatatcaaccatcattttgttgttcgcagcctcgttctggggattttgtactcttctcgaactcgggactttgatctcggctgggataactgcttccattccatgaaagagagcgaagggggtctcaccggtagctctcctaggagttgtacggattgcccataacacgttttgtaactctccgaaccaagctcccttatactcatttagtttttttttgaggttcgagatgatcgttttattcatcgcctcggcctgaccattcccttgcgggttgcaaggtgttgaccgactgaggcagatttgccaccctgcacaaaaaacttcgtactgttcggagattaactgaggcccattgtcggttactatttcatacggcatgccgtgcctacaaatgatttccttccagatgaactggcggacttgaacttgagttatattggagtaggcggcagcttcaacccacttcgaaaagtaatcagttagaacgagtaggaacctcactcctcgagttcaaacgtggagtggtccaacgatatccatagaccatttcatgaacggataaggcgcgaacaccgaggtgagaagttctgcgggctgcaggatgtatggtgcatgcttctaacactgctcgtatcgacgtgcatacgcttcgcaatccgctacaattagggccagaaataaccgtactttttgactttaaaagccaaagaacgacctcctgaatgattcccacaagttctatcgtggattccttttataactgtccgggtctgttttctcaaagatacaaatagcatccggagccgaaagaactcttctgtacagaatgccatccgctacgcagaaacgcgcacaagtggccttcaactttcgagcctcccatttatcggcgggaagtactccgttgaggatatagttccgaattggttctctccagtctgcccctaagtcgtgaggtatctgattgtcaggaacctcgggattgttgagaccagctaaatcttcgtcagccgcaggcggggcagcttctggaattttttcctcgtcgtcgagttgctgcagctcgagattgtttgcttgcgcctcgagttgcttacgcattgcccgagtagtaacaaagtttatttcctcaagtcgaaaattgggctgagctatcgtttcaacagggattatccttgtgacagttacttcggatgtagaagccaaagcagctaaggcatcagcaactgaaatttctgca

SEQ ID NO: 164755 - DNA, 1885 bp, Arabidopsis thaliana landsberg
  unsure (1)..(1885): unsure at all n locations
ttgattcaatggatggttgttggttctatgtgcagcttgagcataaactgaaagaagtggaggagttttactcgagcattggtgtctcaaactctggctctattggtaaagatacagaaaaagggagacatgttgtggggattaggaagattcaacaagaggctgcgcgtagagaagctgttgctgctaaaagaatgcaggaccttatgcgtcaatttggaacaatctttcgtcaggtagaagaatcatctcttcacctgaattgttgtctccagggagaacttggatcattaattttgtttgtattgattttctcagataactcagcataagtgcgcttggccgtttatgcatcctgtcaatgttgaaggtcttggtttgcatgactactttgaggtaacgtttttcatctcagctttcaactttccttgttgatatcttcttttggtaaaacatagaaatatcagctgagtaaatgccttttgcttattagagccttagagctaccaatttcctttttgattcttactttggtagaacatttaatcgaactttaaagttgatttaacttcatttgcctattacagctaccagaatttcacctttctttactggtatattctttgagtatgatcatctgaccaaatagcttttgcctattagaagcatcagatttttgtgggggaagtcttaaaagtacactactatgttttgctatgtgactacgtttaagattttttgtgtgtgttttcctcggtttccattcaatgttatgaaattgtctntgttctgtaagcgggtctctttataacatgtttgatctgattgtaggttattgacaagcctatggacttcagcacgataaaaaatcaaatggaggctaaggatggtaccgggtacaaacatgtcatgcaaatttatgctgatatgcggctagtgtttgagaacgcaatgaattataatgaagaaacaagtgatgtttactctatggcgaaaaagttactggaaaagtttgaggagaagtgggcacactttcttccaaaggttcaagaagaggtaacaaaaatgttataatctttcacactattctcttgatggagcttagtagcaccaaagttaacaaaagtgattacaggagaaaatacgagaggaagaggagaagcaagcagcaaaggaggcgctgctagcaaaagaagcatctcatatcaaaacaactagagaattggggaatgaggttattttttttttccatatcagtgatccttttgtattattaaccttttgactaacaaactgatatattgctgtccagatttgccatgctaatgacgagctggagaagctaatgcgtaaagttgtggaaagatgcaggttggcctaatcactcttaaatttgagcgttctctggtcaatgtatcatttgcttacagttgtggtgaacgattgtatcaggaaaatcacaattgaggagaagcgtaatattggattggcattgttaaaactgtcaccggatgatctacagaaagtgttgggtatagttgctcaggctaacccgagctttcaacctagagcagaggaagttagtattgagatggacatactggtaaatctcttacttactatacgccaccttcattgatggctttctggtccaaagacatgtcttttcttcttcttagctagttttgcttgtatgcaggacgaaccaacactatggaggctaaagttctttgtgaaggatgcgttggataatgcaatgaagaagaagaaagaagaggagacaaagactagagaattgagtggagcacaaaagaaagaggtttcgaagaaacgaaatgcgactacaaagttagctgagaggaaaacgaagcggtcacgcatatga

SEQ ID NO: 164756 - DNA, 592 bp, Arabidopsis thaliana landsberg
agtgtgaagatgtcggcagctgacaaaaaaccgttgattccgccgtcacatatcaccatcaaaatcaaaagtcaggtacttgtaataatctcaatgttattagcagttaaattttcttctaaaaagacctctttcttgttatgctattgtgaaagcgataaattttccatacacaagtatttgtatattatgcaaaacagcaaagaattcattgattctaagtgctaggtttctaggtttttttctgttggttaaatcgttgacagaataatacatattttctataagtgaatactttcgacaacctcaaagatgataatatttttaattttaaccaatctaaaattaagctgagttaacatgcgtatagattaacatgttaaatttttgtaaatataataaaataggatgacatatgtgtgtacttccggattaagagggacgttgagctccgtacgatgatgcaagcatattccgacaaagttggacaacaaatgtcagcttttaggtctctctgcgatgaaattaggatcaaacccaatcaaactcccgatgaggtatttatccatttctgtcatagcaatgttacata

SEQ ID NO: 164757 - DNA, 220 bp, Arabidopsis thaliana landsberg
atgaaaccgggaattcaccccgacaatcaccgggtcgtcttcaaggactccagcaccggacaccgcttcctcacccgttccaccgctaccggtaaccgcatggtaacctggaccgatggtcaagagaacccactgctcgtggtcaatgtcacctccgacaagcacccgttctggactggatcacggcgaatgctcaacaacgagggtcgggtagataggt

SEQ ID NO: 164758 - DNA, 1366 bp, Arabidopsis thaliana landsberg
cttataatgaccattattcctcacaaccattgctcccttttagccattcttcttccataacagacatcttaattcactccacctctaacacatcaaacaatcatctcgaccatcatcatcaattccaacaaccttttcctttttctcacttgaaatttgccccggacacagccctcctcacctctttccacccagaaatcaatggccatgatgataaccaaaccatcccaaacgacaatcatcatccatcacttcactttcccttgaacaacaccattgtagaacaacccactgagccctcggaaactataaaccttatagaagattcccagagaatctcaacttctcaagacccaaaaatgaaaaaagccaagaaaccaagcagaacggacaggcacagcaagatcaaaacggccaaagggacacgagatcgtaggatgagactctcgctagatgtcgccaaagagttgtttggcttacaagacatgcttggatttgacaaagccagcaaaaccgttgaatggttgcttacacaagcaaaacctgagatcataaagatcgcgacaaccctttctcaccacggctgcttcagcacggcgatgagtctcatatccgtaagtatccattcttttctagttttaagtctattcaagttttcaacttctatgaattttttttttgtcttaatctgaaaattgtaaatttcgtaattaatgaaggaccggtgttaggatccatggacacatcttctgatctatgtgaacttgcatccatgtggacggtcgacgatagaggcagcaatactaacacgaccggtacgaccttaaccgttgcctttctgatttacaattatatatagagtactttaatttctatcaaaatgttacaaaagataaattatcttatacattagaaacaagaggaaacaaggtcgatgggagatcgatgagagggaagagaaagaggccagaaccgcgaacgcccattttaaagaagttgtccaaggaggagagagcgaaagctagagaaagagcaaagggtagaacaatggagaaaatgatgatgaagatgaaaggaagatcacaattagtgaaagttgtggaagaagacgctcatgatcatggtgagataataaagaataataatagaagccaagtgaatcggagttcttttgagatgacacactgcgaagacaagatagaagaactttgcaagaacgatcgttttgcagtttgcaacgaacttatcatgaataagaaagatcacatatccaccgccctcttatgacttagtcaactacaaacaaaacaaatcatttccagtgattaaccaccatcgcagccaaggagcagctgattccgttagg

SEQ ID NO: 164759 - DNA, 1432 bp, Arabidopsis thaliana landsberg
atgaatgcgatattctctggacttcaacggctcgtgcaaaaaagatctgtgagaccgtcgtcggacctttcagaaatagcctctgaggaggatccatcacagtctctgaaagctgaagaggaagaaaatctaaacaaagctatggtgttgtatgctgagcccgaactgacacctctcagatctgaccttccacacaaggagaaccaagatgaacaggcagcccaccggtgattgtggaactgcctgacgtgtgtgaatcttctgttggtcatgtgcatagatctgagacacccattcaagctgagaccataaacaagacttgtgatcaagttccataactcaacaacaagaatcctcaagtagtgcagatctctgatgcatctgaatcagcacaagctgttgactcaacagatctgtctgtgtcctcgcgtctgctgaaaagaaaacagtctggtgctgtggagaggataaaaagacagaagactaaaaaagggaacgaagctgctggttcaagtgttgctgatgaagttggctttcaccgcttgcgacttatcactcatgatgctaacaagaggtcgaagacgattctgtcaaggtatgtgtgcgaggcatggagtacgaattctctcctgccaagatcaaagttttgtttggtctacaatcagttgatgccagagcttaacagttgcaaattattggtctgattgatgatgaggtcaccaactatcttactgatggacaagtgaaggttcttcagactcctcccatgagcaccttctcgaaaaactataggaagctgttaaagttttcgtgcagaaattggtctccaacaaccagcgagggatatgcaagtatagacacggctttgcttgtgtatcagattgcacaaaagttggcttttgactttagcaaatggtgtataagcatattctgcagcttgctttgaaacctgaggcaaagttctacattcggtttccgagtcatgtgtatcaactttcagatgcagcatcctgtgaagtttgatgttgagaagcatgtgccattgaacttggccattgaagttctgcatgtgagtttcagttcaattcctctaaaacacaaacatgtcgatgcagttatagagggtgtcaatccagtccactatattgctagcaatcaagatgtgtacaaaaacaactaagtcaagccagattataaagatggtgggtttctagtaacaatcgtaggtcaagattcaaacaagtaaaaatgagaacttaacagccctactcgatcattgggtcgagtagaaccaacaggtgacaaaattaagaactaaaatgcaataaacagaggatccaaataacaggtaaataaaagtgcaatcaacaaggagatacaaatcaatctaatagaagttctaaggatgaattcattgataagggggactcta

SEQ ID NO: 164760 - DNA, 1096 bp, Arabidopsis thaliana landsberg
  unsure (1)..(1096): unsure at all n locations
atgaatccaagtacaataacgaatgatctcaccgtggagatattgtcgagattgcctgcaaagtcagtcgcgaggtttcattgcgtgtcgaagcaatggggatcaatttttggtagtccatatttcaaggagttgttcctgaccaggtcctccactaagccgcgcctcttattcgccatcgcagagaaagtcaacgaagaggaaaactgtgtgtggaggttcttcacgtcgccacagcttgagaatccatatgagaaatcctcatcgactcttgtagcagccgctgaatttcatgtaaagttctctccagacgatctacatgtctgtcattgttatgacctaaaatatttttcaatgtgtacgcctcgggtttgatctatttatatggtgatcgaggcgaggctagacctctaatatgtaaccccatcacaggacggtatgccatcttaccttatctgtatacttacagaaaggcgtatagttttttcgggtttgacccgattgacaagcaatacaaggccttgtcccttccttatgtagatggtcctggtcgtagtaaagttctnnnnnnnnnnnnnnnnnnnntgacatggagaaatattaaatgtacattatgggatatgcatcaatggtgttttgtatttcttagctcacactgaagacatatcttacagatattatgagtatgtgatagtttgctttgatgtgacgtctgagaaattcacctttgttggcgtacaaaagttttgtctattgatcaactacaagggcaagttagatgtgatctattgggaggatgatgtcgacattcatgagatttgttactttgcgaaggatctcgatgagtatttggacgaaaatcttgacgctgatgccactaacgagttgcatgtgtgggttctagaagatgttgagaaacaggaatggtctaaatatgcctacacttggaccgatgatacattcttccatcgtcacctttccattgctggagccactgcttcgggtgaaatagtgttttcgatgcgcaagtacacatctaaacaaccattttatgttttctacttcaatcccgaaaggaaaactctccactgagatg

SEQ ID NO: 164761 - DNA, 1918 bp, Arabidopsis thaliana landsberg
gaatttcttagctcgtatgcatatgaagtctgttctaatcgcttccgcagatacggtactctttctttctctcttaccctagaaaccaaaccctaattctcttctggctgattttgggaattttacgattttttaggtcttagatacgacgatctttatgatcctttgtatgatttggatattaaagaagctcttaatcgtttaccgagagagattgttgatgctcggaaccagcgtcttatgcgtgcaatggatctttctatgaaacatgaatacctcccagataatcttcaggtatgttttagtctctaagtaagtgacaacagagctaaaacggtatatagctatggagtttgtagatagagcttgcaagatttgacttaagacttgtattaggatcaagaacactctgttttcagaaacctgttttggttctgtaatataattgtaacttgataagctttgtaagatcttgtctatgaaagaagttttttttgagatagtgcttgttagttgtgagataggaagcttatgtaaatctttttttcttttccttgtctctgtaattccacaggcagtgcagactccattcaggagctacctccaagacatgttggctcttgtaagaacaaaaacagttttatctatcttgtagtgatagaagaatcatatagcaaagttctaacacacgacacttcatgtgcaggtgaagcgggagagagctgagagagaggctttgggagctttacctctctaccaaagaaccattccttaagcatgttagtctcttgtactatataactaaagcccactaaaccaaacattccgtatggctctttaggctccaatctaccacacaattttaccttttatggttatgtacggttcacttaaacactgaacttatacataagattgatgtgtaatgtaaacttgatcattaagttagatgttaatgtttacacaattcctcaaagatgccacttttaaacattttttacatgaatcatatatatacaacgatgctttgcacggtctagtgaataagtgtcgaggtagataagaatgagataaggtatttaaagtatttaatagagtggtgtcagtagagagaacgatatggatttgtatttgaagacatttccatgtgagtcacattagcacaggagggtcctttgcctaaattcattaatgaattacttaacaaaaataaaatgacaatgttcaattaaatgtgagtagacttactcctattcttttctctcacttgccaaatgccaaattgccaataattatttattactgatgattattaaaaaaaatatttttctttttgcggagatttattaaatattgcatgattttaaaaaatagttatagcctagcttccaaaaagccaaatttatgtagctaaatgttaaaacaatagtatatggccacacttccaccaatcagtcttactatcatttgtctcttatgcggttttgaaaggattttggtgcttctaatttcgaatttagagggacaaactaaaattacgcaatatttgaaaagtaagaattattgctattaaaaaatcttgatacgattcaaaaaaaattatataaaaaatacggtttttaattatttaaattttcagcatctttacacaaaaaagaaaagaattcattctcatgttcaaaactatctattttgttaactttgtttttgaattatgcaattttaaatatatttcctaataatactagggatgtttgatcttaaaataaaaacaatttggtcttagtcatcaaattttaattttttttgggtttttttttgccgtctatatttattatttattgcaaattatgagaactgtttcatatacaattctacccaggacaatttcttccgacccttattagatccacgatag

SEQ ID NO: 164762 - DNA, 12075 bp, Arabidopsis thaliana landsberg
atggttggggaacggaccaaaatactaagtaggaagaacgagaaagttcaagctaaacaagctaggtgagctggacaagctggatgaactagctagctaagctatgtgagctaaaccagctggaagactagctaactcaactaggtgagctgaccgacagctcgactaagctcggtgagctgatcgagtactgacccagttggatggtccggtcagctgacactcgagctggtaaactgtggtagctcacgggtgaagaggtgtctcggccaaaagcgtaaggtcgaacgggtaccaacgaacggttgcatcgcccataagatgcaaggaacggatgtgacctttcggaaaggtgcaatgaacggatgtgattcttcgggaagcatccattcaccccctatataagggaggtcgcccaaggcctttagggcttctcatacaacatccagacaccacaaaacattctcaaaacagtcccaacacatcctaaagttgttggtcggaaaaggggtgcggcttggcgagtataactcgagcgaactgatgcgcatgctacctcccagtccaacggttcgatggagtgtagaggatggagacggtagaccgttcgtcttagagatgaatcggatctggtagaccgatcgtcggatcggatcggccagaccgatcatcggacggaacggatcagccacacggattggatcggacagaccgatcgtcggacgggtcggatgggacaggcagatcgtcggacggaacggatcggacagaccgatcgtcggatgggatggatcgagaaaagtgttcgaggaagcacaaggataagtgcatccgaacacacccaagggtcgcccatggatgcaatcttaccggtaaagggaaaaagcaccaagaatgggtaaggaacgtgattcaccatataggatctatatcgcggcttccttcgtgtatctatctcctcagccatggtgaaaccaatcggagattggtaagaccaaagggtgactcgacggataaccaacggaaaagtccacggtgggaaccgatggacaaaacggatgttggacccgtgagcaaacctaggccgcggaagaaggattttatgggctagcctacgatgatccggtggatgaatccacggacccttgggtgtgataaaggatatcgttcggaccgcatggatggatcattaagccgaaagctttcccgaccaccatggatcggacaggtaaacggttagtaacccaagggcggtcgtagtgttaaacgaccggatcggaaacatggatggttcgataagccgagggctcaatcgtccaccatgtagccggaggggagtacgtttggagaacggatggaccaataagccaagagcttgattcggccatcgtgaaccaagggaatcgtacgatccccaatctctatcgttgtacttagaccagtggggttggttggttgtatggctaagtaacgatagggattggttcatcaatgcaagatcgaatacgaatcgttgaacgaatagaataaggctacaaacgggctaaggaatcaaatctgcatattggccaaggtatgtaacaatctagcttactagttaggatagacgtttgggaattgaccgtgaaaatgggataaaggaatatgcgattgttaggcctagaatggttagcgaacaatatgcatgtcttgaccgagtaaaggatcgatctaagtctaagggacaaagatgatgaaaccggtacaagagttggttagaattaaaccaaggttagaagacttccgctgtgtagtaagaaagtgattattgaatttagcctcgtaaaggcaattctatgttgaatcgcgaaaaattaagaggtttggccaggaagaggcgcgaacgtgagtccaaggttgccggacgccgagacgtccagggtcgggtctcacacttctactcagattgaaatttctgttgttggactctaccatttagctggatcccgttttcaaactcagtccaacctagacgagaaagcagccatcattgagaggatggtaaaacgattcaagccagcaccattaccttcacgtgctcttccatggaaattcaggaaagcatggatagaaagatacaattctcatgcagaaaagcagcttgatgaaatggaagcggtgatgcctctaatagaagttctcaacgtgatcctggatcctcacaaagatgtgagaaattcaattctggaaaggataagatgtatcaagattcagaagacgactgtgatgttaatccgtctagagccactattaagaggagtgttcaagaaaaactggaagatccttgaactttcactctaccatgttccattgagcaattgatttttagcaattgtctatgtgatttgggagcttcagtaagcttaatgccactctccgtggcaaggaagctggaattcactcagtataggccttgcgacctgaccttgatccttgctgataggtcttcaaggaaaccctttggcctgctacaagatctgcagtaatgattaatggagtggaagtacctacagatttcgttgtgcttgagatggaagcagaacctaaggatcctttaatcctaggaagaccttttttagcctacgtgggagcgatgatagatgtcaaagacgggagaataagtctcaaccttgggaagcacatcaagctgcagtttgacatcaacgaaacttcgcaaaggacggttgtagaagaaaagatcagggctcaacctcaaccttcggattcaatcaccaggccaagcacaacctctacacctgacttgcgagatctcaaaaagaaatctgatgagcaagaagaaaccatagagaagctagcttagacagttgaggaacttaagagtaaactggatcagatgcaagagaaagctcaatcaaaatgcgggattgattctatcccgaggaaaaagtttacttcaagatggtctgaggagatagattatccaccagaagagaaagaggcctatttcgaggagagaagaattgagtattctgctactcatctctcaagagaggatgttgaatatgatgatgagatcagagagggctatgcagatcctctctatcacccattttcttcttaatgagtgtgaggagtcaagctagagactttaaaacaagctcacttgggaggaagtctcaagcctatctttgtacatatctttaattttccttattgtttttgatgcatcttgttagtgttttcaggagataagtatgaagagctgagggaaaaagattctggctttgaaggagcaacaatatactcgaccacagagcaatcaaaatcgacattgttctggctttcaccctaggaaatcactcgaccacaccctacagggaccgaatgacgatgtggtcgagtatagcaaatgatgcagtcacaacttctccatgtcagtaattcactcgaccgcggtgctggccgcagcagaagaagagaggtcgagtatcatcagagcggtgctggccgcgacgaaggagcagaggtcgagtacccccaaggggaagctgagacacaacagggagattcttcgatggcctgggagcaatcacaggcagctattgacgaccaactccgctccttcttccattaaggtatgcacctcactccaccattgtaatataccatctcttgtttttattttgtttctgtgatgtgttttgtcctgagtactctcttccaaatttggtcacacagtttggaggaaggctcaggaagtgtgtgttgcattgtatataatcttgagtctgcattcatctaaggcatagaaaaaaccaaaaaaattgaaaaatttcagagaatgatttcacaaaaatagagtgttcatgtagttgcatatgcataggggataatgatgagatagccttgtaagcattttcgttcacctgataagctcagtgccctcgttgttagttgtctgatgcgtagtcattgaaattgaagtaaaactgcaccatgcctagattgctctactcgaccacattgttaggatctgataccattccctatcaatttgaacttgaatctgatttagaattatcatgtcttggcatcgaatttgaactcatggataccctaaaatacttggattttcttactcattttgaccactcttgttaatccaagtagctgactctccttattagagcagttaacctgaacccaaacctagactttctttcaagccctatatcacttgtgagtgtttgagaggtcttattccgattaacttggtagaaagtgttaggttcgtaacgacatagatagtgtctcatgtagttctagttcgcatttttcggactagataggactaggtgggcgcttatactttgggttgggatgtgtttaaaaaaaaaaaaaaaaaagggcttgattcattgacaagaaaaggtaaaagactctaggtgaagtaggctaaataagcagaaaaagtctagtaaaggttttgggatttgtaaagaaaagaaagagttcttgttagctattgaagatgggcaaaagcccttggttttaagatgttaaaaacaggaaccttagttgttaaagaaatccaaatccgctagatgtatcaaagtgttgagaaagtttctcctagagttaagagaaaagaaaagaatgattagaaaaagggtttaaaagattcatgaatgcaaagggtagagtttagttcttgtattgggattggagatgggattaccattagagcttcatttgatgtactctgggtagatgggatcttatctttgtatgcatagcttgggacttacctttagcattctactaaagcttaatcattttttgagagatcccctgttactgaagcctattctgtaagggaccatctttgtctcttgaccttttaccttagccaaatgagttctttgatgatgcattgcttgattcacgttccagaactaatgaatgttaaagggattggtagatttgaaaacatgtgtaggtcgagcatatgagtcggattgattgataatgaggcatggctaacgtttttaagtagaattcgatcttgcagcttagaactttcaacttaaacattgatttcatctggttatctggtgctttggctctgagtccccgctttaaaacctcacctccagcttgttcttgattgtttgcttgagggcaagcaaagactaagtttgggggagttgataagtgtgtattttgaatgttttgagcatccatttgtcatcactttagcatcatatcatcactgttttataccatttcacatcatttgtcatcactttgcatgtttaggatagttttgcatgcatgttgcatatttgtgttgttttcaggtgatttggagctgtcgacgagctaactggaagaagcggacctgatcatgacaaaccactcgacctagaggtcgagtaggagcttcaagatctcaagagaccactcgacccccaggtcaagtagaagacaccgccactctaccacaacactcgacccccaggtcgagtgtcttcaactccatctcttgaccaccactcgatcacatcactcgacccccaggtcgagtgacttcatctccatcttctgaccaccactcgatcacgtcactcgacccccaggtcgagtgacttcatcccattgccagacctctactcgacctcatcattccacctggatgtcgagtacctccatcaccaccactcgattgcatactcgatgacaagcttcagagccttcttcattccgcactcaaccagacactcgagcacaaggaagaaaagaagactccagctattcactcgacctctcactcgaccacatgggtcgagtacagttcttaacccgtccaaatacttcgtcgttttgagtattagggtttcgggatatttggctataagtagcatgtacttctcattttcgcagaaaagaagtttttacctagttttatttccgcaaaccttgtgttctagactttttgtaatccagatttctctttatctattcagtatttagctttggttcttgattttcgtttactgttgttcattctgttatcacactactgttacactgttgttatcatgtcttcaacctgttcaacgtttatgctttctgttatgatgtctgagtagtgaataggtttctgaggatgggttagagtagtgtagaatcatacacatcacatcaaatcatattcgactccaaaacactaaccaagcttcttcttgcttctcaaagctttgatggtgtagccgaagtccgtatgagtctttggctttgtatcttctaacaaggatacaatacttaaacttttaaaatcgagttgcggtttaagttgttatactcaatcatacacatgacaacaagtcatattcgactccaaaacactaaccaaccttcttaaagtattatataatatttgctcctaaacactaaacctaaaccctacaccctaaatcccaaacccttgttggggatcggattccacccaggtaaacgggccacaaaacacctcggagatcacatcaagaatccataccgaggcgacatcgagaacgcctcagagcattattgcaaaatggtcccccgacccgacctcgaaacgcctcggacataaacctagcaaatcatcccgaggcgggttccaagacgcctcgggaacgcattttcgaatatcacggtccgagccgcccgagcacgacccaaggtcagctaaattccggctcggaagaacttcggactaggtaagaaaaccttccaaaaaaaagggacttaaccaatataagatcaaacataccatttccgaaaaccgcggaagagatattagagaatcttcaaagatgtcaccgaatatagaagttcccagaatcttcggaagataaggacaatctccttcgccaacttaaagataaagagagatcttccgagaatatcgcgagcgaactgccaaagccctatataaagaacctctaagcacaaacaaaaagaggatacgcactaaaacgctctcaacttgaggctatcaaaaacgctctgattttgaaggcaaaacacttatatttcatatgtctaaacacttgtacaatcaaatcatcattatctcaataatataatcaagaacaccgtgcgcggtaatcaacaattctgttattctttgagaatctcacagagatccgttctttgaaggaatccttaatacaatttctattgtgcgagtttcgactctcacaatttggcgctagaaggaggccgatttgagatttatcttactcctaaaacaaagaaccaaccaaccattccacaatggtcaacaatcagatccctggtaacacaattgacgcagagggaaacctgatccttccaaaccagacagacgctcctgaagccaccgctcccgcggtcctagcagaattaaggagcatgatggctcaactccagaagaaggtaaacgatcaagaacaggtgaataggtctttggcgcaacagcttgaagcaactacctcccaaggatagatcaggactactcgttttgtcgcacaacatcttcaggatcgacgagcagcaccagatctcaacccaacacgactcgtgttccacacgcctggcaacacaacgaggcccatcccccgaaccgcgccgaaattagaagggaccgagcagaaccggcagctttgggaaaccaggacacgatgaaccgagcagaaggaaacggttcgcagctccctctttctcgagcagaagttgccgaggccgatcgaatcgggatctcagacgatgaagactctgaagagaacgttcgatgggctgagaaatatcccagagaacaagaaataagcgttatcaagctttccttagccaaggcagaaactgagatgaagctcgtgagatcccaaatgcataacgcagtctcctcggccccaaacatcaaccgcattctggaggagtcccataacactcctttcactcgtagaatcttcaacgcgataatttcagacccaagaaagctaaggatcgagtacttcaatggatcttccgacccgaaagggcatttgaagtccttcataatttctgtggcccgagataaattcagacccgacgaaagggacgccggtctctgtcacctgttcttcgaacacttgaaaggaccagccctggattggttctcaagactcgagggaatttccgttgacagttttcaggagctatcgacgctcttcctcaagcaatattcggtgctaatcgatccaggaacgtcagacgctgatctttggtcattatcttagcagcctattgagccacttcgagatttcctcgcaaaattccgatctaccctagccaaagtagaaggaatcaacgatgtggcggctctttcggctctgaagaaagcactgtggtacaagtccgaatttcgaaaggaactaaacttgtccaaaccaccgacaatccgagacgccctgcaccgagcctcggattacgtatcccatgaagaagagatggagctactagctagcagacacgaaccaaccaagcaaacgcctcgcagcgataaacctcagaccggcgctccgaaccacaagaaaggcgcccaaggtggtacgttcgttcaccatgaaggacgaaatttctccagagcccataattaccaggtcgatacaccccgaggcaaagccacccgaggccgagggcgaggccgcggacgaggacgcggtcgagaatcctacacatggacaaaggatcaacccgcaggaaaagagcaagaatattgcgagttgcacaagagttacggccatcacacgtccagatgtcgtagcctcggagcgtgattggcagcaaaattcctggccggagaaattggtggaggcttgaccatcgaggacttagaggcagaaaagggtaaaaccgagcaggtcaacgctgtggccaatcccgagcagaccgcccccgcggcgaaccccgaaggacctaaaagaggccggggtaatcgcgaaaaagatgacgatgaaccagaagctgctcggggaaggatcttcacaattttaggggattcagctttctgtcaagatacggcagcatcaatcaaggcatatcaaaggaaagccgacgcgaatcgtaattggacgcggccatttaatggaccaaatgacgaagtaacctttcacgaaagcgataccaacggtttagaccgtccacacaacgatcccttagtcattacattaaccatcggtgatttcaacgtcgaacgagtcctagtcgacacgggaagcacactggacatcattttccttacaactctgcgagaaatgaagatcgatatgacgcaaatcgtgccaactccacgacctgtgctcgggttctcaggtgaaaccactatgactctcggaaccatcaaactaccagtccgagccaaaggagtaacaaaaatcgtcgatttttctattaccgaccaaccaaccgtgtacaacgcgattttcggcaccccatggctaaatcagttccgagctgtcgcctcgacgtatcacctatgcctaaaatttcccacaaacgacggcgtgaaaaccatctggggaaaccagaaaaatgctcgcatctgcttcatggcagcgcacaagcttaggaaccccgtcactgaatcgacggtcgacgcgaatcataagtaggccaaacttggcggagccgaagaaaagtcgatctccgagcagttatagcaattaaagatcaaagaagctcgggaatctaagataccaactcccgatccggtcatctcaatttgccttgacgatgcaaagcccgagcgatgcgtagaaatcggcggagatctaggagaagaactaacagctgaactcaccgctttcctcaaagagaacgtcaatactttcgcgtggtccccagaggatttgcccggagtaagtgttaacatcgtatcacacgagctcaacatcgatccaacttttaaacccatcaagcagaagaggagaaaattgggtcgggaacgagcagaagccgtaaaggccgaggtagaaaaattattgaagatcggatccatcaccgaggcgaagtaccctgactggatcgcaaacccagtcgtggtaaaaaagaaaaacggcaaatggagagtctgcgtagatttcacggacttaaacaaagcttgcccaaaggacagtttcccattaccacacatcgatcgcctcgtagaatcaacctctggaaacaagctactgtcgttcatggatgctttcgcttgttacaaccagatcatgatgaaccccaaagatcaagaaaaaaccgctttttacacagagcaaggaattttttgctatcgagtgatgcccttcggacccaagaacgccggggcgacctatcaacgcttcgttaacaaaattttcgccttacagatcgggaagacgatggaagtctacatcgacgacatgttggtaaaatccatggaagagaaagaccacatagcccacctgcgcgaatgtttcaaacaactaaacttatacaacgtcaaactcaaccccacaaagtgtcgcttcggagtaagatccggcgagttcctcgggtacctggtcacccaccgcggcatcgaggcgaatccaaagcaaatcgaggcattgttgggaatggcatcgcatcaaaacaagcgagaggtgcagcgtttaaccggaagagttgcggccctcaaccgtttcatctcttgatcaacagacaaatgcttagccttttacgatgtgctacggggaaacaaaaagttcgagtggacgatccgatgtgaagaaccttttcaagaactcaagaaatacttagcaacaccacccatcctcgccaactccgtaatcggagagccattatatttgtatattgccgtatcagagactgcagtcagcggagtgctagtccgagaagacaaaggcgaacataagccgattttctacgtctcacagactttcaccggcgcggaatctcgctatccacaaatggagaaacttgctttagcggtcgtaatgtcggctcggaagctacgaccctattttcaatcccattccatcgtagtaatgggatccatgccactccgcgccatcttacacagtccaagccaatcaggacgtctagctaagtgggcaatcgagctcagtgaatacgacatcgaatatcggaacaaaacatgcgcgaaatcgcaagtcctagctgattttatcgtcgaattacccaccaaaggaagctcgggaaaacccactcgacacaacttggctcctacatgtcgacggctcatcctccaaacaaggtttgggtgtggcatccgcctcacttcacccacaagcgaggttctcgaataatctttcaagctaaatttcgaagcaacaaacaatgtagccgagtacgaagcactcgtggtcgggctgaagctagctcaagggttaaaaatcgccaagatcagagctttttgtgattcttcacttgtcgccaatcagttcaacggggagtacacggctcaggacgaaagaatgggggcttatctcactcacagccaagatcaggcgaaacagttcgacgagtctgaactatcaaggattccccgaggcgaaaacaaatcggctgatgccctggctgctctggcctcgacgtctgacccgtacctgaggagagtcatcccagtcaaattcatcgagaaacctagcatcgagcttgaaaaagaagagcacgccttctccgtgcagaataccacagattgcaaggatatttcggatttgaatgataactgatatttaggttgcgactctgagtggataaaacccatcagaagttacatatccgaggggaaagtgccctccgacaaatggaaagctcaggccgtaggcttcattttggtcgaagagaagctattcgaatggcgtctatccggacctttaatgacctgcgtggaaaaggaagcagcctacaaaatcatgaaagtaatccacaaaggctcatgtgggaatcactccggaggaagagccctgccatcaagataaaacgccacggatacttctggccaacgatgatcaaggattgcgaaaa

SEQ ID NO: 164763 - DNA, 375 bp, Arabidopsis thaliana landsberg
atgggaatattttcgaaaacatgcgagtatgctatgcgggcggtgttttacattgcccaaaagtcggaagaaggacaaaaggtcggaatccgggagattgccgtgcatatcaactcacctgaaccattcctggccaaaatcctgcaaaagctcagtaaagacgggcttatcctgtcctccaaaggtcctaacggcggtttttatgtggattcgggaggcttgcaacgtcccctggctgacattgtacgtgcgatcgaaggcgacagcattttcaccggctgcggaatgggcctcagccattgcccggaggccaacccgtgtccgctgcaaaacgtattcaaaaagatcaggagccagatcgtggtcatgctgcag

SEQ ID NO: 164764 - DNA, 588 bp, Arabidopsis thaliana landsberg; identical to SEQ ID NO: 50905

SEQ ID NO: 164765 - DNA, 4697 bp, Arabidopsis thaliana landsberg; identical to SEQ ID NO: 34839

SEQ ID NO: 164766 - DNA, 487 bp, Arabidopsis thaliana landsberg
atgagtcaacacatgaaccttctcctgccttcatttgaaacggacaaagaggaatacgatgaacgcaagacaacagaccacggaggcatcggtggcagcgtctggaggttcaaaggcaacaaagcggccaaggaagcggctagtgtctcaatgaaaggtacacttgctaggttattcgactgctgcagcaaagacgtcaaaaagactattttgcctctgggtcacggcgacccctccgtctacccttgcttccaaacgtccgttgacgctgaggaagcggtggttgaatccttacggtctggagctgcaaactcttacgcccccggggtcggtattttaccggccagaaggtaattaattagtttctaattgtttcactaatatgttttctttgaaagttatccgatactgtatttatatgacaaaagtttaacatagttctttattactatattaggtgaataagttagacgtagcataaaacatt

SEQ ID NO: 164767 - DNA, 1500 bp, Arabidopsis thaliana landsberg
  unsure (1)..(1500): unsure at all n locations
agttttggatttcatatccatccttntgtttctgttctcagactggacatgtgctgcacttagtagcttgaagnacgatcgnnatgagcctctatcatggaaagatagatttttcaactggttacttgaattcagaaagctgcgttggaagatgcaagagtgccacaataaaggtgagcataagtgtacaaaagaaggtgagaaaccgtgcatcaaggaaggtgatgataagtgttcaatggtacacgtgcatcacatgctcacgacgccattcttcttccggaggtggtgtggaagcatcaacgtattcaactttctagcatatgccacaaaaaaaaagacaaaagaggatccacgatgccggagatgagttccgctccttatggatcatcatagctttcccattcaaaataatcaatctcataatccagaaagtttttggatcgattgtcaagttgatcaatgaagtgcacagacagatcagccacgaagtcaatgcgttatcaagaagccatctttgggcccgtcgttatattcaccctatctatttcgagttcatatcccgcatccctcatttcatcaaatctgtgtgggatatcctcagtgagttctttgacatctcggatacgcttgatatggtccacaagacgctgtttgtacacggagagcccatgacaaaagaattgtggaagttcatcttcgaagagctgaaaaacaaatcaaagtatggagacagtcctgaaaatgccaagaggatatctttggctcggggagaatggactttaagagagaacctgccggtggatgcagaacgtgaaaaactggtacgctatgtcacaaaggtcgattatgatcagagtcttttgatgtggcacatcgcaaccgagctctgttaccaacaacatgagaaagagactatcccagagggttatgatgaacaacgcaagcattacagtaaccgagagttcagcaaaatcatctcagactacatgatgtatctcctgatcttgcaacccggtctgatgtccgaggttgctggaattgggaagatcagattcagagacacattagaagaggcaaaggactttttccagaggagacatgtcgacaaatcaagatatgtaaaaaacaacctcatgaaagaagcatgtcgagctattctctctgtcaacacagaaatcgatccaatggctgtgaaaggagacagaagcaaatccgtgttgtttgatgcaagcgtgcttgcaaaagagctaatgaatgaaggtgaaaacatgtgggaagtagtgagcaaagtgtgggttgagttgctttgctatgcatcacttcattgtgactctcaagaacatgcttctcaacttagcaaaggcggtgaacttatcaactttgtttggctattaatggctcattttggactcggagatcaattccaaatcaacagagatgatgcaagagccaaacttatagtcgccaactgatttatcaacacaaacctgcacttat

SEQ ID NO: 164768 - DNA, 431 bp, Arabidopsis thaliana landsberg
atgagcactgttgtccttaaagtaaacggccggatgcatcgcctggatgtagatccggctacgccgctattgtatatacttcgcaatcagctgactttaaacggtcctaaatttggctgcgggatgcagcagtgcggggcctgcatggtgctgatcgatggaaaggcggagtatagctgcacaatgccggtttccctggcccaaaaaaagaccatcactacgctggagggactggtttcggcagagggtatgcttcatcctgtacagcaaagttttcttgatgaacaggcagcgcagtgcgggtattgcttaaatggtatggtgatctcggctgtcggtctgctgaaaacttcagcacccatagatgaggctgccatacgcaaaggacaacagcgggtactttgccgctgcgggtcgcaggccagggtatt

SEQ ID NO: 164769 - DNA, 870 bp, Arabidopsis thaliana landsberg
aactcaatggctctgttgatctttactcatctttcgtgattcatttctgcactccaaatacaaaccatgatcaatgactcaaccgtccatgtctattactctatttttccagtgagctcatctccatcgttagtccgtcataattctatcccattgaagtacacttctccatcagcacatgtggagaacatagactcttcctatgggttttaacaaaatccgctctccattggctcattgggttctggtcactaggtctaactccatctataacactatactgccgagaaagtctaataaacggaccaacactgatatcatcaggatcaatgcgatgtcccctcagagttctccgaatcaagttaccctgagtcattaggcatgttggttggggactccagttgtggctatgaatgccttggagagttgatatatgatgataaagccatgaagggattctactctaagttcatgaatctccataatattattacttcgaatgatgaggagaatgttaataatttgttaataacatttaccaattcgagacgtgcaagcaatgcgaatgagagcgagtttaaaattggatcgactacttcaggtgtaaaacaaaaggcagaaaatgacattaaacctttatgcaagctttataagagtgttttagtggatactactttcattgactggataaagcgctgaaatcttttgggttaagttttttctagcaattttgttgggaaaagaaagtattatactgatcttaagagggttaaatgtaagcaatacatgcctacacttaccaatgtttaattattatacaattatgtaatgtatagttttgcgacatttattcatatggatgctcgttca

SEQ ID NO: 164770 - DNA, 2719 bp, Arabidopsis thaliana landsberg; identical to SEQ ID NO: 5797

SEQ ID NO: 164771 - DNA, 436 bp, Arabidopsis thaliana landsberg
  unsure (1)..(436): unsure at all n locations
tctctctatctaggaacaagagttttttttttgggtgccatttcttgatttttatagatttttaggtatgtcggagacgagcttgaaagaggaagaggtaacgttaggtggtgttaaagagacgagagaagaagaatgttccgacgataaacttgtgttggatatttgtctgaaaaggaagagattagatgaagaagaagaagaagaagaagaagttgtggaggaagagaatgatgggttcaagacaccgactcgtccggagaatagaatccctatagttagagaatgtccaccggcgccgatgaaacgttcgtcggagatgtttagaggtagaacaatgtnnnnnnnnnnnnnnnnnnnnnnnnnnnnnnnnnnnnnnnnnnnnncgtttataacggatttgcagtggaggacgacaacaatgacgatcaagaaa

SEQ ID NO: 164772 - DNA, 4100 bp, Arabidopsis thaliana landsberg
aacctctcctaccgcagcaccaacgttgctaattcataagaccaagtgtatcctccacaacaacaacaaggtcagaacagacctttttttccttacaatcaaggttttgttcccaaacagcaatttcaagggaactactagcaacaaccacctcctggatttgcaccttagcaaaaccaaggtcctgctgctcctgaccctgacatgaaacaaatgctacaagagctgctaaaaaaccaagcctctggctccatggagatggcaaagaagatatctgactgtcataacaaggtgatgtgaggggtcaatgatctcaatgtcaagatggaaacactgaataccaaagtacgatacttagagggacattttgcatcttcttcagctccaaaacagacaagccaactatcaggcaaagcagttcaaggaccctttgattctagggagacctttcttagccactgcaggagctatgattgatgtcaagaaagaaaagattgatctaaaccttggcaaagactttaggatgacctttgatgtcaaagacgcgatgaagaagcctaccgtagaagggcaactcttttggatcgaagaaatggatcagttagccgatgaattactggaagagctggcagaagaagatcatcttaacagtgctttaaccaaaagtggtgaagatggatttctgcatttggaaacattgggataccagaagctgttagactcccataaagcgatggaaggatcagaaccctttgaggaattgaatggaccagcaacggaggtaatggtaatgagcgaagaagggtcaactcgagttcaacatgcactctcgaggacgtactcgaccagccactcgaccttgtctaccaacgaatctggggagccgatcattgcaacttcagatgactggtctgaacttaaggcaccgaaagttgatctcaaaccacttccaaaaggtctaaggtacgcattccttggtccaaactctacttaccctgtgatcattaatgctgagttaaatagtgatgaagtgaacctgctattatcttagcttagaaagtataggagagcgattggttattcattatccgatattaagggaatttcacctagtttatgcaaccatatgatccatcttgaaaacgaatcctattctagcattgaaccacagaggatgttaaatcccaatttgaaagaagtaatgaaaaaagaaattttgaaactgcttgatgctggtgtcatctaccctatctctgatagtacttgggtttctccagtgcattgcatccctaaaaagggtggaatgactgttgtcaaaaatgaaaaagatgaactgatccctactagaagtataactggtcatagaatgtgcatagattataggaagttgaatgctgcctctaggaaagatcattttcctttaccattcattgaccaaatgcttcaacgtttggctaatcatccatattattgctttcttgatggatacagtggtttctttcaaataccaattcaccctaatgatcaagaaaaaaccactttcacgtgtccttatggaacttttgcctataaaagaatgccatttggtttatgcaatgctcctgcaacatttcagaggtgtatgacctctatattttcagacttaatcgaggagatggtggaggttttcatggacgatttttcgatctatggcccctctttctcctcatgtttgttgaatcttggcagggtattgactaggtgcgaagagacgaatcttgttctcaattgggaaaagtgtcatttcatggtaaaggaaggcatagtattgggccacaagatatcagagaagggtatagaggttgacaaaggaaaagttgaagtgatgatgcagctgcagccaccaaaaacggtgaaggacatcagaagcttccttggtcatgctggattctatagaagattcattaaagacttctccaagatagccagaccgttaaccagactattgtgcaaggaaaccaaatttgaattcgatgatgactgcctcaaatcctttcaaactatcaaggacgctttggtatctgctcggttgttcgagcgcctaattgggactatccatttgaaatcatgtgtgatgcatcagattacgcagtaggagctgttttaggccagaaaatagacaagaagcttcatgtcatatattacgccagccgaacgttggatgacgctcagggaagatatgcaacaaatgagaaggagcttctagctgttgtattcgcatttgagaagttcagaagctatttggttggatcaaaggtaactgtctatacagaccatgcagctttgaggcatctgtatgccaagaaggtatagtaaaccaagaactgttaagatggatacttttattgcaagagctttgacatggagatagtagataagaaaggcattgaaaatggtgcagcggaccatctgtcaaggatgagaattgaagaaccccttccgatagacgattcaatgccagaagagcagctcatggttgtagagttcttcggaaagagctagtgggaaagagttccaccaactgaatgctgttgaaggagaatctccatggtatgctgatcacgtcaattacttggcgtgcggagtagagcctcccaacctgacaagttatgaaaggaagaagtttttcagagacatacaccattactactgggatgagccttatctttacactctctgtaaagataagatctacaggagatgtgtctcagaagatgaagcggaaggtatcctgctgcattgccatggctcagcatatggtggtcacttcgcgacgttcaagacagtgtccaagattcttcaagcaggcttttggtggccaacaatgtttaaggatgctcaggagtttgtttcaaagtgtgattcatgccagagaaaaggcaacatcagtagaagaaatgagatgcctcagaatccaatcttggaagttgagatctttgatgtatgggggattgattttatgggttcattcccatcttcatacggtaataaatatatactggtcctcgtagactacgtatcaaagtgggtcgaagctattgctagtcctaccaacgatgcaaaagttgtgctgaagctgttcaagaccataatcttcccgagatttggagttcccagtaatcagtgatggtgggaagtatttcatcaacaaggtttttgagaacctcttgaagaagcatggagtaaagtacaaggtcgccactccctatcatccacagacgagcgggcaggttgagatctccaatagggagataaaagcaattctcgtaaagactgttgggattacaaggaaagactggtctgcaaagctagatgatgcattatgggcttacaggacagccttcaagacccccattggtacaactcctttcaatattctctatggaaaatcatgtcatctacccgttgagctcgagtacaaagcaatgtgggcggtaaaacttctgaactttgacataaaaactgctgaggagaagcgattgatccaactcagtgacctcgatgagatccgtctagaaccttatgagagttctaaaatctacatggagagaaccaagcttttccatgacaagaagatcatcactaaggatttccaggttggtgatcaggtgttgctattcaactctcgcttgaaactctttccaggaaaacttaaatccagatggtctggccccttctgcatcactgaggtccgtccttatggagcagtcactctagctggtaagagtagagacttcacagtaaatggtcaaaggctcaagaaatacttagcagaccaaatccttccagaggtgacatcggttcatctccaggaacttcttaatgattaaaggagtaaaggagtcaagctaatgactttaaataagctcacttgggaggaagtcccatgactatctctgtaaataaatttttattttctcgttatttttgatttatcttggttatgtttgtggttctcaggaacaaaggaacaatgtggagatagagtaaaaattcaaaacttttactctacagaagacctggagatcgagtgtacagcacgttggagtacaaaattttga

SEQ ID NO: 164773 - DNA, 1782 bp, Arabidopsis thaliana landsberg
  unsure (1)..(1782): unsure at all n locations
cttctacaatatcttatttacttgttttattttcggtaaaaacttacaaaccaaactcaacatgaaatttttattataaaaaattggtaacaaaaaaaacaaaaaagtagaaactgctatatatatatatattttgcacaaagaaaaagctaaaataaaactcaactcatacagtaaattgaatcatttactaaaattttgccaaaaataataaatcaagcaactaactgtttaataattaaacaaaattacaagtcacataatataatttccataacccctaaattaatttgatgttcgattttttgatgaatcattcaggagcattcgaaacagcacagagcggagaagattaggttacttctcctgcgccaccggcaacccaatcgacgattgctggcgttgcgaccgcaaatggcagctccgtcgcaaacgtttagccgattgctcaatcggatttggccgcaacgcaatcggaggccgcgacggtcgtttctacgtcgtaaccgaccctggnnnnnnnnnnnnnnnnnatcccataccgggaacactccgtcacgccgtgattcaagacgaaccactctggatcatcttcaaacgcgacatggttataaccttgaagcaagagctgatcatgaacagcttcaaaaccatcgatggtcgtggtgtcaatgttcacatcgctaatggagcttgtctcacgattcaatacgttacgaacattattgtccatgggattcatgtccatgactgtaagcctacgggtaacgctatggttagaagctcagaaacgcattttgggtggaggacaatggcagatggtgacgcgatttcgatctttggatcgagtcatgtatggattgatcatatctcgttgtcccattgcgctgatgggcttgtggacgcagtcatgggctcaaccgcgattaccatctctaacaaccacttaactctccataaccaggttcttttcaagacttgttgtttcattagttaataattgcttcttttctttggctgaattcggtttttgatgatatggtttgatctacttttttacaggttatgttgctaggacatagtgcctcgtacatgagggacaaagctatgcaagtgtccattgcttacaatctttttgaagtcggacttattcaaagaatgccgaggtatatataaaagacataacaaaacagagtgtgctctgcttttgtgttctgtttcttgagtattctccgtttttgtgcttatgacaatgcgattaacttctctttgcaggtgtaggcatggatattttcatgtagttaacaatgactatacacattgggaaatgtatgcgatcggtggcagtgcgagtcctaccattaacagccaaggaaatagatatctcgccccaagaaaccggtttgctaaagaggtactttcaagagttaggtcgactaggtcaaataaagaaccgatctttcttgacttttgacttagtgtcaaactataacccttatacttatagattacagtttcaacaaaattcttacagcaaaaacttatgggatgtttcaggtgacaaagagagactatgcagggcaatggcaatggaggcattggaattggagatcagaaggagatctttttttaaacggagctttcttcacacgttctggatcaggtcttggagctagctacgctagagcttcaagtttagcagccaaatcatcatctcttgttggcgtcattacctacaatgccggtgctcttaattgcagaggtggtcgccggtgttaatag

SEQ ID NO: 164774 - DNA, 4333 bp, Arabidopsis thaliana landsberg
atggtcgatgtcggggacaaagttagacctccgaatgttccgccggacggacaaggctcgtgggtaaacaaggtggtaggaaatttgggcggagggatgatgagaccggagtgtgtgttggatgatgagtttgttacggccaggatcactgtggagttcccggatggcgaggatggtgaaccgttgataacaattggccaagaagtaatggatgctatgaggggtttgtggaaaagatgcatgatcgttaaggttctggggaggaacatctcgattgcggtggtaagtaggaagttgagaaaattgtggaaacctaagggcgcgatgcatgtgatggatcttccacgacatttctttatggtacgttttgaggaggaggatgagtacttgtcagctttgacgggtggaccatggagagtgtttggaagttatttgatggtgcaggcttggaatccggagtttaatccattgagggatgagattacaacaacaccagtctgggtccggttatctaacatcccggtgactctgtatcaccgaccaattctaatgagtattgtgcgggggttgggaaaaccgattaaagttgacttgactaccttaaactatgagagagctaggtttgcaagggtttgtgttgaagtggacctaaggaagccgctcaaggggacaattatgatcaatggagagaggtctggggtgtcatatgaagggttggcgaacatttgttctatgtgtggactgtacggccacttagttcattcatgtccacggagacctagagaggagaagcgtgtggtgccaacaaatcatccagcagaggggtcgcaagttggtcgggaggcgcaggtggatgatggttttacggtggtgagaaatgggaagaacccagcgaaagctggtgcgtcgatgccagggaggagggagacggtgaagggacgtaatcttcgggatatcacaaaaggaaaggatttagagaatattgtgtcttcgaacagttttggtagtttgaaggcagatatgcagattccgtgaatcatgcgagtggagtgattacggaagcaaataaggaaaacgaattcatggggattcaagaacgcgggggaaagtgtggggcgaaagcgaaggcggtggtgtttagtgcagttcgaaatttagagaaaagcccagtgggcgaggcccaaaaggagcagaaaagagttggtcaaaacaagaatgtcaaaaaaattgggcctaaatccagagttgggaaacaagtcaggccgacaagaggaataagttttgggcccacgattgcagaaacaaagatgtctgattctagaaaacgtctgcgagtagaaaaacagagtatggggcgggccagaggagtcttcgtgggcgctgcgagtcatcgggcagttataaattcggcgaaagttgatgccgtgggtgacgaggtcgggggcttgagtctggggggatctcgggtctgaaagatatggtgtctcatggtagtctggatatgcaagaccagattatcacgaacgcatagcaggtgtccccggttcttctgtattgccctttaaaagatatgatgaattgcattttatggaattgccggggggcgaataaacccaactttagacgttctatacgttatattttgaagaagttcaagactgatatcttagccgtctttgagacgcatgcgggaggtgagcgagcaaagcgtatctgccaagggttggggtttgatcagtcgtttcgtgtggatgcagtgggacagagtggtgggctatggttcttatggaagtcggaggtaggggaagttgagattgtggaccacgctgatcaatttattcatgcgaaagtcacaaaagagcaagtcagtttgcatcttattgttgtttacgcagccccgacagtgagtagaaggagcgggctgtggactcagttgagtgaagtgatgggaaggatagtcgggcctctggtggtagggggggatttcaatacaattgttcgtcttgatgagagatcggggggtaacggacaactgtctcaggactcgttggcgtttggtgattggatcaatgggcagtccctaattgatatggggttccgtggcaacaagtatacttggaggaggggtaaacaagagcaatggtgcgttgcaaagagactagatagagtgctctgttgcgcacaagcgagattaacttggcaggaggcggtggtgactcatctcccttttttggcttcagatcacgctccgctttacgtccaattggaaccagagaatagaggtaatttaaaacggcgaccgttccggttcgaagcagcgtggcttagtcatcctgggtttaaagatcttcttgtctcgtcatggagtagagatttaacgaccccaaaagctctaacccaattagaaagaactcttcggaagtggaacaaagaggtctttggagagattcaagttcgtaaagagcagcttatgagtgacattaatatggtgcaagggttgttggaccatactcatacaaatgctctgttgggtagggaggcagaacttttaaaggaatttgatgtggtccttgagcaggaggaagtactatggtttcagaaatcccgagagaagtgggtagaattgggagaccgaaacacaaagtatttccatactatgactgttgttaggaggcggagaaacagaattgaaatgctcaaagcggatgatgggagttgggtttcacaacagcaggaacttgagaagatggctgtcgattactactcacggctttattctatggaggatgtcgatgaggttgttgagaggttacctccagacggttttactagacttacagaggaagagctgtctaatttgagcaagccttttaatcccatggaggttgagacatcaattcgaagcatggggaagtataaggctccagggcctgacggctttcaacctgttttttaccaggattgttgggatatagtaggtgattctgttagtcggtttgtgttggacttcttcgccaacgggaaacttccagagggtacgaatgatgcaatcgtggtgttgatagctaaagttctgaaaccggaaaggataacacagtttcgtcccattagtttatgtaatgttttgttcaaaacaattactaaaactttggtgatgcgtttgaagcgggtcatatcgaagcttatcgggccggctcaggctagttttattccgggtagattggcagctgataatatagtgattatgcaagaagctgttcattcgatgaggaggaaaaaagggcgtaagggttggatgcttttgaaattggatttagaaaaggcatatgatcggattcgctgggattttttggaggatactctacgggcagttaggcatccagagaagtggattgtatggatcatgcagtgtgttactgagccatcaatgagtctattgtggaatggtgagcgaacagaagcgtttagaccgaaacgggggttgcgccagggtgatccactgtcaccgtatctttttgtgctctgcatggagagactatgccatcttatagagcattctattgctcggaaagattggaaacccattagtctctctcagggtggaccaaagctttcacatatctgcttcgcggatgatctaatcctctttgcggaagcatctgtggctcagattcaggtgataagacgagttctggaacgtttctgtgttgcttctggtcaaaaagttagcctagagaaatcgaagattttcttctctgaaaatgtgtctcgggacttggggaagttgataagcgatgaaagtgggattagctcaactagagagcttggaaaataccttggaatgccggtccttcagaggagaattaataaggacactttcggtgatatcttggaaaaaatgacaacaaggctggctggttggaagggcagattccttagtcttgcggggagagttacactcaccaaggcagtgctttcgtcgattccggttcacaccatgagcaccattgctttgccgaaatcaacgttggatgggttagacaaagtgtctagatcgttcttatggggcagctctgtaactcaaaggaagcagcagcttatttcctggaaaagagtttgtaagcctaggagtgaaggtgggctaggaattaggaaagctcaagatatgaataaagctcttctctctaagctaggatggcgtctaattcaggatcatcatagcttatgggcgagaatcatgagatgtaagtacagagtacaagatgttcggaaatggtcttggctaaagtagaagtgtctgctcatcgacttggagaagtgtagcgttgggtat

SEQ ID NO: 164775 - DNA, 2075 bp, Arabidopsis thaliana landsberg
ccaacaaacgaaaatgaccgctattttttgagctggtatcttgtagtagtctatttctctttttttcctgaaactagattaggactcatgtatgagacgggttaactgataactaatatttacggttaagtgagtcggagcaaaacatcttgcataaaactaactaaaactatttaaatcatctagttgtcaatagaacaacaatctagttaattttctcttatcaacctacattcagagccggctgagatgggagggtgagcggtgcgaccgccccgaatcaaatcccatattcaataattaaggggtccatcttcttcttcttcttcttcttcgcagtgattcttcgcagtgattcatgtggaaagagtataaacgtgaatctatattatagctgcaagatctgtgacttcgacgtggacctatattgtgccaagtacccaccaccagaggttattgacatttccgagacgcataaccacaagctcacccttatcaagaagcagatcgagtttgattgtgatgctaaatgtggcaatgatggttatgggtttcgttacaaatgccatgaatgtgaagtatcattccatgtggattgcgtttggaatccatcggaggtaaaacatctgttagaggtaaaccactcccaccacttacaccctcttaagctcatcacaggtctatcactggaccgttgcgatataaaatgcagtctttgtggaagagagattgaagataggttgttttatcattgttcgtcttgtaacatcagcttggatatgcgttgtgttttaaacccaccacctatatctttgctgaatttgaaagctcatgatcaccaactcacccttatcccaagactcattaattttacatgttgtgcttgtgggttgagtggatatcgaagcctttacgcatgcagtagcagtatatgtgacttcatgatccaccaagactgtcttgaccttccatgcctcataagcattaatcgccatgatcacaatatttcacgcccttcttatcttaatgttgtgaattccgtattatgtggaatttgccgcgataagatggattggatgtatgggggttattcttgtcagaggtgtcctagctattttgttcattctaaatgtgctactagaagagatgtgtggaacgggaaagaacttgaaggagtacatgaagaaacaaaagatgtagaggcgccatatgtggtaatagatgataacacaatacagcatttcagccacatagagcattacttaagacaccatgttaatggtgttctgtgggaggagaacaagcgatgtagagcatgcgcccattgcatcggtctccaatctttctacagctgtattgattgtgatttcattctacaccaaacctgcgctggatttcctacaagtatttggcatgtgttgtacaatgaacggctaactttagttacaagcgaggccagtatttttgagtgttatgcttatcatcgaatgcccaatggtttcaggtaccagcgtgacgataaggtattcgatgtcctatgcggaacaatttcggagccatttcaccatccaagtcatgatcatcccttgtattacatcccacacgatgaaagaagacaatgcaatggttgcaacgagttggcatctcttgtgctcgcgtgcattgaaagtgactgtaaatttgtcttggatttcaaatgcgccactttaccacttgtggtaatgcatagcattgatgacgatcatcctttctcactacgctttggcaaaaatacaagtggtaaacactggtgtgacatttgaggaaaacaatccaatataaagagatggttctacacatgtaaagatgaggaggatagtttgcatacaaattgtgtggttggagacttttcaggggtcatgccaagaagcacagtggaggttttaagcaaatcatttgaggtggtgctcaataaaagtacatctcgtccattttgcagatggtgtaagttgcattgcatttttcctatcatcttgaaaagacttggaacctcagatgaatacttttgctctattctatgcatctgaaagcaagat

SEQ ID NO: 164776 - DNA, 1158 bp, Arabidopsis thaliana landsberg
aatctgtagctaggtttatttgtggatcaaaggtatgggccacaatgatccgaggtaaggtattcatcagatccttcacgtcttactcttccccacagaagcagcctcgcctcctcttcgctttagtcgactgtctaaggctttataacaaaatgttgtactttttctccaaatcaactcatgtttcaactccaatattaccgtgggatcctgctccaggcccacccgtaaaaccgcaccggttcgggctcttttggcgtgctaggtgtttacgttatcttccgaaacattataaatctctaatggaggaacttaaaccaaacctctagttgtggaggaacaacctgattttttatctcgcaaggaactacgacacgaaaattctagctacgtccatgggttgatgagctttttatgtagcggagaacaagtcatttttaatcccagcataggtaagtccataactttaccaactatcaaaacaagtggaataatctcccaaagctttttaggatatgatccaatcaatgcccaatacaaagtgttgtgcttgaccaatgttacacggttttgtgaacatcaagtcctcacattgggagctcaaaatagctcatggagaatgatacaatgcagcactcctcactattgtggcgaaaaatctttgtgcatagatggcattttatattacagtgctttcactagttttacaacagtcttggtgagatttgatgtgagggctgaaagtttggaagttgcatccaaatttcccgagggccttaaatcgtcgaatggaattactttgataaactaccatggaaaagtagctgttgtcagtaaaaattatcacaatgaccaccatgatttcaatttgtgggttttggaggacaccaagaaacaacaatggtcgaatgtactcgtatcttttcatacaggtgttactggacaattccatggcggtttagaagtcctgggcacttctgatatgggagagattgtctttgcacccaaccattttgaagagtttgttgtttactttctggatcaaaaaagcaaccggattagaagtgttctactatagaaggaaacaccaagtttaagtttagagattataatgtagtagttactttcttgcattatgtagagagtattaatatgttt

SEQ ID NO: 164777 - DNA, 1067 bp, Arabidopsis thaliana landsberg
  unsure (1)..(1067): unsure at all n locations
acattggtaaaggacaacaccaacaagagatggagagactatgatgatcatgatgatgcctcacaaactttgtttaatgagcggtgtcgtcgactttgatccatctatagaggttaaaggtcaacttttcattcacaatcaagtgagtatatctaatattttccactttgagggtttgttgttatgcatcttgaaagacgacgttactagggttttggtttggaatccgtattgggggcatacaaggtggatccaaacaagattgatttgctgcgttagtggatgaaaaaagtacgctctcgtatacgtaaataatagtgaaaacagatcttgtcgtagccccaaaatcttgagggttacagataatttcaacattttcagcgaaaacatgcctccccagtatgaaatctatgattttgattctgatgtatggaccactcttgatgtgtctccacactggtttataatgtctgaacgtggcctttctctcaagggaaacactnnnnnnnnnnnnnnnnnncggcacgcatacggatccattggtcatatgatctgctttgattttacaagaggaggatttggaccgcttctacctctgccgtttaaggctaggggtttagtttttgcgccactatcttcggatagagcagagaagatcgcggctttatttcggacaagcaaaaaggttgtgatatggattacgactaagattgatgccacaaatgtaacttggagcaatttcttcacaatatatatatcgaaccttgagcgaaatctttcatgtaagagtttcttcattgacatggagaagaaagttgctatggtttttgataaagaaaaaggaaaaaaaagtcgctcacaacattattaatatcattggagaggctggatgcgtgaggaaattggttcttaaagaatctggagacaaaagctgttggccacatgtgtgctcttatgttccaagtacagtgcaaatcaaacaacataatagaggcaaaaggcaaaaaaaagtgattaggaaaggcattgacattgatatgagacatgataaacgtatcaaggttgat

SEQ ID NO: 164778 - DNA, 5256 bp, Arabidopsis thaliana landsberg
  unsure (1)..(5256): unsure at all n locations
cgtgaatatcacgagcgatctcagaacgaggaaatccaggagctgagaagtagatcctagcaatgtcccagaaaggggatcaggcgagcagttccgctcctgagttagagcagatcctggaaaaaacccaaaagacaccttttgccgcacacatcagcaacgtctcagttcggcatgataacaagataaagttaaaaagttacgaaggtaacacggatccacaacaatttttatcggctttcagcatcgccacgcaaagggcccattttcatccgagcgaagctgaggccggcaagtgtcagttattttccgaacatcttacgggtgcggccttgaattggttttccgacctacctgctaattcaataggaagttttctggaactttcaatcgccttcctgaagcattactccatgtacatcgagcgcggcacgacacacgcagacctttggactatggcccaaggcccaaaggaaccgcttcgcaccttcattgacaggttcaaggcagtcgtttctcacatcgtcgtcccggatgaggcggccatctcggcactacgcaacgccgtgtagcatgagtcaccctttcgcgatgatttgttgttaaaccggccggtgtatctagaggaccccctccacaaggcgacgcgctatattgaaatggaagaagaaaagctggccttcagcaagaaacatacttctaacaaacagtcgaaggaaaaagttcaagatgactattgcgaaccccgccaacactacaaccacgagtaccggcaggagaccgaaaggaaggctgcatcgtatctcgtaagcgaggcagacccagttgctcagccagccaatttcgataaggctcggcgaacagatgaagagaatagattggatcaatattgcgatttccacaaacgatctggccattccaccgccgtatgtcggcacttacaaagtatcctactgaacaagtacaagaagggcgacatcgaggttcagcatagacaatacaaaagccataacaatacctacgcggcacgtggaggccgagatggcaataacgtgttccaccgtttaggtccacatactggccgtcagcaagaagcaccaccagctaatgaagaagaacgatatcctgacatggaaccctccaaaaaaaatcgagaaaacgaccaacaacataacgacgcaccagttccccgccgaagggttaacatgattatgggaggtttaaccgcttgccgcgactctttccgatcaatcaaggaatacgttaagtcaggggctgccactttatggtcgtcacctgcaacaaaggagatggcccccctaacattcaccttggaagacattctcggcgtagatgtgcagcacaatgatccgttggtaatcgagctactctttggagaaagtgaagtcactcgaatcttaatcgatacggggagttcagtaaacgttatattcaaagacgtcctgcaaaaaatggaagtccatgaacgtcacattaagccgtcagtccgccccttaacaggcttcgacgggaacacattgatgacgaacggaacaattaaattaccgatctatctgggaggggcggcaacatggcctaagttcgtagtcgtggataagccagcaatctacaacataatcctgggcacgccgtggattcacgacatgcaggcgattccttcgtcatatcatcaatgcatcaaaatcccaacaagcgtcggcatcgaaacaataaggggaaaccaaaagttagctcgtacgtgctttttaattgaatgcaaacttcgaaaggagctcgacttatagcaattaaaggacgccgaacccaaggaatctgccgaaccatccactaaaaagcgagcttccgaagccagcagtgacgagcccgcacctaagaaaagagcagaagaagaaagttctcctaccagagaattggtagttcaggttaacatcgatgactcaaacgcagagcggtgtgtggggatcggcgctgatcttgatgaagatataaagaccgagctcataacatttcttaagaggaacgtcgcaacgttcgcctggtcaatagacgacatggtcggcatagatcccgaggtttcttgccatgaattaaacgttgacccaaccttcaagccaattaaacaaaaacgacgaaagcttggtccggagcgctcaaaagctgttaacgatgaagttgataaactcctcggcgctggctccattgtcgaagttaagtaccccgaatggctggcaaaccccgttgtcgtaaaaaaagaagacggcaaatggagggttttgcatcgatttcatggacctcaacaaagcatgtccgaaagatagtttcccctcccgcgtattgaccagctcgtcgaagctactgccagtaacgaattgctgtccttcatggacgcttttccgggttataaccagatacttatccactaaaacgatcgagaaaagacggcattcattacagatcgagggacattctgttacaaggtgatgtcttttggcctcaaaaatgcaggagcaacctatcagcggttagtaaaccgaatgttcgccgagcaactgggccgcacaatggaggtctatattgacgacatgcttgttaagtcaacccgtgctgcagaacacgtctctcacttgcaacaatgcttcgacgtcctgaacaaatacaacatgaagttgaacccagccaaatgcactttcggcgtgacttctggagaattcctcggataccttgtcannnnnnnnnnnnnnnnnnnnnacccaaaacagatctctgcgctaatcaatcttccctccccaaggaacactcgcgaagtacaacggctcactggacggatcactgcattaaatcgttttatctcccgttcaaccgacaaatgtcttccgttctaccaacttttgcggagcaacaaacttttcgactgggacgataagtgnnnnnnnnnnnnnnnnnnnnnnnaggactacctctcaactccaccgattttggccaaacctgagcagggcgaagtactgtatctttatattgccgtctcaagttttgcgatcagcggagttctgatcagagaagatcgcggagaacagcaccccattttctacgttagcaaaattctcgacggtgccgaactgcggtaccctacgctggagaagcttgcttatgtcgtagtgatctcggctcgcaaacttcgaccatacttccaatctcacgcaatcgaagtcttgactaaccagcctctacggatgatcttgcacagtccgagccagtctggccgattagcaaaatgggcggttgagctaggcgaatatgatcttacgtacaaaaaccgaacatgcgcgaaatcacaagtactcgctgattttataatcgagctcccacccaatctcatcgagggcgcccctccgtccgagaaatggatattgcacgttgatggcgcttcttcccgacacggatccggagttggcgtacgattggattctcctacgggagaagtgctggagcaatctttcagactcgctttcccagcctccaataacgaagctgaatacgaggcattgatagctggtttgcgccttgcgtacggtattggcgttaaaagaatacaagcttattgcgactcgcaattggtggctaaccaattcagcggcgattacgaggcaaaaaatgaacggatggacgcctatctcaaggtggttcgcgatctgtcccgtaattttgagcactttgaacttaataagatcccaagaagcgataatgcttcgacatctgatccggatctccgtcgtattatacctgtcgagagcatcgatcacccaagtattgatctttctccctctacaaacacgcagactacgccaactattgatttgcctgggccgccgataatctacttaatcgtcaatacgctcgcatcaacatcttcagcaccaccaaatgtttatgcgataacacagccagcccaatcgcctccaaccgaacctacgttcccccagcagacggacgatctcgttgttcaggattggcgcgatgaaatacgaaactatatcgcagatggcacaatactgacggataagtgggtcgcccgacggttacgtgcccgcagtgggcagtatacattgttggatggcaatcttcatcgttggaacgctgctggggtacttctctcatgtcttgccggtgacgaaactttacaaattatgcgtgaaattcacgaaggcgctggtgggaaccattcatgaggtcgtgctttggcacttcgcatacgcaaacatggccattcttggcccaccatactctccgatttcagtaagtttgtcgccaaatgcgaaaagtgtcaaaggcacgcgcctattattcacgcaccgtcggaactgttgcatactattgcgcctccttacccattcatgcgttgggcgatggacatcgtcagacctcttcatgcgtcccgccaaaagaaataccttctcgtcatgatcgactatttcaccaagtgggtcgaggcggaatcatatgcccggatccaatcgaaagacgtccagaattttgtttggaagaacattatttgccgccacgggcttccgtacgaaatcgttaccaataatggctctcagttcacttcacttcaattcgagggtttctgtgcaaaatggagaatctggctgagtacgtctacaccccgcaaggcaacagacaggctgaggccacaaacaaaactattatttatggactagagaagcgccttgaagaaaacaagggtgcatgggcagacgaactcgacggtgtcttgtggtcacaccgtacttctcctcggcgatctaccggtcaaacaccattctccctcgcttacggtatggaagctatggcaccgtctgaagtcggcctccccacgatccgacgttctatgtttgtccacaattctgctctcaacgacaagattctcctcgccaacctcgacaccgtcgaagaacaacgtgacctggctctccttcgcatccagaactaccagcaggctgcagcaaaattttacaacaagaggtaaaatcccgctactttgtcgaaggagatctcgttctacgcaaggtgtttgaaaataccgccgaaatcaatgctggcaagcttggagctcactaggaaggcccttatctaatcttcaaagtcgttaaacccggcgtttatcaattgttgactatggacgggacttcaattcctcgctcctggaactcgtccaaccttaaacgctattactat

SEQ ID NO: 164779 - DNA, 1668 bp, Arabidopsis thaliana landsberg
taacattctcttcaattaccaatgtcccattcggttctatcataaattatcgttagaattaaatatgttcatgatgatcattttgtactccctttgttttggtgcaacaataaagaatttgatgtcaatggtggatgcagtgcatgcaatggctcatattttggcactgattattatttctgtaactgtaatcaaatgtttcacaaagaatgtgtcgagtctccacttaaaataaaacaccctttccaccctgagcactctctcgaatgttacattcatcctccttttgctcacaatattgagtgtttatgttgtggaagaatagcatcaggtcaggtatattattgttccatatgtagagttctcatgcatccaatatgtgcgatgaagacgatacctatggttataaaccaaccaaaaaggtatgatcatcctctcattttctttcctagacaaaattctttaacctgcaacgtttgtggtttgttaagaaaactttattccacatacatatgtgccatatgcaactttgtagcccataaagattgtatgtattctccacgcataatcaagatatcacgtcacccccatcgtctctcctacatttcgtctcttcaatctagagattgttcttgtacaatatgtcgtcaaagtattgatagtgattatggtgcatacacttgcaatgtgtgtagtgactatgtcgttcacgtaagatgtgcattacgtaaggatatatgggatggtaaagaactcgcggaagtaccagaagaattagaagacgttgagtccttcaggaagatagctaatggagtaatattccactattctcatgaccatcatctgaaatttgacagaaatggagtttacgttggaaacaaattttgtcaagcgtgtgtccttccaatcaacgaaggaaatgtttatgtttgtgtggaatgtgatttcatcctacacgaaacatgtgcatatgctccacgtaaaaaagtccatccattacatccccatccccttacactaaaggttgatcatggagacgctttattccaatgcagtgcttgtatgcgtaagagtaatggtttcggatatgattgtactagccgaacttgttactacatactagatgcagtgtgtgcctcgactgctgagccgttcaattatcaaggccatcgacatcccttattcctatcgttagacccaaaagatacgccaatgtgccacatttgcaagtcaacgaaagataagaaggtacttaactgcattgaatgtgactttattatatgttttgaatgcgcaaccttaccatacatggtaaggtacaagcatgacgaacattacctcacattttgtcatggagatgaggtgagtgactcagattggtgtgaattatgtgagggaaagttatcaattggaggaaaagaagggttctataattgcaaagattgctgcaccacgcttcatattaattgcttacttggcccagatcaatattataaggctggtcaaacttacaaaattggtgaggttgatattagtttgcaacacaacaattctgcttctcggcctatttgctgtatgtgcaatatccgatgtccgtatccaatatttttggtagccacagtggataggattgcttatattctatgttctaataaacatttgaagtaa

SEQ ID NO: 164780 - DNA, 385 bp, Arabidopsis thaliana landsberg
atgggaagcttaagggtgagcacagttgttattgcagtagtggcttgtctctccatcctcctcatatctcctacaggtacttaaacaaccaaaatctttgatatcccaagatctaaactaaaacaaatttaatgaaaagaagatctagaataaatacaagttaatgaaatgttgccatctttctatggattggacagaagtagatgggcgtttagtgtgtgacactccagcgggtacatgtacctcgagctctacttgcaatgaccaatgcaatacatggggcggcaattatagtggaggcgaatgtgcagattcaagctttcctggtttaagtatatgttattgctgccattatgtagggagcagtgctgaaatggaaagcatg

SEQ ID NO: 164781 - DNA, 373 bp, Arabidopsis thaliana landsberg
  unsure (1)..(373): unsure at all n locations
cttgtatattatttatactgttattgtattatgtatatttgctatgtattaatatgttactgtgttatatatgtattctaatcttatattatattgtgttattattattattattattattattattactttatgttctatcttatttattatatttgtctatttgttactttgttgtcttgttatttatattattcactttcatataatttctataatatgttttatattaatatattattgtattattgttattataatttatatttatctgttntattttatcgtttattactcactttttgttgtgtgattaatgttattatttttctttgtttattgttcaattgttgattgtatactaattacttat

SEQ ID NO: 164782 - DNA, 558 bp, Arabidopsis thaliana landsberg
  unsure (1)..(558): unsure at all n locations
gggggttccatctccgcctatatgggtgctttgggcgcgtcgttagcaaccatggtggctaacctgtcatcccacataaagggatgggatggccgctggaaggaattcagcgactgggcagataaaggccaacgctataaagatgagctggtanagctggttgacgaagtcgccgctgcctttaataaaattatggaaggctttggcttacccaaatccaacggcggagaaaaagcagcccgggacaaggccatacaggacgctacccgctatgctatcgaagtgccatttaaggtgatgcaagccgcctgctacagccttacagttatcaaagctatggcagaaaccggaaaccccaattcggttactgatgccggggtagcagccttatgtgcccgtagtgcggtaatcggcgcatttatgaatgtgaagatcaatgcctcgggatataaggatagagcctttgtggagaagatattgggtgatggcagtgaaattgaaaatagagctcccgcgttggagcaagagattatagggaaaatgaatagaaagatagcg

SEQ ID NO: 164783 - DNA, 575 bp, Arabidopsis thaliana landsberg
tgctgttttctttttggtttttcttgcagttttcgtgaatggcaaattctgtaaagatccaaaatcagtaacggccaatgatttctcttattcgggactcaacatcgccccgaaacaccaccaacttcctcggttctaatgtcacaaccgtagatgtcaacaaaatccctggcctcaacaccctcggagtctccctcgctcgcttagactttgctcagggaggtcaaaacccaccgcacatacatccacgcgccactgaaatactcgtagtcaccagaggaaaactcctggttgggtttgtgtcttcgaaccaagacaacaatagactgttctacaaggttcttaaacgaggagacgtttttgtgtttgccattggtttgatacattttcaaatgaacgttgggaggacaagggcggtcgcgtttgctgggtttgggagccagaatcctggtaccattaggattgcagacgcggtttttggatcgaacccttcgattcctcaagaggtgttggctaaagcttttcaattagacgttaaattggttagatttctccacatagtgtttggtccgcca

SEQ ID NO: 164784 - DNA, 1045 bp, Arabidopsis thaliana landsberg
  unsure (1)..(1045): unsure at all n locations
gggaattctccacaagaaatccccattctcttcttcttcatcatcttcttagactatgtatctgctcaatttcctcctactcctaatctatacgcaacaagcgaccttttcatgccaagcttagctattcatcaccggagttttctccatcggcttcactctcacctatgttctcctcgtctacgccaaatgcttccacaatgacctgcgatcagagaccgactgtgatggagaaagaatacgacatgatcgcctctggaaggacttttcatcggtcttcaagattctctggtttagacaaaacagcaatcgagtctcttcctctgtttagattctctgctttgaaaggatcaaaacaaggtcttgattgttctgtctgtttgtctaaattcgaaagtgttgagattcttagattgttgcctaagtgtagacacgctttccacatcggatgtatcgatcagtgnnnnnnnnnnnnnnnnncgtgtcctttgtgtagaaacagagtcaatattgaagacgacctctctgtgttgggtaatagcagcactagtcttaggatcttgaaccaatctgagacaagagaagaagactcgaggttggagatttacattgaacgcgaagaaggaactaatgacgggtcatcaagattcagcagtttccgaaagattctaaagaaatcgttgttgcttgagcgagaaggaaatgagaacatcgatgagaagaaacttatgcacaagttcaatcacaggatcgttgtttcggatgctgtgtttaagaaccgctggagtaatatcacttcatctgatttgacgtttttgacatcagaaatgctgaattcggtgtcaagcgacagattttcgtcggtggatcgagtgcatagaggtaacttgcgggacaaggaagatatgggaatgaaaagaatgttgattaagcacaaagactcatccagaagaacggtttctgagatcacgactgtttcaagagaaaaggcggtttggaggaagctacagaggttcaaccgcgttcacttcgcagattatgccgt

SEQ ID NO: 164785 - DNA, 799 bp, Arabidopsis thaliana landsberg
gtaacatattggaacactacttcttcatgtcctatttgggttcaagaaattgtgcaaggacctttgaacaaggtcataacttggccaatgtatttcacaagagggtatatgtttcatacgcaaaatcacggcgctggacgtaagacatgtaactatggggtatgtgttaaaggtgataattacgctgattcatctgatgaagcggatttctacggtaccttcactgagatcatagaactcgagtatgagggcatcgtcaatttgaggatcacagtttttaagtgtaagtggtatgacccaaagattgggagtggcactcgtgaacgcacggtggctgttgtaaactgttcgatcttacgaggaaataaaataaatacgagtcatttattcttggtacgtaattttgaagaggtcaattgtatttctcttttaattattaatactcttgtttgatatatatgtataacttgtgtttacaggatctcaagcagatcaagtttgttatattccgtacccatatacgaagaaaccaaagaacatttggctcaatgttttaaaagtcaacctgaggggaaacatttctcgagaatatgaaaacaatgatccgactctgttgcaaacagaaaatgatgatgctgttttactcactacaattgaagatcttgtactagaaaatccggtagaaagcttaaacccaataatccttgattacgatgtcggggatgctgaaccagaagatgaattccgatgtaatttatcgtccttggacgaagatgaagtagaatatgaagagtaataa

SEQ ID NO: 164786 - DNA, 5736 bp, Arabidopsis thaliana landsberg
  unsure (1)..(5736): unsure at all n locations
agcgatctcagaacgaggaaatccaggagctgagaagtagatcctagcaatgtcccatttagtttatcaggcgaccagttccgctcctgagttagagcagatcctggaaaaaacccaaaagacaccttttgccgcacacatcagcaacgtctcagttcggcatgataacaagataaagttaaaaagttacgaaggtaacacggatccacaacaatttttatcggctttcagcatcgccacgcaaagggcccatttccatccgagcgaagctgaggccggcaagtgtcagttattttccgaacatcttacgggtgcggccttgaattggttttccgacctacctgctaattcaatagggagtttcttggaactttcaatcgccttcctgaagcactattccatgtacattgaacgcggcacgacacacgcagacctttggactatggcccaaggcccgaaggaaccgcttcgcacctttattgacaggtttaaggcagtcgtctctcgcatcgccgtcccggatgaggcggccatctcggcattacgcaacgctgtgtggcacgagtcgcgttttcgcgatgatttgttgttaaatcggccagtgtatctagaagacgccctccacaaggcaacgcgctatatcgaaatggaagaagaaaagctggccttcagcaggaaacatacttctaacaaacagtcaaaagaaaaagttcaggatgattattacgaaccccgtcaacactataatcaggagtaccggcaggagaccgaaaggaaggctgcatcgtatctcgtaagcgaggcagacccagtggctcagccagccaaccttgaaaaggctcggcgaacagatgaagaggggggtttggaccaatattgcgatttccacaaacgatctggccattccaccgctgcatgtcggcacttacaaagcattctattaaacaagtacaagaagggcgacatcgaggttcagcatacacaatacacaggccacaacaacacctacgcggcacgaggaggccgaggtggcaacattgtatttcaccgtttagacccacacgccagccggcagcaagaagcaccaccaaccaatgaagaagaatgtgatccagacatggaaccccccaaacgaaatcgagaaaacgaccaacaacatatcgacgcaccagttccccgccgaagggttaacatgattatgggaggcctaactgcttgccgtgactctgtacgatcaatcaaggaatacgttaagtcaggagccgccactttatggttgtcacctacggcaaaggagatggcccccctaaccttcacctcggaagaccttctcggcgtagatctgccgcacaatgatccgttggtaatcgagctccacattggagaaagtgaagtcactcgaatcttaatcgatgcggggagttcagtaaacgttatattcagagacgtcctgcaaaaaatggaagtccatgaacgtcacattgagccgtcagtccgccccttaacaggcttcggcgggaacacattgatgacgaacggaacaattaaattaccgatctatctgggagggacggcaacatggcctaagtttgtagttgtggataagccagctatcttcaacataatcctgggcacgccgtggattctcgacatgcaggcgattccttcgtcatatcatctatgcatcaaaatcccaacgagcgtcggcatcgtagcaataaggggacaccaaaagttagctggtacgtgctttttaattgaatgcaaacttcgaaaggagctcgacttatagcaattaaaggacgccgaacccaaggaatctgccgaaccatccactaaaaagcgagcttccgaagctagcagtgacgagcccgcacctaagaaaagagcagaagaagaaagttctcctaccagagaattggtagttcaggttaacatcgatgactcaaacgcagagcggtgtgtggggatcggcgctgatcttgctgaagatataaagaccgagctcataacatttcttaagaggaacatcgcaacgttcgcctggtcaatagacgacatggtcggcatagatcccgaggttgcttgccatgaattaaacgttgacccaatcttcaagccaattaaacaaaaacgacgaaagcttggtccggagcgctcaaaagctgttaacgatgaagttaataaactcctcggcgctggctccattgtcgaagttaagtaccccgaatggctggcaaaccccgttgtcgtaaaaaagaagaacggcaaatggagggtttgcatcgatttcacggacctcaacaaagcatgtcctaaagtgctttttaattgaatgcaaacttcgaaaggagctcgacttatagcaattaaaggacgccgaacccaaggaatctgccgaaccatccactaaaaagcgagctttcgaagccagcagtgacgagcccgcacctaagaaaagagcagaagaagaaagttctcctaccagagaattggtagttcaggttaacatcgatgacttaactcagagcgattcgtagggatgggcgctgacctcgctgagaatataagggtcgagctcgtaaaatttcttaagaaaaatgtcgcaacgttcgccgggtcaatagatgacatggtcggcatagatcctgaggtcgcatgtcacgaattgaatgttgacccaaccttcaaactagttaaacaaaaacgacggaagctcggcccggagcgctcaaaagctgttaacgacgaggttgataaactcctcggcgctggctccattgttgaagtcaagtatcccgaatggttagcaaaccccgttgtcgtaaaaaagaagaacgacaaatggagggtttgcatcgatttcacggacctcaacaaagcatgtcctaaagatagctttccactcccccatattgatcggatggttgaagccacgaccggcancgaactattgtccttcatggatgcattctccgggtacagccaaatacttatgcgcccagatgaccaagaaaaaacagcttttatagctgaccgaggcacctgcttttataaagtaatgccctttggtttaaaaaacggtggagctacttaccaaagattggtgaatagaatgtccgccgaccagctagttaaaacgatggaggtctatatcgacgacatgctggtcaagtcagctcgcgaaaaagaccacgtcccgcaattaagagaatgcttcaaaatcctaaacaaattcgaaatgaagctaaaccccgagaaatgctctttcggagttccctcaggttaattcctcggatacctagtaaccgaaagaggcatcaaggccaatcctaagcagattgtagccttcatcgacatgccatcgccaaaaacggcacgggaggtccaacgactaaccggccgtatcgccgccccaaacaggttcatatccaggtccaccgataaatgcgtccctttctatcagctcctccgaaaggataaaaagttcgattggaacgaggactacgagcaagccttcaaacaattgaaagcgtacctgtccgaaacacccatactcgcaaaacccgaagaaggagaaccgttgtacctgtacacggcagtctcccgaaccgcgataagcggcgtcctggtgagagaagatcacgaaggacagaaactgatctattacgttagtaaaacattgatagacgccgaaactcattatcccgcaatggaaaaactggcactggccgtagtcatgtccgctcaaaaactgagaccatattttcaatcacatcccatcgtagtgatgacgtctcaaccaatcagaactattctgcacagtctgactcaatcaggtcgacttgcaaaatgggctatagaattaagtgagtacgatatagaatatcgcaccagaactagcctgaaagcacaggtcctagccgactttgtaatcgagctcccgttagcggacctggatggaaccaattccaataagaaatggctcctccacgtcgatggctcctctaaccgacatggatccggagtaggaatcaactcacctcccccaccggggaagtcatcaaacaatcgttccgactcggattcaacgcatcaaataacgagtctgagtacaaagtcctcattgctggcattaggctagctcaaggaatgggaatctgcaatatacacgcccatagcgactcccaactcgtcaccagccagttccacggggaatatgaagctaaagacaagcgcatggaagcgtacgtcgaactagtcaaaaccttgacccaacagttcgagtcttttgaactgaccaggatccccagaggtgaaaacacctctgcagatgccttggcagctctcgcctccacgtcagatcctttcgtcaaaagaattatcccagttgaaggaatagaacacccgagcatcgacctaacggtcaaacacgctgaaatggaaacctcggcaacttgcaactttacgcgagtaactcgaagctcggaacccccgaacaacttgcctcgtacgaacctgaaccgtacaacgactggagaattccaatcatcgattacatcgaacgagggatcacacctcccgacaagtgggagaccagaaaactcaaagcccagagcgcaaggtactgcatcatggaagggagactgatgaaacgcagcgtcgcaggtccctacatggtgtgtacctatgggcaacaaacgaaagatctcatgaaaagcatgcacgaggggcaatgtggtagccattgtagtggacgtaccctcgccctcagaattaaaaagcaaggttacttctggccaacaatgctagccgattgcgtactcattcattcaggtgcgataaatgccaacgacaagcacctactcttcatcaacctcccgaggaaatgtcgtaggtcccatggacgcctctggtgggaagaagaaactaaaaaacctgctagtcctcaccgactactctaccaaatggattgaggctaaagccttccaacaggtaaccgagaaacaagtcgaggacttcctatgggaaaatatcgtatgtcaacatggcataccttatgagattatcaccgataacgggactaacctcacctcgagaaaaatcaaagcattttgcgacaaatggaagatccgtcttaccacatccaccccccattacccacaaggtaacggacaggcagaagccgccaacaaagctatacttagcaacatcaagaaaatacttgattccaaaaaatcaatgtggtccgacgtacttcacggagttctctgggcctaccgaactacacctcgaaaataaacgcaagaaaccccgttctctctcgcctatggtctagaagcagtgatccctgtcgaaaccatagtaccaagcgtgagaaggaccgccagtcctcctaactcggacctgaacacgcaaatgttacaggacaacatggacttcatcgatgaacgcagagatcaggcaatgatccgagttcaaaactatcaacaagccgccgctcgctactataactccaatatcaaaattcaaagattcgacatgggagagctcgttttacgaaaagtgttcagccacacgagagagctaaacgctggaaaactgggaactaattgggaaggtctctatcgaatcacagaggtggtacgtgacggcgtctataagctcgtaaaagttattaacggagtacctgagttacggtcttgaaatgccatgcatctcaagaaataccacgaa

SEQ ID NO: 164787 - DNA, 1650 bp, Arabidopsis thaliana landsberg
taccaagatcctgaagaggtgtcttcgcttttggaggcagtggatcgtgtctcaaagcttatggggctattgctcaacaccaagtcctgtttggaccatcatgagtccttgatcaaccatgcgggatctattcagcagcgtgcaatggctttcttggaagacgaattccgcatcattttagaagaatctgtgaccaaagagtctgtggttgtcaccgatgacagcaacagccagaggaggagcactgccgatcagcaagaccaccagaacgatgtggtggtctcacaagaccacgaccagatgctcgttccggaatgcggtgatcaggagattgaataccctggttaccctgaggatgtggttgtggtgctgaggaaaatagcggaaaagatgaaagcaggagggtatggatgggaatgtagagaggtttatttggttgggaggaggaacatcttgatgcgcactttgaaacaagattgtgagtttgagaaagttagcatcgacgaggtgcagaaaatgagctgggacacgctcgagagagagatccctatttggaacaagactttcaaggactgctcttctctcttcttccctggtgagctaaaacttgcagagaggatattcccaggggacgaggggaacttattctgtattgtcacacacggtctggccatccagttcttaggtttcgcagaggccgtagccatgacaaggcgctccactgaaaagctcttcaagatcctcgacatctatgagactctgcgggatagttttccggccatggaggagctgtttccggaggagctccggagcgagctgaggaacgaggtgaccagtgctcgctcccgacttggagagactgcgattcacattttctgtgatctggagcactccatcaaatcagattcaagcaagacccctgtgccaggaggggcagtgcatccattgacgaggtacaccatgaactacctcaagtactcgtgcgaatacaaggacacattggaacaagtgttcaagagtcactcgaagatggagcgagaggaggaggaacctgtggagagcggaaactcggccttcgcaagccagctgatgaggataatggagctactcgacggaaacctggagacaaagtcaaaacagtacaaagacataccattgagctgcatcttcatgatgaacaacgggagatacatagtgcagaagatcaaaggatcggcggagatacacgaggtgatgggtgacacatggtgcaggaggaggtcgtcagagctaaggaactatcacaaaaactatcagagggagacgtgggggaagctactggggttcttagggcacgaggggctcatgcacaacggcaagatagtcaagcccaatctcaaggagaggttcaagagcttcaacgcaacatttgacgagatacacaagacacagaccacatgggtagtcaacgacgagcagctgcagagtgagctaagggtctccataactgcagtcatgatacctgcctacagggccttcatggccaggtttggacagtacttggatcctggtcgccagaccgagaagtatgtcaagtatcagcctgaaaatatcgaggatctcatctaccagctctttgaaagcaacacctactactgttatactgccacc

SEQ ID NO: 164788 - DNA, 1347 bp, Arabidopsis thaliana landsberg
ggaagaattgaaaaaccccaatccggcgcaacaaaaggcacttgatgatgcaaatctcaaagatctcaaggccaaaaactatctgtttcagtcgatcgacaaaaccactctgaagacgatcacgcagaaagagacggccaaacaattgtgggaatcaatgaaggttaaacatcaaggaagtgccagagtgaagagggctcaattgcagaggctgaggaagactttcgaaacactggagatgaagaatggagagagcgtgataagctactttgcaagagtcatggagacgaccaatgacatgcgaaattgtggagaaagcatggacgatgtcaaaattgttgaaaagattctccgtagtctcacagacaatttcaactatgtcgtttgctccattgaggaatctaaggatattgattgcctcacagtggatgagctgcaagcgtctctacaaatacacgaacgtaaggtgactgagaagagaggtgaagaacaagtcttggttgtggaaaacgagccaaggagtgctcgtggtagaggaaatgggaattcctatcgaggaggcagcagctcaagaggacgaggaagaagcagatcgtttgtaaacagatctgcaatcaagtgtttccggtgtggaaaaatgggccattatcagtttgagtgcacaagccttgagaagggagcaaactttgtggagtttgacgaagaggaggagttactactcatggcacatgcagagataaaaagtgtggaagatcaaggttcatggttccttgactctggatgctcaaatcacatgaccggagagaagtcatggttcaccgaactggacgagagtttcagacactctgtcaggctgggaaatggatctaaattaggagttgagggaaaagggaacatccgaattagtgtggagggaatcttacaagtggtgagtgatgtttattatgttccaaacctcactaacaatttgctgagcattggtcaattgcaagagaagcagctttcaatcatcatcgaagatggagtgtgcagaatttttcatgctcaaaggggattgatcgtagagacaaagatgaccaaaaaccgcatgttcttagtaaatgctgtgaagaaaccaatcaccaccaactgcctcaagatagaaggagaagacttgggaactctctggcataagaggtttgggcatctaaacaacatgtccattcaattgatgcagagaaaagagatggtgaaaggtcttccaaatatcaaagaggacaacaaggtgtgtactgtgtgcaacattggcaagcagcaatgaggaaattccctaagaaaagtaaatggagggcatcagagaagttggag

SEQ ID NO: 164789 - DNA, 789 bp, Arabidopsis thaliana landsberg
atattatttcaaagattctgattgaagatctgtccttatacctagaaatcgaggaattatgtggcgcatgcgtccattgcaatagggtcttcgtttgagattatctcttgttatgatcataaaacgccgtactacttttcttgagggtccgttgatgcatttccaagtgtaataatgcatttgctctaggacttctcaatttctctagaatataacaccttaattgtcccaattctatagagccaacatataaaccccaccatgcaacagatgtattattacgtgtatataactaacaattagctttggtattcaacattctcatattcacgaaagcattccattccaaattagagaatcataatttcaaaaacgttgaatcattttctttctcgttcagagctctagattagtcaataatggagattgaatcggtgacgtgcgagtgttgcggcttaatggaagattgtacacaacactacattagtaaagtcaaagctaacttcgccgggaaatggctttgtgggctttgctccgaggcggtaagcgacgaattcagccgtagttcgaagacggtggaggaagctgttaatgcacacatgtcgttttgtggcaagtttaacgctaaccccgcagaactcgtcgccgacggcatgagacagatgctacgaaggaggtccggtgagttatcaccgaagatgtccaagaagttcggaagatctaacaccacataattcatgtagtcatctttttctcactttggccttaaagttttggctaatgtaaagt

SEQ ID NO: 164790 - DNA, 902 bp, Arabidopsis thaliana landsberg
tccaggaaagcaaaggttcgaatacttcaatggatcctccgacccgaaaggacatttgaagtcattcataatttctgtggcccgagccaaattcaaacccgacgaaagagacgccggtctctgtatttcgtggacagttttcaggagctatcgacgctcttcctagagcaatattcggtgctaatcgatccttgcacgtcagacgccgatctgtggtcattatcttagcagccaaaggagccacttcgagatttcctcgcaaaattccgatctaccctagccaaagtcggaggattcaacgacgtagcggctctctctgctctgaagaaggcgctgtggtacaagtcagaattccaaaaagagttaaacttgtccaaaccacaaacatccgagatgccttgcaccgcgcctcggattacgtttcccatgagaaaaaaatggaactactatcaaaaagtcacgagccgcctaagcagacgcgtcgcagcgataaatcccaactcagcgctctgaacaacaaaaagggcgctcaaggcgggacattcgttcaccatgaaggacgaaatttgtctaaagcccacaattgccaagctgatacaccccgaggtcaaggacgaggccgcggtcgagggtgcggacgagaatcctacacctcgacgaaagatcaacccgcaggaaacgagtaggaatactgtgagttgcataagagttacgcccatcatacttccagatgtcgtagcttcggggcaaagttggcaactaaattcctagccggagagatcggtggaggcctaaccatcgaagacttagaagcggaaaaggccaaaaccgagcaggtcaatgctgtggccaatcccgagcaggcggcccccgcgacgaacctcgaaggacccaaaagagac

SEQ ID NO: 164791 - DNA, 533 bp, Arabidopsis thaliana landsberg
ctaatgaacatgatgatgcagcagatggagaagcttcctgaacacttctctaactcaaaccctaaccctaatccccataacattatgatgctttctgaatccaacacccacccgttcttcttcaaccccactcattctcatctcccatttgaccaaaccatgcctcaccaccaacccggtttaaatttccggtacgccccctccccgtcatcatctctcccggagaagagaggaggctgcagcgacaacgccaacatggcggcgatgagagagatgatctttcgcatagccgtgatgcagcctatacatattgatccggaatccgtaaagccaccaaagagaaagaacgtgaggatctctaaggatccacagagcgtagcagctcggcatcgaagggagagaataagcgagcggattcggattcttcagcggcttgttcctggtgggactaagatggatacggcgtcgatgctcgatgaggctatccattacgttaagtttctcaagaagcaagtgcagtcgctggaggaaca

SEQ ID NO: 164792 - DNA, 338 bp, Arabidopsis thaliana landsberg
tccacatactccctcatcatcaccaccaccaccaccatgatgttcctaaaggctgtgtagcgattatggtgggacacgaagacgatgaagaaggtctacatagatttgttgttccgttggtgttcttgagccatcctttgttcttggatctcttgaaagaagctgaaaaagagtatggattcaagcatgatggtccgattacgattccttgcggtgttgatgagtttaagcatgttcaagaagttatcgacgaggagactcatcgccgtcatagtcacggtggtcacggccacaacaaccataaccatcacaacaaccatttgcgatgtttctaaaga

SEQ ID NO: 164793 - DNA, 5656 bp, Arabidopsis thaliana landsberg
  unsure (1)..(5656): unsure at all n locations
agttaacaacctcgggcatgaaagacaaagcttcgcccaaaaacgctccaatacattcactcctacaaaaacccagtcctaactcgtaccgagccgagcacttcggaaactaaaacttagttctgatgttacactgaaaccagtcaaccgcctcggaaactaaaaccgagttatcataaacactggtgccgagcttttgcttcggctaaatacagtttcttatctgctttggtctcagtgcttagaaatccagttatcccgaataacctgtgttggggtcggattccacccaagatagcgagccaaccatatctcaacgcctcgggagacatcgatgagttatcccgaaccggggcacaaaacgcctaggagatctcgtcaagaatccacaccgaggcgatatcgaaaacgcctcggagatcttgtcaagaatccacaccgaggcgatatcaagaacgcttcggagaattctcatgaaatgtcccccgacccaacctcgaaacgcttcgggcataaaacctggcaaatcgtcccgaggcgggctccaagacacctcgggaacttatcctcgaataccgcggtccgagcatcctggaagaatcccacaatacaccgttcacgcacaggatctccgacgcgataatctcagatccaggaaaactaagaatcgagcatttcaacggtcttccgacccgaaagggaacttaaagtcgttcatcatctccgtggcccgagccaaattcagaccagaagaaagagacgccggtctctgtcacttgttcgtcgagcatttgaaagggccagccctagattggttctcgagactcgaaggaaattctgtggacagttttctggagctatcaacactcttcgtggagcaatattcggtgctaatcgatcccgacacattagacgccgatctatggtcactatctcagcagcctaatgagccacttcgnnnnnnnnnnnnnnnnnnnnnnnnnnnnnnnnncaaagtagaaggaatcaacgacgtggcggctctctcggctctgaagaaatccctgtggtacaaatccgaatttcaaaaggaactaaatttgttcaaaccactgacaatccgagacgccttgcaccgagcctcggattacgtatccaatgaagaagagatgaaactactagctaaaagacccaaaccgaccaagcaaacgcctcgcatcgataaacctcaacctggcgctccgaatcacaagaaaggcgcccaaggtgggacattcgttcaccatgaaggacgaaatttctccggagcccataattaccaggccgatacaccccaaggcgaagctgcccgagcccgagggcgaggccgcggacgaggacgcggtcgggaatcctacacgtggacaaaagatcaatccgcaggaaaagagcaagaatattgcgagtttcataagagttacggccatcacacttccagatgtcgtagcctcggagcaaggttggcagcaaaattcctggccggagaaattggtggaggtttgaccatcgaggatttagaggcagaaaaaggtaaaaccgagcaggtcaacgctgtggccaatcccgagcagacagcccccgcggcgaaccccgaaggacccaaaagaggccggggtaatcgcgaaacaaacgacgatgagccagaagctgctcggggaaggattttcacaattttaggggattcggctttctgtcaagacacggcagcatcaatcaaggcatatcaaaggaaagccgacgcgaatcggaacaggacgcgaccatttaaatggactgaatgacgaagtaacctttcacgaaagggataccaacggtttagaccgtccacacaacgatcccttagtcattacattgaccatcggtgatttcaacgtcgaacgagtcctagtcgacacgggaagcacattggacataatttttcttacaactctgcgagaaatgaagatcgatatgacgcaaatcgtgccaactccacgacctgtgctcgggttctcaggtgaaaccactatgactctcggaaccatcaaactaccagtccgagccaaaggaataacaaaaatcgtcgatttttctgttaccgaccaaccgaccgtgtataacgcgattatcggcaccctatggctaaatcagttccgagctgtcgcctcgacatatcacctatgcctaaaatttcccacacacgacggcgtgaaaaccatgtggagaaaccagaaaaatgctcgcatctgcttcatggcagcgtacaagctcaggaaccccgtcactgaatcgacggccaacgcgaatcataagaaggccaaacttggccgagccgaagaaaagtcaatctccgagcagttgtagcaattaaagaccgaagaagctcgggaatctacgataccaactcccgatccggtcatctcaatttgccttgacgacaaaaagcccgagcgatgcgtagaaatgggcggagatctaggagaagaactaacagctgaactcaccattttcctcaaagaaaacgtcaatactttcgcctggtccccagaggatttgcccggagtaagtgttaacatcgtatcacacgagctcaacatcgatccaccttttaaacccatcaagtagaagaggagaaaattgggtcgggaacgagcagaagccgtaaaagccgaggtagaaaagttattgaaaatcggatccatcaccgaggcgaaataccccgactggatcgcaaacccagtcgtagtaaaaaagaaaaacgggaaatggagagtttgcgtagatttcacagacctaaacaaagcttgcccataggacagtttcccattaccacacatcgatcgcctcgtggaatcaacctctagaaacaagctactatcattcatggatgcttttgctggttccaaccagaacatgatgaaccccgaagatcaagaaaaaactgcattctacacagaacaaggcatcttttgctaccgagtgatgccattcggactcaaaaacgctggggcaacttatcaacgcttcggcgacaaaatctttgcattacagatcgggaagacaatggaagtttacatcgacgacatgttagtgaaatctatggctgagaaagatcacatactccatttacgcgaatgtttcaagcagcttaacctatacaacgtcaaactcaatcctgcaaagtgccgcttcagagtaagatccggagagttcctcgggtacctagtcacgcaccgcggcatcaaggcaaattcgaagcaaatcgaggcatggttgggaatggcgttaccttagaacaagcgagaagtgcagcgcctaaccggaagagttgcggcccttaaccgtttcatctctcgctcaaccgacaaatgcttggccttttacgatgtgctttggggaaacaagaagttcgaatggacgacccgatgcgaagaagcttttcatgaactgaagaagtatctggcaacaccacccatcctcgcaaaacccgtaatcggagaaccgctgtacttgtatgtttccgtatcggatactgcggtcagcggagtgctagtccgagaagacagaggtgagcagaaaccgattttttacgtctcgcagactttcaccggtgcggaatctcgctatctgcaaatagaaaaacttgctttagcaatcataatgtcggctcggaagctgcgaccctactttcaatcccattccatcatagtaatgggatccatgccactccgcgccatcttacacagtccaagccaatcaggacgtatggctaagtgggcaattgagctcagcgaatacgacatcgagtatcagaacaaaacatgtgcaaagtcccaggtcctagccgattttattgtcgaactgcccactaaggaggtccgggaaaatccactcgatacaacttggcttctgcacgtagacggctcgtcatcgaagcaaggctcgggtgtaggcatccgcctcacctcgccaacaggagaggtcctcgagcagtcatttagattaaacttcgaggctaccaacaatgtagcctagtacgaagccctcgttgccggactcaatctagctcgggggctaaagatagaaaaaattcaagctttttgcgattcccagctcgtcgcgaatcagttcaacagagagtacacggctcaagacgaaagaatggaagcctatctgactcatttacaaaatctggcgaagaattttgacgagttcgagttaacaaggatccctcgaggggaaaatacatcggctgacgccctagttgctctagcctcaacatctgacccgagcttgagaagagtcatcccagtagaattcattgagaagccaagtattgagctcggcgaagaagaacatgtcctccccatacaaatcagcacggatcacaacgacgctccaggcgacaaccaagacgagtgcagttcatagtggatagagcccatcaaaggctagatagccgaaggaaaattgccctcagacaaatgggaagcttggaaactcaaagctcaggctgcacgtttcgttctagtagatgaaaaactttacaagtggcgattatccggacccttaatgacatgcgtggaaggagaagcggtttgcaagatcatgaaagaaattcacggtggctcgtgcagaaatcattccggnnnnnnnnnnnnnnnnnnnnaaataaaacgccacggattcttctgaccgacaatgataaaaaactgcgaaattttttcaaagcgatgcgaaaaatgtcaaatgccaacaatccatcagccagccgagctcttgtcatcaatcgcctcgccgtatccattcatgcgatggtcaatggatataattggacctatgcatccctcgaagcagaaaaaattagttctcgtcttgaccgattatttctctaagtggatagtttatgaatcttacgccagcataaaggacgctcaagtcgagagcttcgtgtaggaaacatatcttatgtcgccacgggataccttatgagatcgtcacggataacggctcgcagtttatatcaacccgcttccaaggcttttgtgataaatggagaattcgacttagcaagtcaacaccacgatatccccaagggaacagccaagccgaggcctcaaacaaaacgatcctcgatggattgaagaaacggctcgatgctaaaaagggctcgtggtccgacgaactcgaaggtgtactttggtcgcatcggacaactcctcgccgagccacaggagaaaccccttttgctttagtctacgggacggaatgcataattccggccgagatgatagtgccaagcctacgacggagtctatcccccgagaacacccctgataacactcaaaggttcctcgacgaactcgatctgattgatgaacgaaaagattcggccctggttcgtatacaaaattattagaatgaaacgactcgtcattacaattcaaatgttcggcaacgaagattccacgaaggagatcgggtctccggaaagttttccagaacactgccgaaccaaacgctggaaaactcgggacgaactgggaaggaccatacttaatttctaaagtcgtctgacccggagtgtacgctcgctgacttaaacggcaaagccgttccaagatcatggaacgcaatgcacctaaggaaatactacaac

SEQ ID NO: 164794 - DNA, 369 bp, Arabidopsis thaliana landsberg
tctgcattagttctttctgatgctccagcggaagcaccaacttcgggcggcgatggcttgttacctctaagcgaaaaacatgttgtaatccgcaacaagttaaaaaatagagaaattttgaatgtacattgtagatctagtgaagatgattttgggcttaaacatattccttggaatggtgcatggggtttcagattttatgttaacttttttaaaactacgaaatttcgttgtcattttacgtggcataatggtggatctcattatttttatatatttaaagcatcaagagatgatagtccagttggagaacttccgatttgaaaaaatgtatatgggaagtaggacaagacgatgtaacccctattt

SEQ ID NO: 164795 - DNA, 4314 bp, Arabidopsis thaliana landsberg
tttgtggtttcttttgtgtatgcttcaaatgacgagactgttaggcagactttatgggatgagcttgtggccctttcttcagacagtcgtgttgtgggaaaggcctgggctgtgatgggtgacttcaaccaaactctgcacccaagcgatcactctgccaccattagtcagaatgtggaccgggcaacaagggtcttcagggaaactctgcttgatgcctctcttgttgacctgaactttcgtggaagcacttttacctggtggaacaagagagccaactcacctatagcaaagaagattgatcgtgtgttagtaaacgatatgtgggctgatatttttccctctgctttgggcttctttgggaagccgcacttctctgaccatgcttggtgtgggatcctgtttgattcagctgcgccaaagacaaagaagccttttcgtttttacaactttctcctgaagaacccagactttgtgcctctcatcggtttcagctggctttctctaaacgtaactgggtctgcaatgttcagagtatcctgtaagctcaaagcgctgaagcatgtaataagagagtttagccgctataactattctgatctggaaaaaagaacgcaagagtccctggattgtcttttggaggcccaaggtagagtcctcgaaaacccaaccatccacaatgctgagcgggagatagaatggcaaaggaagtggcagactctctctctggccgaggagagtttcttcttacaaagatctcgtgtcacctggttaggagagggtgataggaacaccgcctactttcacaagatggcctcttcccgtcaggctgtgaatcacatacactacctctttgatgttaacgggtcccgtctggattccctaagcgccattcagaaccattgtgttgactattttgagaaccttctgggagggattcaaggtcctaccatgtttgctcaagaagatatttctgctttgcttagtgccagttcgcaagctcctattcagcatggtcttgactcccctttcacggctgaagagattaaggctgctttcttctctctgcccaagaacaaggcaagtggccccgatgggtactccgctgaattcttctgcagctgctggtcttttgttggcgttgagatcactgcagctgttgctgagttcttctcctctggccagttgctcaagcagtggaatgcaacctccctggttctgatcccaaagatcccaaatgcgtcttctgttgctgacttcagacccatttcctgccttaacaccgtctataaggttatctcctctctgttggctggtcgtctaaaagctgtcctcccatccatcattggccactctcagtctgcctttatgccaggtcgtctcctgttagagaatgttctcctggctacagagattattcagggctactctaagaagtccactgctcctagtgcaatgcttaaagttgacctgcgaaaagcgtttgattctattagatgggactttattattgcctgcctcagagcattgaacttccctagattactcatttgttggattgagcagtgtatctctacagcgagcttctctattgtggttaatgggcagtcaggaggctatttcagaagcacccagggcctaaggcaaggtgaccctatgtccccatatctttttgtcttagccatggaggtcttttctggtctgctgcagtccaggtattcttcggggtatatctcttaccaccctagaacttctgaattagaaatctcccatcttatgttcgccgatgatgtcatgatattctttgatggtgggggctcctctcttcaaggcatttatgaaacattggatgacttcgctggctggtcagggctccatatgaacagagacaagacgcagctcttctacgcaggtctgagccaaactgaatccaatgctttggcaagctatggattcactgttgggtcgttacctattagatacttggggctcccgttgatgagtagaaagctgaaagtttcagagtatgagcctctcatagggaaaattactgcaaggtttaacgcttgggctgtgaagtctctgtccttcgcggggagagctcagctgattggctcagttatttcaggcactgtcaacttctggatatctacttttgtgttgcctaagggatgcattagacggattgaatctctctgttcccgtttcctgtggtcggggggaactgaaaaaagaggtttggttaaagtggcttgggctcatgtctgtttacctaagaaagaaggtggtttgggtctgaggcggtttgcggattggaataggaccatgtgtttgcgtctggtttggctactcttctcaaacagtggctctctgtgggttgcttggcataagcatcataatatcagcacttctaccaacttttggaaccaagttgaaagtacaggtgactcatggagttggaaatctattctgaggttgagagaacctgcttcagttttcattaagtgcagtcttgggaatgggaggcgcgccagcttctggttcgatagctggactcctttgggaccgctctacaactgctttggctcctctggtcctagctccttgcgtgttccattaaatgcgacggtttcagatgtgtgcaaccatcagggctggattattgcaaacccgagatctgaccagggggtgtctctgcaaattcacttatccaccattgccttaccttcggatgacagtgggccggatgagttcgattgggtggtcgaaaacaagatctgcaaaggcttctcctctgctaaaacttgggcagtcactcggcctagagctgccatagttgattggtgggactcagtttggttcaaagaccacattcctaagcatgctttcaacatgtggatagctactttggaccgtctcccaaccaaaaccaggctctcttcttgggggcttcagattcaggatacttgtggcctctgctctctctccccggagagtagagatcacttatttctgtcttgtgatttcgccctctacttgtggaatgcggttagtttgaagttaaatatgcagggtatccacttcactttgtgggctgagcttctttcctggctgaagtcgggtaacagaaggtcgcctcctactctcagaaagctcattgcccaatcggtcatctatgcaatctggaagcaacggaacaatctgctacacaatcttgtctatgtccttccctcggtggtctttcgcgaagtggaccgcgaagtgaagaactgcatcactgcccggcgactcaacaagcgcttctccaggctaatgagtctttggttgcactaatccgttgcctctcataacctctcttttgctttcttgtttttaagcttttttgccaagaaaccaacctttaggtttgctctgtaaaccaactctttcattattatgatatttacaagttagcaaaaaaaaaaaaaaaatcaggaaatctccccaaaacctccgaagaataaggagaatatccttaggacgattatcctctagaaccgacctaaggataaataagaatcttccgaagaatatcgctagagaggcggtttaacgaccctatataaagtgtctcagggacttcacaaaaggggatctttggatactcagaagaaacacataactttatacctagtgagaactacgaatggcttgatcccttcacagggtacgtaggcaatctatcatggatgcagctatacctttttaaaaccctaatgtatttcataagagattagaacatcttttgtaatcgagtcttggatagaatacctaatgaagagaaattactagatttgttttccctctctaaacaaatctattgtgtgaatccttggttcaacaattggcgccgtctgtggggacgacaaagaactctcttcgcatatcattctacttgcggggggatttcccgtcaagatacaatgaaccagatgacgtacaaccattccacggattgccccggagatcagcgttccagggaatctaaccgtaactccatcggatatctctgctcagagttatcgccgtttttctgaagtcgatgctgtctgtttcttaacagatccgtccgaatagaccagttcgcctcggggccgatttcccggcaaatcacagggaatctcgtaagggttaatacatctacggatcgcccaaagagtcgtcttttcgaagaagttgacctcgccttaatcgaagatataaactgagagatataaacgtttacctcaagcaagcgcagccagtcataggacccaactctataaaccagtcagc

SEQ ID NO: 164796 - DNA, 467 bp, Arabidopsis thaliana landsberg
tctccctgcacgtggatgccgccgacgcccatggccatgtgcgcccgtagttcgtgtacaacgccggcggctgtcacggacaggacgtgtcgccggccatttcgtggacatcgccgcccaagggtacggctggctacgccctgacggtttatgaccccgatgcccaaggcggctggtggcattgggtggtagtggacattccgccggtcacccacgccattgcgcaacacgggctcttgccgccgggagcttacgcgctgaccaacagcttcggtcatgcgcgctgggacgggccctgcccacccaagagtgatccgccacatcattacgtgttcacgctgtacgcgctggatacgccggcattgggtttggacgcccatgccacgcgcggcgcacaagcccaggccgccatcgagaagcatgccatcggcaagggacgcgttaccttcacctatggacgtccgtag

SEQ ID NO: 164797 - DNA, 1046 bp, Arabidopsis thaliana landsberg
tagaactaaattacacttctctttcaatcatttgcgtctcaccggctaatctcattcctctgtcatttttacagttcttcgatcgaaaaccggatgtgagaagcctcgaggttcaaggatttgcagaggctcaaagctttgctttcaaagaaaaagaggaagaaagcttacaagatacagttctatttctacagatgctgcaaagtgaagacccctcatcgtttttttcaatcaaagagccaaactttctgacgctactgtctcttcaaaccctcaaggagccttgggaactcgaaagatatctttcacttgaggattcacaatttcattcaccggtccaatctgagaccaaccgcttcatggaaggagccaatcaagctgtgtcaagccaagaaattccctttagccaagcaaacatgacactcccttcttctacctcatcaccactcagtgcacattcaagacgaaagcgcaaaatcaaccacttgctgcctcaagaaatgactagagaaaagagaaagaggaggaaaacaaaaccaagtaaaaacaatgaagagattgagaatcaaagaataaaccacattgctgttgaacgaaacagaagacgtcaaatgaacgaacatatcaactctctccgggcccttctcccaccttcctacatccaacgagtaaataaccaaaagcatacatgaaagtttcaacctttaatcatcaaaaccttatcaaatgttgtcctgcagggagaccaagcttccatagtaggaggagcaataaactccctgaaggtgctcgagcaaatcatacaatctgttgaatcgcaaaagagaacgcaacaacaaagtaacagtgaggtagtagaaaacgcacttaatcatctcttaggcatttcgtcgaacgacctgaggacaacttttgaagatcaaacttgtatccccaagagcgaagctccagagatacaaagccatgtcagccttaaagttcaatgtgagaagaaacatggacaacttctcaaaggaatcatatcacttgaaaagcttaaactcact

SEQ ID NO: 164798 - DNA, 681 bp, Arabidopsis thaliana landsberg
atggagaatttatcgaatccagatgaaaacgacgatcatcaatcacctagatccattgaccaaaatgatcaatcagcagtagaaactccggtttactcgacgatgagcatagattcctttgtttaccctcgaacttgttcagagaccacttcagggttttcagaccagatagatgaaaccaacagcttctgtagtgaagcttctccttgtaactggcctgtccttactgaatctaagagctccaaatgtctctctggtttagagatgcaatcaaatgaatgtcttgtagtccaagaaatttatgaaccaggtactgtagttttctctctttctttcttctctgttttcttctactgctttttttaaatgtctcatgtgttctagggtttgtgcagaacttgagacaatgaaggaaagattcgctaagcttctacttggagaagatatgtcagggagtggtaaaggagtttgcactgcagtgactatctcaaacgcaattaccaatctttatggtaaagccattaagcatcattcacatagaggctatgatcttgttttagacaactgtaaaaatgatacttcggttgatattggttgagctacagagtctggcagaatctatgttagagccgttagaaacagagataagagctttgtggaaagagaatgaattggctttat

SEQ ID NO: 164799 - DNA, 1236 bp, Arabidopsis thaliana landsberg
atgaccaacaaccagatccccgctaccaccgttgacgcggagggaaaccctgttcctccaatccagacaaatgctcccgaagtcgccactcccgcagtcctagcagaactgaggagcatgatggcacaactccagaagaaggtgaacaacaatgagcaagcaaagcgatccttggcccaacagctcaaagcggctacttctcaaggacaggtcaggaccaatcgctttggcgcacgacactttcctgatcggcgagcagcggtagatctcaatccaacaagacttgtgttcaacacacccggtaacacaacgaggccatttcggcaaactcctccagggctcagcgaaacccgagcagaaccagtagcctcgggagagaatatgatggattaagggaaagaagccgacccgcgggatccaattccccgagccgaagttgacgaggttgaccagatcgaagtctccgatggcgaagatttggaagaaaacgttagatgggctgaggaatacgctaggaagctggaaataaacgccatcaaactctccctagccaaggcggaaaccgagatgaagctcgtacgatcacagatgcacaacgcagtctcctcagccccaaatatcgactgcatcctagtggaatcccacaacacgcctttcactcgcaagatctctaacgcgataatttcagacccaggaaagctaaggatcgagtacttcaacgggtcatccgacctgaaggggcatttgaagtctttcataatctctatagcccgagccaagttacggcttgaggaaagagacaccggtctctgttatctgttcgttaaacatttgaaaggaccagccctagattggttctcaagactcgaaggaaattctgtcaacagttttcaggagctatcgacgctcttcctcaagcaatactcggtgctaatcgatccgggcacgtctgatgccgacctttggtcgctatctcaacagctgaacgagacacttagggatttcctaacaaagttctgatccaccctagccaaagtcgagggaatcaatgacgtcgcgactctctctgctctgaagaagggatgtggtacaagtccgaattccgaaaggagttaaatttgtccaaaccacaaaaaatcttggacgccttgcacctgagactcgcattatgttcccatgaggaagaaataaaatggctgtcgaaaaggcacgagccgccgaaccaaacgcctcgtg

SEQ ID NO: 164800 - DNA, 1423 bp, Arabidopsis thaliana landsberg
acaagaatggttctttcgatgattccttgtcccttaatcttgaaaattcgtcaaaacctcgcttggatccagtctctatagccatcgccaagctgatgtatgggtcctccaatgatttcttgtcccttacgcttggaacttcacagaattcagagacgattactgcttcttccgatgaattcttgttctctgatcttggacatttgcagaaatttagcttcgatcccctctcaatggcctccaccaagccgaataaagctctgtccatcgtctccatcgaagctatttccaatgggtaccgttttttcttttcttagtagacaagaagcttctttttcaaagaagttttttaaatatcgcttcatccattattacaggttgaaacttcctgcgacaatcaaggtaattaagcctttcgttcgtctctggaggtatagttagtaacttagtatacacagataagtttgaattggtgtgtttcttgatctgcagagtcaggctaatgagatctttaaggtagtggagagttatgccagaggaaaggaacgaaacgtccttttggctgcttgtatctacattgcttgtcgagacaatgatatgactcggactatgcgtggtatatatatttgaaacctgaaagattcttgttcctttcttggtgtagcttctgccattgtagctgaatcagctttttcaaaaccatttgtgtagaaatatctagatttgccaataaagcctcaatttcggatattagtgagacagttgggttcatagctgagaaactggagatcgagaaaaattggtatatgagtatcgaaactgcgaactttatagtgagtttgtgcactaagcttttgttgcattgaccaaatagtcaatagctctagtttactgacattgtattcatctgcagaagcggttttgttctatatttagattggataaggaagcagttgaagctgctctagaagctgcggaaagttatgattatatgactaatgggtaacttacattatctgagcagttcctggaatttagtggatgagtaagctctaagcagatgtatgatgcagcagacttaaaacccatatatttctacttattgcagttgcagccgtagggctcctgtatcagttgcagcaggaatcgtatatgtcattgctcgactttcttatgagaagcatctgctcaaaggtcacatttaaatctcaatctatatagcagcccttaaagcaaagtctgatcagctcttctctttctctaacatattgacacataatgagttgcaggtctaatagaagccactggagttgcagaaaacacgataaaaggaacatacggggacttgtatccaaatctgccaacaatagtacccacgtggtttgccaatgcaaatgacctgaaaaaccttggagctccttag

SEQ ID NO: 164801 - DNA, 2287 bp, Arabidopsis thaliana landsberg
cggttctataaccattacaaggacgatatgcagagaatgaaggatatttacatggatgctttcagattctttatctcttggcctaggatttttcctcgtaagttcttagctcataagtttatgtataccactattttcttcgattaaagatattgatcagtgctcttcatacaattcaatagatttaaccttttgttttgttcatatccctaaaaatatagttggaaagaaaagcataggagtgaacaaagaaggaatacaattctataacgatctcatcgatgaactcctcgctaacggtagttatttaactattttaacttacatatataacctaaccttatggattgacatattctaatatgttccatattatgtatgaacaggaataacacctctcgccactttatttcactgggatactcctcaagcacttgaagatgaatacagtggatttttaagcgaagaagctgtgtaagtgattattaacaatcaatatattagtttttgactacttttcggataaattaatgttcctaacatatatgcatataaatatactatcttgcagtgatgacttcaaggattttgcggccttatgttttgaggagtttggcgaccgtgtaaaattgtgggtcacactaaacgaaccatgggtgtacagtattggtggctatgacacgggaagaaaagcccccggacgtgcctccaaatacatgaacgaagcagccgtggcaggagaatctggtctcgaggtttacactgttagtcacaatctacttctggctcacgccgaagctgttgaggtcttcaggaacaatcccaaagtacggaaaaggataattaatttcactttaacgagcatttttgtctttaaaaacatacttattgagatatacgacgtttattgtttggattacagtgtaaagatggcaagatcggtatcgctcattgtcccgtatggttcgagccttatgactcgaactgccctaaagacatagaagcatgcgaacgagctatggagtttatgtttggatggtgagtggttttatatcttaattaaaggttacatatttcaaaataaaactagtacatatgttttgttaagtttctaattatttttgtttgggtgctttctttaattaacaggcacatggatcctacggtgtatggagattaccctgcagtcatgaaaaaatcgatcggaaaaagattaccatcatttaccgcagcacaatccaagaagcttagaggatcttttgatttcgttggggtgaattattacagtgctttctacgtcaaaaatattgatgaagtgaatcatgacaagcccaattggagatcagacgcacgcatcgaatggagaagtaagtggagttgtgtataatatttatatcattttagggtttcttggctccaagctttttgttactgttttcttgtctcacaagttttcaatttctattggtacagaagaaaacaacgcagggcaaacattaggtgtaagaggtggttcggaatgggactttctatatccacaaggccttagaaagtttctaaattatgccaagaataaatatgaaagcccgaaatttatgattaccgaaagcggtaataattttataagaagttctttaattagtcttactcaatttaatccgggatatagtttactaactcttgttttgttaaaattgttcaggacactgtgatatagattatgagaaaaagcctaaactttctaacttgatggatctccaaaggacagagtaccacaagaaacatctccaaagcatccaacaagccatccagtaagtgtctcttctaaacatctccattataagtttcttgtgggacaagaaactttactgtgttgaaaccatatactttgtttcatactgacgatgaaaattgttttggtcagggaggatggggttgtagttgaaggatactttgcgtggtcattactagacaattgtgaatggaacgccggttatggagttcgatatggactattctacgtcgattataacaatggactaaaacgtttcccgaaaatgtcggcgatgtggttcaaagaattcttgaagagagaagaagaaattgaagattcagaagaagaagagtacgtgttgaagtcaacaatgaacaagaagagattcttattagcaactggttcatcagcttcatgctttattcctaagatgtctgaatcttctaaagccctcgaactattattctaggtttaattttgttttccttattaaaatttgatttgtcaaaaaaa

SEQ ID NO: 164802 - DNA, 528 bp, Arabidopsis thaliana landsberg; identical to SEQ ID NO: 38778

SEQ ID NO: 164803 - DNA, 490 bp, Arabidopsis thaliana landsberg
tagttaatctcatctgcttccagagatgcagtttagcagaagatctctgtagattatcagttcttcttgaccaatccaccgaaagagatcctccgattacttgtatttcgagtaatttcactctcttttgtttttgattctgcgtcgccctcgatgaaaatcgaatctgtcttcgctaaattggtcacattatctgtctatttgatgctgtgtatagttgccgatacgggaattggatgcaatttggaggaatttcagaatttgaggtgcccaagagaattcaatggagcgaagatttggggtcagttacattactagcatcttcagtattcgattattgaatgttaactatgaaattttagttttatttagaattgtacaaattgagctgaatttgttcgcgtctctgttatctttgtaatacgttaatgcgattctgactgtggataatgatgtgttgcagatgggttactctccgtcaaaacgactt

SEQ ID NO: 164804 - DNA, 3253 bp, Arabidopsis thaliana landsberg
cagaaatcttctgcagcttatgcaaatagagtttgtagtaaagtttgcatcttctttcatgtacagggcgcattctcatcggcctttttggaaatatagttcctaaaactgcaggtaaagttttaaatttagatcgaccaaaccttcacattgtattgtctacttgtccttgagttgtttcttccttactgaatcctcagtttctttcgcagagaactttcggtcactttgcacgggtagccaagtaacctttgttttcccctttaaaactcttgtctcctggcgtttagtttttcttcttctgagttctgagccaagagactcttttcgtttgatgtttatcctcccggtgcaggagagaaaggagttggaaacatggggaaacctctttatttcaaaggaagtagctccataggatcattcctggcttcatgattcaggtggagattttacacaggcgatggacgaggtggagagtcgatatatggagataaatttgcagatgagaactttaaactcaaacacactgggccaggtatgcgctaaagcttacctcgtatggccaataaactcaatacatactcaacgaaaggcttatggattgagtctgcgaatgggtttcaggatttttatcaatggcaaactcgggaccagactccaacggttcacagttcttcatcacaacagtcaccacgagttggtaagcaggcgtgatggttaattttgcttatcttcagtcttagtttcgcttctgttttccgacaatgtgattatgaaatctttctcgtaggccaggtatgcgatgatgaagaagcttgcactcgcagtagtaacttcagtatggatttttagcccgtattttcaatctcaggcagtcgaggtgttaacaaatcagccgcttcgaacaattcttcatagtccgagtaagtctgggagattggcaaagtcgacaatggaattaagtgaatatgatagagagtacaagagccgagtcgccatgaaggctcaagttttaatcgatttttaacagaattatcagtacttggcacgcaagagcaaccagaaaatcaaacttggaagttacacgtcgatgggtcttcgtcaaaacaaggatccagagtcaggatcaaattagagtcacccacctcggagatccttgagcaatcattccgtttattattcactgcatctaacaatgaagcggaatacgaggcattaattgccggactcaggttggcacatggaattggagctggtgaagtggtcgcctatagtgattcgcaactggctgttaaccagttcaatggagactatgaagccaaagactcaaggatggaagcatatcttgaaatggtcaaagatttggctaggaatttcaggaagttcgaactcattcgcataccacgaggagagaatagaaccgcgtacgcacatgcagctctggcgtcgacgtagatccggaagtaaaaagaatcattccggtagaatgcattttggaacgaatcattaaggaagagaaagaaaccctcgtcattacaagatcccgagctgtggcacgagatcgcggtgaacctgtgtttgaattgccactaatcaaaagaagaaaatcaaaaaaggcagccatacttgagcccaccgtgcaagcagaaaatgggatcgaggaaaacatcggacaaacagaagacacagttcctgaaaacatcgttgaagccaaagacaaaccgctagttgaagaagacatcctcgaaccaaatgagcatcccgagccagaagcacgaatatttcatgaaattgaccaaattctggctaaagattggggggctgattggagggagccaataaaacattacattgtgacaggcgacctcccaaagaataagtggcaggctaggaaaatgagaatcgttagcgcgaaattttgtctataaaaggattctttatatagacgtggtgtaagcgatccctatttactgtgcatttacggactcgaagtcgagatcgtgatgaacgaggtacacgaaggtttgtatggcagtcattcttcaggaagggctatggatttcaagattcaaagaatgaggtattactggcctactattatcacaaattatgttaagtatgctcagtagtgtaaacgttgccaactccacgcacctctcatccatcaaccttcggagttattctctttgatctctgccccgtacccgtttatgaggtggtcgatggatatcattggaccattgcacaggtcgacccgaggtgtacaatatctcttagttttaactgattacttctcgaagtggattgaggctgaagcgtatgtgaacatcaaggactcggcggtaaagaccttcatttggaaaaacatcatttgtagacacggtgtcccgtatgagatagttacaaataacggaccgcaattcatctcacatgagcttgaggctttctgttcggattgaggaatcaaagttagttattttactccacggtatccacaagggaacgaccaagccgaagctgcaaataagacaattataagcaatcttaagaaacgtctgaatcatttgaaaggaggttggtatgatgaacttcaacctgttttatgggcgtttcgcacgactcctaggcgttcgatccgagaaaccccattctcattggtatacggaatggacgcagttgttccggccgaactcaaggtgcctggacttcgtcgaacagaagctgctttaaatgaagatgaaaattcagcgatgctagacgcctcgttagacatcatcaacgagaggcgagatcaagccttaatgcgaattcagaattattaacaggcagcagctcgatattacaattcaaaaatcaaaagcagaccattctttgtgggtgactacgttctaaagcgtgtgtttgataacaagaaggaagaaggagcaggcaagctcggcattgattgggaaggtccctacattgttaccgaaatggtctggaatggtgtttacagattaaaggatttagaagacaggccagtccaacgtccttggaaagtggtgaacttaaagaaattttatggttaaagtaacacgtgtttttttacatgaactacggtgtggcttgctcccaaaatgggtacgtaggcagctcggaaacgagtttagttattaataaataaaaaaagatttatattaaaaaaaaaggagttggactctacgaacgaacaaggcaaagaagttcgtctgtgcgaccgtacaaagataagggc

SEQ ID NO: 164805 - DNA, 1529 bp, Arabidopsis thaliana landsberg
atgggtaatgtgacgtcaaacatggctgcaaagttcgctttcttcccaccgccaccaacatacgacgtgagtaaagacgaggagaccggaaagcttatgttcaccgggataacaccagaaaaaagcatggatgttcatcagcttaccaccaaatctggcaacaaggtcattgccacgttttggaaacaccctttctctagattcactcttctttattcacatggcaatgccgcggatctcggccaaatggttgatctcttcatcgagcttcgagctcatctccgcgtcaacattatgaggtttatacatacaaataatcagaaaacacttctctctttgttgataatgatgaacgaacttgaacctgaacttctttatatgtgattgaaccaggtatgattattcaggctatggagcttctactggtaaggtgtgtcaaaatgcatcttctctagtaaaatgcttaatagatttaagcccaataacttaatttcatcgaaaaagttacctagaaatcttttcataggttgttggaatgttctgtattaatctcatagagtctaggaatattgaatttttaggtgatgggattgagaattttctccggttttcatttgactaattgtggttttgtatgttgtgtttgtagccgagtgagtacgatacatatgcagatatagaggcggcgtatgagtgtttgcagacggattatggggtagggcaagaagatttgatcttgtatggtcaatctgttggcagcggtccaacgctgcaccttgcctctaagcttccacggcttagaggtgtcgttcttcatagcggcattctctctggtcttcgtgttctatgtcatgtcaagttcaagttttgttgtgacatttattcggtatgaaaactcgttgctgcttgttgttttggcgatttaagtgcttcaagtcctagtttaggaagtgtgaatgacaataccatgctactttagttaaataagaacagtttcttttggaaccgtgttttacttatggatagtattttacatgaacaacatttcgtataagtcctatggattgatgaaagttaagataggttatgaaagtggctaaggtggaagcttaccagtttagaagtggctgtggctaatatgaaagctaattggtttagaagtggctatagctaatttgtaaggtaaccggtcttggggttctaacactatcctcttactgatttgtaatgtttaattgcagaacgtaaacaagatcaagaaggtgaaatgcccggttcttgtcatacacgtaagcaaaatctgtctcatatccatgtccttagcctcggccctatttgaatccgtaaaactttaccaatcttactgtctattgttacacagggaacagaggatgatgtggtgaattggttacacggaaacaggctttggaaaatggcaaaggaaccgtatgaaccgctctggattaaaggcggtggacattgcaaccttgagatatatccggactacattagacacctataccggttta

SEQ ID NO: 164806 - DNA, 1428 bp, Arabidopsis thaliana landsberg
atggcaatctcagaggcatcgaaatcgagccacgagctcccagtaacaacagccgaatccagcgggaagaaagcaaccgcaaagaaactgactttaatccctttggttttccttatttactttgaggtcgctggtggtccatttggtgaagaaccggcggttcaagcggctggaccgcttttagcgattctcggtttccttatcttccctttcatttggagtatccctgaagccctaatcactgcagagctctccactgcgtttccaggtatttctcaattcaaatccaaatcacacaaagatcgtaactttatatgtgtagacgacatcactaagaacaccactgcttatctattagagattttagtggaaggaagctactttctgatttgttacactttcttcaagaattagggttgtaatttggatcaaagcctgaaacttttctgatttgatttcaaaattcatgattttggtgtattaggcaacggagggtttgtgatatgggcgcatcgagcatttggctctttcgtgggctcaatgatgggttcgttgaagttccttagtggggtgattaacgttgcttcgtttcctgttctctgtgtcacttacttggataagctcttccctgttcttgaatccggatggcctcgaaatgtctgcatattcgcctcgacggtggtcttgtctttcttaaactatactggcttagccattgtaggttacgcagctgttgtgctcggtctggtgtctctctcgcctttccttgtcatgtcggctatggctatccctaagatcaaacctcaccgttggggtagtttaggaaccaagaaaaaggattggaatctctacttcaacacactcttctggaacttgaatttctgggacaatgtcagtactcttgcaggggaagtggacgagcctcaaaagacgttccctttggcgcttcttatcgctgtgatcttcacttgtgtagcttacttgattcctcttttcgctgtcacgggtgcggtctcggtagatcagagcagatgggaaaacgggtttcacgcagaagcagctgagatgattgcagggaaatggttgaaaatatggattgagattggtgctgtcttatcgagcattggacttttcgaagctcagttaagcagtagtgcttatcagctggaggggatggcggaattagggttcttgcctaaattctttggggtacggtcgaaatggttcaacactccttgggtcgggattctaatctcagctctcatgtcgctcgggttatcgtacatgaacttcacagacatcatatcctcggcgaatttcttgtacactctagggatgtttctagagtttgcatctttcatttggttaagaagaaaactacctcagctaaagagaccttaccgagttccgttgaaataccgggctggt

SEQ ID NO: 164807 - DNA, 1627 bp, Arabidopsis thaliana landsberg
  unsure (1)..(1627): unsure at all n locations
cttttatatcaatcggacaaaaccgtggggtcgaattctcagtaaatgctttctctgtctctttaagtacttcattaagcttttagtttttcgtgctgtagcgtatttctctcacccgtgtactttttcagcgtcaatttttccttactgacacgaaggacaagttaaggaacagagtttgtgtgcgtttatgttcctttaatggtcaatattgttgtgtgttttacaggcagaagaggagccggttttgagtagcttcttgtatgctagtatcttgtcgcatgactgtttagagcaagcattgagttttgttctagctaaccgtctccaaaaccctaccttgttggcaactcagcttatggatatattttgcaacgttatggtacatgacagaggtattcaaagctcgattcgtcttgatgttcaggtaaaaacgctatctcgtatcggtgaatcttccttttgacactgatattattgtctgagaatgtgacttcagtgtaatgttttttttttttggtccattgaaggcattcaaagacatagatcctgcttgtctatcgtatagttcggctattttacatctgaaggtagtctcttaagcatcagtagttgctgatttaaagacaataacatctcttacaccgatataaaatgattgctaagtgagttttcatgtgtattttaccagaatagtttgttccacagggctatcttgcactgcaagcgtatagagtagcacataagttgtggaagcaaggaagaaaactattagcattggcactgcaaagccgagtaagcgaggtaagagtaacttctacaacttctttggttactgttatagtcttggtgtacaacgttaacctctgatccatgtcaatggtttctctcaggtttttggaatcgatattcatcccggtaaagattttagattcatagctaatagcttgtctatgcttttacatctagcatctgaataactttggtttctgttttttttgctcagctgcaagaattgggaaaggaatattgttggatcatggaactggtgtggtcataggtgagactgctgtgataggcgaccgtgtctcaattttgcatgtacaaatccgttctctaacttcatttctccaaaactataaagaactgttgatgttataaatgctagcttatattttcatgttacagggtgtgacattaggaggaactgggaaagaaaccggtgaccgccatccaaatataggcgacggtgctcttcttggagcatgtgtgactatacttggtaacattaagataggcgctggagcaatggtagctgctggttcgcttgtgttaaaggatgttccttcgcataggtatgaaaccactgacatgcatctaaatatcaatctcgttgagcttttttgtttgaacattgctcaaattgacattttctctcgggcgtttctgaagcatggtggctggaaatccagcaaaactcatcgggtttgttgatgagcaagatccatctatgacaatggagcatggtgagtcttgattgtgaaaatagtattctgattttgttctccattgctcaggctttcgtagtgtgccaatatgctagttgannnnnnnnnnnnnnnnnnnn

SEQ ID NO: 164808 - DNA, 758 bp, Arabidopsis thaliana landsberg
atgcttcgatcatggtcgatcgcgaaactacaaatcagtaaagtttattcatccgattctcgcttttgcacacacgttctcttcaatggagttgtcagacgacaattcacgagcactagcggcgaaagaagaacagtgatgagcttcggtgacggaaaccttggcgctcttggtctttcatcatcgtcgattccaggcatgggaatggaagcttacgaacccaccgtagtttctaatttgccttccgatatttcttccatatccgctggtcattaccattctctcgccgttacatgtagcggtgagatttgggcttggggtcgcaacgacgaaggccagctcggtcgaatcgtaattgattctaggtaaaatctctacctgagaacccaattttgaattgatttcatcagagtaaagtagtgattgaacttgaatttgataggtcaattagtgagaatactttacgaatcattaacatgaatttgctagtcatgatgttatttaggatttggtgggtctcttatgctagtaatgctactatacctgatgttttcatgatgtgattagtagagattcaaggagtgaacctaagagagtggaaggtctagagaatgtgaatgtccaggcagcgtttgcgtctggagttgtttcagctgctattggagatgatggctctttgtgggtttggggaagatctaaaagaggacagcttgatcagaaaaatggtatcattgaagctcgagttccttcgagagttg

SEQ ID NO: 164809 - DNA, 3117 bp, Arabidopsis thaliana landsberg
acccaatcggtaggcctacatttaaatatgtagagatgtttttagatttttataaattcctttcatttccttggggtagagggtcttttctgaagactgtagtaggaatgagacctgacaaacgaaatctcggtaagtccactggtaaaagacagctgacaactgaccctatcaagagtttggtgagtcaacttcagcagaaaacattccgtttgaaaggtttccccctagccttgcagctcatagcatttcgtaacatacctggactgttagatttggtgttagatgactgaacctctaagacaatcctcctttggaaacgattaactcatccaaaacaagttatatcgcttcctcagattcatgctttggaaagcaaccttaaggtatttttctaacctaaaagttataatatgggttagaaactataatattctctttctataacaatataatattcagtcttatttactaataataaccttctatttttcaatagagaccagtggatccgcttataggtgaagatattaatgttgaccaaagttgggcagagtgggatgacgaggtgaaagacaggaaagttgcttacatgaatgatttgatacggaaagctcatcaattcaaaaaaagcgattggccaggaggtgatgctacattgccatcaattaaaattccaaagaagaagtcatctgttgttcacaaaaagcatattgtggatcgtaagaagagactacgggtgaagtctgaccctcccaaatccaagcgttggtattcaactcgttctaatccaaaactcaagctatctgatgatgggaagtctaggttgctcgttaaattacaaaacaaggtggaagagctatcaaatcgtgtaatgaaccttgaaaagaaaagaaaatctgtcagattcaagcggtccagaaaactctctttcagttttgttccattttcttctagatcaaagcgcaataagtcattggaggtacctactcaatctcaaacctctgaggtaatcaagatttcaaactgtttataatatttgaaccttatcatctacttatacaattttcaagttttaacgcatactaaaacttttattttcctcaagaaatccatttcattcacacacgctgtttgatgaccagaatgaggattttgatattgaggtatgctgataaaccttatgtttttattgtttattcttttaccacatctatatgtacttaatcaatttttatcaatcttgctagcatcaatctgagcaaaaggatgattcatgggatgtttctcctcctctttcccacccttctatgatagtccaagatgatgaattcaagaagtttcaagatgaatccattgatagaacaattttgacaaacacggttagtgtaatatttaatttccaatatctctttggtagaattgattacgtcaaaatattttgtttcaggtgattactgatgaccccatggatgtcaatcatactccacatgaatcacaggattctgaaaaggatgatgcaatagaggacaatccaatttatgacactggtgccaaagatccaaatgacaatgaaccagatgatgagggaaaaatccaggtacttttataaatacaaacacaacacatcatacactttatttaacagtttataggatctgacacatttgactattctactttacaatcagtttgattcaagtgcaaacgtaagcaacaaaaaacaatcacctctcgaggaacacaatattatggaggtaagttaatacatcatttggtgcaacacattgtaaatggttggtgcatcacagaccgtaaacataataattgcacatctgcttagttattatggacaggattttgtggatacttacgagtgtactttaacattcaggtcaatttggaggcgggtgaagcatctcaatcagtggtggagccgcaacccgatgaccctatggaggtatacattttcaactagttccttgatttattggacaccggtgagggatgcttcatcactcagtccttgtccaaaaaaatatttacaggccaattctccagactgtaattctccaaatggccatgaagcagatgatgagggaaaaatccaggtacaaaaatacaaacacaacacatcaaacaatttattttacaggttatagattctcacaaaattgactactgtactttacaatcagtttgattcaagtgcaaacctaagccaaaaagaacaatctcctctcgagctagacaatattatggaggtaagcttatatataaaccaaattattgtcagaactttattaaaccaaattattgtcacagcccttaagacatatctgtttgtaattcataattcaggaaaccttggagacggttgaagcttctcattcagtgttggagacgcaacccgaagaaaacattgacgatgatcatatgacggaggtaagctaatacataatttgatttaacacattggatttagtccttaatataaataatgactcttgtgcatagttattgtggacatgattttgtggatacttactagtgtacttcaacattcaggttactttggagtcagctgcaacatctcactcagtcgaactacctcaacccgatgaccctgtggaggtatacatttttaactagttccttgctttatttgacactggagagggatgcttcttctatcagatcttttccaaaacaacatttataagccaattctcaacagggcaatgcagcatctcattcattgctagagactcaaccagaagtcaacagcgatggtgattctatgaaggtatactgtaacaatcatcatcaagttttatgtgttgaggctcttgtgtaattggacatgattttcttgttacttcataaaatgtaggcaaaatttcttttatttattctaactagctacatgtttacatcaacattcaggttactttggagatgcctgcatcatcgcattcagtgtcggaggctcaacccgaagaaaagattggcaatgatcctatggaggtatacatttctaactagtttcaactaatgatttacattcattgatttattggagattgtagaggtttgatgcatctctcacgcattatg

SEQ ID NO: 164810 - DNA, 1838 bp, Arabidopsis thaliana landsberg
tactgtttgataattatgcaaaaaaattatactttgattcttatcttgagaatattttttgacttttcccaaaccgtgggaacaagattaatagaatcatacgacacagttagtatgtttcatggaacatgataccactaattaaataattaacttatacacacactgaaagaatatactgggtgagatcatcacttccacttacttaagatgtcattataagtctatatggaatctatagaacattactatttgttcatgcacatgtaaatttaatacagtaattaacgattttgggtttttaatataaatttcaggttagaaagcgtgaactttaagaaggtacgaagcatagccaaagttgtaggaacggtgatcacagtctccggagcacttctcatgactctctacaagggtccaatagttgactttatccgattcggcggtggaggaggaggaggtagtgatggtgcaggaggatcccacggtggtgcaggagcggcagcgatggacaaacactggattccgggaacacttatgctgttgggaagaacttttggttgggccggtttcttcatcctacaagtgagtaccaatcaatttacaatttccggttctcatataactaaccttttgtaagaaaaaacctaaccggttttgtcttcttatgtaaaacgcagtcgtttacactgaagcagtacccagctgagctgtcattaacgacgttaatatgtttaatgggaacgttagaaggaaccgctgtttcattggtaacggtacgtgacttgagtgcttggaaaatcggcttcgactctaatctcttcgccgctgcttactccgtaagtacaattaactaaatttaattttatatgattaatgatgataattcaaagtattaattaattaatgaacaaaactaatggtgattagggggtgatttgttcgggagtggcgtattacgtgcaaggagtagtaatgagagaaagaggaccagtttttgttgcgacatttaatccactttgtgtcgttataactgctgctcttggtgttgttgtcttgtctgaaagcattcatctcggaaggtatttattcttgttatctaaaattagtataaaatttttggacccttttttttttttgtcaaacaaactttgcattaacttaaagcctcaaaagaggtaggttcatacaagttggaaatgagataatacaaatacaagtaggataaaggttccatgagttttccaaagagatactcaaaatagagaatcttgtagtgtttgaaaagtcttttggagccatagtggattcgaccatggagatgagctccgcgaaatcctctaccaagcggtggtcatagacggctcgcgcaactaacaacgcatacgagcttgtggtgaaatgctccatgaaagaggtttcgagataagcaagactaaagaagcttcggtaaccaccactccttggaggtcactgtgtgcaatgcagctgctaaaattttatctgctattacttaattttataatcgcatattacttataattctcttttacttaattttatctgctaaaatttttggaccctattacttaattttatctgctaaaattttcagtgtgattggaacgctatttataatcgtgggcctatacactgttgtatggggtaaaggcaaagacaaaagaatgacggatgatgacgaagattgcaaaggacttccgattaaaagtccggttaaaccggtagataccggtaaaggcttagccgcagaactggagatgaaatcaaaggaaggtcaagaggcaaaggctactactactactcaagttgagatttga

SEQ ID NO: 164811 - DNA, 1260 bp, Arabidopsis thaliana landsberg
atggttttttcttcatttcctacttatcctgatcattcatcaaactggcaacaacaagtaagttcatgatccgattatctcttcttttactctaaatggcttttgttggctttctttggttttataatttatgagtactcaagaaccaatttaaagaagaagaaaaaaaaacataaagagagattaaacaaacaagaaaaaaggataataatattcttgttccttttgtcacttttaatctttgtatatctgtggttgaatttgaatatactcataaaattaattctttctttccttctttatcaaaattttcacatattctaaaaactttttgtgttgtttttgaatcatttcttcctctctttagcatcaaccaatcacaaccaccgttggattcacgggaaataacatcaaccaacagtttcttcctcaccatcccctcccaccgcaacagcaacaaacgcctccgcagcttcaccacaacaacggtaacggtggagtcgctgttcccggtggacctggcgggttaatccgaccaggttcgatggcggaaagagcaaggctagccaacataccattacctgaaacagccttgaagtgtccaagatgtgactcaactaacaccaaattctgttacttcaacaactacagtctcactcaacctcgccacttctgcaaagcatgccgtcgttactggacacgtggcggtgctctaaggagcgttcccgtcggtggcggttgccgtagaaacaaaagaaccaaaaacagcagcggtggaggtggcggtagcaccagtagcggtaacagcaagtcacaagacagcgccacgagcaacgaccaataccaccaccgagccatggctaacaatcagatgggaccaccttcttcgtcatcgtctctaagctcgttgctgtcttcttacaacgcagggttaatccccggacatgatcataacagcaataacaacaacaacatacttggacttggatcatctttgcctcctcttaagctcatgcctcctttagacttcacagacaacttcaccttacaatacggtgccgtttcagctccttcttatcatataggcggtggaagcagtggaggagcggcggctcttttaaacggttttgaccagtggagattcccggcaacaaaccaacttcctttaggtggtttagacccgtttgatcaacaacatcaaatggagcagcagaatccaggttacggattggttaccgggtcgggtcagtaccgacctaa

SEQ ID NO: 164812 - DNA, 3152 bp, Arabidopsis thaliana landsberg
tctaacgatctctgatctgtttgcataaaattaagttatttgcagatgtgtgccattttcatgttaataaccttcttggttactcctgtttttagggcacttttctgccattcgtggttccacgaacagtatttcaggggttcctatggacaatctggttgactgttctgtgtactctaaaggtatggtatacaggttgcataattggctttcttgatttatgatcaggaagtgctgatttttttttctagacaccctaatgtgtagtaaaatgttgtgtagatgtttcaagctttggctagagatcggcttgatcgattgaatgcatctccttcttctactccttggacatactttcgtgtgtattcagcactgttcatggttctctctactgatttgtgctggtatttccttaactctttggtatcatgtgaaattttgagttgcggctttttcaacccgttttttttttttaatatgagtgcactattttccttcttctatttcaaaatatgagtgtaaagttttcctcctagtttctgtctctggaaccagatatatattcttaaaataaaataaagtatagttgtatatcagaggagacaaaacaaattaaccctaagtctctgaatggtgcacatgactttcatgatgcatatagttctagtgaaagcagtgtaattttctgctaagataaaacagagactttagtatgttctgagggtgcatatgctgtagtgagcggagaaaatattgtgttctagagttcccgtatttattatactgcagttcaatgaggagaaaatagggagtttttaattcatacaccagaccctctggattatcatattctgttctagtgattgaagaatgaacttgttcgtctctggatgttaattttgtcgaatcttgcaggataaagctttcccttatgatatacaatacagttggttcgtctgtgtatttactgttactttttgagccatgcagtatagcttttgagaccttgcaggtacttgagtaagatagttgtattcattgtttatgttacccttctttgtaaccgtacctagaaatatagagggttgatcaatcgcataatggatcatttttttcaggcgttgttgattcacgggtttcaactgcttgatatgtggatcaaccacttagcagtcaagaattcagattgccagagatcaaagttttatgattccatgacagcaggttttgtctttttctcggcatatgattgtaattatgttttctgttagactgcaggcgtgcattatttgaaattttttgtcctgtttggtgttcacattactaacttgacctcttacccattgaataggctcgttattggaatggaaaggcctcctcaaccgaaatcttggtttcttcctagacatggctaccttggtaatggccctcggtcattatttgcacatctggtggctccatggaatggccttccatctggtggatgcagttttgtttctcaacatacgtgtaagtctgttaattgactttctttgtaaaagtgctactctactggtttcttaataggcacatacctaattgttaagttctttgtgtgttcccgtttgattttgacaggccttgctaagttcaattttgaaacgaataaaaggatacatcaaactgagagtagctttaggtgctcttcatgcagctcttcttgatgcaacttcagaagagctacgggattatgatgacgaatgtgctatatgtcggggaagtttctgcttgatagtaattggtctccttacttttttttagtagctcactaatcttggaaccattatgaatgataggaaccaatggctaaggctaaaagacttcactgcaaccacctttttcatcttggctgcctacgatcatggtatgctagctctgttatgttggcagccttgtgctattgcggttctgtgagaactgtaaatcataatgatattttgactctggcaggttggatcaaggtttaaatgaggtttactcttgtcctacttgccgtaagcctctttttgttggtagaactgaaagtgaggcgaatcctagcagaggagaagtctcaagcgatgaacacttagcccgtcaatttgagagacaaaacaattctgtgcatgcactaaccactggaatgtttccaactgagacgccaaatttcaccgaaagtgatccttggaggttgggttcattgttccatatgttttcttcttaagtgcattaaagtaacagtgtgttcataacaagatcatcaacttcctgtggtttcctatccctgagctaaaatactatgcattctctaattttgtctaattatacttggttcttttgggtagcaagtaattgttggttttgtgaggaccaagcttgtgcccccattgattttctttttaaagactggctttcttaatcgggattagcagttctcacctttttctcatgccatataggaattcagaggtggatccaagctggctgcaaacatggtcagatcagggtgttgatgttgtgggttcctctgcaggctccagatccgttgggctggggcaggttcaattgatgatgaggcatcttgcatctgtaggggaaggttctgctcagactacacttgacgatgcttcttggggtctctggccaatgaatccttcgcaagcatcgacttcatctacatatgttcctcctggtgctggaggaagaacaggtggactgcatctaagaactgtctcccgtgcagcaaataacatggcgagtatactagcaatggccgagacagtaagggaagtcctcccacatgtgcctgatgaaataatttttcaggtaaatattagatgcatttattggtatgtgtctgctttgacaagcaagctacttgctgggttgaattgctaggatatttagttagtttcctgcatcaaatgaaaggaaaacatttgtatatatgaatttgtgaagcaaaattttcattaagaaattaatgggctcaatttttctgagtttaatggccatttgttgtcatttgtttgcacacgctgggtattgaagtgatgattgattcaatcttctttcaggacctgcaaagaacaaattctgtttctgttacagtgaacaatcttctccagatgtga

SEQ ID NO: 164813 - DNA, 2391 bp, Arabidopsis thaliana landsberg
cccggaacccagattatacaagttatgcgtatagtctaataacccatgtggcgtctgagtacgtgaagcccattagttcaactttcactagctcagtgctgtacttgagtatgtttccatgggatcatcactgcattcgcagattataaagcttggatcttttcagatgatgtagatgtactccagttgaggggacttagaatctacgaggacaatcttcttaaaagggcaactatttaaattttcttctggaaaacctgaagctttctttagcttttttatgccactgaacgaaatagcttcttccgttgtagaacttacacggaaatgcgtctcgatcacggtactaaaacgggcgcgtcagctccacgctctcgtcctcaccgccggcgctggcgccactaccgagtctccgttcgcaaataacaatctcatctcaatgtatgtaaggtgtggttcactggaacaagcacggaaagtgttcgacaaaatgcctcagagaaacgtagtttcttataatgcgctttattcggcgtattcccggaacccagattttgcaagttatgcgttacctctaataacccatatggcgtttgagtacgtgaagcccaatatgtcaactttcactagcttagtgcaagtatgtgctgtgcttgaggatgttttaatggggtcatcattacactcgcagattataaagcttggatattcagataatgtagttgtccagacatcggttttggggatgtactctagttgcagcgacttagaatctgcgaggagaatatttgagtgtgtaaataatgaatatacggttgcttgtaacacaatgatagttgggggttttaaaaatgataagataggagatgggcttatgttctttcgaaacatgttgatgtctggtgttgatccaacgcagttcacgtattcgattgtgttgaatggttgtagtaaattgggaagctattcactggggaaactaatccatgcccggataatagtctctgatagtttagttgatttacctctagataatgctcttcttgacatgtattgcagttgtggagacatgagagaagcattttatgtgtttgggaggattcataacccaaatttggtttcatggaactcgattatttcagggtgctcagaaaacggctttggagagcaagcgatgcttatgtatagaaggttgctgaggatgtccacacctcggccggatgaatatactttctctgctgctatatctgcgacagcagaaccagaaagatttgtttatgggaagcttcttcacggacaagtaacgaaattaggatatgaaaagagtgtgtttgttggaacaacactcttgtccatgtacttcaagaacggggaagctgaatctgcacagaaggtctttgatgtgatgaaggaaagggatgttgttctctggactgagatgatcgtagggcattctagactaggaaacagcgaattcgcggtccaattcttcattgatatgtacagagaaaagaatagaagtgatggtttttccatgagtagtgtcttaggagcatgttcagatatggcgatgctaagacaaggtgaagttttccattctcttgccataaggacgggattagattgtgttatgtcagtatgtggagcgctagtagacatgtatgggaaaaacggcaaatacgaaactgcagaatcaatattctctcttgtttcaaatccagatttgaaatgttgtaattcaatgctaggagcttacagtcagcatggaatggtagaaaaggctctgagcttcttcgagcaaatactagaaaacggattcatgccagatgctgtaacatacttgtctttattagcagcctgcagccacaggggatcaacgaaggaaggtaagttcctgtggaaccaaatgaaggaacagagcatcaaagcaggttttaagcactattcttgaatggtgcctttgccatcaaaagctgggttattagacgaagcactggaattgatagaacaatctcatcccggtaacaaccaagcagagctgtggagaactctgctaagcgcatgtgttaacacaagaaacttgcagatgggactctatgcagctgagcaaatactgagacttgatccagaagacactgcaacacacattctactatcaaatttatatgcagtaaatgggagatgggaggatgctgcagagatgagaaggaagattagaggattagcttcatctaaagatccaggattgagctggattgaagtgaacaacaacaatacacaggttttctcctcaggagaccagtcgaacccagtaataataagtcgagcgcgagatgaattgaatagattaaagagtaatatgttgtgcaaatcatcattcaatagacttgt

SEQ ID NO: 164814 - DNA, 1503 bp, Arabidopsis thaliana landsberg
gcgtggaaatcatctagtgttcttagaaaggcttttgactagataccaaaacagaggagtttcagcgatacgtcgaacaccacacacttgggattgatcaaagacggatggcaaaaacgagagaaaggatataaaaagtgtaattatgactcaagctacaaacaaaatggtggagatgtgaattttgggtaaacttcaattgacttaaggcccgagtaatctttaatgaggaggttaaagatttagataggtttagtatattctattaggtattaggagttatctaatcctaattgtattaggaaaaggcaaagttgtgcccgtatataaggatctatttgtttgagttgtaaccataagagttgtgtgagaatattgagagaccttggtgcttagttttgaaagagagttattcttttaaaagcttgcctagtgttcttaagaaattttatcaatgcaggttggattttacgtgatgtggaaggttattatatagaagcaacacagagcaaagctcagatctgcaatacgattttggaagcagaattacaatcgctactcatggcgatgcaacacatgtggattcgaggtcatcggtatttattctttgaaggcgacaacagcaaaatactgaagctaatcactggtgaaacaaggagcttcacacttcataatttgattcaagaaataagagtttggcaacagaggttcacaagtatgaagattcaatggattccaagaacaagcaacaaggcagtagattgtttaacaaaaaccagaagatataatgatgttgcttttacaaatcatttttatgtaccttgattccttgtaaacatcctccatgaggatcacatatcatcatcttaatatgacgccacacacaaggagaacgttccttcttcgtctttacaatgtcctatgcttactcaatctaactacacagtatgggccatgcgaatgagggttatgctgcgagtgcataaagtgtgggatacgattgaacccggattaaccgacgataacaagaacgacgttgcaacagctttgatctttcaatcaatacccgaagcccttacacttcaagtaggtaattaagggactccaaaagatatttggaacttgattcaaagtcgaaacgtaggagcagaacgtgtcaaggaagcacgtttgagtattgtgatgtcttattttgagaagataacaatgatggatacggagacagtcgatgattttgcaagtaggctatcgcagctgtcatctaaatcatcgactcttggccaagcaattgaggaaacaagactggtgaagaagtttcttaatagcttgccaagagacaaatacatacaaattgtggctgccttggaacaagtacttgacttaaaagttataggtttcgaagacattgttggacaaatcaaagcatatgaagaaagaatcaacaatagcgatatagctcaaattgccttaagcttactccctcaaataagagatcgtcgttag

SEQ ID NO: 164815 - DNA, 2327 bp, Arabidopsis thaliana landsberg
ctttggtagcagaaactcgttttgcgggtcaccgaccaccccaagatcagttctaccagaatcgatgatgggttcaccgggaagagttggagactttgcaaactctgcatctcatcttttatggaatatgagagttcaagcacttgaaaagcttagtcctatcgatgttaaacgactcgctatccacatcttgtcacagaaagaagctcaggaaccaaatgaaagcaatgatgaagatgagattagtattgttgaagagatcaagcagaagaaggatgaaatagagagcattgatgtgaaaatggagacagaagaatctgttaatcttgatgaagaatccgttgttcttgatggcgaacaagacactatcatgaagatctcttcattggagtcaacatctgaatccaaactcaatccttcagaaaaatatgaaaattcatcacaacttttcccgccaccgccgcctcctcctcctccactatcctttataaaaactgcttctttacctcttccatcaccacctcctactcctccgccaattgctgacatagcaatatcaatgccacctcctccgccgccaccaccgcctcctccagcagttatgcctttgaaacactttgctccaccaccaccaccaccgcttccaccagcagttatgcctttgaaacactttgctccaccaccaccaccaccgcctccaccagcatttaagcctttaaaaggctctgctccaccaccaccgccacctccttcacttccaacaactatagcggctccacctccaccggctccacctccaagagctgcagtggccccaccaccacctcctccacctccaggaactgcagcggcaccaccaccgcctcctccacctccaggaactcaagcggcaccaccaccgcctcctcctccacctatgcaaaacagagcaccatctccacctccaatgcctatgggaaatagtggaagtggtggaccaccccctccaccacctcctatgcctctagctaatggagcagcaccgccaccgccgccacctcctatggctatggcaaacggagcagcaggaccgcctccgccaccacctcgaatgggtatggcgaatggagcagctggtccaccaccgccaccaggagctgcaagaagcttgcgtcccaagaaagctgccacaaagctgaaaaggtcaacacaactaggaaacctttatagaatccttaaagggaaagtagaagggcgtgatcctaacgcaaaaaccggcagcggaagcggaagaaaagctggagccggaagcgctccagctggtggaaagcaaggaatggctgatgctcttgctgagatcacaaagaaatctgcatattttttgcaaatacaagccgatattgcaaagtacatgacgtcaataaatgagctgaagattgagatcactaagttccagactaaagacatgactgagcttcttagcttccaccgtcgcgtcgaatcagttcttgaaaacctaacagacgagtcacaggtctgcaacatttaaacatctttttaccatcactttcatatctaatatcctctgtttttgtgattcttgattgtgaaagtgttctaaaatttttaggttcttgcgcgatgcgaagggtttccgcagaagaaactcgaagcaatgagaatggctgttgcattgtacacgaaactacacggtatgatcaccgagctacagaacatgaaaatagaacctcctttgaaccagcttcttgataaagtagaacgttacttcaccaaggtaactacaataatttatttaatatcttccctaagatcctaatttcaactacattttgtaacttaaatatccaaaactcaatgattattcaaacagatcaaaggagacattgacactttggatcgaaccaaagatgaggaatcaaagaagttccagagccacaacatccacttcgatttcaatatacttattcagatcaaagaaacaatggttgatatctcatcaaattgcatggaacttgcattgaaggtaactaactgctaataatgttaaaacaactttcgttttaaccctttttgttgtacgaaatcttatcgtattaacaatgaattcacaggaaaagagagacgaaaagctcgtgtcccccgatgcaaagccgagtttgaagaagacagtaggatctgctaaaatgctttggagggcatttcagtttgcattcaaagtctacacatttgcaggaggacacgacgatcgagctgattctctaaccagagagttggctcatgagatccaaactgattctgatcaaaccgaatcatcgatcatgtcttga

SEQ ID NO: 164816 - DNA, 1117 bp, Arabidopsis thaliana landsberg
ttcaccaaatcgtgtttttgtgtgttggtgatggatttgattactgatttaaagacagggtttggtgaatttttgcagttgttcgagcaagttccgtttccgacacaagacaaatttatattggaacgatgtccttcagatttctgatcatctctccaaacaagctactataggtttttcttttgccagtttctgtcttgttgttaaagaaaaacaaattcttcaattgttttgttgttttgtggcttaattccaatagtgggaatgctatggatcactggagaacctccaaaagctgaagcaatgaaggagactatggaagcatacttcaacgctcttcaaggatttttgctgcattgtcatggaagcatggttggtgctgggactacactctcttcgaccatacacgcttctgtgaagcaaattgttgattccagcttcagattgttgcagggttctgtttccttatacggtaataagaagactctatgttcttctgcttattgatttaagaagattacttcaactgtgtatatgaatttttctggtggttctgttatttggaaacagagggatcatatgagaaaggaaggaagcccacgattccgcagcttgcaggagcagtgtgggaagcatgttctaatttaaagaacgtgcctgaaacaaacatcaaagcgattggaagagcgatggcacatgtagctgtttctatgaaggatgtgcttagggagatgaaagaactgaagcctgcttcttcttcacctgatcataatgtttcgacaaactcggatgacgatgatttaggcgatgaactgtctcctgaagaatttgaagttgctaaaatggtagcagatattgtgtctgagacgctcgttgttataaaagagcttatccgtgctatcacatgcatgatcaagctggagaatccaaaggataatagtgagtttgtggattcgtttgagaagttactgaagttgtgtcaaggaattggtgtacagattgatgagcttggagcttgtgtttacccgccgcaagagtttggtctcatgaaacaaacagtggagaacatgagggaaagtattggtgagattgagtctgatgttaagagttccaagaa

SEQ ID NO: 164817 - DNA, 1396 bp, Arabidopsis thaliana landsberg
aaatgtagttcgtaaagcttatcgctttctcttcatctccagaaaattctgcattgggaactttggtggtgatgaaatcgataatggtttccctgatttggattgtggatttgacgaggactccaatatcaatgagctcagaagcatcgatcgagaagtgatctctgttcggagtaggtttttgaagagtgccaatcatagtgcgtctcgtgttctcgtgacattgcagctagatgaatctggattcaattcaaagtcagttttagatgaattgaatgttagagtctcagggcttctagtgagggaggttcttgtagggatcttaaggaacttgagctatgataataaggcaagatgtgcgaaactagattatagattcttcctgtggtctggagaacaagagtgttttaggcacacagtgaattcttatcatttgcttatgaagatatttgcagagtgtggagagtacaaggcaatgtggaggttagttgatgagatggttcaagacggattcccgacaacagcgaggacgtttaatctgttgatttgtagttgtggtgaagcaggtttagcgaaacaagctgttgtgcagttcatgaagtccaagactttcaattaccgacctttcaaacactcttataacgcggttttgaattctttgctaggtgtaaaacagtataaattgattgagtgggtttacaagcagatgttagaagacgggttttcgccagatgttctgacttataacattctcttgtggacaaactataggttagggaaaatggatagattcgacaggctgtttgatgagatggctcgagatgggttctctccggattcttacacatacaacattttgctgcacattttggggaaagggaataaaccgctcgctgctcttactacgttgaaccatatgaaggaagtaggaatcgacccgagtgtcctccactacactactttgatagacggtctgagccgtgcagggaatctggaggcgtgcaagtactttctagatgaaatggtgaaagctgggtgcagaccggatgttgtttgttacacagtgatgataacagggtatgttgtatctggagagctcgacaaggcaaaggagatgtttagagagatgacagtgaaagggcaattaccgaatgtattcacatacaactcaatgattcgcgggttgtgtatggcgggagagttcagagaggcgtgttggttgttaaaggaaatggaatctagagggtgtaacccgaatttcgtagtgtatagtacattggtgagctatttaagaaaggcggggaagctttcagaagctcgcaaggtaataagagagatggtgaagaaaggacattatgttcatttagtttcaaagatgatgaaatataggagatga

SEQ ID NO: 164818 - DNA, 1836 bp, Arabidopsis thaliana landsberg
gatttgtcgcatatctgggtaccttctaatcctcgtggtgctgaaatgttgccaccgggtatggctgctgctgaatcagacttctatatgcgcagattatggtgtttaccgcatgaggtttgtgctcatagcatacatttctgatatacaaaagtaatgtaaatttcttatacattattttcttcctcaggatttgaaaagtgaaccaagatacctcgcaacatttacatgtgggtattaatcagaaagcaaatatcgatgcttgtgtcaagaaggttggttcattccctttgtttgatgttttgacttcacgtcataaattatttatcatcttctcaacagttttcagaaaacttcactattgtcctgtttcactatgacggccgggtaactgagtgggatgagtttgaatggtcaaagactgctatacacattagcgtacgaaagcagacaaaatggtaccaaacgctctttattctttatggtagaaaatagtttggtgtgtttatgactactgactcccttggcacctggaaatatattaggtggtatgcaaagaggtttttgcaccctgatattgtagcaagatatgattatatcttcgtctgggatgaagacctgggtgtcgagcattttaacgcagaagagtaagttgtaataaacctttgcatggattctttccttttttcttgttttcatttgatctgttgtaatcatcttggttatctgtttccaggtacgtaaagatggtgaagaagcacggcctggagatttcccaacctggcttggaaccaaaccagggactaacgtggcaaatgacaaagagacgaggagatatggaagttcacaagtatgttggataaaatccctcagattatggccatgtttagttttctgtataatgatctttatgaagtaatgggctttgaatcttatcaggataacagaagaaagacctggatggtgctcagatcctcatctccctccatgtgctgcgtatgtagaagcctttctttttacccgttttgagttggtttttccctataacaggaactaaccagtatcgaacttttgtgtcattcaaaaatgcagattcgtagagatcatggctcctgtattttcaagaaatgcctggcgatgcgtgtggcatgtgatccaggttccttgcttcatcatctgtttcattcttcattcatcttccctaactctctcttcttgcctgccttacttatacgctttaccttaaactgttaacagaatgatttggtacacggttggggtcttgactttgcactcagaagatgtgttgaggtaagaaaaagacacttaagttcgttgtttgtcacgcaaaagacagagtttctaattatatcgtctgttatatgacgaatctgaatatattttacaccgaaatgcagcctgcacatgagaagataggagtagttgattctcaatgggtcgttcatcaatcttttccttcccttggcaaccaagtaaatcccatagaactctccatgtccattttaacttcttctctcagaaatctgattctttttcgcttgatgtagggtgaggcgacagacgggaaagcaccatggcaaggggtaacaaagctttttatctctctctcgtgctgagaattatgtgttgtgaggaagacgcataacttgtgcaacaagcgacgtcaatttgttttgttatgtggttttgcaggtgagggatagatgcaaaaaggaatggacaatgttccagagtagaatggctaacgcagagaaggattatttcaaatccttacaagtagaaggctcctcaaattcaacagccacaaccatttaa

SEQ ID NO: 164819 - DNA, 530 bp, Arabidopsis thaliana landsberg
  unsure (1)..(530): unsure at all n locations
cgtcacatccgcgggggctcgtccgtcatggagnacgagaggtgagacccatgcaagcccgaatgaaacaccccgtctacgtcctgcccgaggccatgcaggccctcgccgcgctgagcaagtcctcgacggaccgcggcgtcccccacgccacgctcctgttcgcccagctgcgcgcgagccagatcaacggctgcggcttctgcgtggacatgcacgcgcgcgagctcaagcagctcggcgagccggacgagcgcatctggtccgtcgcggcctggcgggaggcgccgttctacaccgacgccgagcgcgcggcgctcgcgctcaccgaggccctcacccgcctcgcggatcgcccggacccggtccccgacgacctctgggcggaggcgacccgtcactacgacgagcgggcgatgtccgcgctcctcgtcgacatcgccgccatcaacgtcgtgcaaccggctcaacgcggcgatccggcagacgaagatgggcccgcgctcggccgaggccgccgcgcacagcgg

SEQ ID NO: 164820 - DNA, 2779 bp, Arabidopsis thaliana landsberg; identical to SEQ ID NO: 2388

SEQ ID NO: 164821 - DNA, 3292 bp, Arabidopsis thaliana landsberg
tttctgatgctgtcgtcgccttagctccctcctccgcccctcctccgtctcctcctgtggttttggtttcgcctctggctgttgaaaccctatatccggttgttgtgtctccagcgattacctcggtatctgctgccgttcctccgttgatggatgagatgactccgctggcgtcagatctctccacacccactgcgttacctgcacccgttccggttgttgcggctaacccagaaagtttaccaaaaaccccagcgttacctgcacccgttccggttgttgcggctaacccagaaggtttagtaaaaaccccagctcctgtagaggatagctggtgtgatgtctttaagggtacatcaaaaaggctagaaaggaaaggcactgccttcactcttccctcaggtgaatcatgtgtgaagattccaaattctgtcattgagaagcacaagaaatcctgggaatctttcatcttgggccaattttattccgaaccgccggctcaagggacaatccatacgattgttaacggcatctggagtaagcagtaccgggatgtcacagtctctaagatggaaggaaacgctttcctcttccgaattcctaatgtccaaacgcgctctcgggttctaaatcagcgtctgtggcaaattgatgggcaaactatgtttgttgccaaatgggagcctggagtgacacctatcaagccggagctgacttctgctccaatttggttagagctgtgtggtgttccgttccaattcttcaatgatgatgggcttgaacatattgccagtctggtgggtaacccaaaattcctccaccccaacacagcaaacaaaactaaccttgaagttgcaaaggtttttactatcattgaccctaggaagccgctgcctgaagcagtgaatgtccaatttgattcgggtgatgtgcgtcgtatagaggtttcaagtccgtggatgccgccggtttgtgctcactgtaaagaagtgggacacagcttgaggagatgtcgtgttgcccctatcaagtgtaagggttgcaactccactgttcattcagctgaggagtgtcccaggggaaaaccaaagcaacaatctgctgccaagcagcgtcgtaggcgttctaaaacacctaagccctcagcgaaagaaggtgagtgggtggttgttggctcaagtaaacaggctgtgagtgtgggaaagtctgtgcccccaggtcccaaacaggctactgttggtgccgaggctagttctagcaagcctaatggcgaaaatggcgaaagtggccctttgcgtacccaaggcaaggacctggttttgcgtggaaagggtaaagcagtccaggctgcaaagagtacttcagtctctgaggaggatgatgactcttcggatttaccttcatctcagtctgaagatgactacgctgatcttgaagatgaggttcgattcacagaggtgctgacccagaggcagcagcgaagtgcgaggggcaaaggccccaaatctcactagtctatatgtgtatagacatcttttgttggaatgtccgtggcttcaattcttcctcacactgaagcggatttaagaaatggtataggaggcgtctacctctttttgggagtctcgttgagacgcatgtgaagcaaccaaagcagcaaaaatttatcaatgccttgctgcctagttggtcttttgataataactatagtttctctgagttgggtaagatttagattttttggcatcctagtgtaaccgttttggtgatctcaaagtctcttcaaatgataacctgtgaagtgcagcttccaaattgtcctgtggctattgtggtttcctcagtctatgcttctacagatgaatctactagacagttgttgtggaacgagttactgtctctggcgtcggatagcagggtctcttccaagccttgggtggttttaggagacttcaaccaaattctccaccctcatgagcactctgcggctgttagttccaatgttgatagacctaccagagtctttagagatgtgctgcttaactcttctcttgttgatcttaacttcagaggtaacagctttacctggtggaacaaaagaagaagttttccaattgcaaagaagcttgatcgtatcctggttaatgacatttggtccactgtctttccttactccatggggaaattcggtgagccagacttctcagaccattcttgttgcgagatcagtcttgattcctctgccccgagagagaagaagcctttcagattttataattacttattgaagaatcaggatttcctgcctttgatttgcgtgaagtggtattccctaagtttctctggttctgcaatgtttagagtctcaaagaagctgaaggctttgaagcagatcattagagagtttagcaagtctaattactctgatttggaaaagcgtacaaaggaagcgcatgacaacctgcttgctgcgcagaacttaacgctgagaagccctagtgtttctaatgctgaaattgagttaaatcttcacaggaaatggcaagtgctatcttctgcggaagagagtttcttttatcagaggtcgcgagttacttggatgagggatggtgacaggaatactgcctactttcacaagatggcctctgttaggcaatcgcttaatcacatccactttcttgttgattcagatggcaacaggtttgattctcaacggggtatacaagatcattgcgtggattactttcagcggactttgggaggagagcagcctcctgcaaattttctccaagaggacatcactgctatcctcaaccacaggtgctctctagttgagcaagcagctctctctgcccccttttctgcgctggatatcaaggaagccttcttctctcttcctcgcaacaaggctagtggccctgatggcttctcttctgaattcttctgtgactgctggtctattattggtgctgaagttactgaagcagtgttggaattcttcagctcagggcagctccttaagcagtggaatgcgacgaacctggtgctcattccaaagattcctaatgcctccagcatgtctgactttagacctatcacgtgcctgaatacggtctataaggttgtatccaagctattggctgctagactcaaagctatcctccctccaatcatcagccactgtcaatcagctttcatgccaggccgcctgctattagagaatatcctccttgctacagagattgttcaaggttataacaagaaaaacatttcgcctagggcaatgctcaaa

SEQ ID NO: 164822 - DNA, 1170 bp, Arabidopsis thaliana landsberg
atgggccaaacgtttcacgcctttatgttcccatggttcgcttttggtcatatgactccatacttgcatttagccaacaagttagctgagagaggtcacagaatcactttcttgatccccaagaaagctcagaagcagcttgaacatctcaatctgtttccagacagcatcgtctttcactctcttactattcctcatgttgatggtctccccgctggagccgagactttctcggatatccctatgccattgtggaagttcttgcccccagctatagatctcacacgcgatcaagttgaagcagcggttagtgccttgagtccggacctgatcttgttcgatattgcttcatgggttccagaagtggctaaagagtatagagtcaagagtatgttgtacaacatcatatcagctacttctatagctcatgactttgtcccaggtggtgaacttggagttcctccacctggttatccttcctcaaagttgttgtaccgcaaacacgatgctcacgccttgttgtccttctccgtctactacaagaggttttctcatcggctcatcacaggtcttatgaattgtgatttcatttcgataaggacatgcaaagaaatcgagggtaaattctgcgagtatcttgagcgtcaataccataaaaaggttttcttgacgggtccaatgcttcctgagccaaacaaaggtaaaccactggaagatcgatggagtcattggctgaacgggtttgaacaaggctctgtagtgttttgtgcattgggaagtcaagtagttcttgagaaagatcaattccaagaactctgtttagggatggagctaacaggtttaccatttcttttagcggtaaagccaccaagaggatcatcaacggtccaagaagggttaccagaagggttcgaggagcgggtgaaagatcgtggtgttgtttggggaggatgggtgcaacaacctttgatattggctcatccatcaataggttgctttgtgacccattgtggtcccggaacaatatgggagtctttggtgagtgattgccaaatggttttgattccatttataagtgatcaagttctcttcacaagattgatcaccgaggagttccaggtatctgtacaagtgccgaaaaaaaaaacaaaatggctttcaaaggagagc

SEQ ID NO: 164823 - DNA, 1290 bp, Arabidopsis thaliana landsberg
  unsure (1)..(1290): unsure at all n locations
gaggagattttggcgacaaaacatgaaattctcaaggagaattatgagaatttggaaaaagattacaaaagtatagaggaaagttttaagcagatgaatgaaatgaacgagataatgaagtttcaatatcagaagcaaattaaggaactcgaggagaaaattctaagcttgcttaaggatttagagaaagagagaagtgagaaagaggagtatatgaaggagatgaagggaatgatcagtgagaaagaggccattatcaatgatttgagtgttaagaatcaggagcttttgattgcgaaagaggaagaagtggagaagctgaagaagatggagaacaagtatgctgaattgaaagagagatttgatgcggctgaatcacaatgttcattcttgaaatcgctttttgatgctgagaatctcgccggtctagggagtagcgatgtggctttcgaaaatgaggttattgtggtggaggattataatgtgactatcaagaatgaggttattatggtggatgatcataatgtgaataacactccaacaggtatgtatgtatgttcttgatatgttggtgaacctctcttgtaagaaaatttatttgaatattttctgttgtgtgcagatacgattgtgatccttgacgagagtgatgctgaaaatgataatcctcatccaagagagagtaacataatctctgaaaattctgttgatgtaaaaacagacaacaatcagctggccanngctcatcaaaagtaaatcgtctattgtcatcatcgtcgtcatcatcatcatcatcatcagttgaacatgtattcgttgagcttccctttaaaaggtcccgggatatttataacaagtcttgaacctttctcgatgcagtgatcactgagccagaagaagttgctcactcttaagttaagctagtttaaggtatatcttatcgatcctccggtttattgttttttgttttgtcccggaggttgtaacattttttggacgagatagataaaaaaaacgattagtatctgattaggtgaatattttggctgtatgttttttgtaaaatgtttggattactcggcttaatatcaaatcgcatctaaatcgctttgattcttgagtcactcctccatacttaaaacgcctatagcattgtataagcataattacttaattagtgatgattatgaaacagagacaataaaataaaataagtcttaaatctaaacgcttatttaaatggattctcggaataaacaaattggcttttcttcctcattctatacactc

SEQ ID NO: 164824 - DNA, 1546 bp, Arabidopsis thaliana landsberg
atgcgcgaatcagagaagataagggcaccgaaatatgtggataaaaatgaaagtcgttactgtggggtggatagtcttagtgtgtagtgtaccatttaagaaaaagaaaaagccaaacttcatagtttctcagatccgaaaaaggtggtactatcggtgttcacagatcataccagatccgaagaatcgatgaaacgaaaggtaatatatggtggaatagagaatttataagtcgctgttgctcgattgatatttggttgaatagaattaattgccaataaggttgtataattgatttattagcagattctaagttgttaggaatgtagatcatgtgatcttcagtgataatgtagattagtggtttggttttttgtttattgctagtcgttttaaatgaagttcaagtgtttattgctggggtttttttatcgcttgttgcagggtgttgatgttacagtttttgccatagctggaaagtgagaatgttcacaacaaagaaagtgggaatttgtgatagaaaatgatcgatttgctaggagcatatgcgttaattatgatatgacatttaagagttcgaagcggttgtagctggtgagtttcatgtcgatgcaaatgcttggattactaacttaagttaatggcttccagagaagctggtgatattttcaacgtctaaaaggcctctagtagctttaaatagcattgtcgcgctgaaaagtttcttgcttgtaaaggagacagaggcccatttaaaatttgtgcctctctattgagcccagtgttggtggggacatccgaaaatatgatgggcgtgatcttggggaaagttctggaactaccaaatacattctaagggagctggagagcgttcgtgttgagctcaagtagttcagtttgttactgctccaacaaaagagaccaatggtgacgtagattatggcgtagggaaatactttccaagtgaggtggagggcgttcatgttgagtcggcaatggttaagtctgttagtgctccaacaacagagacaaatggtgaagcagttgatggtgcttgggagtggcttgtttgaggaaataggcatcacgacaaagctctgtggactgaacctgtgtctgatgtttgccatgatttagatatggcggggattataagtctagctgatgcatgcacgccatctttgtgtactaacattgatggaagatgcgaggaagatttctttgccaactactcttaggatgaggctgttctgagggagctagaggctttagaaagagttgaagcggaaaaggctcgtgttaaaggcaaaggaaaaatgccatttacagtggtcgaatttctggatagcgaagaaggagctttccaatatgacagccttgatgggtatacgtcagggtataatgaatagaagattcattgtctgttgatgatgatgttgaggactcactggactgggcagatgtgtatgaaagagcaaatcaaaagtttgatgttcgtagtggcagggaagaagttgtagctactcctgaacctgaaccccaactg

SEQ ID NO: 164825 - DNA, 1558 bp, Arabidopsis thaliana landsberg
  unsure (1)..(1558): unsure at all n locations
atgaaaaggggagacgagccaaccgaaacgtacaacaggctcaagaccctggtgaacaagatctagagttatgggagtacaagatggatggaccatgacattgttcgactcatgctaaggtcatttaccattattgatcctcatcttgtaaaccttattcgtgagaatcccaggtacaccaagatgacgtccgagaaaattctcgaaaaattcgtaagcgagcgcatgatgataaaggaggctaggtacattgatgacatcgccaatggaccattcccactctacgagccgcagagtgttgtcctcaaagcaacaagcagcaaggagacgctacctaacaaggtggcacaagtagaggctgctggactcaacgaggaggaaatggcgcttgtaatcaagcgcttcaagaccgctttgaagggacgcaaggagtatctcaacaagaataaatcaaagggaaagcgatcctgcttcaaatgcggtaagactggtcatttcatagctcaatgccccgataatgataatgaccagggacaagaaaagcatgggaagaaagagaagaagaagaattacaggaaggcgaagggcgaggcacatcttggaaaggaatgggattctgactgctcttcatccgactccgacgatgaaggattggctgcctcggccttcgacaaatcttcgttcttccccaacgaacgccatacttgccttatggataaggagaagaaggtacgtattcgggacactcccaagtatacttcttctagtgatgaagagtcatctgatgatgaagtagattactctagtttatttaaaggtttagatagagcaaaagtagagaaaattaatgaattgattgatgtgataaataaaaaggatagacttttagagaagcaagaggacgtattatatgaagaacatgataaattggttagtactcaaaaatctcttgctctagaaattaaaagaaatgaaatgctatcctctgagttgtctgcttgccatgaaactgtatctagtttaaagagtttaaatgaggatttaaatgctaagctagaggaagctaataaatctagttcatgtgtagagcatgttagtatttgcaatagatgtaaggactttgatgttaatgcttgtaatgaacatcttattgctattacaaaattgaataatgaggtggcaagtcttaatgctcaacttaagacttgcaaaaatgattttgataagttaaaatttgctagggatgcctacacaattggtagacacccctctattaaggatggacttggttttcaaaaggaaaccaagaacttaacnnnnnnnnnnnnnnnnnnnnnnnnnnnnnagaaagcgaaggcttctatggctagtagttctcaaaagtgtcatgcctacatttatgatagaaaatattctaggaatgctcatagaagatatgatcataatgcttttgattcacatgctatgtttgctctagctctacttttgtgcatggtagaagtaggcctaggagaagcaatgttgtgcatcatatgcctaggagagtgtgtaatgaacc

SEQ ID NO: 164826 - DNA, 1309 bp, Arabidopsis thaliana landsberg
ctcccccggaagcctccctgacggcatctctgcggccgtgagtggtgtggcctttgctggaacgtttatcggacagattttctttgggtgtcttggtgacaagcttggacgtaagagagtctatggtttgactctcttgatcatgaccatatgctccatttgttctggtctttcccttggaagagacccgaaaaccgtcatggtaactctctgcttcttccgcttctggctcgggtttggcatcggtggtgactatcctctctcggctacaatcatgtccgagtattccaacaaacgtactcgcggtgctttcatagcagctgttttcggtatgcaagggattgggatccttgccgcaggagctgtttcgttacttgtctcggctgttttcgagagtaagtttccgtcccgagcctatatattggatggtgcagcctccacagtcccacaggcggattacgtgtggaggatcatcctaatggtcggcgccttaccagctctcttgacctactactggcggatgaagatgcccgaaaccgctcgttacacggctcttgtctccaagaacgcggagcaagcggctttagatatgactaaggttctgaacgtagacattgaagcctctgccgcaaagaatgatcaagctagggtttcctcggacgagtttggcttgttctccatgaagttccttcgccgtcacggtcttaacctattggacaagctaccacatggtttctcctcgacatcgctttctacagccaaaacttgttccagaaggatatcttcaccactatcggatgattaccttcggctaaaaccatgaacgcacgccaagagcttcattgccactatagtattaatcgacagactgggacgttgctggattcagatcattggattcggcatgatgactgttttcatgttggttttagccgtaccgtaccaccattggactttaccagctaaccggattggttttgtgattttctactctttcacctttttcttttccaattttggacctaatgcaactacgttcattgtcccggctgagatttttccggcgaggattaggtcaacttgtcacggtatctctgcggcgtcgggtaaagccggtgcgatggtcggttctttcgggttttctgctttggttaaagctttgggtatgagtaacacgttatacatcatggcaggaatcaatttgcttggcttgcttctcacgtttacaattccggagactaatgggaaatcacttgaggagctttccggcgaaactgaaccggagaaaatccagaagaagattgttgtt

SEQ ID NO: 164827 - DNA, 612 bp, Arabidopsis thaliana landsberg
gtttccgacagcgccgcgcccagggcgtcctccctgctcgagggcaatgcgcccggctccgatgtcgaccgcgtttacgccgagattttcgacgcggtcatggacaggcgcctgctgccgggggccaagcttaccgagtcgacgctgtgcagcattttcggctgctcgcgcgcgacggtgcgcggcgcgctggcccaactggcctacgacaagctggtcgtgcagttgcccaaccgcggggcctttgtgtggcgccccgacgccaaggaaaccaaagacgtcttcgaggcccggcgcgccctcgagtgcctgctcatcgaccaactgctgggcatgcccgacctgcctcaaaggctcgagcctctgcgggccatggtcgctcaagagcgccaggccttcgagcagggcgaccgcgtcagctggctaaggctttccaatgcctttcacgtcaagatggccgccctgcgcggcaacgatgtgcttaccgaaatgatgcacggcctgtgctcgcgcacgaccctgatcatcgcgctttacgacacgcccagttccagcacctgctcctacatcgagcacgaacaaatcccttgacctgctgccgttgggcaacgc

SEQ ID NO: 164828 - DNA, 2470 bp, Arabidopsis thaliana landsberg
tccggacatacaagcattaagattaaactcaaatagaaagaatagtgtaatcgatcaaacaaaaccatagaggcggccaacctagactttcgatctattagtccccatgaattcccctttgaaaccccctcaaacccaactagagatctactcgctcatggcaaaggagtgataaggttcaaattaccctagaactactctctcaaataaaagatcaattgcagtattttagaatcgaattcacaaagttcttttgttcaaacaatgagttgaatgtcgagattaagctagcaaatgatgattgaaatagtaagaaaacaaagtaagaaaacagcaggttgattgtgttgtaaacgattaggacaagagctaggaacagggtattctcaagaaactattggttagtagatctaatgaaagataaggttgttatcgaaccattcttaaactcaaactctaattatagaataaccgatgggtgtgccgcgaaactccctatatgtatagctaataataaccagagaagccgagaaactatcaaccttaatatgcattctcaacgagttcaattgttcatcttagtaaataggccgattcttattacacacttataaacataactcatcaaataatagatctaactatagatacctatggctggaatatctattgtctggattcaagatctagttaattactctagatctagcattaagcataattaaagatgaagaattctatagataacctagcaaaggacaatctactaaaccatatgaatccctaatgagaaactctattcctaacaaacagactactcagacatattggatgaaacaaacaacatgattaagtgtgaaagcataaacacagtaaatagagaaggggaaagaagggatctcttcattgtattaaaaattggaatgaatctctcaagaacaatggatgaatagcttatgtctctcacaatagagtttgcaaagaacttgataaaagacttgataaaagaaacttaagtctaaaaacaatatgtatagaccctaaaaacgtccagtgacgaataatgcatatagggaagtcttctggggcaaacttgagattctgtaaactcgaaagcgtctagggtttttgctgggcctaaactggtgtcgatcaacaccaacagtgtgtcgatcgacactcctcgctgattcctgaaccaaaattatccttagcttgcttttccttagcttttgctccaaatgtctccttatctccattgttgccccattgcatagaatacctgaataaacataaaaaacacttgaaaaataacataaagactcaaaatcttatacctaaaacatagataaaatcagtgataatagggatatatcagctatcaacatccaacaagaagatgagtctccaacaagttatcagactcccaatattgaggacaatatggttcaagaaagaaggaaaggatcccctgatcctaggcagactattcttagcctcagctagagcaatcatagatgttaggaatggaaaaattgatctaaaccttgaaaaaggtatcaagatgaaatttgacatcagcaaagcttcaaggaaatcaacattagaaggtcaaaatttcgggattcaggacatggatgttgatgtagaaacagaagctgaaaacccaccaagatttaactatacttctcaacttagcaagctgaagagaacttttgaccactagaagagagcaacagcatggttagcttagactgaagaacctagagaagatgactggtatgagatgagaaaaaaatttaaatggcaaagcagagtcatagaggggttatcttcaagagtgatgaagcttaaaggtcaactttggattattgaaaaaagagttaataattattcaatgggtattgatcgagagaagatggaaactgctctagctatcaatgaggaaaatgagtttgcaacagaatggtttgcatgagaatatcagaaaggagttcatttagaggaaagtatctcagagagtaagttgttgagtgaggaggaaatccttattccggcttattctccacgagtgcctaaacagcccaccaacccctctagtgaagaagaacacttgatttttgattctgttgctgaagaactcttggagctctagattggatatcaagctcaggaggatgcaattgtaaatttaactcataagatggaaaagttaaacagcaccattctggaacttcaagaaatgattaaaggctaccccagttttgaaattaaggattggtcaaaggaacctggttcagaagatgaagactactttgctgatcaaaaagaagcttattttgaagaaaaatcaaatgattactcatcctaccatatgtcaagggagaatgcagagaatgattcaggcactgaaaattcaaccactgaagatgaggacttctatgttcctctctttaactttttttctgac

SEQ ID NO: 164829 - DNA, 167 bp, Arabidopsis thaliana landsberg
cagggtttagggttaagggttaagggttcagggttcagggtttagggttcagggttcagggttcagggttcagggttcagggttcagggttcacggttcagggttcagggttcagggttcagggttcagggtttagggtactggttatggggtgtatggattagggt

SEQ ID NO: 164830 - DNA, 2023 bp, Arabidopsis thaliana landsberg
  unsure (1)..(2023): unsure at all n locations
caacttattatcacatctgaccaaagactgcagtgtcctgaagaggcatctcgcagaactatgggcaagcggagacctttcaaaattcatcatggagaacttcatcaagcaatatcatgagtcaagggataatccagaggctcaaaactctaaaagaccaagaccggctggcgaagaggaaccaagagcttcaaaggataaaatcaatgtaatttttggaggatctaaactctgccgtgattccatcagtgcaatcaagaagcataggctcaatgttcatttgaaatcaagcttaagtgaagaagtagactttcaaggcacttcgttattgttcgaagaaaaggagacacgacatctcgaaagacctcacgatgatgcactcgtaattacgttggatgtagccaacttcgaagtgtcaaggatcctcattgatattggcagttcggtagatctaatttttcttagcactttggaaagaatggggataagcagggcagacgtggtaggacctccatcacccttagtggcttttacaagtgaatcagcaatgtctctcggaactatcaagctaccagttttggctggaaagatctcgaagattgtggattttatcgttttagataaaccagcggcctataacttcattcttggaactccatggatttatcaaatgaaagcggtctcttctacttatcaccaatgcctcaaattcccaacttcgagcggagtggaaacaattcggggagatcaagaagcttcgggaacttgttatttagctggccaccgattaaaaattcaatagcaattaacgaaacccgcaaagaaaggtgtgatcccgagatttcctagcgggcagaaagtggatgatgtcgtggtggaagtaattctataagcacacaaaccggatcagaaagtttgaatcggagctactttatcgggcaaattaaaggaagccttaattgagatgttaaaaacaaacaagaaatcatttgcttggtcggcagatatatatgcctggcatagatccaagtataatttgtcacgagtgaaacgtagacccgagttttaaaccgatgaaacaaaaaagaagaaaactcggagtggacagagcaaaagcagtaaacgacgaagtggataaactcttaaagatcggatctataagggaggtgcagtacccggattggttagcaaataccgttgtggttaaaagaagaatggaaaggatagggtgtgcatcgatttcacaaatctcaacanagcttatccaaaagacagtttcccactcccacatatagatcgtcttgtggaatcaactgccggaaacgaattgttaactttcatggatgcttttttgggatataatcagatcatgatgaatccagaagatcaagagaaaacgtcattcattacggataggggcatctattgttataaggtaatgcctttcggcttaaagaacgcaggagcgacctatcaacggctggttaagaaaatgttcagcgagcaccttgggatgacaatggaagtctatattgatgatatgctagtcaaatcattgaaaaaggaagatcatgttaagcatttagaggaatgtttcacgatccttaaccagtatcaaatgaagttaaacccggcgaagtgtacgtttggagtcctatccgaggaattccttggttatatcgttacaaagcgaggaattgaggcaaatccaaaccaaattaatgcctttctcaacatgccatctccaagaaatttcaaggaagtacagcggttaaccagtcggattgcggcattgaatcattttatttcaagatcgaccgataaatcattgccttttattcaaattttaaaagggaacaaggagttcctttgggatgtgaagtgcgaggaagcattcggacagcttaaagcatatctgaccactctacctatattgtctaaatcggaagcggatgagaagctttatctatacgtctcggtctcaggtcatgcagttagcggagtcttgatccgagaagaccga

SEQ ID NO: 164831 - DNA, 2057 bp, Arabidopsis thaliana landsberg
gaaacccgttgctctctcctctttctctctctcattctcctgtatttgcccaaacccggatccggatttggatcctccggtccgattgcggcgtcgttcggcggctctgctttcttctgcgccattgacgctagtggtcgtcaagatgttatctgctggggaaagaactattcatctccttcttctccctcttcttcttcttcttcgtcgtctattgcttcttccacttccgcaagctacaacattccgtcaatggcggttctttcaggcggagacgggtttctctgcggcattttgtcgaacacttctcaagcattctgttttagttcacttgggtcttcttcaggtatggatcttgtccctctagcttacaggactactgcttactctcagatagctgctggaaacagccatgtctgtgctgttagaggagcttactattccgatcacgattctgggactatcgattgttgggagataactagagctacgaacaacaacagcttaatcgccaaggagaatcctaacttctatgatcagattgttagtaatctcgtcttcaacaatattgtttctggtgatgggtttagctgtggtggaatcagagatggtgggatgctctgttttggtcccaattcttctaatttagggtttaacacaacttctgataacttccaagtcttagccgccggtaaaaactccgtttgtgctattcttaatttatctcgagaggttaaatgttggggagaagatgaatcttttgtcaattctccgatgaatgattctcgattcgtctcgctaaccgcgggtcctcgccatttctgcggaatccgtgaggataatcatgaggttgagtgttggggaaactctaatttctctttgattccaaaaggttctggatttaaagcaattagcttcgtctgatttcattgtttgtggcattagagaagaggatcttgttcttgattgttggatggttaatgggttcgtccacattagcttacgatcctccgttagagctctgcagtccagggatgtgtagagctggtccttgtaatgaaacagagtttgctttcaacgcaagtatactcaatgaacctgacctaacgagtttgtgtgtaaggaaagagttaatggtctgttcaccttgcggctcggattgctctcacggattcttcttgtcaagttcgtgcaccgcgaactctgatcggatatgtacgccttgctcgctctgtcaaaacagttcttgttcggatatatgtaagcttcataacagcaattttccagataagcattggcatcaactacagagacttgttcttatcatcgggtcttgcgcatccgctctattgatcattataattggttgctgtgttgtgccacggattgtcactagtcctaataaagaagacggagcagcgaatcaattcaaatcttgcataggaaagcccgatttagacactgatcagccacttgaaaatgtatcccctgctccatcggtaacgccttttgctcaagtgtttagactctctgagcttaaagacgcgaccaacgggtttaaagagttcaatgagttaggcagaggaagctatgggtttgtctacaaagccgtgttggcggacgggaggcaagtagcggttaagagagcaaacgcagcaaccataatccacacaaacactagagaattcgagacagaattggagattctctgcaacattaggcattgcaccagtgtgaatctccttggttactctaccgaaatgggagagaggcttcttgtttacgagtacatgcctctcggtacgcttcacgatcatctgcacagtgggttttcgccattgagttggagcttaaggatcaaaatcgctatgcaaaccgcaaagggtcttgagtatcttcacaatgaagctgagccgagaatcattcatggcgatgtgaagtcttcgaatgtactattggactcggaatgggtggcgagagttgcggattacgagctcgtgacatcgtcgaacgagaagaatttggacatcaaaagagatgtttatgacttggagatg

SEQ ID NO: 164832 - DNA, 803 bp, Arabidopsis thaliana landsberg
atacaagaaactcatttcatagaataagatctgttcaaaaacgaaacaaatattaccatctgagaaaaggatccaggatcattgtcttcttcttcttcttcattattagcaatcatagataggagtctgctcatgccttaaattttgtgactatcatcgacctttgggtgcagatgcgaggaattcctcttccctatgtttgtgaggagacatctttggagattgctcatgaacttggtgagatcatcactttggacttccatgatgcaaccactactcaaattgcttatattcgagtccgagtgaggattggaatcactgatagactaaggttcttccaaaggatcacttttgattatggggagactgctctaatcaggttttaatatgagaggttgaggaggatacgcagtagctgtttttgagttacacatcacaggacctattgtccttatcgaccaagattacctaattatggaagggaaagaactgtattctatgatgaaaggcttatatcgactatgaattctcagtctcaaatgactgagtcttcctttctagttcctgtgaaccctcctccaagaattgctaccccaccgttgaatcatggagagtttgttgcaacccatcctcattttcctactccaagagaaggacttaaccaacatgttaggggaacttcttatcaggggctctgtcaaggctaacaagtctccacggattctaattcacgtcttcggtgggaacaacagtcacagctggtactcgtcgtgtttttgaagttggtcaatcttcaagaaggt

SEQ ID NO: 164833 - DNA, 4163 bp, Arabidopsis thaliana landsberg
gagaaaattgcaggaataactcaacatgtgaataaaaatgttgtaatcactaacacagctacaacacaagatttctgggtagcagtggtgaaaaacgaagttgaaacaaaagtagagttggtagtagaggaaatagatggtataccaacagcgacaataccaaacagtgtttttgatgaggcaaagccgttgtggaaagatttcctagttggaaagtttcttgctaaggctccttttgtgggagggattcatgctttagtgaataagatttggacgttgggggacaagtctatgcgaatagatgtgtccgtggtggaccacacaacagtgagatttagaataaaggatgagcgcattcgctctcgggtgctacgaagaggcatgtggaatttatgtggggttgtagtggtgttatctaagtgaagtcctattgtggaagctgatcaagaagcaatcaaaaatatacctctttgggtcatagttaagaatgttccactaaaatatttctcttggaaggttctaagtgctatcactagtccactaggcattccaaggaaactacacccatatacagaagcgtgcaaatcttttgaagaggcaaaagtgtttgtagaagtggatttgacaaagaaattacctaaatatttctctttcaaatctgagaagggaggtgatactaccgtggagtttgtgtatccgtggctacctccacgatgttgtaaatgtgaaaatggggtcacttggatgtgaactgtttgtcacaggagaaagtaagagctgttgggatctcatgtgtggataaaggggcatcaatcaaaacagagagtacaagggaggagagggttttggttgcagaggctgagaccattgagcctacaagcgtacaagatgtggaagaagataaggcacttaaacaacaggaaaaccaaagtgataaaacgaaatcaatggatgtaagagacaaggactggaatactcctactaagataataagaagtccggggaggaacgaggagctcagttatggagagatctctattatgtctaattctttttcatgtctaagtgaaaaaggaggaaaaggttaggacattgaaacagagaaccatgaatcgaataaaaacgctggaatagaggaacaagataaaaaagaaggggttaatcaagacaatgaggaagagagtacgggaaaagattgtcaagatagaagtgtggtactgagacaaactttacctcgcgcatcaaaagacagtcacaaagttctaggcaacaatgcaaaacaaagtactaggagagcaactcaatgcaatcctaacacacgtcccatccaacaccatcattaatgtctggtttcttttggaataatcggggtttcaacaacaaaagtaaacatggagtaacgcggaagtggttgaaagaagaaaattttgattttggttgcttactggaaacgaaagtgaaagaaggaagagcgaatcagatagtaaaatcagtttttaaagatcactctctttacatctcaacgccacacatatcaccaggaatgcgggattttcaggaggtggtgagaaaatgtgagcttactgacttgagttaccaaggcaagaggttcacttggtgtaataaaagacaagatggaataatctgcaagaaacttgacagagttctggtgaatgagacatggactcaaaaatatatcaattcttatgcagtctttgagcctggaggatgtttagaccacatgagatgtagattctatctagcagaggagattcataagactaagcgtccttttaagtttatgaatgttgtgatgacgcattcaggataccaggcagaatttgaacagagttggaaaagatcaccaccactttttcactcgacttcagcaatgcacatattatccaagaaactaaaagcgctaaaaccgcagctgagagcgataggtaaacagttaataggagctattattgttcgaaccaaagaagcttttaaaaaactctgtgagctacaacgacaatggctttcccgacatcgcaagctatcattgatgagactgctgcttatgacgaatggaggagattattggatattgaggagagattcttacaacaaaaggccaaactccattggatgaacactggagaccaaaataacaaggctttctatgcttctgccaagctaagggaaataagaaataacataagagaaattcagtgtgaggatggtacaatagctggaactcaagaaagcattaaggctgaagcagagagatactttaaagactttctctccatgaggcctacagattacgttcaatggtcaaaggaggagctggagaatatcttggattttaagtgtgatgaacatgacaaacaaatgttaacaagcgaagttttggaggaggaaataaggaaggtgctctttgcaatgcctgcaaacaaatcccctggccccgatggtttcacgtgtgaattttttaaagattcatggtctataattcacaaagatgtggtggtagcagttcagtctcttttcaagacaggttttctccctaaaggagttaactcaaccatattagctttgataccaaagaagaaggaagcaatggttatgaaagattataggcccatctcttgctgcaatgttcaatacaagttgatatcaaagattctcgcaaaccagcttaagggtattctccctaagttcatctctccaaaccaatcagcttttattaaagatagattgttaatggaaaatctcttactcgcaacagaggtcatcaaagactaccataaggactctgtttctcctcgctgtgcaatgaaaatagacatatccaaggcgttcgattcagttcagtgggtttttttactcaacacactgagagcccttgatattccggagcagtatgttaattggattcaaaaatgtgtcacaacagcctctttctcggtgcaagtaaacggagaacttgcaggatattttaacagcgatcgcgggcttcgcaaggctgctctctgagcccttatctttttgtcatctgcatgaatgtgctctctcgcaagttggacaaggctgcagccgacgaaaaaatggattttcatcctaactgcaaacagatgaaattaacacatctatgttttgttgatgacttgatggtttttgtcgcatgaaataagaaattaatagaaggagcactagaggtctttgatgattttgcggttcacacaggactcaaaatcagccttgaaaagtccacactttttatggctggggtacatatgagagctaaagaagagattctaacccagtttccttttgaacaggggacacttccggtgagatatttaggattacctctaatgacaaagcagatgacttcctcggattatctgccccttttggagaagattcgatcgcaaataaaatcatggacagctagaactctctcttttgcgggaaggcttcagctaattggttccgtgatattcagtttaacaaatttcttgattgcagcgtttaggctaccaaaaacttgcataaaggaaatccacaagatgtgttcagcttttctttggtttggacctactttgaatccgaaaaaagcaaaggttgcatggtcagaagtgtgtacacccaaaagtgaaggaggtctagggctgcgatcactcgaagaagcgaacaaagtgtgtgtgctcaagcttatatggagacccctgtttgcgaacgattccttatgagtagactgggttaatagacaccttatctggggaggttcattctgggcggtaaagaataatacatcaagcgggtcttggatttggagaaagatgctaaaatatcgacaactagctaaggagtttcatagagtggaagtgcataacggtgagagcacatctttttggtttgactcatggtgttcgatgggacgtcttcatgagaagctaggagataggggtatcattgacatggagatttcgctagagagcaagctttgtgaagtgatgaacagagacaggagaaggaaccatcatcgagacttactgaaccaaattgaggaagagcttcgatgccaaggacaacacagcttggaaacagagccggatgcaacgttatggaaagggaaaaatgactactaccggaaacaatacagttctcga

SEQ ID NO: 164834 - DNA, 2477 bp, Arabidopsis thaliana landsberg
gatattattgcctacaatttcttcaaatcatcattataattgttttgctcttttgaaaaaataaaatggagatattaatttgcttgaactcaaaacgacgacgtagcacaactcctttccactcgaataatccatttggaggctttttttcattacagaacacacactctctctccaatggacctaaaatgaacattctccgacctccgacgtcatcatcatcttcgtcgtttcctccatacccaaagcccgtttcattaacccctccggtatctttcactctcatccacaaccccataaacctctgctctataaacccaccattcaccaacgctggtcgaccaattttccaacggtccgcctccggcactgctaatagctccgccgaagacctctcgtctttcttgggctctccctcagaggcgtattcaacacacaacgaccaagagcttttgtttctcctccgcaatagaaaaaccgatgaagcttgggctaagtatgttcaatccactcatctccctggaccaacttgtcttagccgtttagtttctcaattatcttatcaatccaaacccgagagtctcacgcgcgcacaatctatcctcacgcgcctccgcaatgaacgccagctgcatcgccttgacgctaattccctcggtctcctcgccatggctgcagcgaagtctggccaaacactttacgccgtctccgtcatcaagtccatgattcgttctgggtatttacctcatgttaaagcgtggacagctgcagtagctagtctctctgcttccggagatgatggtccggaagaatctatcaaactcttcatcgctattacgcgacgagtcaaacgatttggtgaccagtctttggttggtcaatctaggcctgatacggcggcatttaatgcggtgcttaacgcttgtgctaaccttggtgatactgacaagtattggaagttgttcgaggaaatgtctgagtgggattgtgagcctgatgtcttgacttacaatgttatgattaagctttgtgcgagggttggtcggaaggaattgattgtgtttgtgttggaaaggattattgacaaggggattaaggtttgtatgactacaatgcattctcttgttgcagcttatgttgggtttggagatttgagaactgctgagaggattgttcaagcgatgagggagaaaaggagagatctttgtaaggttctacgagaatgcaacgctgaggatttgaaggagaaagaagaggaagaagcagaagatgatgaagatgcgtttgaggatgatgaagactcgggttattcggctcgggatgaggtaagtgaagagggggttgtagatgtgttcaagaaattgctacctaactcggttgatccgagtggtgagccaccattgttgcctaaagtctttgcaccagactcaaggatctacacgacgttgatgaaaggttatatgaagaatgggcgtgtggcagacacagctagaatgcttgaggcaatgaggcgtcaagatgatagaaacagtcacccagatgaagttacatacactacggttgtgtcagcttttgtaaatgcagggttgatggatagagcaagacaagtgttagccgagatggctcggatgggtgttcctgcaaataggattacttataatgttctgctcaaaggatattgtaagcagttgcagatagatagggcagaggatttactaagagagatgactgaagatgcggggatcgagccagacgtggtttcctataacattataatagatggatgcattcttatagatgatagcgcaggagctctagcgtttttcaatgaaatgagaacgagagggattgcaccaactaagaatagttacacaactttgatgaaggcttttgcaatgtcggggcaacccaagttggggaatagggtgtttgatgagatgatgaatgatccaagggtcaaagttgatttgatcgcgtggaacatgttggttgaagggtactgcaggctaggtttgattgaggatgctcacagagtagtgtcaagaatgaaagaaaacgggttttacccaaatgtggcaacctatgggagtctagccaatggggtttcgcaggcgaggaaacctggtgatgctctcttgctttggaaggagataaaggaaaggtgtgcggtgaaaaagaaagaagcaccttcagattcttcttcagatcctgctcctccgatgctgaaaccagatgaagggttgttagatacactagcggatatatgtgtcagggctgcttttttcaagaaggcattggagataatcgcatgtatggaggagaatgggatacctccgaataagactaagtacaagaagatctatgtggagatgcactcgaggatgttcactagcaaacatgcttcacaagccagaatagataggcgggtagaacgaaagagagcggctgaagctttcaagttttggctcggtttgcct

SEQ ID NO: 164835 - DNA, 231 bp, Arabidopsis thaliana landsberg
ggttggaggttggggtatagaggagaaagcggcatgtttcgttcaaacctcatgtcatgcctgccgggggtagggaaaggaagtcagccaccggcatattgttgcgagatgctgaaagagcagcagtcttgtctttgtggttacataaagtctccaacgtttggtcactatgtcatccctcaaaatgctcacaaacttctagcggcttgtggtattctttaccctaaatgt

SEQ ID NO: 164836 - DNA, 1144 bp, Arabidopsis thaliana landsberg
attttcaaggttagagatgtctgctaccgtcctcctggaacacagttgaatatcttgaatggagttaatttttccctgcgcgagaaaaggtaattccggctgtttcttgaggtactgtgtataaacaacatgcctacttaatagttttgtgactctattactctttgcagctttggcttgatctttgggaagagtgggagtggtaaaactacccttttgcaggtttgttttgttgtctcacgagcttgtcatcacacacagctatccggcactgttctttgagttgtttgtagtctgtagcaacttttggggttttcttcttcttttctgtagcttcttgctgggctaaacaaaccaacatcaggttccatttgtatccaaggatatggggatgatggccagccgaaggcggatcctgacttgcttcccactgaaaaggtgggcattgttttccagtttccagaaaggtaattctcattatcatcttttttccttttttttttaccttatcaggtttaggtgctgctgtttaagtgacacgaaaatatcgatgtatttttcttttttgtgtgtggctagattctttgttgcagataatgtgcttgatgagattacttttggttggccaaggcaaaaaggtagtttgcagcttaaggagcaactgacttcgaatctccagagagcatttaattgggtattccactcctcctggttcggacagtgtttatcttatgtccaacgatctgtcttatgttagctttcctcttgaaacgttaggttggattagacagcatcccacttgataaagatccccagttactaagtggaggctacaaacgtcggcttgcactagctatccaattggtgagaacaatgttttttgacgtattccaaagtgtgaactgttctaaatagttctgccttttgtaggtgcaaactccagatttactgatactggatgagccccttgctggtcttggtatgattttgcatcttctaattcttgaagtttagtagatttttcctatcctctcttatcaacaggtgcttgatgtccatctctcccatggttttctgcttctcattctttacagaagatgtttttttctttggcgttctctctgcatatgctctgcgtttcttt

SEQ ID NO: 164837 - DNA, 107 bp, Arabidopsis thaliana landsberg
taagagcacccgactgctcttctgaaggtccgaagttcaaatcccagcaaccacatggtggctcacttccacccgtaatgagatctgatgccctcttctggtgtatc

SEQ ID NO: 164838 - DNA, 890 bp, Arabidopsis thaliana landsberg
attgattggaatatggctgattctgtggttggtgagggtcagttgtgttcaacagaccaactagatcttgtgaacaatatgcctcttggtccttctgctggaattgttaaggttgagaaagtgtttaacaaagacgcatatttgtggagaccaagtccaggaaagtttgtgatgggagatgtactaaatgagaacattgcatggccacttcctagtataaaatatgtgaattcatctcctccacggtatgaaacagcatcagcagaaaaaagaccattaccaccatcagcagataaaagaccaggatcagtaaatttctgcactttaacttacagcctataaaatcacttaagtattatttctgcttgaatgcttggtattatttctgcctgaatgcttggtattgtttttgaatcttgtagagcttaagccacagtactgctagcaccagcaaatctgccaagaagaaatgcatcatgttagattacaagaacggaagagaaagagttgcagaaggaagagtatgtgcctctaacccttcagacacagtccaccatatgcccctaggtccaaatgcgagcaaggtatgtgtagaagtttcaaagattggagatgctactgtgtggagaccaaactctgaaattcaaaccattgtcgatgcagtaggtagtattgtggcttggcctactgataaaatcatgtgtgtgtaaacattatgtagttttttatggtaagtactttgacattaaaatgtaatttggaatcttgaattctatataatatgaatagcttgctaaattgtgaatttatgatatctaaataatatgaatttctttctgaatgtgggattaaaaactaatctatgaactgggaataatttgaagaaatat

SEQ ID NO: 164839 - DNA, 1089 bp, Arabidopsis thaliana landsberg
agatggcgggatgggatggaaaaatacttggcgtcgaatacaagaagatacggctgcttatcttcagttactacgaatgtctctggattgttttagatcattatgtgacataatggaaacaagttatggattaattcctacaatgaatgttagtattgaagagagtgttgccatgtttttacggatatgtggacacaatgaagttcaaagagatgttgggttacgatttggacgaacgcaagaaacagtgaatcagaaattttttgaagtccttagagcgacatagatacttgcttgtgattatatcaaaacgccaacaacacaagaactacgtcgaattcctgaataactacaaatggatcaacaatattggtcatattttagtggatttgttggaggtataaatggagttcatgtatgtgttaaggtgaagcattaactacaaggaatgtattggaatcgacacgatagaacatcgtttaatatcaaggccatatgtgatataaatatgttgtttacatatgtttggaatggagcacctggatcgtgccacgatacagtagttctaacgttggcacaagataatgattctgaatttcctttgcctcctagagataaatattatgtagttgattctgggtatccaaataaacaaggctttttggcatcttatcgatcttcaaaaaacagagttttcggtatcacatgtcacagctctacaatggtcctcctcttagaaataaacatgagttgtttaatcgatgtcatgcatctttacgttctgttattgaaaggaaaattggagtttggaagaaaaaatggaggattctttatgaattttctagatatgatattgatgtccaaaaaacagtggtaacgactacaatgtgactacataattttatcagaatgtcaaattattttgacgagaattttgttgaagtaataggagatacaaatatcaacaacataaattctgagaatgatcttgatgaccgaagagaagtggtatatctgatggaaatcatatggcaaaatataagagaaaatattgctgatatgttatgggcaaatcaaattattattatt

SEQ ID NO: 164840 - DNA, 2336 bp, Arabidopsis thaliana landsberg
atacgtgtcgctccaatttcatcgtcgaggaccttctcaggagaggtcaagtttctgctgcacgcaaggtgtacgacgaaatgcctcacaagaacactgtctccaccaataccatgatttccggttacgtgaagacgggtgatgtttccagcgcccgagacctttttgacgcaatgcccgacagaactgttgtcacgtggactatcttgatggggtggtacgcccggaacagccacttcgatgaagctttcaagcttttccgtcagatgtgcaggtcttcttcctgtaccctgcccgatcatgtcacctttactacgcttttaccaggctgcaatgacgctgttccccagaacgcggtcggtcaggttcatgcttttgccgtcaagttaggctttgataccaacccctttctcactgtctccaatgttctgcttaagtcctactgtgaggtaaggcgactcgatttagcctgtgtgttgttcgaggagattccagagaaagactctgtcacgttcaacacccttattacagggtacgagaaggatggcttgtacacggagtccatccatctctttcttaaaatgcggcagtctggtcaccagccttcagatttcacattttctggggttctcaaggctgttgttgggctgcacgattttgctcttggtcagcaactccatgctctgtcagttactaccggcttctccagggatgcttctgttggcaatcaaattcttgatttctactccaaacatgaccgtgttcttgaaactaggatgctttttgatgagatgcctgagttggattttgtttcttacaatgtggtcatctcaagctactcacaggctgatcaatacgaggcatccctccacttctttagagaaatgcagtgcatggggtttgatcgcagaaacttccctttcgcgacgatgctgagcatcgctgctaacttgtcatccttgcagatgggtcgacaattgcactgccaggccctcctggcaacggctgattcaatccttcatgttgggaattctttagtagatatgtatgcaaaatgcgaaatgttcgaggaagctgagttgatattcaagagtttaccacaacggaccaccgtttcctggactgccttgatctcaggttacgttcagaaagggcttcatggagctgggcttaagttgttcaccaagatgagaggatcaaatttacgagcagaccaatcaacttttgctactgtattgaaagcttccgctagtttcgcttctctgttgctggggaaacaactccatgcattcataatcagatcagggaacttggaaaatgtgttctccggaagtggcctggttgatatgtacgccaaatgtggttctatcaaagatgcagttcaagtattcgaagagatgcccgatagaaatgcagtttcctggaatgctttgatttcagcacacgctgataacggagatggagaagcagctattggtgcatttgcaaagatgattgaatctggtctccagccagattcagtcagcatcttaggcgtcttaactgcatgtagtcactgtggatttgttgaacaaggaacagaatatttccaggcaatgtctccaatctatgggataactccaaaaaagaagcattatgcatgcatgctggatttgcttggcagaaacggaagatttgcagaagcagagaagttgatggacgaaatgccctttgagccagatgaaattatgtggtcgtcagtgttgaacgcatgtcggattcacaagaatcaaagccttgctgagagagcagcagagaagctcttcagtatggagaagctcagggacgctgctgcttatgtaagcatgtcaaacatctatgcagcggctggggaatgggaaaaagttagggatgtgaagaaagcaatgcgcgaacgcggaatcaaaaaggttccggcttatagctgggtagaagttaaccacaagattcatgtgttctcatcaaatgatcagacacacccaaacggagatgagatcgtgagaaagatcaatgaattgacagctgagattgagagagaagggtacaagcctgacacgagttcggtagtacaagacgtagatgagcagatgaagattgagtcgcttaagtaccacagtgaacgtttagccgttgcatttgctctgatcagtacaccagaagggtgtccgattgttgtgatgaagaacttgagggcctgcagggattgccatgctgcaataaaactaatatcgaagattgtaaagagggagataactgtaagggatacaagcagattccatcactttagtgagggggtctgttcttgtggtaattactgg

SEQ ID NO: 164841 - DNA, 913 bp, Arabidopsis thaliana landsberg
cgactataccctttagattcagtcaagattcatcaccaaacgtgtgctttattcgacgccttagaaatttcttcgcatttagttccaaaactcaataacttatcgaagaaattataatcaaccgttttagaaattattgagtcttcgtgtgtagacatatagacaaaatttaaaatagtttgacttagtcaatgttattaccaattcttctacggtgttaaatccaacatctcggaccggatcaatgatttatcatctcaaaattgttttataaataccgacacacgtatcaagccaaaaacatactttatagtttatacatctaactctaaggttcaagctcatgtccgaaacttctttgctcatacccaaaacaaactctccagcttcatcagaaaacatggcaaacacaaacaaatccctcacaggcctcgagagtcttataaagcttctcccaacgggaacactctttatctaccttctacttaaccctgtcctcactaacgacagtgaatgctccacaggtaataaggtcatgtcgagcattcttgtcgccctttgcagcttttcctgcgtcttctcatgctttaccgatagtttcaaaggcgttgacggatcaacaaagttcggtatagtcaccaagaaaggtctttggacttacgcggagccaggatccgtggatttatccaagtacaagcttaggatagcggatttcgttcatgcgggtttcgtgctggctgtgtttggtacactggtgctgcttgacgctaataccgcgagctgcttttatcctcggttcagggaaacacagaagacacttgtcatggctttgcctcctgccgtgggtgttgcctcagccgctatctttgctttgtttccgagcaaacgaagtggaatcgggtacgcgccaatt

SEQ ID NO: 164842 - DNA, 1225 bp, Arabidopsis thaliana landsberg
catgacgcaaccattaaattttgttttctaaaaacgagttgggtgcttatatatatgtaggcttcaaaatctgagatctttaagaacattctagactcagatggatgcaaaaccgctccagaatacgccataacgctccaagaactaaattccgagcaacttcaagctctcttggagtttctatacaccggtacattggcttcagataagttggagaaacatgtctacgcgttgtttattgcagcagataagtacatgattcattacttgcaagagttgtgcgagcaatatatgttaagttccttggacatctctagcgttcttaacgttcttgatgtctcggatcttggttcgagcaagacgctgaagcaggcttgtgtagggttcgtggtgcggaacatggacgacgtcgttttctcggataagtacgaacctttctctcagaaaaaccaacatctatgtgtggagatcacaagggcgttcttgatggaaacgagaagcaagagacgtgactaattaagttagtgagattatcaatgaatgtttcttctatagctgttacttgattgatctttaatcttccaagctagaccttttctttgtttgataaaaggaaaatatgttttacgcatggcccatattccggcccactaacagtaacatatataaagcccatcaaaccaacgattgggacctattaagtattaaccgttcataacctagcgaagggtttaagtggcaaaagattatcgttcccttgggcggttttaaaatcgaatcgacagaaaagggaacagagttgaagaagcgaaatggatagagaggatcttctttgcttttgagctggtcaaattcactagagaataggaatagtgtccttttgaatctccaatatgatcaagctatacacgttttcgcatattagtgatgaattaactaacttgctgctaaagaaattaattgacagatttgataatcagagagacatacaattgatttattttccttgatcatatgtctatctaaagatctctttttaggtaaaacaaatgtaaattatatatatagaaaatctaatgaatacttgatcatatatgtctagcctttttgaatcatgcatggctatcactccaggtccttattgcttctgccactgcctgtttcactgcttcagcatctatgcagtctccatcatcattctgtatttaattatttaagtaaaagt

SEQ ID NO: 164843 - DNA, 596 bp, Arabidopsis thaliana landsberg
atgtttccggtcaatgcctttttggcggggcgacccgtgacagccacctacagtgcgcgcgaggacacgttttgtctgatgttcacccgtgagtctgttcaaacgctggccgagcgaagcccggtcttttctgattacctgacccgccgcaccctgcagtttcttgatctttcccgcagggccgttcaggtggcctattcttcacaaaccatggccgagcaatcgcttgaaaagccacttcgtgatttgcaccggggtatggccttttcgtgtttgcctgaaacgccgatcaagcaggtgctggaggtgatgcaggagcaaagggttggctcaatggtggttgtaacgccagacaagcaggtgctgggcattttgacccggcaagacgtgttggcgaaggtggcattggctcaaaaacccttgaacacacctgtgcaagaggtgatgaaccagccagtgcacacgctggaggagcacaacacggcgcaagacgcagcgctgttgatgtcgagacacggcattcgccatgttccggtgacccgggcgggcgttttacagggcatggtttcagagcgggacatttttgccatgcaacg

SEQ ID NO: 164844 - DNA, 2369 bp, Arabidopsis thaliana landsberg
cactcactcctctcctctctctgacgatgcatcgacgttcgagctccgcggagccgctactgtgttacggcgatcagaagatcagacttgggagctcgacgctctgagatcctctcattctgttttcttgggaagatatggacgcggcggcgtcccggttcctccttccgcttcttcgtcgagttcttcgcctattcaagccgtctccactgtaagattcgataccctctcttgatttattatagttacaaggagttttctgcttatggtcgtgaaaaattcatgagatgctttttgaatcgccttcacgaatattcttaaaaaatttatgttatctgagattctgattattatcttagtggaaatgattactggattatgataattgatgcagctgtatcgtgaaaatcattatttattcggtaattcatagcttttcatattggtgattaatattttatgaaattgagtttaggattaaataagatatagcagtgtgagagagagagagattcagtgatgcgttctcatgtttgattttgtttttttgtttctttttttagcctgcgaagcctgagactgcgaccaagcggagcaaagtcgaaattatcaaggagaagagtaatttcataaggtatcctttgaacgaggagcttttaacagaggctccaaatgtcaacgagtcagccgtgcagcttatcaagttccacggtagctaccaacagtacaacagagaagaacgtggtggaagatcttactccttcatgcttcgaactaagaatccatctgggaaggtccctaaccagctctatttgactatggatgacttagctgatgagtttggaattggtactcttcgtttgaccacaaggcagacgtttcagcttcatggtgttctgaagcagaatcttaagactgtgatgagctcgattattaaaaatatgggtagcacgcttggtgcatgtggtgatctgaacagaaatgttcttgctcctgctgcaccttatgtgaagaaagactatctctttgcacaagaaactgctgacaacattgcggctcttctttctcctcaatcagggttctattatgatatgtgggttgatggagagcagttcatgactgctgaacctccagaggtagtgaaggctcgaaatgataactcccatggaactaactttgtcgactctcctgagcccatctatggcacccagttcttgcctagaaagttcaaggtcgctgtaactgttcctacagataattccgtcgacctcctcaccaatgacattggcgttgttgttgtttcagatgaaaatggggaaccacagggtttcaatatttatgtaagttgacactcatttagcctaatgtgctattatatatatttagtgtcaggcttgtatgcccgccttttctttcagtattctttttctggatactttcttggttttaaactaatgatgataatgactcatcttgtaggttggtgggggtatgggaagaacacacagaatggagtctacttttgcccgcctggcagaaccaataggttatgttccaaaggaagatattttgtatgctgtgaaggccattgtagtcacacagcgagaacacgggagacgagatgatcgtaaatatagcagaatgaaatatttgatcagctcctggggaattgagaagttcagagatgttgttgagcaatattatggtaaaaagtttgagccttcccgtgaacttccagagtgggagttcaagagttacttgggatggcatgaacaggtattgttactaaaacccttttgaaaattgcgtcactttcagaactttatagcatggcttaatcaataaaatcttatcgtcgttgtgtactgatagggagatggtgcatggttttgtgggcttcacgtagacagtggtcgtgttggaggtataatgaagaagacgctgagagaagtaatagagaaatacaaaattgatgtccgcatcacaccaaaccaaaacattgtcttgtgtgatataaagactgaatggaagcgtcccatcaccacagtacttgctcaggccggcttactggtaagcagttttatttgacccataaggtatgaaaatctaatagctattgtgtcttaagctgagcaaaccattgcttatttgtgcagcaacctgagtttgtcgacccattaaaccaaactgcaatggcttgcccagcttttcctttgtgccctctggcaataactgaggcagagcgcgggatccccagcattctaaagagagttagggcaatgtttgaaaaggtaagatctctctgtgcacttatctaatcttgtgccattacaggcatttgatattgatgtgccaaacttcttccttga

SEQ ID NO: 164845 - DNA, 1154 bp, Arabidopsis thaliana landsberg
ctttacggccgttggcctgaagttagggacctctggtggggtctctgtgggccgcactggatggcggaggccggtctcaaaccagctcttcaagctcttgagatcactttccggttaatcctcaccgttgctgctgacacacgtgcttacatcaaccgccgcgaatggatccgacggttggattccctcactaccagccagataaaaatcgtggcggctatctgcggagatgcagacaactacgaagagaacgtatcgtcggctccggtcacaaatggctggagcccgttgagtttacttcgcaagatcgccacctgtcgtacatcggagagtgttggacagaagatcttgtctacgatcgagaatgagatgcgttggtgtaagtatacgctcggtttaggagaaccaaacctcgccggaaaaccgtatcttcaatacgacgccgtttgtctcccggaggagctacatagcctcaagaacaatccttatgcttatcacatcgagaaccaagagaatcaaatgctctacactattcatcagattcttgaatcgtggatttacgtttctgtgaatcttttatatagaatcgaatcgagaatcgaagagggaaaattcgaaaaagcttcttcagacgtctacttgttggagagaatctggaagcttctatcagagattgaagatttacacattcttatggatcctgaagatttcttgaaggtgaagaaacagttacaaatcaaatcgacgtttccaaacgacgcattttgttttaggtcaaagggcttggtagagatggcgaagatgtccaaagagctgagacagaaagtgccaactgttcttgaggtggaggtggatcccaccggaggttcgaggttgcaagaggcggcgatgaagctttactcgaggaaaacagagtacgagaagatacatttgcttcagggaatgcaggccgtggagtctgcagtcaagagattcttcttcggataccagaagttggttgcagcgatgattgggaatgcagaggcgaatgcaaatagaacggtgtcgaatcacgagtcctatgactcactgactcaggtgtttatggagccaccgtattacccgagcctagaccccgaaagacatttttgggagaagtctggaggcattgtgat

SEQ ID NO: 164846 - DNA, 1206 bp, Arabidopsis thaliana landsberg
tgtcaatctggaatcatcctccaaaaagtcatggtgaaattacaaccatgattcttcatgatgacaaggtttgtatttttgattgtttcgttcttttaatccaaatttactttgttattattgaaacagatcattttaaattatttaatctttgagttatctgggaattttttcagaataatcgtgtagatgcaattcctgacacatggattcacatctctgactttcgggtcgttgttcctcaagaaagggttaggtattcttcgtttcgtttccacatcaagttcatttgggaaacaagcctcttccggaactggtgaagagacttctttgatttcatttttcccattgaccttaagtatccatgtcttgaggattgggattatgtcacgggtaagtttttagtcaatctatgttcttctcattttaagaatgaatttttgttagtagtttatgttattatttttttgaaatatgctattaatatattattctatacttagatgcaatgggtgtggtgacaaatatctcggctattaagaaattttcatttgtttgtccgccacggtgaaaccgactatgaatcaagatatgtctcattcaaactttttggacaatatgtaaattgtagtgtttttaagtatgtttagtaatgtgtctcttgtctgaaaaattagcttaataatgtattgcttagtctaatgttttgtcatattggttaggggagaaaaaatgaaatgctatgctgttggaagatgctgtgaactctttgttataaatttctcaaaatgtatcagttcagcgacttataaatttctcaaaatgaatgaagatatcagcccattgttgccattgtgaggttttggagaattgctgagattgagggttagttatttttttttctattgtaatcctatttacttatgattgttatttttattatataattttaaatgaaaattttagaacaggcgagaatgttttgaagagtgaatttggatcttcaggaatttacatcaatccaaccaatttccctaagatagatattccaagctacatgtaagaattttagtattttttattgtattggttaaccataacatcaattaatcaatacaattttttatttttctcttttacagccgtttcgaagattctgatgaactttcagagaacccaaagatggaagtgattgaagagaattag

SEQ ID NO: 164847 - DNA, 804 bp, Arabidopsis thaliana landsberg
gtcaactacgtaatgtttccaacaacacttacatacatatatgtatatatacacacatcttaccgtatttttataccgcgttatatgatgcagtggccaggagcaatatgcgatagccaaaaaggatgttgccctccaacgaaaggcaacacagcgtcggattttatcatccatggactctggcctcagttcaacaatggcacttggcctgcgttttgcgaccaaaccaatctcttcgatatctccaaggttaacatagatctatctctattagtatctaactgatatgttttgttgaaatcttccgactctgaaactagaataagtgaagctattatacaaatttattcttgtaaagcatctgaatttcggaaaaacaacagatatcagatctagtctgccaaatggaaaagaaatggacagagtggggagtgtgggcatgtccaagtaacgagacaaatctatgggaacacgagtggaataagcatggcacctgtgtccaatctatcttcgaccaacactcttacttccgtaccaatctcaaattcaaacacaaagtccatctcctcaacatccttatacaaaaaggtacataaaagatttggaaaaagaagataaacctgtggaaacaattatgcagattgatcattgtttgtttttgtgtaggtattaaaccaaatgatgggttttacagtttggacgagatcaaaaatgcgatcaaatgcgcgatcggatttgcaccgggtatcgaatgcaatgaagatgtaaaggggaataagcagcttttccagatctagatatgtc

SEQ ID NO: 164848 - DNA, 1352 bp, Arabidopsis thaliana landsberg
cttttaagggaaaacttgatgatggaactattgttgctatcaagcgtgcgagaaaggtagtagttgaaatccttttcttggaaaatatgtggaaaacagattgaactagtttcttaagaattattcggagaagacattatcgataactcaaaattctgtggcagaacaactatggcaaaagctggttgctagagttcaagaatgaaatatacacattgtcaaagattaagcatatgaatttggtaaagctgtatggatttcttgaacatggagatgaaaaggttattgttgttgaatatgttgccaatggaaacctacgagaacatctagatggtaagttgcaagaggtacttccttcttcttttacgtgtatatagagaaaaatccagtctctaattttagagcatagagaactttcccaaaaaataaaatatctaaatgaattctcaactattgatcctctatataaaaacacaggtttaaggggtaaccgccttgaaatggcagaacgtcttgagattgcaattgatgtggctcatgcattgacctatttgcacacatatactggtaatcttgtcatattgttgtcggtgttgcattatagcttattgtgccaagatttaatgcattagggattttataatgcagatagtccaataatacacagagacattaaagcatcaaatatcctcatcacgaataagcttagagccaaagtggcggactttggctttgctcgtttagtgtcggaagatcttggggctactcatatatcgactcaggtcaaaggatctgcaggctatgtggatccagattacctcaggacgtttcaactaactgacaagagcgacgtttactcttttggtgttttgctcgtagagattctcactggaagacgtcccattgagttaaagagaccacgaaaagacagactcacggttaaatgggtaagttactttctcttttccctttcaccagaagctcgagattatctcaacgactaaatcaggagaaactcgtttcatcttgggcaggcattgaggagactcaaagacgatgaagctgttctcataatggacccatttctcaagagaaaccgagccgccattgaagtggctgagaagatgctgagacttgcgagcgaatgtgttaccccaacgagagctacacgtccagctatgaaaggcattgcggaaaagctatgggctataaggagagagatgaaggagacgatgatatgttcatctgcatctaattcttcttgttcttcaacaacacatagcttcattggtcgtgattcagacagatatgcattgccgaggattgaagataacgagaatagcattgagtaa

SEQ ID NO: 164849 - DNA, 837 bp, Arabidopsis thaliana landsberg
atggatccgctgtcttcactgatgaaaaacgaagagccaaaaaactgggcggatcttccgacggatttgatgtgtttgattctgctacgtcttagcgtgactgagatactggagaacgctcagaaagtgtgtagatcgtggcgatatgtttgtaaagacccatccatatggcgtaaaatcgacatgcgaatcttgagttacaacaaaccagtactggtgaacaatcctgaggcgatatgtcgtaacgccgttgatcgtagcgagggtggcttgctggagatcaacattggggacttcgggagtgattctctccttacatacatcgcggagaggttctcctctaattctagttttgacttttgattacttttcatgtaagtcttcaagtgtctgttaaaaacagatatctcaagattatgatttataactttttacacaccattacttgtaggtcaagtaatcttagaagccttagactaatgtgctcagaaataacagacgatggatttgttcaagcagttgtgaaacttccaatgcttgaagagcttgaggtttcaggaatatcattgtcaggagagtctatgaaacttgcagggctgtcttgtccaaatctgaagacattgatgctaaaccgcctcttttacttaagttcggatgatgatgatcatgatgccatagcaattgcagaaagcatgcctaaactacgccatctccagctttgtgggaacaagctacccaaaacaggcttaaacgcccccctagacgcctgtcctcacctggaacacctcgataaacgccaaaaaatcaaccttgtcgaaaatctagagaagcgttgtt

SEQ ID NO: 164850 - DNA, 1345 bp, Arabidopsis thaliana landsberg
atgctgccgaagaaggcgctaagcaaggaggaggcggaggctaaaacgtcggtatggtgggacatggacagctttccggttcctagtgggtatgatgctggattgctggtcagatccgtgagtgtatagaacggaagttgcggaatttaggttacactggtcctgtcaccatctctgcatgtggcgagctacaaaaaacccaagagcacgtactgcgagcactctcttccactggaatcattcttaaccaatcctatcgtcgttaatcttcttcttcttcttctaatcttttttttatactacatattactagtttttagatatattcaatctggcttgagttgctgtcttttactgaaacagctatggcacacatataagaggataataaagtgaagaagaagaagttgatgaagaacgtatgagcatctagaggacgactaagaagaagaagaagagtatacatggcccatggagccttgtttttctccaaggaatttcatttggtgaatggttatgttttatacttttatttgtagccggaaatgttgggttaactttatactacttatgcttatatacaaatacaagtctcatcttttattcttatttttaagttaggatagtatgtttggttaatgtttttttaataagttaactcgttatcgtatatttacatatttcttttatggagataggatagtatgttcatacttcatgcataatactaagttggatgaataaaagctaaacattcattttctcatacaattaacaaatgaaaactgacttgtgtatgtacaatgcgatactaaaggtctacgtgtatgtagaaaaaggtcaaagcttgacaaaagaacaaaaaaaaagaatgaaaaatctggcttttgctctaattaaaccctaacaaaaattcggatgtgttcatagagttggttggcctagaagcagagtatgccaccaaccgcatgcaatgtttttggggaaacaatctttgattctaacctctgcaggtgcattcctgtcaatcacatctcctatacccaactgtttcagacaagacacaaactacgtcattcaatggaacgacaataacaattcagaaactccatatggtctttctctttttacctgtccgtatttgttccatccccagcagaatactctcccttcatctacaacaaacaaaaacacagagcagtttttttaagttttaagatgaatcactttcctagctaacatgaaactgaatctagtctttggttaaatgggttacctgtgattacagctgtgtggcgagccccgcaggagatggttttgacgtttacgttttccaatttggagc

SEQ ID NO: 164851 - DNA, 2513 bp, Arabidopsis thaliana landsberg
agccaaacaaccaattgggccatttgtgtgggcccaataaattttattttctgcggtgcgattgcgacaaaacacggcggagatggctgatctgattatttctgcgacagccgagtacaaccgtgtagctctcttcctggacttggaaattcggttagctacttagcttatggaactgatctcttcctgcaatcacgtgaaggcaacgattctgaatcagaaaatggaggcgcaaacgcagatgcggaggatttgggacggcttaggtatagtgggtatcacgcttatctcgtcttctcaaaatagttgagaggaaagaaaagtcttggttttgattgctattagaataacatagcttcctccatttttgaagacttatgtttaggctaatgttattttgcactgaagcttagagatacgatgaattattattgatttgttccttagatgtcgcttaggaattgaggacatgatctgtggtatgtaaaactgattcatattccttttctggatgtagatatcactggaagcactttgcttaaagtctctgattggtgtgggacttcattagtatgtgacacgttgttggctaaaagtcatgcactcattcctgggctggtttcatgccaccacttgaatcattaaagaccagtaggccagattgacaagcttgaatatgatgccaagtttactattttccattccttttggtctttggtatttaatattttctccttctttcacgcggttttccaatcgatgtgagattgctgtccgggtcaagcagttgtaagtctctttctatctaccttcttcttgataaaatatgagacagagctgctttagaaagcatgaaattgaattttttttttttaaaagttattacagcagtttgggcttacttactgttggtgagaattgaagcacatagagcatcaatgagtgtgattgtagagcaacgaagacaaaaatgcttccctgtgacgctgatcatagactgctgcacaccgcacatggaatatgtctcagattttctaactaatatcaggttatcggatatttacaatctccctggtgaatctgtgccaatgaatccagagatctttagtgcaatgagagcggggaacagagactttctggagaagatgagaagctatggaacaccaatggcatgtctcaagaacgataagggagattccattctacacgttgctgctgctttgggtcatcttgaactagtggagagcataatatctgaatgcccatctcttcttttcgagccaaattggaaggatcagattccaatccatgctgctgctcgtgctggccgtttagctgttgttgagactcttattaggtcgataacatatctttcagctagaatattgcctgaagaagagagggagagatttaatatttatgttctaaaagacatagatggagatattcctctgcacgcagcaataaaaggatgtcatctggaggccgctctctgcctcgtgaatgcgagcaagcatgcatcgtttcttgagaataacgatggaatatctcccttgtacatggctgtagaagctggaggtctagccctagtgaaagagatgttgaatggtcttggttataactccccagaccaaggttctaacttatcttcacagttagaagggagaaaatcgcttgtacacaaagcactagagacaaagaatccaggtttgcttttccattttatctctgttcatgttcctctgctcaagaagctatatattgaagttcccacttatttaaagcagatatcctagatgttattcttaatgaagatccaactcttggggacgagcgagatgaagaaggaaggacgtgtctttcaattggagcatccatagggttttataaaggagtatgcaacctgttagaccgatcaacgtcaggcgtctttgaatgcaacgatgatggttcctttccaatccatatggcagtcgagaaaggttatgtggatgttgtaaaagaaattataaaacgttgtccagattcaaaagagctgcttaacaaacaaggtcagaacattcttcacattgcagccaagaatggggtacataatcttgtaaaatcgttgatgcgaagtgatgatgcaaaacatttgggtgttggtcaagatgtggatggtaatacacctttgcaccttgctgtcctaaattggcgctaccgatcaattagaacgctagcttcggatgtaaagatacgtgcaactacgaaacgataactgcttaacagctaggggtattgccgagtcagtgctgaaacccaactacatctttcatgaggtatgcctgattccctatatcataccatttgatcacacattaatgattttatagcttggccatttttggattacagaggttgacactggcattcttattagcagtcacgcgtttaggggttgtggatctgttaagtcgttaacaaaaccatcagaactactagacaatgaaaagagcagtgggtatcttctagat

SEQ ID NO: 164852 - DNA, 395 bp, Arabidopsis thaliana landsberg
catggtcgttttggaaagcaccgtaagcttcccggaagtcgtggtaacgccggtggtatgcatcacaccgtatcctcttcgacaagtatcatcctggatattttgttaaagttggtatgaggtatttccacaagctcaggaacaagttttactgccagatcgtcaatcttgacaagctttggtcgatggttcctcaggacgttatggactaagcaacgaaacactatgtgtctatgattgatgttactcaatttggatattttaaggttttatggaaaggtttcttgccggagaataaacctgttgttgtcaaggctaagcttgtgtcgaatacagatgaaaagaagattaaggaagctggtagtgctgttgtcctcacgtttctactatactaa

SEQ ID NO: 164853 - DNA, 1351 bp, Arabidopsis thaliana landsberg
aaataattaaagttaagtgaaacgatgtggaataatccatcacgtgaatggatgtattatcgaatcgatccatttacgaacaatatctcaacggattatttggccggtgtggaagagttcattcaatttgcaagctctcatgttcaagacaaaaaaggtcggtttatggtccttgtgtagtttgtaaaaattctaaacgcatgaaagttgtcaccatttcgagtcatttgcttagtaaggggtttatggccaattattatgtctggtatgaacatggtgaagattgtaatgatactagggagggaactagtactcatcaagaatatgctgaaaacatcaattttactagtgatagtcataatgaacctataggatttgatggggataatgtttatgttgggatggttaatgatgcatttcatggttctgtaccatataacgagtatcatgaacatgaaagtggaaatgatcatgttcatgaagaacctacccaagaagcgaaacggttttatgatatgttagctgttgcaaacacgcctctttacgatggttgttgagaaggtcattcacaattatcgttggcagctcggtttatgaaccataaagtcgaccacaatttatcagaaaattgtgtggacggatgggcggaaacgtttacggagtatttacctgagggaaataagacgaccggttcctactacgagacagagactttgatgcgaaagctaggattgtcgtaccatacatttgatgtatgtatagacaattgtatgctcttttggaaagatgatgagaagttggagcattgcaagttctgcggaaaaccaaggtataaggaaagtgatggaagaacaagaataccatttagtaagatgtggtatttaccaattggggatagattgaagagaatgtatcaatttgagaagactgcagcgtcgatgagatggcatgctgagcatgaattagaggagggattaatgtgtcatccatcagatgcggctgagtggaagaatttccagcaattgcagcccgcatttgcatcagaaccgcgaaatgtgtatcttgggttatgtactgacagtttcaatccttttggtatgtccaaaaataattcgttgtggccagtaattttgacttcatacaacttgcctcctgatatgtgcatgaatagtgagtatttgtttctaacgattttgaattcgggaccatatcatccacgagctagtctagatgttttcctccaaccacttatcgaggagttacaagatttatggatgaatggaaatgaaacatatgatgtgtccttagagcaaaacttcaaccttaaagcagttcttatgtgactaaagcg

SEQ ID NO: 164854 - DNA, 1140 bp, Arabidopsis thaliana landsberg
gcctgaacacacaagaagcatttcactagagaagacgcttgctcctaaaccagatgaagaacacacctttaccaccaaacccatatctaaaggttcattcattttttcttcacctcttttgctaattatgatgtaaacttgttcggaaaccaacagagattgcaatttttggtatagaagatagaattttggtcattttgttctgaaatttgtgttccagatgatgaatctaagactaggagaggctcagctaaatcggtgttacacgaaatgtgtgcttccaagcgttggagacctcctgtttatgaatgctgcaatgttgatggaccttgccatttgagattgtaagtaaacatcttctaacccgcacttgcttttattttttgagtcgcaatcttttttgcatcaacttggttttttggttcagatttacatacaaagttatggttgagattagagattcttcagggaaaactgttttggagtgttttggggatcccagacgcaaaaagaaagctgctgctgagcatgcagcagaaggagcgctttggtatcttgagcatgtgaagacaaagccgcatcagtaaatcatcatttagtcgatatgaagtagctggagagtttagtaaagccatctatagttagttctaacgagggaagcttgaaccatattatacctatcttttaattcattatagctctatgggttgtaacagtttttgatctgtatcagaatttgctttgagtaaataaatgtttaatgattataatttctctaacttttctttcaaactttgtgccattatatttctccttagtaaggagcctttatctttatctttatgtttatggaatagaagagctcaagtcatccaagttagagaaagctttggagactttgtctggttagactgaaggagggaattcagttcagtgagatttgaaacactgatttttctcatttgcaactaagatttgagcattcttttttttttttggttttgttgcattctctcttgcgcggacagagactagaagaaacttactcaagaattctaagtaattgtaagatcttattactcttgtaaaaaaggaaaaaacaagaatatctcaaaaacataaaaaaagaagaagccacat

SEQ ID NO: 164855 - DNA, 2137 bp, Arabidopsis thaliana landsberg; identical to SEQ ID NO: 2749

SEQ ID NO: 164856 - DNA, 679 bp, Arabidopsis thaliana landsberg
cgaatgtggcgttagcttcgacgtgactggttcatgggggaatccccgcctgacctgcggagatgagtgcgcaaaggcccgtatcaacaggcgcgcgcccgtgagcgttacgagtgggatgagtcctatcaggcccgagctaggggtacgcgcggagtctgctctaagtgcgaaaagccaattcacataagggccaccagtagggcgaatccggtatgccgcgattgccaaaaggctagccccacttacaagggcgcgattcctaccgcattcccccaggcacctaagttctgtgccgactgcggaattgactgcattcgcaagccgagccgttacgacggcaagcgctactgcctcaactgcgcccaggtaagggcagttcgccgagacgtagataagcgaaggcatcgccgcgctagggctaaggaccggcctagtgaacgctacaccttggccgaggtgcaagagctttcttgccatgtgtgcgggccttgcggcggactggtcgatcccaccctgtcgggactagacgaatggggtccaaccgtggatcacataattccgatctctaagggcggcacggatttgcggcataacgttcagctcgcccatagggtgtgcaacttgaggaaaggcgcccgaatctaaacaggagaatgggcgggtgaagggttatggc

SEQ ID NO: 164857 - DNA, 2555 bp, Arabidopsis thaliana landsberg
atgcgagcgagtttgagcgaagctcaaacccagccgtctctcatccaaaccctaattttctttcttcttcgcctattctctctcgatccgacgactgccgaagctgctcgccgccggcttgaacttcttcagcgactcattgccgtcgtgtctacatcttcttcgccgccgtctggagcttctcatccacgcttgttcttcgtcgccgccgtctggagcttcttcatcgacgcgtgttcatcctctcttccgtgtctacctgttcgtcgccgccgtctggaaccaaaggtaatgtttcaaacctagagtgtatcttcattctataataaggattatcgattagttttttgtgttggtctttcaaaacctagtgttgaatcggttttaatctgtcttattcgagtttatatttggagatctaattaggtttctagttgcatgttgattttcattgtagatcttattagggtttcttgtttccctttgatttcattgtagatctaattagggtttcttgtttccggtcgatttttattgtagatctaattaggatttcgtgtttccggttgattttcattgtatatctgtttagggttttctatttgttgattttcgttgtatttcgaattaacctttactaatgttctcttttttttgcaagatgtcattcactggcaatgattattcccggcttcgatctcagcaacaaaatcatcggctctttcctagtgaaagaaacggttcatccactcagggtaatctccaaaccccaatcaattccaacaatcaagccaatggtgcttctcctccgcctgtcaatcaatctcctaccggttctgccaatcaatctcctcgcggttctgccaatcacactactccactagctgctcggctcaatgacctgactatagaagagttgcttgctagccctggtcgtgcagggttgcctaaattagatcccaatcgacctcctggtactctctgttaagccactagggtctgttctcttcactatttagtttgtagacacatttagttttgtctgtctgatggagtctcgatttgtaggtttgacgatgacacctcagttgcagccactgtccgaagcatttttgaaaaagatttcaaagagcctcatgcaaatgggtcacagacatcagaagcagtggtcgatagatggtttgaaacatttgctgtaagtgaaataattttgtgttttgtttggtacagcttttggtcttgtctatttctaatgtgtcttgtctttgttttgtagcaagtatataactgggaccctgcaataaaccagagagttagattggagtttgaggcaaagatgaaggataggatgtctgatcaagttggtcgttggaagggaaagtggaaggagaagggaaatgaggcaaaaccgcggtggatagatccagaagtttggaaaggtctggttagcttttggatggatccaaagtcggaaagaaagagtctcaacagtaggaatgtaaggtatcatgatccggaaggcctcgggatacataaacaccggtctggacagacctcatacaaagccagagcccgcaaacgtgtaagttaattaaatttcatactttaaaaagcttgtatttcaaacaattgacctatatgtttatgtgttttagtgtgagatgacaggagaaagtactccagattttctcctcctcttagatgaaacacataggaaacctgatgggagtttcatcgatagaaagtcagaggagatctataaggaagtgtcatcgaagattcaagaggaagagtcacttctgtgtttaggcgacactacagagagcacgggttcaggcgggttatctgttcaggcaaagaacaagatctatgcacatgtatcttatctctttcaactcaatatagtgtcggacatatggcatcgacttaatatagttgcaacatttttttgttgctttggatttgtctgttgtggcttgcattatgtctttgatgggataattgcagttttttgtgttgctttgtatttctctgttgtggcttccattgtgtcattgtgttttacactgaattgattatgttgtgtttttagtttgcaaaatgtcaatgtgtgtaaactgatatgattatgttgtgaaagaagtttgcataatgtcattgtatttttggcctgattcagttgtgtttttggtttgaataatatcattgtattttcggcctaatatgattatgtctgaagctataagttttgcattatgtctatgtgtttcgaatttgctttgattatgtttgctcggtttggttgtgagtttctgacaggttgctcctaagaagaaaggcgggatttatggggccagttcattgcagcaagaggcgtcttcagcttatgccggtccggtgcttcctcaagatgatccggttgtgctctcccaaaagctggctgttgctgaagcccttattgcaaaccaggctgaaaagatcaccaattttgatgcatactttgactaccttgccgagaaggatccagagttcggtgcactgtttcgatccaggtc

SEQ ID NO: 164858 - DNA, 1095 bp, Arabidopsis thaliana landsberg
aatcatcaaaaccttaagggacgcattaacactcacatgttgcgaattcaattttcaaaatcaccgatccttccgaattcttcttcatctgaaaaaatcgcttccatggcctccaaatcagcggatgctaaagatatcatcactttacacggatttgctgccatggtcagtgaattcttctgtgggtatttctcatactcaacttcctcaaaattctcattccattttccccgatttgatgattttcttcttcttcttcttctaacaggttacgctgcgaacaggtgagaattgaatccgaattttcaattttagtttctggaattctccgattgtgtttttttttttttacagtgaaattgattcgctttttctggggtatagtattctgtataatcgtgcagtttatccagaggaaagttttgtgaaagtgaagaaatatggacttccgatgttgcttattgaagatgaatccgtcaaatctttcatgtctaatctcacttctcagatctccggtaatgtatttttccatttccatgaattttattgaaagattcctcttgtgagagaatctgagacttgattttgtttttggtctaaagaatggcttgaagctgggaaattgcagagagtagtgttagttataatgagtaaagctactggtgaagtcttggagaggtggaattttcgtattgagactgataatcaagttgttgagaaagggtcagttttttttctcaagtttgtttgttttctttgattctttgtttcattatgttatctttatggaactttttagtgtgtcgagggagaaaagtgataaggagatcatgagggagattcaagctattatgagacaggttgcttcaagcgttacttacttgccttgtcttgatgaaacatgtaagaaccaattcataggaactttgagtgatcatttcgaaactagtttgctttggattctcgtttttgattgtgtctgtttcattctttgtattaggtgtgtttgatgtattggcgtatacggataaagatgtggctgttccattcacttggatcgagagcgacccgaagttgattgctatccgcagatgg

SEQ ID NO: 164859 - DNA, 977 bp, Arabidopsis thaliana landsberg
  unsure (1)..(977): unsure at all n locations
tacgcgcgcgtgatgagcgccattcccatccacgacgtggccgaggacttcatccgccggcgcgccgtgcgccacatcgaaaagggccgcatcgcgctgttcgcggccggcaccggcaacccgttcttcaccaccgattcggcggccgccctgcgtgcggtggaaatcggcgccgatctgctgctcaaggccaccaaagtggacggcgtgtatgacgccgacccggccacgcatcccgatgccaagcgctacgaccgcctcagctatgaccgcgtcatcgaggacaagctggcggtcatggacaccgccgccatcgcgctgtgccgtgaccacagcatgcccttgcgcatctacgacatgacctgccccggcaacctggcgcgcatcatcgccggcgagaacgtcggtacgctggtcgccaaccccggcgtgtgactaaatccgccccatcgcattgcaatactcggtcggatatgacgttttaaggggagcccaccgtgctcgacgagatcaaacagaacgcccagacccgcatgggcaaaagcatcgaagcgctcgaacacgagttgcgccgcntgcgcaccgggcgcgccagcaccgctttgctggaaggcatcaaggtgccctactacggccaggaaacgccactgagccaggtcgcgaccgtggccctggccgattcccgcacgctgaccgtcacgccatgggaaaagaccatggtcggcgccgtggaaaaagccctgatggattcggacatcggcatcacgccaaacacggccggcatggtcatccgcctcaacatgccggcgctgaccgaagagcgccgcaaggaactggccaagcacgtcgcccatgagggcgagcagtccaagatcgccatccgcaacatccgtcgcgatgcgctgcagcaggccaaggacctgctcaagaacaaggaaataccgaggacgacctgcgtcaggccgatgacaccatcc

SEQ ID NO: 164860 - DNA, 6306 bp, Arabidopsis thaliana landsberg
atgagacttagtgattgttattcacggctgaagttccattcgaccggtgcaatggaatggctctgcttccgccttgaacttttatccactttcgcattcgcttcttcacttgttatcttagtttctgcccctgaaggagtcattaatccaagtgagtcaccacccctttttattattgattttgttttggtgcagatgcacaactaaaaatctcccacgcctttctcggtattttgcttcttaaaggcttagcaggactggcgattacatatgcactcaatctaaataccctgcaagcaactttaatatggacgctttgtgatctcgagaacaaaatgatatctgtggagagaatgcttcaatacacaaacatccccagtgaaccacctcttgtgattgaaacaactcggcctgagaaatcatggccttctcgtggagagattactatctataatctgcaagtacgatatgggccacatttgcccatggtgctgcatggactgacatgcacttttccaggaggcctgaaaaccggaatcgttggaagaacaggatgtggcaaatccactctaattcaaaccctttttaggattgtggaacctgcagcgggagaaatcaggatagatgggataaacatcttgtccattgggctgcatgaccttcgttctagactaagtatcatacctcaagatccaaccatgtttgaaggcacgattcgtagtaacttggaccctcttgaggaatacactgatgaccaaatctgggaggtttgttggctcttgtttctttccatgtttctgcagataacaaaaggaaggttctcacacgattttctcgtcctcttttcaggcactcgacaattgtcaacttggggacgaagtaaggaagaaagaactaaagctggattcccctggttagtgttaataaaactattgtttacaagagtcatcttgaatctggttatcacatctaatgaaatgaatctcttatattttagttagtgagaatggacagaactggagtgttggtcagagacaattggtgtgcctgggacgagtcttgctcaagagaagcaaattactggttcttgatgaagccacagcttctatcgataccgctactgataatctgatccaggagactctgaggcaccactttgcggattgtacagtgataacaatcgcacatagaatatcttctgtgatagacagcgatatggtcctgctcctaagcaatggtttgtctgaaaaaaatctcaaattcattcgatggaacttgtgtgcatatgaaacattgagaaatgtcttgttgtgttctatttgcagggatcattgaggagtatgatacgccagtgagattactggaggataagtcttcctctttttctaagcttgtggctgagtacacctcaagatctagttccagtttcgattgaagcaaagactctgctattttcctgctgatgatgacgatgaagaaaaacttaggatgtctgaatctggtttagccacaacactagctggattatgattcacacaagaagaaacactatcttttgttaaaagcttttgttcttagtttatagcttctactactgttgaacccctaaaaacgattattctacatcgctagtttcaaatcaatgcaataaaagattgttcacttctgattgaaaatttcagaaacgtttctcaataagtcattattgatttgatgaaagttaaaacaaaaaaccagggatcaaaaacaaaaaacaaaaaaacagagcttgatagactcaaaacagatgaaagtaaaaccgacgcagcatctttgttgaagagcaaaccgggttagtttttattaaatcaagatcacacgggtctatgaacaaaaaccgggacggtttagtaatctctttttgcgtggttgcttggttggtggatgcgataggggtattaatgtaattaactattatctgcctgccacttgctcacgagcgactttggtctgagaaaaacaattttgacggaggaaaggctgcgccttttttctccgcaacttcaccattttcggcttttcgctgccggaggggtttccccattgccagctatgaaccttagttctcattctcaaaatcaccattttactttcactaaacagataactatccttttggtctaccaattttagacgcttctgagcatttacagagacattgactgagtaaggaggagccgtcttatctttcttcatacttgagctcttcccacacgtcacataccggaggcatttttagcgaagtttctagctccaaggttctgtttttgtttgctctagggttttctattatcaggttcttatgatgggtatggcacttgaattatctgttctgggtcgatctgtcattgactctaaaaccttaaatttgaagagatatggtcaaaaatcgaagctttcaggaagatttctgcccagagctgagctgcactgccctgtggcgttgagttcttctaaacactccaatttgagttttagattccgacgaagttgtgaatttagctacagaagtcgctttatgctgtttagctccagtcaatgtcacgagggcagtcaacgaaagtccgattctggtgaaaaggagctggagtcgattaaggttttgctgaaacgtggaattgtgataggagctctagtctgtggagttttcttgtatggatgtcagaaagtgttggcatcggctggtgtggtcgaagcaggctatgaggtgtttggtcagagcgtagtgttgtttaagaatgctttgcctaaaatttaccaggttcttacggttcttagagagcaaggtctaattttggctgcgctgctcagcctctcagcattctaataaatggcagagacgtccattaccactctgtggccgtggaaggtaaaatcagaacattcattttggtgtgatttagtaatgctaatgctgtttagttgattttggaacaacgagatctattggcaagaatatgttgtttaagttactcaatttgaaaattccatacaatttttttgcctggtctccaatgttcttataatgttgtatctgattggttttgacatattgctgtgttatgtacggcttatctcaggtgcgtgagttggctgagaaagaaccagagaatggtgtattcagaatgctccggagtgatgtcaccagattcttgacgactatacttattggaacaacgtaattgttttttcctagatatgaatcgtctttagaggattgctataaatattgtctcttatcttaggtcttgtggttggtcttagtgttgtgaatattgcggcaactgcactggtcactgaagcagcaacagctatatttggggaagctggtgttagtgctgccactggattgatgacagtatgtataattgtttcaacactttttcatacctgtaaactttataatccttttgtttggtttagtacaatgcctcttttgtttctgtctggatattctttgatcagtataattgcttcctaagaatttgccattcttgggtgactatataggtggctattttactcctgactgagattactccaaaaagtgttgctgtgcacaatgctcaagaagttgcaaggattgtggtaagttaaaattaattgtcagtggttcactctaagcaaactttatgtggatatccaatggctttgctcattgtgacccttctgctatgaaatagtttaactgttcaaatctcatatgtgggtagtaaaaagacatgacttattttgtatgactgtgcataggtcaggccagtggcgtggctttccttagtattatatcctgtcggaagaattgtcacatatctgtcaatgggaatactgaaaattcttggtttgaaaggacggaggtatgcatcagtctagacttgttttaatatttgattcggtttggtggattgtcatgccttctccttggtaaaagttagcagatcctagatgtaaatcttgtggccttttttgtgtgtgtcagtgaaccatatgttactgaagatgaattgaaactgatgctacgtggtgcagaattaagtggggctatagaagaggaagagcaggtatgagtttgttatatatggattttcgatgagtctataccatagacttgtgatagttcacatgatacatgttgcaggatatgattgaaaatgtgctagagattaaggatacccatgttcgagaggtgatgactccccttgttgatgtagtcgcaattgacgccagcgccagtctagttgatttccatagtatgtgggtgacccatcagtactcaaggtaaaaaaattccatagacttctcacttaagccgtttcccttggattattcatcaagctcaattaattttcttctcagggtgcctgtttttgagcagcgtattgataatatagtgggaattgcatatgctatggatcttctagattatgttcagaaggtttgacagtttcatttcctatttcttgcttccagtttttgttagggtttctttctgttaattgtgttgtagaatgaaatatactgtgtttgattttgaagggtgatctgttagaaagtaccactgtggtggacatggcacataaacctgcattctttttccctggtaatcatagatgcattcaatctgtttaatctagatacactagctttgacattcgttgttcacacggaataatctttgatgttatgtcaataatttgcagattcgatgtcagtttggaatcttcttagagagtttagaataagaaaggttcacatggcagttgttcttaatgaatacggcggaaccatcgaagtatgttgctggttgtcctcttcgttactttattttttctctcctgctctcttgaaaggttgtctaatttctctccatgcagatagtaactcttgaagatgtggtggaagagattgttggtgaaatatttgatgaaaacgattcaaaggtaagctcatcctagtttcagcttgttgccattcttcaaggttgggttgaatagtaggagattcagaacaaaacgggttatatctgagagcagaggagattcaaatttctcacttccattgttttgggctcaataggaggaaattcagaagaaaacgggttatatcgtgatgagagcagaggggatatatgatgttgatgccaacacttcgattgaccagttatctgaagaactcaacataaagatggcagaggtaatatactctgtagccgtgtctttagtgtgtccctctagaaggaataaccgatcttgaagattgcttgttggcagagtataaactatccttttgtttcccttttcgcagggccatcagtatgagacagtctcaggttttgtctgtgaggcctttgggtatatcccaaagacaggtgagagtgtgacggtagttcttgaaaaggaaaactgggaagagaatgatgaacaagacgagggtaagcacgagcgtacaagatcagaaggagaagcaccaagtttatagactagaggtacatagattcatagtactacttctctttgcactaccacattctgcaaaatgcatatattattctcttaactgttcagacagatactagcagggaatgccagagaagtgagtgcagtccggttcgaacgagttaatgatatggatcaagtgtgatttgtgaaaggcccgagatggttcccaagttcgtaagaaaatggagaagtgaggaagattccgatggtaatctccaagccaagagaatcatgcatcgaaacaaaagtttagttccatatattgtaaagagaattaagtattgactctaataataaatttgattaaattaaatgactcatttgcaataattacgtagctaaatgggcttcacttaccattatacggcccaatgaacactggctccgagttttgccaagatataaacgattcatcttcttcgtttcatgaacagaagaaacagagcaagtttacacacagagagttaaaaccctaaaccttttcgtttcccaggaacaatggctaatcgcgaaacagattcctcaccggagattcgctgcgtctttgtagaaaccaacctcgacactcgtctcgcgttacctgtgcataaagatgaaatcatctccgatttcaaaggtctctcttctcaaattcatcactgaatcggcttactaaaacttatagttactgcgtttctctgattattgtggtttttggtttatagacaaagtactcaaggagcataaacaagttttcccagaaattggagaaatcaatatctctgcgatgaag

SEQ ID NO: 164861 - DNA, 529 bp, Arabidopsis thaliana landsberg
  unsure (1)..(529): unsure at all n locations
gtcgctgaccaggacttgtcttcccggtggggaggggcccgacgncggtgcggcagacgggtgaggcgaagaaggtgtgcgccggttgcccggtgcggcccgtctgcctgcggtacgccctggcgacccgtgaggcgcacggcgtgtggggcgggctcagcgaggacgagcgccgcgcgctgctggccacggtcgcccacgtccaggacgacgtggccggggcgggggtgacggcgtgaccaccgtctacagcacccgggccgcgaagaagctggacgcggtgaccgtgacgcgggctcgtgcggaggccgacgtcgccgcggcacgggctgctgcggagcgggccgacgctgaggtcgccatcgaggcggcgcgggcgcggacggctgccgagcggcgtcgggctgagggggaggcccgccgggaggccgaagaggagaaggcgcggccccgggcggcccggtcggcggcccggcgagaagccctcgagcggctgatggcccggaaggagctggcggtcaccatcgcg

SEQ ID NO: 164862 - DNA, 576 bp, Arabidopsis thaliana landsberg
atgtccaaggcagctaaagatgctgcactcaaaaattttaaagaagagccagattgcagagttttattaatgagcttgcaagctggaggggttgctctaaatctaacagccgcttcgcatgtaagaagtgtacaacttataaaacagttgctcctagaacatgttttattcactgacattcgggtgtttgattgtataggtgtttatgatggacccgtggtggaacccagcggttgagaggcaagcacaggacagaatacataggatcggacagtgcaagccaatcaggttagactttagttctctccttcaatctctgtattgttggtgggtaaaaacaatgtgtcaatacatgtctgatttgtggaattacagggttgtgagattcataatagagaacacagtggaggaaaggattttaaggcttcagaagaagaaggaacttgtgtttgaagggtaagtaaaacattctcaacttcttttccgaaccttaaaactactattgaaggttattataaacacatttttgttcattacaggacggttggtggctctcaggagactatagcaaagctg

SEQ ID NO: 164863 - DNA, 1327 bp, Arabidopsis thaliana landsberg
aaggatagctttttgcagttattagttaatatttgactgcaaacgtgtatcagaaattagaagaggtttgattgatatatgttcttgtataggatcaaaggaatgttgattatatatcagaaattagcgtattcaaacttgtggatttagttgtcccaacaatgtatcgaaaggaaattgaatttcttctattcctatcatgtttcaggcttgtgctgatttcatgtcacgaataatgggaggtaatgtgtcatttgatccctcaaatatggtgataacagccggtgggactcctgctattgaagtattggccttctgtttggctgatcatggaaatgcttttctaattccgacgccatattatccagggtaatttttagtttacacttctcgaccattagtatgtggtgaaactttttgatttatacaccagtcttctcttcctatgcgatgtactaaggaaacttcattttgcagctttgatagggatattaaattccggacaggagtggagcttataccagtacactgccgtagctctgacaattttactgtaacggtttccgcactggaacaagctttgaatcaggctagaaaacgaggaagcaaggtttctggcatcctcttttcaaacccgtcaaatcctgttggaaacatactatcaagggagacgctttgtgatattttgagatttgctcaagagaagaacatccatgttatttctgatgaaatatttgcgggttctgtttacggggacaaagagtttgttagcatggctgagatcgctggctcaggggaatttgataagactagggttcatatcatatatggcttgtcaaaagacctttcaattcctggttttagagctggagtcatctactcctttcatgaagacgtagtaaatgctgcaaagaagctgatgagattttcatcagtgccagttctagttcaaaggatacttatctctctactatctgatgtaagattcattgagggatacatggcagcacacaggcaaaggatccgggataagcatattcggtttgtggaaggtttgaaacaattaggaataccatgtgctgagagtggtggtgggttgtattgttgggtagacatgagcagtttactgacatcttacagtgagaaaggagaactcgagttatttgagaagctattgactgttgctaagattaatgccactccaggaacagcctgttattgtatagaaccaggttggttcaggtgctgtttcaccgctttagctgatgaagatatcccagtgattatggaacgaatcagacagcttgctgaatcatttagatcttga

SEQ ID NO: 164864 - DNA, 1792 bp, Arabidopsis thaliana landsberg
atgatgaactccgttgagatattgggtgattactacgtctcctccggtaagtttatgttcttggatacttctgctttcaatcctaacatttgtttcacctttgtgtcctcactacaagaatgcttctcaggtagcttttctcttcactgagtttaggtgcctgtggtgttctgttgtgtgttaactagcttaagcctctacaactttttaaaccttgttaaaccttgttgcttctccgagagcatttattgagtcctctgaagatctgtttttacccatcctactaccccacaatcattactatacttaccagcttctggaaactcctaagctcattgaagaaaatgatttaaccctcatgggtagactaaccaacccgtctgccgaaagactatggtctttattcctatatcttactaataaatggaatctgaaaaggaaagccattggcttacatcttggaaaatgttgctttcaatatccttttgactatgaagaagattttcagaaggtccttgacaatagaccctaccactatgatcaatggatggtcattttacaacgatgggagccaataatttctgactctttcccatcatgattcctttctggatagagcttcggggcctccctaaacactattggcagtatgagatgctgaattctatcggcgaagaacttggcaaaattatggatgtggacatcagcccctctgctgcaaaacttcgtgttctcattaatggtctagaaccattaacaaaagacactgtcgttgaattccagaatggaaatgaggctctggtaaccttggagtataaaaaccttaaaaaccactgtcaccattgcctaagactgtcccatgaaaccaaaaactgccctggagtactagcctcaaaagggaaacctttgtcttccccccaggcggttagttctactgactcaaaaggagtatccagaaattactacacgtctaaggataacttcactgcccctagaaacgtcccattgatctctgcaagttcaggattatctcagaaagctacaaataatttgaagaggaacagggaaaacttaagtactggagggccttaccagtctgcagagagatctcagaggcatagggagactagaggatactttgatcgtccccgtcagtatgacagaccagtgcatagaactcaaacaccatcgagatcaggatcccacagggatagggctcatacacctgaaaatttccaatggagagaaaaatctctacctgagaacagaacagtccctgcagtttctgacctttcccagccaaggagacctcctcttgaaagatctcctgtgcccctggagatccaaagtcagctcccagaccctttagggagacaagaatcccaagaagtcttcctaccaacccctgcaatcccctcaaaagatcagatacttggtgaattaagagatgttacagttcaatacatcacttgtgcagacccaactgagagtgctgctagaagacaaagagttctacagggtgaagcaaataaccttatgagtaccaaggctgataaaattattgaagcagttgtagcctctgcacctgcaaccccttcttcttcaacatcccctggctcaaagagtcccacttcacttgtggttactctaatcaaagatttggttaaacaaccaaaaagagggcgtgggaggccacctctttcaaaacaaatgggtaaaccacccatcaacctgaagggagcaaagtcccagaaaagaaactttgtgaaaggttcccccaaaaagccttatg

SEQ ID NO: 164865 - DNA, 744 bp, Arabidopsis thaliana landsberg
ctctctctgtctttctcaaatataaaactcaccaatcaattcttcatcttctggttctttttaccattctttgcaatctccggtgatgatgattataaaaatctgatctttaaaggttgtgcaaatcagaaatctccagacccaactggtgttttctctcagaatctcaaaaacttattcacttctttagtttctcaatcatcacaaagctctttcgcttccgtaacctccggaactgataacaccaccgccgtgatcggtgtttttcagtgccgtggcgatctccaaaacgctcagtgttacgattgcgtctccaaaatccctaaactcgtttctaaactctgcggtggtggcggagatgacggtaatgtggtggcggctcgtgtgcacctcgctggatgttatatccggtatgaaagttcaggattccggcaaacttccggtacggagatgttgttccgtgtctgtgggaaaaaagattctaacgatcctgggtttgtcgggaaaagggagacggcgtttggtatggcggagaacggcgtgaaaactggatcatccggtggcggaggagggttttacgcggggcagtatgagtcggtgtatgtgttgggacagtgtgagggtagtttgggaaattcagattgtggggaatgtgtgaaagatggatttgagaaagcaaagagtgagtgtggagagtcgaactcgggacaagtttaccttcagaagtgcttcgttagctatagt

SEQ ID NO: 164866 - DNA, 950 bp, Arabidopsis thaliana landsberg
atggaagcagctgcggaggctgtatcagccgctagggagcaatcattgatccttaaagggaaacggactaagcggcaacgtcctcagtccccaatccctttctctatcattcctcctatgtcttcgcatgaaccggatgctgaagaagagtctactagtcttgtttccaaggagaagagtctcaatgatgaaatcaacaacaataacatcaagaataataacaatactttgatcaatggtgttacatcttcatcttctgcctcttcatcttccaacaacaatgccacattaaaggccacggctgacgaagaagatcaagatatggctaattgtttgatcctcctcgcccaaggtcactctcttccccacctccaaccgcaaccgcacccccaacaacaaacaagacagcttatgatgagttaccaagattccggtaacaacaacaacaatgcgtatagatctagcagcaggaggtttctagagacatcttcatctaacgggaccacaacgaacggtggtggaggcagagccggttactatgtttaccagtgcaaaacatgtgaccggacttttccgtctttccaagctcttggtgggcatagagccagccacaagaagcctaaagccgctatgggtcttcactctaaccatgaccacaagaagtctaactacgatgacgccgtttctctccatctcaacaacgttctcaccacaactcctaacaacaatagtaaccatagatcgcttgtggtatacggcaaaggtagtaataataaggtccatgaatgtgggatatgtggagccgaattcacatccgggcaagcattaggtggtcacatgagacgccatagaggtgcagtggtagccgcagcagccgcctctaccgccaccgtatcggttgaaaccattccggctactgcaaacacggctttgtcattgtcgccaaggtc

SEQ ID NO: 164867 - DNA, 710 bp, Arabidopsis thaliana landsberg
aactcattttactaaatcagatcgtaaaaaagtttgtggctgtcaaccttcttacaagggtcttgaactttgacggatgcaaaacttgggctggggcttatacactcattccagctatcaaaaaactctatactaaaaaagaagatcaaatcgctgctcttgagcgtcaccttgagttcttcaacactcatccatacgtagctgctccagtcatgggggttactcttgcgcttgaagaagaacgtgctaacggtgtggaaatcgatgacgctgctatccaaggggttaaaatcggtatgatgggacctcttgctggtatcggtgacccagtattctggtttacaatacgcccaatccttggatctctcggtgcttcacttgcccttactggcaatatcttggggccactcctcttctttgttgcatggaacttgattcgtatgtcattcttgtggtatgttcaagagattggatacaaggctggatcagaaatcactaaagatatgtctggtggtatccttcaagatatcactaaaggagcttctatccttgggatgttcattcttgctgtccttgttcaacgctgggtaaatattaaatttgctttcgatgtttctaaagttcaactagatgaaaaggcttatatccattgggataaattgccagaagggtctaaaggctttagagcacactggcggtcgttactagag

SEQ ID NO: 164868 - DNA, 1789 bp, Arabidopsis thaliana landsberg
atgtgtatcgattataaaaagttaaatgctgcatctaggaaagatcattttcctttaccattcattgatcaaatgcttgaacgcttagctaatcacccatactattgctttcttgatggatatagtggtttttttcaaattgcaattcaccctaatgatcaggagaaaaccactttcacctgcccctatggaacttttgcttataagagaatgtcattttggtttatgtaatgctcctgggactttccagagaagtatgacttcgatattcccagattttattcaggagataatggaggtattcatggacgatttttcagtgtatggatcctctttaattctcctcatgtttgttaaatttgtgcagggttctagaaaggtgtgaggaaaccaatttggtactcaactgggagaagtgttacttcatggttcataaaggaattgtgctagggcataagatttctggtaaaggaattgaagtcgacaaggcaaaaatcgatgtcatgattcagctgcaacccccaaagacagttaaggatataaggagctttctaggccatgcaggattttacaggaggttcataaaagatttttcaaagattgctcgacccctcactagattgttgtgcaaggaaactgagttcaactttgatgaagattgtctcaaagctttccatttgataaaggaagcattggtgtccgcccctatcgttcaagcacccaactgggaccacccatttgagatcatgtgtgacgcattcgattatgcagttggagctgtcgtagaccaaaagattgatgacaaacttcacgtcatctactacgcgagtagaacaatggacgaagctcaaacaagatatgcaaccacagaaaaggagctattagctgtggttttcgcctttgagaaaattagaagctatttggttggtttcaaagtgaaggtctacacagaccatgcagcactaaggcacatttatgccaagaaagaaaccaagccaagacttctaaggtggatactgttgcttcaagagtttgacatggaaatcattgacaagaaaggtgttgagaatggagttgcagaccatctctccaggatgagaattgaagattcagtcccgatagatgacactatgcctgaagaacagcttatgttctacgatcttgttaacaaaagcttcgacacaaaggacatgctggaagaagcatatgcagttgaagaagaaaagttgccctggtatgcagatttaatcaattatttggtaagtagtatgatcccccagagtttggatgcatataaaaaaagaagttctttagagacatccaccattactattgggatgagccgtacttgtataaaaaggggagtgatgggctattcaggaggtgtgtctctgaaggggaagttcaaggtatactgagacattgccatggatccacctatggagggcattttgcaaccttcaagactgctcagaaaataatgcaagcaggtctatggtggcccacaatgtttaaggatactcaggaattcatagcgaaatgcgatccatgcaaaagagttgggaacatatctagaaggaatgagatgccacagaattcaattcttgaggtagaagtttttgatgtgtggggaatagacttcatgggtccgttcaaccctccctcatatggaaatgcttatatcctggtagcagtggatacgtctccaagtgggtggaagcaatagcagcaccaaccaacgaccacaaagtagtcctgaaaatgtttaagtccgttactgagagaacag

SEQ ID NO: 164869 - DNA, 3145 bp, Arabidopsis thaliana landsberg
atggatgagggttggatcacgccggctaatacaggacgtagtccggggaaaacagagggtcttaagtacggtgaggtttctatcctctctaactcgttctctgccttgggtgaagaggaagttatgggagcagtagaagcaacagaggaggtagcggaaaaggtagaccaggagcctgctttggttgtgacagatacaagaattacgatttcaagggaggttgaggacacggagctcttaactcgaggagataaggaggtccttttgcgttcgtctttacctcgtgcatctaaaactgctcataaagcgatcccacataactcttctcattcagcaaggggtccccctaaagatcagaccaagaaaccccctcttaaacgttgttaatgtcggggttctcatggaatgttagagggttaaataagtcatcaaagcattctgtaataaagaagtgggtggaggaaacgccttttcagtttggatgtcttttagagacaagggttaaggagcataaagcagaaagtttgcagagtaaattgtttaaggattggtcgatcataacaaattatgaacacaattcaagaggccgcatttgggttatgtggcgtagtagtacaaggcttagtcccttttataagagtgctcagttggtaacctgctcggttaagcttgacaaccatcaagaagaattcttttgttcttttgtgtacgctatgaacactgcagaagatcgtaagattttgtggcaggaactgaaagaccattctgattcacctattattcggaaacgaccgtggataatttttggagatttcaatgaaactttggatatcgaagagcactctcttgcggatagttatcctgtggtcactgcaggtatgaaggattttcaacaaacggtgagctattgttcgataactgatatggcttcgcagggtccactttttacgtggtgtaacaagcgagaaaacgatcttataatgaaaaaactggaccgggtgttgataaatgatgtttggctgcaaacattcccacaatcttacgttattttttaggctggagggtgctcagatcacttatgaggaagaattaaccttagtagagaagaaggcagtcataaaaatagacgaaaacctttcaaacttgttaatgttattgcagaaatggaggagttcaagcctgtggtagatgactactggaaggatacagagccattattcctatctacgtctacgcttttccattttacaaagaagttaaaggatcttaaacctaagataaagttgtaggcaaaagatagaatgggtaacctggtgaagaaatccaaagaagcttttgagatattgtgcaagacacaagaggagaacttatcaaacccatcactgcattctatggaagcagagaatgaggcttatacttgttgggattttgtggcaggcctggaagagaaatacttaaagcaaaaatcgaagcaacattggatgcaagtgggagataagaacaacaaaacttttcatcgggctgtggtggctagagagtcaacgaatcagatcaaggaaatccattgtgtagatggtagtgttgcaaaaggagataagataaaagtggaagctgagagattcttttgagaatttctgcagcttatcccagatgattatacaggtgtcgaagtcagtgagcttcaaaacatgctgccttgcgttgttctgatacctatcaaaagctgcttacacgtgaggtgttagcggaggaggtgtagagggttctgttttctatgccaaaggacaaatctccaggtcccgacggttataccactgagttttataaggcagcatgggctaccataggtcatgaattcactttggcagtccaatctttttgtgtgaaaggtttcctccctaaaggaataaactcaactattttagctctgattccgaagaagctgagagccaaggaaatgaaggattatagacctatctcttgctgtaatgttatctacaaggtaatttccaagatcattgctaatagattgaaagtgctactgccaatatttgttgcgggaaatcagtcggcatttgtaaaagacagattactcattgagaatctattacttgctacggaattagtcaaggactatcataaagactcagtctctacttgctgcgctattaaaattgatatctctaaagcgtttgactcggttcaatggtcttttctgattaatgtcctaacaactatgaaatttccagcggtttttactcattggataaaactgtgtattattacggcctcgttctcagttcaagtaaatggtgatctcgctggttatttccaaagtgcaaggggtttgcgtcagggttgctctttatctccatatctgtttgtaatatgtatggatgtcctctccaagatgttggataagcctgctggtgctcataaatttggtttccatcccaaatgtaaacggctaggcctaacacatctcagttttgctgacgatttgatggttctttctgatggtaaggttcgttccatagagggaataatggagattttctatgagttttataagcattctggcttaaaaattagtatggagaagtcgactttgtatatggctggagcgtcaccaatagtaagagctgagattgcagataaatttctttttgaggttggtcaattacccgtcagatacttaggcttacctttggttactaagagactctcggctggggactatgctccgcttctcgagcagataagaaaacgcattgcatcatggacgtcacgctacctctcttatgcgggtaggctcaacttgataaactctattctctgcattatttgcaatttctggttagctgctttccgattaccccgacaatgtatccgggagattgataagacttgttcagcttatctttggtcgggtcctgaactgaattcaaagaaggcaaaactttcttgggataaggtgtgtaagccaaaaacagagggggggtttaggcttgcaaaacttgaaagaggcaaacgacgttagttgcttaaagttggtctggagaatcatttcaaatagtaactccttatgggttaaatggatttccacatagctaattcgggaggagcttttttggacaatgaaaca

SEQ ID NO: 164870 - DNA, 507 bp, Arabidopsis thaliana landsberg
  unsure (1)..(507): unsure at all n locations
cttcttcctcatcgaaggtgtgatgctattctttgatagagccatgtgagtctcgtccagtcttcctgaatgcccgttgccatcttgctgacgatgctgactgcttacaggcttgccatgggaaatgtacgactccctccctttcctcgatccccacgaaccagcgagcggcgcaaaaacccgaagctaacatgttctccgcacgaatagatccttttcctcatcggcttgacaatcatcatcggacctcaaaagacactcctcttctttgctcgaaagcaaaaggctaagggcaccgccgccttcttcctcggcttgatccttattctcatgnnnnnnnnnnnnnnnnnnnnnctcgtcgaagcgtacggcataatcatcctgtttggagacttcctcggtacgattgctagcttcgcgcgtggcctacccgtcgtagggccctacatcggaatgctcgtcgacaggattggcctgggtcgacgcaaccccgagcttcctgtctag

SEQ ID NO: 164871 - DNA, 3952 bp, Arabidopsis thaliana landsberg; identical to SEQ ID NO: 5891

SEQ ID NO: 164872 - DNA, 1036 bp, Arabidopsis thaliana landsberg
aaaacttcgtccttctccagtcttccctgggatttagtagaggatatactcgctagggttccggctacgtctctaaaacgattacgatctacttgcaaacaatggaactttttattcaatgatcagatattcaccaagatgcactttgataaagcagaaaagcagtttctggttctcatattgcggttgtatacggtttgttcaatgagccttgatctgcgtggacttcacgataatattgatccatctatagaggttaaaggtgaacttagcctaattgatccacattgtagttcaaggaaaactttcgtaagtaaagtctttcactgcaacggcttattgttatgcacaaccatgaccggacttgtggtttggaatccgtgtacggatcaaaccaggtggatcaaaaccgaagttcctcacaatagaaacgataagtacgctctcggatacggaaactacaaatcatgctataattacaaaatcatgaagttcttggatcttgaatcttttgatttggaaatctacgaggttaactctaattcatggagggttcttggtaccgtcactccagacttcacaataccactagatgccgaaggtgtgtctttaagggggaattcttactggatcgcttcacataaaagagaagaaatagaggaagaagaagaagaagaaaatgagtacttcatcaacgatttcttaataagttttgactttactacagaaagatttggtccacgtgtgtctcttccgtttaagtgtgaatcttcttgggatacttatctccttatcttgtgtacgagaagagcggctttcactgttttttcaggacgacggtacattaaagatggagatatggatgacaaataatatcactgagaccaaaaccacaactatgtcttggagcccttttcttaagattgatttgtacacttacggtcatcggtttgggaatgaagtccgtcttttagttgacgaggagaataaagtgattatgtgttgtgatgaggaggaagatgacatcaacgatact

SEQ ID NO: 164873 - DNA, 1582 bp, Arabidopsis thaliana landsberg
  unsure (1)..(1582): unsure at all n locations
aatctctcgtttaccacttctaacgccggcgattctagctgggacaagatctcattcttccgtcaccgttcacggcaaatcaaacgagacacttggcttgtctccgtcttcgttcttcttcagatcgtcctcttcgctgtaactatgggcgtcaacgattgctccgggaactctcacggtcactgctccgctaaactccttggccgattctctttccagtctctctccgagaatcctatgcttggtccctccgcctcaacgtaagtagctctctccggcggatttcgcttttggtctctgcttgtaactgattttggaatcgatctctaattgaattgttagatcctttagagatggattttggatgcttcgttgcttagacctgtaattttggatgtttcattctgctcatcttttggatcggtaacgataggttgctgaagtttgttggatttggatgatactagtttccaagattgatgagtttcagctgattcatagtgtctcaatctctgattacagtgacaaccgacaagttcttgtttacaattctgtgttgttctagtgtgtgtgtgtgtttatttgtgtggctcttggtgctacattctgttgatgaagcaatctaattcaagtggtggttcttgtgagagctctatgtttcagaaaattaagggaaataggggtaacttgagctatcaaatgactgattataagctatggactacttattttcttgtgagtttgcaggttagagcatatgggaggtctttcttggaaagctctgacggagaatcatgagatttggcgtattttgacatctccatggctgcacagtggattatttcatctattcataaatcttgggagtttgattttcgtagggatatacatggagcaacagtttggaccatgtaatttagactacttgacttttgattagtctgttttggatggaatctatcacctttctaatccacctttcttctgcttttgctttggttttgtagtgaggattgcagtcatatacttcctctctggcattatgggtagtctgtttgctgtgttgtttgttcggaacatcccatcaatctcttctggtgctgctttctttgggttgattggagccatgctttctgcacttgcaaagaactggaatctatataacagcaaggtcaaggatttcttgtggttctgttttgtctcttgttatcttcttctcatagcttttctgattgtattttcttttgcttggaannnnnnnnnnnnnnnnnnnnnatattcactatcttcactgtgagtttcctgataggctttctccctttcatagacaacgttgcaaatattggtggtttcacatcaggattcctccttggatttgtgctattgttcaaaccacaactgagacagatgcctccatctcataaggggaaattgtttgaagatgatatgaccagatccgcaaggcttgaagaacagtttgacagaccggtattaaggattatatgcctgctcgtgttataaagaatgtgagaatttacctcaaatctctttttggtcgagttttttttgttttatatacgct

SEQ ID NO: 164874 - DNA, 520 bp, Arabidopsis thaliana landsberg
atgacggaaacacaccgcacgacgacgacgtttcttgatttgctccgacgacagatgagcggtcacgatctcaccagaaggaaacggacgttaaaagaacggttgagattcaaatgcatcggatgctgtggtccaacctggaatctccgtctaactaacaacaccactcttcacagtccaacctcaagagacgacgaaatcgaagaattacaaattgaaaccggactcgttctcgaatcggatcatggatcgggtacgggtatgaatctcgcgacggcgttagaagctgagaggtataaccgtggagaatcgacggaggcggaggcagatatgacgccgaggagagtttcgttgatgagattgttggcagagacggcggagaaaatctgtgatgacgacggaaagaaacggagttttaacggcgtctattggacgttacgggtaatgttcggtggtgtgcgtgtgatgggagaaaggaaggccttggtttattcatgtggtatacttttgcgagtgtgtt

SEQ ID NO: 164875 - DNA, 165 bp, Arabidopsis thaliana landsberg
tcagttttcgcctatattagtacatccctaatctgaatggttagtgaaccagttgcgtatcagtctccttatggttggtagagtaacgctaatgttgagttcttaggaacatcttaacggatccaattagtatttggtgtgggtatcgatccttctgttgtcttc

SEQ ID NO: 164876 - DNA, 924 bp, Arabidopsis thaliana landsberg
gattgtggccctaacacacattggttcactctctgtcggaaacctgacggaaccctaaccaatgacaccagttagaagaagaagtcaaatgggtatggtttggctactgtgccaattccccattctcctactgcaaacttttcaagtctcgtggcggttggctctgatatctacaacattggtggatccatttacctacgaccctcctcgtctagtgtctcgattctggattcccagtctcacatgtggcgcgaggctccaagcttgcgggtggagctgatgtcacattctgctagcgtccttgacagaaagatatatgtagcaggaagctacaaagatggcaatggcgattccaactcctgtaagaacttgttcgaggtgttcgacacaaaaacacaagtgtggcatcctgagcccatcccatgcagcaagacaaaaggcattttttactccaaaagcgcatgtattgatggaaagtttcacgtggaaacgactcacggagtggtgtatgcttacaaggaaggtagatgggacaaggctataccaacgatgtttggtatgagggcttcatattctttttgcgagatgaataatgttttgttctatattcatcgcggagtgttcagatggtatgatactaagttaagaatgtggagaatattgaaaggtttgttaggactacctagtttacctgagaatatgtttgttagattggctgattatggtggaaagatggcggttttatgggaagaggatcgcccttcttgtggggctggtggcagagatgagatgatgatttggtgtgccgtgattgcgcttaaaaggcacctaaattttagtttttggggaaaggttgagtggtttgatcatgtgcttacagtccctaaacaacatgttttcgttaaggctcttactgctagtttg

SEQ ID NO: 164877 - DNA, 1074 bp, Arabidopsis thaliana landsberg
tcgtttcgttgcgtgtctaagctttggttatcaatcaccaccgatccatatttcatcaacttgttcgaaactcggtccccacggccgagtcttttagtttgcttcatataaaatgacaagttgtttgtgtcctcaattccgcaacatcttcattcacttcagaattctagaaggtcttactcttcttctcagcctctttatcgttatcatatggaattaccagaaggatgtagtatttattcctctacggaatctgtccagggcttgatctgctttaagacatcaaaaatgccgatagtttggaaccctatcacgagacagttcttaaccttacccaaaccaagaaaaagctggaaggaactaacagtctttttaggatacgatccaatagaaggtaaacacaaagtagtgtgtctgcctcgtaatagaacttgcgacgagtgtcaggttttaacgttgggatcagctcaaaaatcatggagaacggtaaaaactaagcataagcaccgttctacaaatgatacttggggaagatgcattaagggggttgtatattatatagcctatgtttatcatacgcgtgtttggtgtataatgagctttcatgtcaaatctgaaaaattcgatatgataaaactaccattggaaaatatttataggcatgttatgataaattatgaagggaggttagcttgtgttgataaactatataccttgaataacgatggtataagattgtggattttggaggatgcagagaaacacaagtggtcgagtaaacagtttcttgcacgttatgttcacaatgacctgagaacgaacaccatttccaagctaactggtgtcactcatgctggtgagtttgtttatatttcaacgcagtatcttaaatcgtttgttttgttttgtgatccgaagaaaaataggtttagaaaagtagagtttaatggaattgtagacgaagaatttaggctcagtaatggagttggtaggggacgtatatatgcgctctataatttcccgaatcattgcgagagtctcatgtctttgtagcataaaagattattatttgat

SEQ ID NO: 164878 - DNA, 493 bp, Arabidopsis thaliana landsberg
  unsure (1)..(493): unsure at all n locations
cagcttntgcgtgagatgccggtcgaaacacatctcgtcatgagcaaatcagccgaggtcacgctagcctacgagacggacatgaaggtcgccgaggtacgcgccctggcgcatgaaacccacgccatcggcgacatggcggcctcgctctcttccggctcgttcaagacgctcggcatggtcgtcgcgccctgctcggtgcgcagcgtcgccgagatcgcctcgggcgtcacgacgacgctgctgacgcgcgccgcggatgtgatcctcaaagagcgtcgtcgcctggtgctgatggtgcgcgagacgccgctgcatgttggccatctgcgcaatatggaggcgctgaccgagatgggcgcgatcatcgcnccacccgtccccgccttctacaatcgtaccaagacgctcgaagacgcgatcgaccacaatcttggccgcgtgctcgatctcatcggtctcgacacgggcaagtgaagcgctgggcgagacc

SEQ ID NO: 164879 - DNA, 265 bp, Arabidopsis thaliana landsberg
gacatgtgttggtcaggttaggtcatttttagcgcgttgcgccgggtaagcacataagtaatatgctttcacacaagtgagacacctcttactcatagcttagcgcgatcccctccgcgtaatagtgcgcccgcccgtagttgggtttcgtggcttaggccccggcagagcgagagctttctatcaagccattggactatctggacacatccttcgggaaatggttcaggcatgtttgttgccaggggcaacaagatcaagctgg

SEQ ID NO: 164880 - DNA, 1415 bp, Arabidopsis thaliana landsberg
atggggaagcaaaagcgcctcaagtcgttctctccttcggggagctcgtctccctcggtctcttccgccgcctctctggtggctatctcctcgccgtctcctccgccttctcctgtcgcaagtgcccctgccgccatctcctccgcggccatctcccccgccgcctctttgtctgcagtttccagatctgcgcctgtcttagatcccagatctacaattgatcctagatccacggcggatctagcatcctccggtcacgtcgatgtgcagctagcggctacaagtgtacctgcttcagctccatctgtgcctcctacaattacagtgattccatcgaatccctctaaagtctctgcgaaagctgcacctgtcatggttgctgcagcaaacccagtcattgtcgcgcctattgctcctccccccgtggatagctgggtcgatatattcaaaggtacaacatctaaaaggctagagaagaaaggttccgcttttactctaccctcaggagaagcatgtgtggcgattcccaattcgcttattgagaagcatcagaagtcttgggactcgttcatcctcgggcaattttactctgatccccctgctcagggtactgtccataccattgtcaatggaatttggagcaagcagtttcgtgatgtctcagtctcgaagatggagggaaacgcgttcctgtttcgcatcccaaatgtgcaaacccgtactcgcgtgctcaaccaacggctttggcagattgatggacaaaccatgtttgttgccaaatgggaacctgggctccgcccagttaagccagagctcacctctgccccgatctggctggagctccgaaacgttccttttcaatgcttcaatgatgacgggttggagcacattgctagtctcgttggtgagccgaagtttcttcaccccgccactgcgagtaagactaatttggaagttgcaaaggtcttcactattattgacccccgtaaacctcttcctgaggcagtgaatgttcaattccagtctggagagattagaagagtggaagtgtcaagcccgtggatgcctcctatttgtgcccactgtaaagaggttggccacagcttgcggcggtgtaaagcagcaccgatcacctgtaaagcctgcaactctacacagcattctgctgatgcttgccccagggcaaagtcccaagcagagaagaaaactccaagacgtcggcgatctaaaacgccgaagccgatgctcaaagaaggtgactgggcggctgtagggttgggcaagcggacactgcaagacaagccagttcccttaattaaccctgatgctgccacctcctctcgggggaagcgggtgacagatgctcctaagcagaaaggctctgttcccaagcctattgggcgcgaaagcaagta

SEQ ID NO: 164881 - DNA, 930 bp, Arabidopsis thaliana landsberg
accatgtgggcgatcatgaaaagtctctgattctccttccttatcctcgcttcatttgcaactttcttctccgctgctgatgcatggaggtttaacgtcggaggtaacggcgcttgggtcacaaatcctcaagaaaactacaatacttgggctgaaagaaaccgtttccaagtcaatgactctctctgtaagcttctccattttgttagggctgtaactaggccgctaggactatgcttctaaccaaagaaacatacaatctttatgcagattagtagtacgcgaagggatcagactctgttcaacaagtgatgaatgcttattttgatggatgcaacgttaggaatccgatcaagaacttcgacaatggtgaatctgtggttactcttgatcgatctggtgctttttatttcatcagtggtaatcaagagcactgtcaaaagggacagaagttgatcgtcgtagtcctcgctgtcagaaatcaaccttcggctccgtctcattcccctgttccttcagtttctccgactcaacctcctaaatctcattcccctgtttctcccgttgctccagcgactgctccttcgaaatctcagcctcctagatcctctgtttctccagtacaaccacctaaatcttcttctcctgtttctcacacaccagctctctcaccgtcgcatgctccatctcactctccagctactccatctccgtcaccaaaatctcccacccctgcttctcactcaccatctcactctccggcacatgccccatctcactcaccggcacatgctccatctcactctccggcacatgccccatctcactctccggcgcatgctccatctcactccccggcgcaagccccatctcactctccggcgcatgctccatctcactccccggcgcattctcatattaattccggcg

SEQ ID NO: 164882 - DNA, 1060 bp, Arabidopsis thaliana landsberg
ttaaaaaaaatgtagtcaagtcaatcttatatattaatgactaagcaaattactctcccattgcatttgtatatataagatagaatcttgatttatagattatctatcttatcaaacagaaaaaaaaataaaaaaatactaaacttttttcttatcaagtatgatttctgaagaccttttggtcgaaattctcttaagattgcctgtgaaacccctagctagatgcctatgtgtgtgcaagctttgggccacaatcatccgcagtcgatatttcatcaacttataccaatctcgatcctctactcgtcagccacatgtcatgtttgctttacgtgatatattcacatcttgtcgttggcatttcttctcgtcatcccaaccttctttggttaccaaggcgacatgcagcgccgataattcttctcatacgcctgattgtgtcaatggcttgatatgtgtcgaatacatgtctcaactgtgtatacccaatccggccacgcgtaagggtgtactcgtgcctcaatccgctccacatcaaaagttcaggaaatggtatatgggatatgatcctatcaattatcaatacaaggtcttgtttttctcaaaacaatatttattatctccctataacctggaagtgtttacattggaaggtcaaggttcatggacaaatgatcgaggttgagaatattccttctccctcaaccagaggaatatgcatcgatggggttgtgtattacggtgctcagacggcgcatggactgacgcttgttagattctacgtggctactgaaaagtttggtgatttcattgaaataccggtcggggctagtaatgtttatgatatgaactttggttactctaatcttgtgaactatcaagggaaactagcttaacatgctgcaaaaagtatgagcatgtatgatttatgggttttggaagatgccgggaaacaagaatggtctaaggtttctatcgttttaactcgagaaatgtattcgaaaaatcaagtttggctaggaacggtgggttttgttgctgggagtattagctaatgttc

SEQ ID NO: 164883 - DNA, 215 bp, Arabidopsis thaliana landsberg
gcgagagaggcggagagaagtagagaaaatagggttggtgaaacattaaccttatatagggcttctaatactcggtttaggttaacccgatcggagtctgataaccgaactgacccgaaccgaataccgatagcccaaattaatttttccgaacggtttactcctctgctacttcaattcgcaatgatcggtactccggtctttagagcacatga

SEQ ID NO: 164884 - DNA, 640 bp, Arabidopsis thaliana landsberg
tgtattggcattctgactttctgttctgttatcctctgtttgactcttaaaacatccaaagaaccttaaaacaaacaaatatgcaatgcacatgcaatcctaatgtaaaatcgtcctaagtatgcaaaacacactaaaatgattactaatgagatgaaatgtggatgaaataatgatgaaatggtgaagaatgaatgcctaaatcatgcaaataatacacatatctgatccaaatccttaaagtcgttattaccggtgtgtttttgctgcagaaagaagggtaaatctcattttgatgggttgtaaaatttttgatgggtgaaatcttaacaacttttacaatttcaaaaatgtagcttatgaacggcaaccatgtgtttaagtgggtagatgaggcttttacaaatgagattgaacagttgaaatttcaaatctctgttcttgaagaagaagttagagtgatgaagatggaaaggaaccaagagaggatggaaagcgatctgatggaaaggaaccaaaagaagaaggaaattaagatggtaatcgtttttagttttggctgtttaatcaccatggcaattggaatgttgtgtttgtagtagaaaaaaacttatttatcggttttaatttggtttatttt

SEQ ID NO: 164885 - DNA, 3161 bp, Arabidopsis thaliana landsberg
gtattgagtcatgaatggatgcagtgctatcctaagaagcttagtgatcctggttcattcactctaccatgctctttaggtccattggctttcaacaaatgcctatgtgatttaggagcatcagtcagtctcatgccgctctttgtcgccaaaagattggggttcactcaatacaaagcctggaatatatcccttatccttgctgataggtcagtaaggatccctcatggtctactagaaaacctaccaatcaggattgaagccctagagatacaacctgactttgtagtcttggaaatggatgaggagcctaaggaccttttgattctggggagacctttcttagcaactgcaggttctatgattgacgtcaagaaagggaagattgatctaaaccttggcaaagactttagaatgacctttgatgtcaaagatgcgatgaagaagcctaccatagaagggcaactcttttggatcgaagaaatggatcagttagccgatgagttactggaagagctggtagaagaagatcatcttaacagtgctttaaccaaaagtggtgaagatgggtttttgcatttggaaacattgggataccagaagctgttagactcccataaagcgatggaagaatcagaaccctttgaggaattgaatggaccagcaacggaggtaatggtaatgagcgaagaagggtcaactcgagttcaacctccactctcgaggacgtactcgaccagccactcgaccttgtctaccaacgaatctggggagccgatcattccaacttcaaatgactggtctgaacttaaggcaccgaaggttgatctcaaaccacttccaaaaggtctaaggtacgcattccttggtccaaactctacttaccctatgatcattaatgctgagttaaatagtgatgaagtgaacctgctattatctgagcttagaaagtataggagagcgattggttattcattatccgacattaagggaatttcacctagtttatgcaaccataggatccatcttgaaaataaatcctattttagcattgaaccacagaggaggttaaatcccaatttgaaagaagtagtgaaaaacgaaattttgaaactgcttgatgctggtgtcatctaccctattacttgggtttctccagtgcattgcgtccataaaaagagtggaatgactgttgtcaaaaatgaaaaggatgaactaatccctactagaactataactggtcatagaatgtgcattgattataggaagttaaatgctacatctaggaaagatcattttcctttaccattcattgaccaaatgcttgaacgtttagctaatcatccatattactgctttcttgatggatatagtggtttctttcaaataccaattcaccctaatgatcaagaaaaaaccactttcctatgtccttatggaacttttgtttataagagaatgtcatttggtttatgcaatgctcctgcaacatttcagaggtgtatgacctctatattttcatacttaatcgaggagatggtggaggttttcgtggatgatttttcggtctatggcccctctttctcctcatgtttgttgaatcttggcagggtattgaccaggtgcgaagagactaatcttgttctcaattgggaaaagtgtcatttcatggtgaaggaaggcatagtgttgggtcacaagatatcagagaagggtatagaggttaacaaaggaaaagttgaagtgatgatgcagttgcagccaccaaaaacggtgaaggacatcataagtttccttggtcattctgggttctacagaagatttattaaagacttctccaagatagccaggccgttaaccagactattgtgctaggagaccgagtttgaattcgatgaggactgcctcaaatcctttcacaccatcaaggatgctgatatgagtcaaattaccctaatgactactctctcaaataaagaggttgttagagcacttagggatcgaattccacaaagttctcggatcacacaatagattaatagtttcgaataaagctaaacagaaaatattataaaaataaaagacaagaaaacaattaaaattggttgtagatttagatgattaagacgtcggatttagggaaattcctaggagatatcagaatagtagaactagcattaagaataatcaaagatgaagaattctaaatatattatcctaacagggtttttgatctactaattcatccaaatccctaatgagaatccctaaaccgaacaagagaactactcaagcatgatcatagaagaacaaaacatgattgaataagaaatcgattatgaaattaagaagagaaaagagtttagaagaatcttctataaagggagtctccacagggttttgctcccaagaataaaagagataataagagttaggtctaaacaatgacctttaaaactatctatatatatatatgacctaaaacgtgcaagacttctttagaactaggagaaagttctgggccaaatttgaaaatcttcaaaaattgaataacgttgcgcaatcgaattgccgtcagatattggtgtcgctcgacgaccaggggcggtgttgatcgacacatacgtagatttttgtctctggattgcttctgcagcttaagttgtctgttttgatccagaatgctccataatctccaaatgcatcccacatatgtaaagacctaaaaaagactagaaaaactctacaaataacaaaagattctaaaatctatacccaaatcatagctaaaaacagtgaaaatcgaggtatatcaactctcctagacttagcttttgcttgccctcaagcaaaacacaaatgccgaacccgtgaaagaggtttgaaaacacagaaactcccaatctctctagcttattaccttgatcaaacaaacccaatccatgcactaaacagctcaagtcgaatcctgaccactatgtaattctctgctagcccacacaacatcctagattccataccaaagcactcaactatatccattaggctctcatcgctgggtctcatcaatcaatttaatgtttaagaacctactagactcattcctgtactataccataacaaatcaaccattcattttctttttatttctggtattcttt

SEQ ID NO: 164886 - DNA, 436 bp, Arabidopsis thaliana landsberg
ctctttatcgcactcacttgtgttatcggtttggagcgcctcgccgaacttgtcgtagctaagcgcaatgcgcgctggagccttgcccatggaggccgcgaatttggctccgggcattacccctggatggtgttaattcacacactgttgctagttgggggtccgcttgaagcttacctgctgcagcgtcccttttatttttccgaagcagtcgtctgcacgatcgttttgatcgcaacccaaatgctccggtggtggtgtatcagtgttttaggcgcccaatggaacacgcgcgtgattgtgattcccggccttcatcgcgtcgtccgtggaccttatcgttggctgagccatcccccctacgtcgctgtcgtgcttgaggggatagcttaaccactatggcatcattcttttctaacggctctagtgttcagcg

SEQ ID NO: 164887 - DNA, 776 bp, Arabidopsis thaliana landsberg
tatcttcatgaaacactaggtgaacgtggatgcattgatatgggtattccgagagcaactaagctgaatgaactgataaagagatcacgaatacgaaagcatagacgaagggatttaaatcgagttgaagaagaactgtaaacaaagaggcaagcaaggcaggaaacagaacgaatgtcgctttgtggaaggggaaaaatgatttttataagcagaaattttcatctaaagagaaatggtcacaaatccgcgtcgctaagccaataatgcaaggtcgtacggaggtttggttttcaaacgctacaccaaagtacgcctttctaacttggttggttgttaaaaacatagttgcaacaggggaaagaatggttaaatggaagcaaaatatggacacaagctgcatcttttgccaagaacctatggagacgagggatcacctcttcttcctatgcccttattcgagaaaagtgtggaaagaactgatgagtgggcttcttctagacaatttctaggcaagatggcgagatgttatgcggattcttgcgagtaacaacttggacaacacgaaacgattcataattgggtatgtgttccagaatgttatacacactttttggggggaaagaaacagcaggaaacatggagagacaccatcaccgacagagaagattgtgaagatgatagataagaacattcgcaatcgcttgagtacactgacaagaggaggagaggagagatatgcgggagggcttcaaatgtggtttgtgtcaatacta

SEQ ID NO: 164888 - DNA, 2771 bp, Arabidopsis thaliana landsberg
agaagaagggagctacatcaacaatcaaggtggctacaaagggtacaacaactttaagatgaacaaccccaacctctcttaccgcagcaccaacgttgttaatcctcaggatcaagtgtttcctccacaacaacaacaaggtcagaacaaaacttttgttccctacaatcaaagttatgttcccaaggagcaatttcaagggaactaccagcagcaaccaccacctgggtttgcacctcagcaaaaccaaggtcctgctgtacctgatgctgaaataaaacagatcgtacaacagctgctacagggacaagcatctagctccatggaaattgctaagaagttatccgaattacaccagaagatggacaacagctacaatgacctgaatgccaaagtggaggcgttgaattccaaagtcagatacttagaagcataatccgcatctacatctgctcccaaagttacgggacttccagggaagtcaattagaatcccaaggagtatgctaatgttcatgctatcaacataaggagtggaagtgagttatccactagagagagacccaagtcagtcactaaggacagtgcataccaagatggggaggatttcagtctcaataaagatcaagttgaccagtcactcgagcagccactcaactagtcacttgagcagccactcgagcagccactcgacctctcactcgagcagccactcgaccagtcactcgagctcccacttgaccactttactcgaccgaccttcccagcaacatcacaaactgctctgaaaccagttgctgtcaaaaacaaataaaaagttttcattcttcatccttacaagcccccacttccatttcctggtcgacacaagaaagaattagaagataagtacagagctatgtttgccaagaacataaaacaagttgaaggcaggatacctcttgttgatgctctcacgcgtatcccggattcccaaaaattcctgaaagacttgatcatggagagaattcaagaagttcagtaaacaacaattatgagccatgagtgcaatgccatcatacatgagaaagatgaaccagagaagctaggagaccctggttcattcactctaccattctccctaggttcattgacattcaataaatgcctttgtgacctaggagcatcagcaagtctaatgccactctcagtagctaagaggttgggttttaacaaatataaatattgcaatatctccttgattttggctgatgggtctgttagacaaccgcatgggttattagaagatttgcctatcaagattggaaatgtggaggtgcctacagacttcatagtgttgaacatggatgttgaaccaaaagatcccttgatcttaggaaggccctttttggctacatctggagcaatcatagatgttaagcaaggaaagattgatcttaatatggggaaggattttaaaatgaagtttgacatcaatgatgctatgaagaagccgacaatagaaggacagaccttcttagttgaggaaaaggatctgctagttgatgaacttctagtggaacttaaagaagcaaataactcaaaaactgttttgaccaagagtggtaaagctgggtatctccctagtgaaactttgagttctgagaagtcattagactcacacaaggcaacagttggctcaaaggtttacaagggcttgatggggtctgacacaaaggttatgaaagctaatgaagtaagttcaacacatgctcgaccaactgattccaccaacaactcgaagaagcctccaacttgccatgaaagctcatgctcgaccaaacaactcatggcaagcactcaaacgtcagatgattggttagaactcaaggagagatctaaatggcaggacaaagccatacaagagctaacacatattgtgaaaaagctgaaggatcaaaacaaggagctcaatggaaaagccaaccaagtaccactcaatatcaaggacgcccttgacgatggagccactattcttgtcagcaaagaaggatgtgaattcacatcggaatggtgtagaggagaagactatcttgatattgaaagaagctcactatgaggacatggcctctgagtacccaattgcagacctgtcaagaaaccctaatgagtatgatgatcactctactcaagaaggagaggagaccacatttcctctctgcaacccaccctgagcctaatgagtatgagaagtcaagcttagagacttaaaacaagctcacttgggaggaaatcccatgtctatctttgtacatatctttatttttccttgttgattttgatgcatttggttagtgtcttcaggagataagtataaagagccgagtgaaatggattctgactctgcgagtaaagcagtatactcgaccataaagcaatgaaaaatactagaccatgttttagcttatccacgccaggaggtcactcgaccgtggtgctggccgcagcagaagaagagaggtcgagtatcctcaagcggtgctggccgccacagagctgatgagatcgagtacccacatgctagagctgatacagaacagggcgattcttctatggcctcagagcaatcacatgcaaccattgacgaccaacttcgttcattcttcgactgaggtaagcgcctcacttctccattgtattatatcatctcttgtgatttgttctttattttgtttctgtgatttgatttgtcctgagtactctcttccaagtttagtcacacagtgaactgtg

SEQ ID NO: 164889 - DNA, 711 bp, Arabidopsis thaliana landsberg
atgccaaagatagcggatttctgttaaacggggaacttaagattgttgtcaagatcaaagttcttgaaactattggcaaattagatgtgacagaggaaacttcaacaatcacggaaactgtggatgttaatggctttcaactccttccttcacaagtaagaaaataacatcattttgtgtagaaattttatccacgagagaaaacacgatgtgtttgttctatgatatggtgcttttgtggtgtctccgggaacttctatttggatatgcattctacttcattttcacctttttcactcacaggcaaaatctgtgagtcgtatgtttgcaaaacacccagagcttgcatctgatttacgtccaaagaacccaaatctcaggacaggttacatgagtctactactcagtctgattgagactctgagccagttacctcagcaaatgtcaaaggatgatctgttggatgcttacgatgcactgggatccatgagagatgctggatttaaactggattggttggagaagaaactttatgaagtgtcagaaaagaaggagaatgaggaggctagtgagactgggctgcaagaaatggaggaagagttgaaggacatgaagcagaagtgtttagaaatggaagctctggttgagaaggagaaggcaaaagtgtcgactgcaaaagctcctatctcattcgatgatattgtttgatgc

SEQ ID NO: 164890 - DNA, 624 bp, Arabidopsis thaliana landsberg
atggttggagaaggaggcgcacacaagcctactacaaatgacgcgcttaaataccttagagccgtgaaggctaaatttcaaggtcaacgtgaaaaatatgacgagtttcttcagatcatgatagattataaaactcagaggttaaagttctttctacttttatgtttgcatttggtcttggtttaggtaatactccatggtttctgagaactgattaccgactattgtgttgtatagaattgatatatctggtgttataataaggatgaaagaactcttgaaagagcaccaaggattacttttgggtttcaatgccttcttgccaaatggttatatgatcacacatcatgaacaaccttcacagaagaaacctgtcgagttaggggaagcaattagttttattaacaagattaaggtatataatgtgttataaactgtccaaggaaattactgcttttccctttcttactctcttcgatattcattcatttgcagacaaggtttcagggcgatgatcgtgtatacaaatcagttttagacattttaaacatgcacagaaagcataggaagcccatcaccgcgaaataccagaaggtaggctcattgattcatactaagtttttt

SEQ ID NO: 164891 - DNA, 2254 bp, Arabidopsis thaliana landsberg
tgtgtttcaaatgacacaagctttgtcgatttaaaaatgttcgtcaaaaggtgaagttgttgaaagctttgtctgggcatagtcacatggttaagttctatgatgtgtttgaggattcggataatgtctttgttgttatggagtaagtatgtctctttcatgcttcttatatatcaaaagttgttttatttataatctccttgtgtttagatttggaccattgcctctgttataggaaaaaaaaaagtatagttctaatagtaccagtggtaggagaaagtttaggaattgagatgaccttaagatattgactccaatatgattccaggttatgtgaaggtggagagctattggacagtattttggcgaggtaaaatcaaaactagtcctttttctgttttccaccttgaattttggcatacttaggttaaagaggtaactttgtgttacatatatatggaggatgattctgtgatgtctatatcttactgtagaggtggtcgatatccggaagcagaagctaagcgtattcttgtacagattttatctgcaactgcttttttccatcttcaaggtgttgtgcaccgtgatctgaaaccggaggtacacacattgttcttctaccaatgtgaatatcataagtagttgttgcttctgtcttgaacaaatgccatactgttgtatccagaattttctctttacaagcaaaaatgaggatgcagtactcaaggttatagattttggcttgtctgattacgctagatttggtaattctttgttcctctttcttatacatgactctgcttgtagtattttacttagaagactaaggatggaatgtttttttttttttttatgttgggctttaactagatcagcgtctcaacgatgtggtaggaagtgcatactatgttgcacctgaagtacttcacagatcctatagcaccgaagcagatatatggagcattggtgtcatatcttacatattactctgtggaagtagacctttttacggaagaaccgagtctgcaatttttcgttgtgtgcttagagcgaacccgaatttcgacgatttgccgtggccttcaatatctcctattgccaaagactttgtgaaaaggcttttgaataaagaccataggaaaagaatgacagctgctcaagctttaggtaagtttataaccactattgttaaaactagtgacattgattggtgaaatgaaaacatgagtatgattaataattttgcagctcatccatggcttcgagatgaaaatcctggtttacttctggatttctctatctacaaattggtgaagtcttatattcgtgcatcgcctttccgaagagcagcacttaaggtaattgtctgcttttcatcttgtcaagattttcttaggattttgatcacaattttcatgcaaaaggtaaaagaatagacacacatgacaaaatacttcctctgtttgtttgatcctagcttttgttcttgatagatttgatcatctatatgtcttgtatgtatcttaattttgctgtcacttgtacaacagtctctatccaaagctatacccgaagaggaactcgtgttccttaaagcacagtttatgctcttggagccagaagatggaggcttgcatcttcacaatttcaccacggtcagtggatgattaccacatttcatcgttccttgtttaacaataacttctaatgccactgttcttcaattgatgatcaaacaaaatcttgtggtaaatgcaggctctgacaagatatgctacggatgctatgatcgaatctagacttcctgacatattaaacatggtacgtactaacacatctttttaagtcccatcatttctagtcggtgctaaaatacatctgtaatactcttttcttctgtgtgtttcctttttgttcattgaagatgcaaccattggcacataagaaacttgattttgaagagttttgtgcggcttcagtcagcgtttatcaacttgaggctcttgaagaatgggaacagatcgcaacggtagcctttgaacactttgaaagtgaaggaagccgagccatttcggtccaagaactcgccgaggtatgtagagacttcaatatttatatctcttagatatgtgaaaacgacatcttttgcatcaattatgggttattatggaatatgtaggagatgagtttgcgaccaaatgcgtatcctctgctcaaggattggatcccgaattttagattggaagctgaa

SEQ ID NO: 164892 - DNA, 426 bp, Arabidopsis thaliana landsberg
gaactcgagcgcgacgccgggtctcccgtgcgcgcgctcgcgcagcggctgcacctgtcgcgggcgacggcctatgcgcggatcgagcgactgacgcgcgacggggtgatcaccggctatggcgcccggatcgcgccggagcgggccggcctgaccaccaccgcctacatcgcgatcaccatcgagcagaacacctggcgcgcggtgtccgaggagctggcgcacctggactacatcgacaacatcgccctgctcgggtccgacttcgacgtgctcgcgcaagcgcacgcaccggacaaccaggcgctgcgcaccctggtgctggaacggatccaggcgatccccggggtgaagggcacgaggacctggctggcgttcgaggagatcgacggcgccgggacgccgtgggagagtttggacgcgtga

SEQ ID NO: 164893 - DNA, 943 bp, Arabidopsis thaliana landsberg
atggctgatgaaagtaatgagaacaagaaagaagtgaaggatgatgagcaagaagtaagtttggcttttgacattttgtttttgtctacaaggactccttgattaattccctaaattaagacaatagattttgtttcctttttcgtttggtttgattgttgttgttgcccttttacatcagctatcctttgacccaaccaaaaatgaaaaccaagtaaacagttgtacttcaggatcttgtattaagcatgcatagttggtagatgattctctttggttactagaacgtgcgacttacataaatattgctttggagcattctttccttaagtcaatgcatacttcttcctgctcgttttttttctttttctgatgggaattatatgtacagattcttcgtagggtctttaatatcctgcgtgaaaatagtccggagcttgttggaatttggcttcttacaattatatggccaccacaagttcttcgtgaagagacagcgaaaggcacaaagaagacagtctttgtcaactttatggactattgcaagacgtatgaagaaatttccatatctctgccccttcaaacttttttacttttacttttggaaccattgttactagaacgtagtgagttttcatgtttgtatttggaactaaaactttttcaggatgcatcgaaaccctgatcatgttatggcgttcttgcttgctgagctgggtaataagggtaaacttgatgatcagcaaaggttggttgttagggggagatttacacagagggactttgaatcgttattacgaggatatatccgtaagtaacatttcctctcaagattaggattcaactaaacatccttctgttgatttcttaaagtgaaatctctaattgctgttaatttcagttgactacgtcatgtgcattccctgcaagagtacagaggatc

SEQ ID NO: 164894 - DNA, 1044 bp, Arabidopsis thaliana landsberg
atgaagaaaaggggaaggaagtctaagaaaccagaagaaaaaagagatgaatgcgacccgagttcgattcttcctctggaactgaaaatagagattctcatgaagtcaccgccgaaatccatagccaagctaggtttcgtttcaaatcattggtcatcgataatccgcagccaagttttcaccgacttgtacatgagacgatctttggctcagccgcgtcttcttttctcagtgtaccgtcccaacatgcagatgcagttctttcactcctgctctcaggaagatccgtcttctgatcatcgtagcgtcagttacactctgaatccagatctacggtactcattttctccacccatcggcggtttgatattcggtcaaaacaatactaaagctatgattggaaaccctagtacgggtcagtttgtacctttacctagaatcaaaacgcagagaaaggacattttctccatttttggatatgatccagttaatgatttgtacaaagtcttgtgtatgacggtaagaagtctacgtggaccacattattttagatgggaagatcctatgtgggaggagcctatgacagaggagcactaagttttcacgctaggacccaaacaaaaatggagaatgctcgaatgtaagtatctacatcgtcatcattctggatctcaagggatatgtagagatggggtgatgtattatttagcttctttcaacgataaaatctctgatgagctttgatctgagctctgaagaatttcatgttactaagctacctgaggattatatattacaacagtttggtaatatggtggaccatagtggaaagatagctatagtgagtcaggcatacagcggtccaatggacctgtgggttcttgaagatgccagcaaagaagagtggtcaaaagttgctgccctagttccttctgttgatacatatcgttgcatgcattgatacatatattgaagaaaaagctcagttgaaaccaaataaaaaatgtttcttggtactgcctctaccacataattccagttttc

SEQ ID NO: 164895 - DNA, 392 bp, Arabidopsis thaliana landsberg
atgggcaagaacaacaagcgcaacgtgacgcgactcctccctcggaggagtttggtgattccgagtactcggaggaggagttctcctccgagtccaagggttcgccggtccatgcctctcccccagcgttgtctgacgactcagacgactcccagggatcgctgcagaggtgtggacctacatccgggctatcgagcgtgccgggctcgagggctcggatgagtcggaggtctccttggacgaggcgaactcctcggactcgtccgaggagggtggcagtgacggtgatggcgacgacgacaacggaggcgacggcgatggcgacggcgacggcggcgaaggtgacggcaagggcagcaaaggtgacggcaaggacgacagcaagggcagca

SEQ ID NO: 164896 - DNA, 549 bp, Arabidopsis thaliana landsberg
  unsure (1)..(549): unsure at all n locations
atgatggcacaaagatctattttccacggcgactctagtgttgatgagaaaacggtttcagaaggaaatgaggtatttatctcgaccatctgaaaagtaaaaatcgttagtcatttaacgtggtgtatattgtgtttgtgttaatgtaggagctcgatcgtatggaaataaggatgagaatgaggtacggcgaaaacaggaggcgcgataaaggcgttctgatcgagttagattgcaatgctaaggttgtcgttgccacttctcatgatcctgttacaagcggaaaactttatttcagttgtccgtataaaatatcagatgtaagcatcttttgagttatgattcattattttatttcttttatttttgtatccctattaatcaacctcttatttttaagggttccggtcgaggcagcggtttcaagagatggtggactgttgcattgtgtgacgagtttgatatgataaaagaggagacgattgagatgaagaaggatctggaagccgncaatatttgtgaacttagctaaggcggaaaagattgatc

SEQ ID NO: 164897 - DNA, 587 bp, Arabidopsis thaliana landsberg
atgtcgaccgcaacttctgctcccactaccaaaccaactgagctcttccaagatattcggggagatttttactcaagaagactgctacttcatacagcttatcaaccacctactgcggcatcaccgccgttcgcagatgctcatgaagcatcacactcctaccaaagtcatatgagctttgatgcaaatgttgtcatggtcctatcagtcctcttatgtgcactagtttgctcacttggactgcattctatcataagatgtgcactaaggtactccaatttattatcatccgaagctagtgacgagttctcagttcgcttggccaacacaggggtcaaacaaaaagccttgaagagtttccagacggtaagctacacagcagaactgaagctacctggcctagatacagagtgtgccatatgtctctcggagtttgcatcgggagagcgagtcaagcttctgccgaagtgccaccatggattccatgtccggtgtatagacaaatggctcagttcacactcatcttgtcccacctgcaggcactgcctcattcagactttgcaaaagatagctgggtacagtgagac

SEQ ID NO: 164898 - DNA, 1811 bp, Arabidopsis thaliana landsberg
atggactgtgaatcagtgagaacgcagttgtatcaatttgcgcgagtgcagacacacaaaaagcagtttaaggagctttcctctatgtgtattgaccaagagttttcagcgcatgatggctccatcttagcaatgaagttttctcctgatgggaaatacattgcaagcgctggggaagactgtgttgtacgagtttggagtatcaccgaggaagagagaacagacacgtatgaagtagctgaggttgattctggtgttcactttgggatgaatcaacgttctcagattgagcccctgaagatcaacaatgagaaaactgaaaagaagtcaagttttttaaggaagtcatcagactcaacttgtgttgtattacctcctaccatcttcagtatatcggagaagcctctgcatgagttcaaaggacatataggtgagatcttggatctttcctggtcggagaaaggggtaaacatcttttcaaactcttccctacatttatatagtctctgattgtgcccatcctcttacatttacctctctttggtgcagtatctactgtcatcttctgttgacgagactgttcgtttatggagagttggctcttctgatgaatgtcttagaactttctctcataagagttttggagacgatctttctttatatgtcttcttcaatgctgcttttggtatggtttcttaattaggcacattctctcttccttgctacagcgacttgtgtggcattcaatcctgtgggtgacaattactttataagcggatcgattgatggcaaagttcgtatatgggatgtgtctcagttccgagttgttgactatactgatataagacagattgttacagctttgtgctatcgccctgatggtaatggcgcagtagtaggttctatgactggcgagtgtcgattttaccatacaactggtatgttatttaccttgcggttgattaccaaacttgcatctagagtcatctatgttttaatgtctgcatcatctttataatttcagataaccagctgcaactggatagagagatcagtttacatgggaagaagaaggttcctaacaaaagaatcaccggttttcagtttttccccggagattcagacaaagtgatggttacttctgctgactctcaaatacgaataatctgcggagtggatacaatctgcaagcttaaaagaggtcctagtcaagtttcttctctttcttcaggatatgtgaacgatcttgtgagtttgtttgttattgatttggtggatatattgcagcttcaagtcttcgaacaacactgatgagtccaacatttgcttcattcacatctgatgggaaacacattgtctcaacaatagaagactcaggcattcatgtttgggacttctctcaacccaacaaaaaggcatcttctcagaaaccaaagaccatcagatcttatgagggatttctatcgcgaaatgtgtctgtggccataccttggctaggccaggggaaggaggacagtatcatagcagatttggaaaaaagttttgctcatttcccggttcccttggactatttctctccaatgaaaggagcaacaacgtggccggaagagaagcttggagtagtagcaggtacggctgcagcagcggtttcagctacagtcagcagcagatctaagttgaggctcttaaaaagtgtgtgccagaacgttcatggctcgacgcctcacctgtgggggcttgtgattgtgactgcaacgtgggacggtagtatcagagtattccataactacggtttaccaattcgagtctaa

SEQ ID NO: 164899 - DNA, 2899 bp, Arabidopsis thaliana landsberg
ggctcttgtggacatgttagttataaagcgaggaggcaagctaacaatcatcaatggattatctccttttctgttccttacgtggtgggcgccatagcatgtacagtaatcacgagcaacatccgtggaaccgtggcgaaaaataatcccgaccagctccacaatttactaacaaaccaatccgtagtgtattttcaagtggcgtattcggttttgtcgaatctcaagatgctgaactcggagcccggaaggttagccctctcctccataatggtggctaactgcttcggctgggggtttttcctccttttgattacctttgacagtttcttgcatcaaaattactccaagaccacttatctgcctaccttcacaaaggtactactgctggttggtatagtagttgtgtgccgaccaatattcaactggatagtgaagagaacccctgaaggaaagaaactcaaggcttcccatctatgcaccatttgcgtcatgttgtgcaccgccactttcctgtctgaaactgtagggtttccttacgtagtcggatccgtggctctcggtcttgtcactcctaagacgcctcctttcggtactggtctcactgacaagatcggtagcttctgttatgcggttcttatgccgtgttacgtcatcgggattggtaacaaagtggatttcttttcattcaatctacgtgacatcatatctttggagttccttatctttaccattagtgctgcaaagtttgcctccatcgtccttccatcgctttacttccaagttcctatatcacacgcagtgattgtcggcttcatcgtctgcatacaagggatctacgatgtccaaatcttcaaacagctcttgaactacaaggtacacattgatttagtacaaatgaaatatcattcatcgccaattagtgttttgacttttaactacttgttttaagggatgcagaatataagccacgaggcatttgggataatggtgatctctgccatggttcactcgaccattttcacggccattgtcaaaaatctctacgggtgggtgcagaggaaacacatcacttaccggcgacaaaccgttcaacactacgaaccaaacaaacctctcaagatcctcacttgtttctaccaccgtgaaaccgttcctcccatcctcaccgtcttggagctgggtacttgtccctcgagcgcctcttcgctctccatcgtttccgtcaatctcgaagagcttgagcaaaataacgtccctctcctcattcaacaccatccaggtcagaacgacgagtcatcaacgtcttccagccgcagagatcagatctccaaagccttcgagaaattccgaagcggccacgatttgcaagaaaacgtttccgttgaatgtttcacagcagttgcaccgagcaagacgatgcacgaggatgtatgtgccttggccttcgaaaaagaaaccgatctcatcattgtcgggatggccgacgggactgcagcagaacgaaggctctgtcgcaacgtccggaatgcctcacctagctccgttgcggttctaatggaccaaggacggcttccagatttcaagaacatgggaacggcgatgaagaacggctcaatgaggatcaacatctgttcaatattcctcggtggagcagacgaccgtgagacactggcctttgcggttagaatgacaaaccaaccttacgtaaacctaaccgtcttaaacttgtcgacggtgaaaacgtctcacacctaaacgacgtcgtagagaaaagactcgatttcagaaccatcgaaaaattccgtcaagacaccatgaacaaacacaatgtcgctttacgagaggtaaacacacaagtcttgactccgtttctccggttttcaaatccggattagatttaaccgttcattttggtcttaggtatggataaaggaagcgagtgatctggtgaacctactgagagaggaaggtaacaattacgatctgatcatggttggaatcagacacgaaaaaagtttcgaagtgcttcaaggattatcggtatggagtgagatcgaggagcttggagagatcggagatctgctcgtttccagggatctcaagctttctgcatcggttttggccgtacaacaacaactctcctctgtcgtcgaggaggtttaatggcatagagcatttgtatacagtttttaggttatacgggagactgctttcttttattttcagaaaatgtacatttgatatcttacaagttacaacaaacacattccttacatagttatgtttgtttctcgggctcggcttagtcttcatggtcccatagatcagccacactcgggaatggactttcggtcttgttgacgaaaagatcctcaccgtctatcactcgtttctgcatcagggccaaataagacccaaagtgtgaacatttggatcaaatgaataagctgaaaatattgttagttttctctaacaaactcagaagataaagaagtgctctgtttccttactctgtcctgttcctcactagttactactataacaagaactcaggaagcagagaagactaacaagtgctctgtttctcactaacagaaataacggtgattcctaactaaaataaaatgactgtcccattaaagcagtaaccgcgatttcatcatagcaagcaatttactctcgttgtaaaagatcatctagagattctggttggtagtttggtaagtttacctggtcagtgatgctgttgagagcttggaagtcttgttcagggatcacccaatcaaacactttcatgttctctttgatcctctctggattcaatgacttagggatgacacttgttcctctctgcaaaccccatttcactagaatctgccgcggtgtgcttatgcag

SEQ ID NO: 164900 - DNA, 1207 bp, Arabidopsis thaliana landsberg
ccggattgagatataatgataaatggcctgatcttacttttttagttaccattatggcaaatttcaaaccttggtgggtcagaaagcagaggacatgttcatatagcatagtacatactagagcaaacttaaatattgataatgtgaaaacaggaggtaatacaatattcctctcatcttctttttggcactatgatgaacacttttggaatttgttccacgtaaatgtttcttcttgaagttttctggaatctcctagttctttatgtaaagaaagataagacaattaaacacatatctatcgtcctcttacattgctgtcctggaatccaataccttcccatgaagcatgcacgtctttttatatgcgtgttgcaaaagctaaacactcaattcttgttcttcattgatctgcaacctgttttagttccaaaaagcttcagctacatcaaagaacgagtttgattctccatagatggtatcagattaatagcagcttcctctttgttgtaaaactttggtttcttagcatcttcccttccattgtgtttacaaaagttagctgtcatttaaacagcaggacgactcatggatcaacaacaacaaggtgataagaatctgacagtgttcgtaggaccctggggaggaaatggaggaaccacttgggatgatgggatttatgatggtgtccgtgagatcagacttgtttatgaccattgcattgactccatctcggtgatctacgataagaatggtaaacccgcaaagtcagagaagcatggaggtgtgggaggcaacaaaacatcagaggtatgttcctctatcactctggattatgtctctctttaacttcctccctcagattttggtttcttttacatgaaccgaatttctgcagataaagctgcaatacccagaggagtatctgactggcgtgagtggctactactgtccaatggttaacagtggcactcctgtaatcagatcaatgaccttcaagagcaataaacaagtgtatggaccttatggagttgaacagggaacacccttcactttctcagtcaatgggggacgcattgttggtatgaacggtaggagtggctggtaccttgactccatcggcttccatctatcacgccctaaatcaaccaagatgatcaacaagctccgaaagaagattcactggctcacaaggatagtagcatga

SEQ ID NO: 164901 - DNA, 1155 bp, Arabidopsis thaliana landsberg
ccggtctcaatcgcatcacctggtcaagatggatcatgggaattcaataataattatatcccaatcaaggataaggataaacttatcccgagtttggataaagcaaaccggtgccggaatcttaaggaagtgtacaaatctagaagtggaggttacgatgggaggtgtactgttccaatgctgtgggatttaaggaagaaagatgttgtttgtaacgaaagctatgatattatcgagttcttcaattcaggtttaaacaaattggcccgaaatgataacttggatctctcgccaccagagttgaaagagatgatacaaggttggaatcagattgtgtatcctaaagttaacaatggcgtttacaggtaaattggaaaacatcattacaatgtttatagaatgttacaatggcgtttacaagtaagcgggatatcaaaaaagctataggaatggagtgaattgttccaaatttgatgcgggtttagctcatagcttgtgttcttaatgctgcaatgtgtgtttgatgctaaagttgatgactttgttgtgtggtaatttgcttgcgatattttttgaaaggtgtgggtttgcgcagagccaagaagtgtatgatggagctgtaaaatgaactctttagtattaaaagctatagaaagcaactgaattgttcacatttgatgcggtttttgcgtagcttgtgttcttgatgctgcaatgtgtgtttgttgctaaagttgatggctttgtttgttgtgtcatgtgtggtgatttttgaaaggtgcgggtttgcgcagagccaagaagcgtatgatggagcagtgaatgaactctttagtaccttagatgagattgaggatcacttgggtagtaatagatacttgtgtggagaaaggttgacattggctgatgtatgtctgttcacaactctgattcgttttgattcggtttacaacattctattcaaatgcaccaagaagaagcttgttgaatacccgaatctctatggctatttgcgcgagatttaccaggttcctcttcttactggcttctctctgagacataaattctgcatctgggagtgtgtttcaaattatgtgtttgttgttgttgttgaaacagattcctggtgttgcggatacttaaatagtcggctat

SEQ ID NO: 164902 - DNA, 878 bp, Arabidopsis thaliana landsberg
gttcttatcttctacagattcctttatgtcttattgttattcttttgtcaggtttcagattacaagattaatctctttgataacttagttgggaaagcagaaaaagttttggagattggcattggaacaggtcccaacttcaagtactacacagacattccaaacgtttctgttattggtattgatccaaatgctaaaatggaaagttatgcgcgtaaatccgctacagaagcaggcttgaaacctgaagaattcacattcgttcatgcggtaactttgtgattatggatcaaatatgatatcattagcaaaatagcatccccctgatgctacattttttgttattgtgtctagcttggagagtctataccgttagaagatgcatcggttgatgcagtcgtggggactctggtgctttgttctgtcacagatgtcactcagacgctcaaaggtaactctttacctcctttgtattcaacagcttaagagtgctcagtaacagtttgagtttatgtggtttgttacagagataaaacggatacttaagaccgggagggatatacattttcattgacatgttgcagccgaaggcacaacatccgactcgaatcaatcatcagcagagcgtgtacagaactgataaaactaacccatcgtttggctttttctttggctgagcagatggtacatttttgaggttggtgcagacagttttggacccattgcagcaagttgctgccgatggatgtcacttgacaaggcacaccggagagtccattttagaagctaggttcaatggtggtgcagatgttaaaaagacatctctttctaggcttgcttacataagctctcatgtctatggagttgcttataattaa

SEQ ID NO: 164903 - DNA, 2116 bp, Arabidopsis thaliana landsberg
gcttatgtatctcttgctagctacttgcttgtcttttgtttttttgattacacaagcataccctcgtgtttatttgtttcttgaaattagagttcggattggtaaaacttggtatctgctagttcctagttgcgaattctaattttgatttgtgatttcttcagattcagtgttggtgatcgggtaattgaactatttgacaactcctgtgacagctctggtggaacgtagtagaacttcttctagatcagctatggtggaggcgacatgctttaaagaaactcattgactgggaaagtgtggaagaagacaaggggaaggattccattgtggcttacatcttgcatctcatgaaaaagtactccaagctattcagaagtgaaattgtggatgacaaatgactctggttaaggttgtaatgaacatcgtgttcatgcgtttgggcgccaactatcgaagtttggttctatcaactataagcttatgaacagtaggaaatcaggacagattttcattccaccagaagaacagatatctttgcaacttatgtgtgatcctgtcattattgcttcagggcttacttatgaacgggtctgtattgagaaatggttcagtgatgggcataatacttgcccaaagactcaacaacagctcccacatatctctttgactcccaataactgtgttaaaggtcttattgcgagctggtgtgaacagaatggaactcaaattcctagtgggccgccggaatctcaagacctcgactactggagactagctctctctgactccgagtccaccaaatcacagtcagtcaacagtatagggtcgtataaattgaagggcgtaaaaattgttccgttggaggagaatggtactactgttgttgaacgacaaaacacagaagaaagttttgtgtctgatgatgatgatgaggaggattctgatataaatgtacttgagaggtatcaagatttattggctgtcttaaacgaagaggagggtttggagaaaaaatgcaaggttgtagaaaaaatcaggctattgctgaaggatgatgaaaaggccaggatcttcatgggagccaacgggtttgttgaagccttgttgcggttcttaggatcagctgtagatgataacaatgctgcagctcaggatagtggagctatggctctgttcaatttagctttcaactacaacaggttagtacctcttggtgatgttggtaatacaataatagatcgggactttctcattactttttgtgttctgcaggaacaaagagttgatgttaacttctggggggattcggctgctggagaaaatgatttcttctgctgagtcccatggttcagcaaccgcgctttatctgaacctttcctgtctcgatgaagcaaagtccgtgataggttcaagccaagcagtacctttccttgtccaacttcttcagaaggaaatcgaaacccaatgcaagctcgatgctcttcacgccctctacaacctttccacatattcccccaatatccctgctctcctttcatctaacatcatcaagagcctccaaggccttctcgcatcaacaggtgaaaatttgtggatagagaagtcactagccgtattgctaaatctagcttcaagcctggagggcaaagatgaagcggtatcatcacagggcatgatcagcagtctagcaacagtgctagacatgggtgacacaacagagcaggagcaagctgtttcatgccttttgattctatgcaatggaagagagtcttgtatccaaatggtgctacaagaaggtgtgataccatcattagtgtcaatctctgtaaacggaacacctcgaggcagagagaagtctcagaagcttctaatgctgtttagggaagaaagacagcaacgggaccagccatcttcaaacagagatgagccaccccaaaaggaacctgcccgaaaatctctctcagcaccgctgtctgtccatggatcaactcctgcttcagcttcagttcaagactatgaaccaagagtcctgtcgaaatcaatgtcgagaagaaagtcgatggcaagaccattcagcttcttctggaagaaaagctactcggttcgcgagtga

SEQ ID NO: 164904 - DNA, 727 bp, Arabidopsis thaliana landsberg; identical to SEQ ID NO: 65282

SEQ ID NO: 164905 - DNA, 402 bp, Arabidopsis thaliana landsberg
atgcgctggacgatcctggctttcggcaagctcaaagagccgtactggcaagccggcgtggccgaatacctgaagcgcctcacgccctatcggccggtcgagctcgtcgagctgccggacgagcgggtcgacgagggccgcgaggcggccgcgatgcagcgcgaggccgatcgggtgctcgcggccctcaagccgggcgcctacctggtggcgatgtgggagcgtggtgagcaggtcgactccgtcggcctctcgaagaagctgacggcgctcgatcacgagggccaccgcgaggtggtgttcgtgatcggcggcgccaacgggctccaccccaccgtgctcgcgcgggcggactggaagctcgggctctcgaagctcaccttgccccatatgctcgcccgg

SEQ ID NO: 164906 - DNA, 513 bp, Arabidopsis thaliana landsberg
  unsure (1)..(513): unsure at all n locations
caatgtgatctttgcgatagcaaccggatgcaaagcgctctgaacccgttacacaggaacacgcagaacatcatggctacgctggatatactggaatttcccgacccccgactgcgcaccgtggcaaaaccggtggagcaggtggacgaggcactgggcaagctggnnnnnnnnnnnnnnnnnnnnnnnnnnnncgcccaggggatcggcctggccgccacccaggttgacgtgcatctgcgggtactggtcatcgacgtctcggagcagcgcgaccagccgcaagtgttcatcaacccggaggtcacgccgctcaccgacgatctggcgccctacgaagagggctgcctgtccgtgcccggcttctacgagaaggtggaacggcccgccaaagtgcgcatcaacgcgctgggccgggacggcaagccgttcgaaatcgtcaccgacgggctgctggcgacctgcatccagcacgagatcgaccacctcaacgcaagctgttcgtggattaca

SEQ ID NO: 164907 - DNA, 1522 bp, Arabidopsis thaliana landsberg
atgaaggaagatccacttgttcctctaaaagcaagaaaaactccaatgaagctaatggctgcgtcactgcactttaccacttttttcatttccaccatttttactttccttcacgtcatcatcatcaccaccaacctagtattgattctccctccagaactcgtaaaggtacgtgctttctctatctctctatagataaaggacttgggagctttttgcaagacagtgagtgaggaatgttatgctactgaaacttgtaggcttggtggcgccacgaaacagcttggacttatcagaggagtctccattatcaaccaactacaagctggaaagagaaggcttgaacatctctgtaagtcaacattaatgacttcaatgtacatttgaagttgcttcattgatggagccaagtgagaattcaattgcaggtgggcgggaaaaagtcaacacttagaggtcttctcgttgatacaccttcacataattgcaacttacctctcaccaagacaccgaacgttgtggctagactcatgggtcttgatcttcttcctgataaaactgaccttaaccattcactgtcagatcttcataccatgtcaagtcatcatatcacgagccatagactttccaagaaaggcacacgatctttaccggttagccctagaatctcctctgctcggaaatctgatttcgacattcatcgtctctctcttcagctgaacagagaaaaagagtttgggcgttcaaggctgaaagaagaccaagaggagagtcacagtccaagagattacgcgaggcagatagttaaacaaatcaaagagagagtcgtcacaagaagagtcgtcggtatggatataacaaactcggtgaaaaacagagaagcaagaccatcacacgagcttagaagagacacaacagtttcttgttcaccaagaactaggttttcagagaaagagaacaaacaaagcaccagtcataaacctaattcatcatcttcttccagaccagaaccgatcattcagaagccaaagccaacaccagtgattcttggagagaaacagagccagaacagagtaaaacaaaggcaactaaaacccatcaacctgtgcaagaaggcagagactgaaacaagacgtcccataaagccttctccaacatcagatattcgaaacaggaagcgagagactttcttgtctgattctagagacgtgaaagccaagcctttacacaagatcaagaagtttaagaagataccaaagtcaaatgatcttgaaaacatctctgccacaagacctcctcatcaacaggtacaatctatttcaagtttctctctaactctcacacacactaaattttcaacctttgataaatcccttttcgtggttttttcaagattaacgaaagagagcgactaatatcgaatgaagcagcatcgatacgctctagttagatgaacaaaaccgagaagaatagtccacaagtagcgaggaatcacaaattcgacgatgcagccactgaaatc

SEQ ID NO: 164908 - DNA, 1922 bp, Arabidopsis thaliana landsberg
atggcttatagcgacgaggatccgtcggcaaatcagggacaattttcgcgggatgaggacgaatcgagaactctaattgaagatttgaatgaaacaggggaagggaaaggggaagaggaagagagtggagagtgcaggttgtgccggttcataaagggaggtgagtgcaaggaatcattcatagcattggagcaatgcgtggatgaagccgaggagagcggagaagaaagtgacttcacaaaatgcaaggaggtcagagccaagttcaagacttgtatgaaaaccctgtttactacgagcccattcttgctggggaggctagagcgattgccaagatgttgatggagttgcaagccgaaaaggaggccattcttgccggtgaggctgcagccattgctagggcggttagcaggttgcaaacagaggaatccaatggacgacgtcacgggctcacggcgagtctcccacaccggctttcaatttaagttcaataatcgacaaaggaatccgcaaccgtcttagcacattggccagagtaggatccgagcacgaagggctcctcagatattggtttcagacccacggtcactaatctcttcgaaggctgattaaataaatctttctaaacaattcggttagttgctgcatttattgtacaacagtattttttaattgtatgttaacacaaatggactggaagttagaaatatgtttgtttaattgactaaaactggatctatgttaataaaataattcatcaagactataaacacataagttgtaatctatattactaaaaattgaaaaacaattttaaaatcaaccattaaactaataatagagaaaatacgttatactcactaaaatcatcgttttaaaatatttcttctttgtaaatgcgataatatccttgattttcgcggatctttatgtttgatgcgggcatcaaagaagggatagtttggtaaaaaaattgttcgtagatttggaccgccaagactactttcttgaactttgctaataagtaacgagaaaataaatttaaaaaagataaatgtaaaaaaaaaaaaagaagaacaagttttataacataaaaaaaaaaaaaaaaagtttaagattcagtgaacctgaactttaacggcttgaaatatgggccggtaagcaccagctgggctaaaaaatgggtcgagcggggaatgttattgtttagttatttttaaaagaagttaaaaccgtaaacgcacataagaaaaccctaaactggggtttggtaaatcttcgattcattagagagtttcaaagtttccatttatggaaaatgatttagagaaaatgaaaagaagaacaattgatgtgaagttggcaaaagtaaatgtgtgacctttgttttgttaataagagaggcggcgattagggttttgggagtgagcaagcaaattggataaatcaagagtccgatctctctcgatcatctatgggagttgcgagttctgtgggcatgacctttagcgacggggttccgttggcgcgagatggggacgaatcgagaatcctaattgaagatttgaaagaaacagaggaaggagaagagagtggagagtgtgagttatgcgaatacataaagggaggtgagtgcaaggaatcattcatagcattggagaaatgcgcggatgaagaaaagaagaacgaagaagaaagtgacgtcacgaaatgcaaggatgtcagagccaagttcaagacttgtatgtatgaaaactctgtttactacgagcccattcttgctggggaggctagagagattgccaagatgttaatggagttgcaagccgaaaaggaggccattcttgccgtcgaggctgcagccattgctaaagcgttaagcaagttgccaacagaggaggcggagttggggaaagcagaga

SEQ ID NO: 164909 - DNA, 576 bp, Arabidopsis thaliana landsberg
cttgaccgggatcaatgggcgaaggtcggaaatgtcccaggcttgcgctgcgatcccccgcacgttcggtgcaaggtatcggctacaagggctgcctgatcctggcccatggcgcaggtgcgccgatggacagcgggttcatggacgaaatggcgcaaaggcttgcggcgcttggggtagcggtagtgcgcttcgagttcccgtacatggccgagcgcagggttgccggcggcaagcggccgccgaacccgcagagggtgttgctggaatgctggcgcgaggtgtaccggcaggtgcgacctttggtcgcgggcaaattggcagtgggtggcaaatccatgggcgggcgcatggccagcctgctggccgatgaactggaagcggatgcactggtgtgcctgggctatccgttctatgcggtgggcaaaccggaaaagccacgggtcgagcacctggccgaattgaagacgccgacgttgatcgtgcagggcgagcgggatgcactgggtaaccgcgaggcggtggcagggtatgcgttattgccggcgatcgaggtgagcttgcttggtggcgggg

SEQ ID NO: 164910 - DNA, 1933 bp, Arabidopsis thaliana landsberg
tgcgggaacgtttattggaagcaagcggaggttttttcgcttgtatatatgttttaattctcaaaaggtttcatggaaacaacattgtagaccagtcataggcatagatggagcgtttttgaaatgggacataaaaggtcaccttcttgctgcagttggaagagatggtgataataggattgttcctctagcttgggcagtggtagaaatagaaaacgataaataattgggactggtttttgaagaaactgtctgaaagtttagggctttgtgaaatggtgaatctagctttaatttcagataagcaatcggtaagcaatcaagctttagttttagctttattcgtgttatgcttcagtttgtattctttgtttagtttcagcttttattcatgctttagtttcagcttttattcatgctttagtttcagctttattcatgctttctttagtttcagcttttattcatggatcactttcagcttttattcttggtttagtttcagcttttaatgatggattcatatttctgtgatttttcagggtcttgtcaaagcaatccataatgtactgccacaagcggagcatcgtcaatgttctaagcacatcatggataattggaaaagggacagccacgacattgagctacaacgtctattttggaagatagcacgcagctacaccgtagaagagttcaataattaccaggcagacttaaaaaggtacaatatccaagcctacacgtctctccaacttactagtcctatgacctggtccagagccttctttcgaataggtacatgctgtaatgacaacctaaacaatttgagtgagtcttttaataggactattagacaagccagaagaaagccgttattggatatgctagaagacatccggaggcaatgcatggtcagaactgcaaagaggtttatcatagctgagaggttaaagtcaagatttactccgagagctcatgctgagattgaaaaaatgattgctggttctgcaggttgcgaaagacatttggcgagaaacaatttgcatgagatatatgtgaatgatgttggatactttgttgatatggataaaaagacttgtggttgcaggaaatgggagatggttggaatcccatgtgttcatgcagcatgtgtgataataggcagaaaagaaaaggttgaagactatgttagtgactactacacaaaggtaagatggagagagacatacagagatggtattaggcctgtccaaggaatgccattgtggcctagaatgagtaggttgcctgtcttaccgccaccttggagaagaggcaatcctggaagacaaagtaactatgctagaaagaaaggaagatatgaagcagcctcttcttcaaacaagaacaagatgtcacgggctaatcgaataatgacatgctctaattgtaagcaagaagggcacaacaagagctcatgtaagaatgctactgtcctgttaccaccaccgagaccaagaggtcgaccaagtctaaatcaggttacacttcttttacgtttcagattctcaacaagagcttcattgaattatgtacgtttcagattctcatcaaggcttcattgaattaggaaccacaaggagcacaatcttatcaagaacaagcagtttcaggtcatggatcacaagaacaagcagcttcgggtcatggatcacaaggacatggttcacaaagacatggatcacaagaacaagcagcgtctggtcatggatcacaaggacatgggtcacaaggatcaagagctcatggaccgcagagacaaagggcatcacaaagacaaagatcaagagctcatgttagatcagaagcacaagcacaatctcaaccacaagcgcaagcccaagaacaaagacttgctgggttagaatcatggtttaattgttcatctcagctc

SEQ ID NO: 164911 - DNA, 3530 bp, Arabidopsis thaliana landsberg
  unsure (1)..(3530): unsure at all n locations
agtatactnagttggaatgtcaagggggctgggaacactgagacaggccgtcgtttaagggagatgcaaagaacgtttattccagattttctatttctcatggaaactaaacaaaaaaagaagtatgttacgagattacaagactctttaggttatgataactgtttcatggttgatccagtaggattgagtggtggcttagccgttttttggaagaattgctacaaggttgaagtgttgagtgctgataatcgcataattgacttgaaggtgaatatagggtcaatgatgtttttcctcacttgtgtctatggcgatccagtgagagctcttagacagttagtatgggaacaactttctgggattggcattggtagaaatgaagcttgggtagtgcttggtgacttcaatgaattgatgaccaataccgagaaaatgggaggacctctccgcaatgaatcatctttctgggattttcgtaacatggctcataattgcaaattggcagagataagaagttctggaaactggttttcttgggcaggctggcgagataaaatatggattcaatgtcggcttgaccggagtttcggtaatgacgaatggtttcaattatttcctagagctcatatggaatatcttgatatgtgggcatcagatcatcgacctattttgattacctttgcttcggagcaaagtgttaatgccaaaggaaggttttgttttgataagcggtggttatcaaaaccaggaattgttgacgtagtgaaaagaggatggtgtggtggacaacaagatatagagatctctttggcagaacgtataggaagatgtagatcagaattatctcgttggaaaagatcatcaaatactaactctgagataaggatggtgaagttaaaagagactcttgagaaggaagtttctaaaatgcacccagagcccaacgtaatgcagaggacaaagactgagttagcttttgcttataaagaggaagagatattctggaaacattgcagcagggaacaatggcttaacacaggggaaagaaacactcgttactttcataactgtgtgaagagtagaaaggtaaaaaataggatcttgatgcttgtggatgaagagggtgatgaacagttttcagaaggatccaaaggacagattgccataaactattttcgagagctctttagcagctcaaagccacaaaatttagattcccttcttgacggctttgaagcaaggctcacaccatctatgaacgaagctttaacggcgccagtcttagagtcggagataaaaaaagcagtttttagcataaaaggaagtagagcgccaggagcagatggctttacgagtgatttctatcaacatttctggagtatagtggggccaagtgtaacagcataaatccaaaaattctttagctcctcttccctttccaatagaatggaattatacccaaatatgtttaataccgaaagtgaagaacccatcgaaaatgtcagagatgcgaccaataagcttatgttcagtgcattacaagattatctccaatatcatgtgtgagaggcttaagaagatccttcctttgatcatatcagatacacaaggagcttttgtatcagggcgtgtaataactgataatatcattatcgctcatgaattgattcatgctttgcggactaacgatgctgtttctaaggagtttatggcgattaatactgatatgtccaaagcgtacgatagggttgaatggtgctttctggagagactaatggagaaaatgggctttgaccatcgatggataaagtggattagttgctgcattagatcagttacttacacggtcttgttaaacgagcaatctcatggatatattaaaccggatcgtggccttcgacaaggagatccactatcttcgtttttgtttattctttgtgcagaagctttagtgaatgtactaaataaggcataagtaagtggtaggctaaacgggatacaacttgctgattctggcccgtcaattcaccatcttctttttgctgatgatagtctcctcttgtgcaaagcctcagcgaatgagagatcagagatcatgcgttgcttgaaactgtatggggaagcctcgggtcaagtcatcaacaattccaagtcatctattatttttgggtctaaggtagaggaggtattaaaacatgtggttaaaaagattcttggaattggaaaagaggggggagaaggatcatatttaggacttcccgaatgtttcagttgatctaaaaggaagctcttaaatttcattcaagagaaacttcaatcgcgtctccatggatggtttgcgaaatctttatcacaaggagggaaagaagttctgttaaaatccatagctatggcatttcctatgtatgttatgacctgcttcaagctactcaagactttatgcacaaagttgactagtgtaatgatggacttttcgtggaactctatgcatgacaagaagaaaattcactggattggagctcaaaaattaatgctgcctaacgttttaagaggatttggggtcaaaaatcttcaatgctttaaccaagccttactaggcaaacaagcttcgagacttctcaatgattcagacagtcttttatctccaattctcaaaagcagatactatctgaatacatacttcctctcggctacaaaaggcacaagaccatcttacgcttgggagagtattttatatggcagggagttactaattacaggtctgaaaaaagtcatcgggaatggagagcaaacttatgtttggatggataaatggcttttttatggggaatctagaagacgagtgagtctgcaggtgatgaatgatattaaattaaaagtgagtcaacttattgatcctgtttctaggaattggaatctgaatatgcttcgtgacttatttccttggaaagatattcagcttattcgtaaacagcgacctatggtttctagaaaggactctttttgttggtttggtaccaatcatggtctatacactgttaaatctggctatgaaatgtgtagtagacaggtgcataaactgatgtttaaagaagcagaagaacaaccatcattaaatcctcttttcggaaaaatctggagtctaaacacggcaccaaaaatcaaagtattcttgtggaagatgctaaaaggtgttgttgcagtggaagacaggttacgaacaaggggtattttaattgaggatggatgttcaatgtgctctgagaaagatgaaactttaaaccacattctgtttcagtgtccccttgctcgccaggtttgggccatctgataatggttttgggaattctatctttaccaatatgaatcatgtgattactaactgccacaatagagaactttctactcagttgagatctgttagtccctggatcatttgggtgttatggaagactcgaaataaaatgctatatgaaggtataagctcggtgtccctaagcatgttgggaaagcatttgagaattgca

SEQ ID NO: 164912 - DNA, 1156 bp, Arabidopsis thaliana landsberg
  unsure (1)..(1156): unsure at all n locations
aagattatgtggcagaccttgttcataaagagaatatccgattcgataccctaccctctgaacggacgtcgtcttccgatagatagattgctatcgattggattctcactgtccgtaatctcaaatggattttcccttatctgatctttgtcttaatctctgattgattggttctttgtcttaatctcagacaaggacaagatttgggttcctacatcacacagcttgcattgcaatctcatacttcgatctgtttctccaccaaagattcatcggtgtaagtttcactctccggtttcattgatctataaaaatctcgcctttatcttcagattaaagcttaaagatggtttctttgtagttacaaataaatgaaacatgggcgatgcgattgttatcagtagcttgtttatcattagctgctaaaatggaggaacgtattgttcctggtttatcacaataccctcaagatcatgacttcgttttcaaacccgatgtcattcgtaaaactgaactgttgattctatccacattggactggaagatgaacttgatcactccttttcattacttcaactacttccttgctaaaatctctcaggacaaccattctgtttctaaagacttggtgttgttaagatcctctgattctcttcttgctttaactaaaggtaactctattaagaaacacatttttttctcaagatcaaagcatttattgatatcacatttttgtttccatgtagagataagttttacggagtatcgacagtttgttgttgctgctgttactacattgctagcttcttcttctacctcatcggatattagattgactagagaagagatagctaacaagtttggttcgatctcttggtggacttctaatgagaatgtataaatcttggtgtctttttattcgattttgattgtttgatgttgatgatcataatcttaggagtgttgggttttgtaggaaaatgtatatttgtgttatcagagaacgctagagattgaggagaggaaacatatgacacctccaccggaaatagcggtttctcgcgaacagccggcttcaggaagtggcgctaaacgctgattgtcttttgatgaatctgatcaaaagtctcgaccagctnagagaatgcgtaagcta

SEQ ID NO: 164913 - DNA, 339 bp, Arabidopsis thaliana landsberg
  unsure (1)..(339): unsure at all n locations
gtgatggcatcgcccacatccatgcctctttcagcaacacccatcgtgaccatcaccgaccgtcagggcaacgctttgtcctgggcgacctccggtggttcgggtttccgtggttcgcgcaaatccaccccgttcgcagcccagatcgctgctgagcgtgctggtcaagctgcgctggaatacggtctgaagaacctcgacgtaaacgtcaagggtcnnnnnnnnnnnnnnnnnnnnnnnnnnnnnnnnnnnnnnnnnnnnnnnnnnnngatcgccagcatcaccgacgtgacgccaatcccgcacaacgggtgccgtccgccgaagaagcgtcgcgtg

SEQ ID NO: 164914 - DNA, 888 bp, Arabidopsis thaliana landsberg
tcacgcagttgatcgtagccacggtggtttgattgagatcgagatttggtactacggtactaatgatctcatcatgtacatagctgacaggttctgtttctccctagctctctttccatgttaaagacaatttggtcggtgctaatactagggttagagtgtttgctaactatagggctaagagtgatcggtgctaatccaagggttcgagtgattgctaattctgaagttataagtgattggaggattttgtgtcactctttttaaactagatttatttttatctgttctatatccttctactgaatctctgataatgcaccttggtttgcttagtggttttgtcaacgaagtgttctcaataaggttatgtttttgacttttttagtaacaattatttgcaggtcaagtaatcttaaaagccttggacttgtaaggtgctttccaataacagatgagggagttgccaaagcagtttcgaaagtaccgttgcttgaataccttgaggtttcatactgcttgttttcaggagagtctctgagagatataggccggtcttgtccgaatctgaagacactgaagctaaaccgagcccctgaaatcatgttttcaaatagtgggtttgatgataatgccaaagcaattgcagaaagcatgcctgaactacgccacctccagcttttagggaacgggctaaccaataagggcttgaacgccattcttgatggttgtcctcacctggaacaccttgatttacgccagtgtttcaacatcaaccttgttggggatctcaagaaacgatgttttgagaggatcaaagacttgagatgccccaatgactcagatgacgattcagatggtgactataatcaaggtgcggtgacaaca

SEQ ID NO: 164915 - DNA, 403 bp, Arabidopsis thaliana landsberg
cctatcctgacaccattcagacgctcgcaaatgaatatcgttgtcgacccacttgcctggcagtacgccgccacaggcggcgtactgatcggcctcgctgctgcgctgctgctgtgggcgagcggcgcaatctccggtatcagcggcatcttcgcggcagccgtactcggtcagcgcacgatatcggagcgcggctggcgcatcgctttcgtcgccggtctgctgatcggtgctgcactgtttgcgctgtacagcggtggcctgacgattcacctgcagaccacgtggcccggcatgctgctcggcggccttgcggtaggtatcggcacgaggctcggcaatggctgcacgtccggtcacggcgtctgcgggctggcccgactttcaggacgttcgttcgcgg

SEQ ID NO: 164916 - DNA, 529 bp, Arabidopsis thaliana landsberg
  unsure (1)..(529): unsure at all n locations
cgtttggaatcgatgatggannnnnnnnnnnnnnnnnnnnnnnnnnnnnnnnnnnnnnnncgatggtgatgagtagatccactgctcacaagcttcgtgaggaacattcgagtggagagaggagcttaccacgtttgtctacctcgaccgagacagagtgggttatcaggatcatcgccgtgaccagcgacaagatcaggatcatcgccgtgaccagcaactaaatcaggaccatcggcgtgacaatcgactagatcaggtccgttatgaatctcaacaacaacattacggtaacctgactcgcttgggaaagattgatttgcctcgttttgatggtactgggattaaggagtggttgttcaaggtggaagagttttttggaattgattttacacctgcagatctgaaggtgaagatggttgctattcatttnnnnnnnnnnnnnnnnnnnnnnnnncattcttttatgcagtcaggtgtgggtttggaggtgctatatgactggcctggttatgtgaggaagtaaaag

SEQ ID NO: 164917 - DNA, 393 bp, Arabidopsis thaliana landsberg
cgggcccattttgtgatggttcatggagcttggtttttggtataaactataccattcttgaaatctcaaggccataacgtaactgcggtcaacttagcggcatccagaatcgatcaataacggcctgagactctacggttggttgcggagtctattgggcccttgatgggcctaatggagagtctaggtgaggatgagaaggtgattcttctggcacatagtttgagtggggcttgctattcctaaggccatggagttgttctacaaaaaggttcatatggctattttcgttattggtgaaagagtttcagcactggatgatcaagaacaaccctcctaaccacgtggagcatatccagaattctgatcatatggtcacgagggagagtcgac

SEQ ID NO: 164918 - DNA, 383 bp, Arabidopsis thaliana landsberg
aaaactatattctaagggattagactctccgaattgatggagaaatggagaagaaggaagaaagggcacttcgttgtgtacacgaacgaagggaaaagattcgttttaccattggattatctgaatcatccaatgttacaggtgctattgcaaatggctgaggatgagtttgggactaccattgatggtcctttaaaagttccttgcgatggaagtttaatggatcacatcatcatgcttgtgagaaggagcatgtcccatgattatgatgatgtggagaagtcttccacgagcagcacctgcaagggagcttcaatctcttctctctttcgtggacagagccagcttcagtcattagtttcctaaccatttggagtaattgt

SEQ ID NO: 164919 - DNA, 1472 bp, Arabidopsis thaliana landsberg
tattcgtgagaatcccaggtacaccaaaatgtcgcccgaagaagtccttggaaaattcgttagcgggcggatgatgatcaaggaggcgaggtacgtggacgatgccttgaatggtccgatcaacgagccgcaaccccttgctctcaaggcaacaagaagcaaggaggcgctacctagtaaggtggcacaaattgaggcagccggacttaatgatgaagagatggccctcatcatcaaaagattcaagacggcgcttaaaggtcgcaagggacagccaagcaagaccaaagccaaggggaagcgctcatgcttcaaatgcggtaagcttggtcattttattgctaactgtcccgacaatgatagtgatcaggaccaagggatcaagagggagaagaagaagaattataagaaggcaaagggcgaggctcatcttggcaaggagtgggattcggactgctcctcctctgactccgacaatgaaggacttgccgccactgccttcaacaagtcatccctcttccccaacgagcgtcacacatgccttatggcaagggagaagaaggtatgcaatcaaaacaatgtcacttatgattcttccagtgatgatgagtctagtgatgatgaaatagattactctagtttgttcaagggattggatagaactaaagtagataaaattaatgaattgattgatgccttgaatgaaaaagatagactcttagaaaaacaagaggaccttttgtatgaagagcatgacaaatttgtagaagcacaaaaatcttatgctttagaagttaaaagaaatgaagtgctttctagtgaactatcttcttgtcataaaaccattgctactttaaagagtgttaatgatgacttaaatgctaaactagaagtagctagtaaatctaattcttgtgtagaacatgttgagatttgcactaggtgtaaagatttcgatgttgatgcttgtagtgacacctagtttcaatttctaaattgaatgatgaagtgtctagtcttaatgctcaacttaagactagcaagagtgaacttgataaaataaaatttgcaagggatgcctacacgattggtagcacacccctcaattaaggatggtcttggcttcaagagggaagtcaagaacttaacaggccataaggtttccatctccgccaaggagaaaggaaaggcccctatggctagtagtgctcataagaaccatgctttcatgtatcatgataagagacattctaggaatgcttttaggagttgtaatgcttatgagccaaatgcaatgtttgcttcaagttcttcctatatgcatggtagaaatgtggttaggagaaatgttgctcatgtccctaggaagactaatgaaccttctacaatttatcatgcttgcaatgcttcctttgcaatttgtagaaaggatagaaaagtgattgctaggaaattaggggcaaaatgcaagg

SEQ ID NO: 164920 - DNA, 2144 bp, Arabidopsis thaliana landsberg
tggagggaacgctacaattatggcggtactggcggtttctatcgagattggatgtacaagagatttgatgaagtgacggggaatttgtcagccgaatacgtcgcaggagttgagcaattcatgacattcgctaatagtcagccaatagtacagagtagtcgaggtaaatttcattgtccttgtagtgtatgcaagaatgaaaaacacatcatctcgggtagaagagttagtagtcatttgtttagtcatggatttatgcctgattattatgtttggtataagcatggagaagaaatgaatatgaatataggaacgagttacacgaataagacgtattttagtgagaatcatgaagaagtgggtaatattgtagaagatccatatgtggatatggtgaccgatgcatttaattttaacgtggggtatgatgataactatcgtcatgatgatagttatcagaatgtggaagaaccggtctgtaaccattcaataagttctacgacttgttagaaggtgcaaataatcctttgtacgatggttgtcgtgaagggcagtcgcaattatccttagcatctcgactcatgcacaacaaagcgaagtataatatgagtgaaaagttggtggactccgtttgcgaaatgtttacagattttttaccagaaggaaaccaggctaccacttcacattaccagaccgagaagttaatgcgcaatttaggacttccatatcatacgattgatgtttgtcagaacaattgtatgctattttggaaagaagacgaaaaagaagatcaatgtcgattttgtggcgcgaaaagatggaagcctaaggacgaccgtcgaagaaccaaagtaccatatagtcgtatgtggtatctacctattggggaccggttgaagagaatgtatcagagccataagacagctgcggcaatgcgatggcatgctgagcaccaatcaaaggagggagaaatgaatcatccttcagatgcagcggagtggagatatttccaagagttacatccccggtttgccgaagaaccccgtaacgtttatctcgggttgtgtactgatgggttcaatcaatttgggatgtctcgtaatcattcgttatggcctgtgatcttgactccatataatttaccccctggtatgtgcatgaatacaaagtacttatttcttaccattctcaattctagaccaaatcatcctcgaggtagtcttgatgtgttcctccaacctcttattgaggagttaaaagagttgtggtctactggagttgatgcgtacgatgtttcattaagtcagaattttaatctaaaagcagtactactctggacgattagggactttccggcgtatagcatgttatcaggatggactactcatggtaagttgtcttgtccagtttccatggaaagtacaaagtctttttatctacccaatggacggaagacatgctggtttgattgtcaccgtagatttcttcctcatggtcatccatcccgtaggaatagaaaagactttttgaaaggaagagatgcttctagcgagtatccaccggagtctttaacagaggagcaagtttattacgagcggttggctagtgtaaatccaccaagaacgaaagatgttggtgggaacggtcatgaaaagaagatgcgaggctatgggaaggaacataattgacacaaggaaagcatcttgtgggagttgtcttacaggaaggacctcaatcttcgacataatattgatgtgatgcatacagagaagaattttcttgacaacatcatgaacactctcttgcgtgttaagggtaaatcaaaagacaatatcatgtcaagaatggatattgagaaattttgttcacggccagacttacatattgatagtaatggtaaggctccatttccagcgtattgattaacagacgaagccaaacagagtttatttcaatgtgtgaaacatgatgttagattttcagattgttattctagcgatttggctagttgtgtagatctggagaatggaaagttttcaggcatgaagagtcatgattgtcttgtttttatggagcgacaacttccaattatctttgttgatctccttgaccggaatgtccaccttgccttatcaggtataatc

SEQ ID NO: 164921 - DNA, 262 bp, Arabidopsis thaliana landsberg
acaaactatttaaaacattatagagaactaaaattaagaataatatttattttggattttgttgttttgtggatggattatggaaaagaagcgataagttttgtggataagggtggttttgcatctcatcaaatggagagtcgtcaaccataggagtagccaatctgcgtagaactctatctccactccatagaagttgaagctctactcttcgcgatgaagtgtataattggtgcccacaatcaagaattagcattttcag

SEQ ID NO: 164922 - DNA, 957 bp, Arabidopsis thaliana landsberg
atgacgaccgaagaagatatgaggtcatcatcgaagtctccgaagtcgtttttgtctttacccaacgacgttgttcttaactgtctgtctcgtgtctcgagaactcatgatccaattctatctctcgtatccaagagtttccgatcactcgtcgcttcgccggatctcgaagccgcacgattccgcttcctaaatacggagaggtgcctctatgtctgcttaaaacttaataacaaccataaccctagctggttcatactttccgaaactcccaaacattaactgataccacttccttcgtttccttacccacatcccaattgctcaactgttgtcttgtctctactggttcagagatttacatgcttggcggattcgacgcaaagggaaagagtagcaggagagcttatgttctcgattgtaaatctcatcaatggcgtcgactccctaaaatgcttatagctcgaaaaggtgcagccgctaatgtaattgacggtaagatctatgtgtacgtaggattcagcagcgtttacaataacggcgtaaacgggggagagatttacgacccaaagactcaaacttgggagccatttccgcaaggagaagaagatttctccaataaagagggtgtgactcgatgtgattttatagttggtgaattattttttcatgattgtggcatcctaattagtggaaaagtttatgacaatcttctgatggacaagcttaacttgtgtccgaatgtttgcatggtactcatagattgcaaagacttccaagcaacggtttccaatgggaaactcaaactactttgcagtgatgattctaggccgtgggcgtggagtaccaaggttgggggacttgaaggactgtcttgtaattatcatgtttaagtggcaaaccctggcggagaaaggagagtgacagtttatggaagacgtatacaagaaatgtgaa

SEQ ID NO: 164923 - DNA, 414 bp, Arabidopsis thaliana landsberg
  unsure (1)..(414): unsure at all n locations
gtagaaactaacgttggatggatcattagaaataaaactggaacttttgttatggctgcacaaagtaaaggtcgacaatgcaactcggccttagaagcggaattccaaggtttattaatggccatgnnnnnnnnnnnnnnnnnnnnnnnnnnnnnnnnnnnnnnnnnnnnnnncaatagaagtgtggcagagtgtgtcaatggcaaagctcgaagttttgagttacaccacttgataagggatatacaatactggcagaagaaattcatacaagccaaagtcacatgggtgcctagaatgtgtaataaagtagctgattgtttggcgaagactccattcccaaataatacttctttttcatttttctcttatgttccatcttttgttgtacaattcctccatgaggattatcct

SEQ ID NO: 164924 - DNA, 1259 bp, Arabidopsis thaliana landsberg; identical to SEQ ID NO: 9832

SEQ ID NO: 164925 - DNA, 1014 bp, Arabidopsis thaliana landsberg
cgactctagaggatccctgagcttcttagtgtaagaagttcatcgaagaaaatcggtaataactaagcatacccaaataccaacaggaacctcatctcccatctcccgaacaaagatgataactggcactatccctggatctaaataaagaagacccttgcttcgattgagagccttttcgaagtgcttccatcaaagtggaccacgaaacctggtagaaattagggcataagcatatttacccactgttcatttactcattttttcctaactcgaattgctccgacccttccgactgaagaattctttgcattcttcaaagtggttatcgaaggcgaaaccctttggaactcgtttaccctcgattggtttatggaagctaaccggaacctcagaatgagtcctcctggacaactccatcatcttccacctcctcctcccatacctcatgggactttggcccgggctattgcttcccggcgcaaaacgttggccaagccgatggccgaggcttgcgaagcaaacaaattattcctcacgtctgtcattgataagaaagaatacagcaggactcagttggttgatgatggcagtggcgaaggggccagatctgctggagctttcatacttactcctcatcgtgaaggtcatggtggctggtcacctcgaagagaccaatcaactcgtcatgactcacctcggccttccttttggaataggttgagcagcgaaccgatcgcggatttacttcgcaagaaaagagaaagaccaacccgtagcagttcttctactaagagagataagacgagggcctgaactgatcgttctcctcgatcatctcccccacctcgctcgatgggtccccctcctccagtcattacatccccctcctctagatttggggttgaaaagactggccaaagtgcaaatcctcgacatgaagagtctgagccccgagatgctaaccctaaacccaaggccgttgtggtttctcaaaccaaatcacacactagc

SEQ ID NO: 164926 - DNA, 1648 bp, Arabidopsis thaliana landsberg
gttacacaaacacatgggttatgctgatcaatgcgagttcttaaaagcaaacccaatttgttcccctaatggattctttgattacctcagcttcttttactgctcctgtagagatttcagtatcttgagttacatgatgttaggtgtttggcttgttgctttgttttatctgttgggtaatactgctgctgattacttttgttgttcactggagaagctttcaaagcttttgaggctgcctccaactgttgctggtgttactttacttcctcttgggaatggagcaccagatgtgtttgctagtatagctgcttttgttggtacagataaaggagaagttggtcttaacagcgtcttgggtggtgctgtgtttgttacttctgttgttgtagggattgtttcgctttgtgttgcggataaggaagtcaagatcgataagaattgcttcatcagagacttgagtttcttccttttctcgcttgtgtctttgctggtgattttgatggttggtagagtgacagtccggattgccatcgcgtttgtctcaatatatgtggtttatgctttccttgtggcagcgaatgtgattctgagaaaacatgctaagaggtttaaactagaggctcttactcctttgctacctatgcaaggaagtgtgttttccccgagtgttggagaggatatgccaatgaatacccccttgatagaaactgagactgaggatggtccacctcggctacagagtcttcctcagtggatgtgggcgtcaaatgtggccatctattcaaaccatttcgcaaaagttagtgtacatgatgaagacaggccaccttggggatggattgatgacactgcagaagtagagagctcctcatgtactaaattcacttccttgttggaaattccgctgaccattccaaggagattaacaattccatcggtcgaagaagatacatggtcaaagacatatgctgtggccagcgtctcattagcgcctgtccttttggcgtctctctggagtagccaagacgatgtgagtctccaagcttgtggtgtcgcatactttttcagcgttgttataggctccactcttggctttctggcttacaaaaacacagaacctgatcacccacctcgaagattcttgatcccttgggttcttggtgggtttataatgagcatcgtatggttctacatgatagcaaacgaactcgttgctcttctggtgacatttggtgagatttacggaatcaacccgtcgatacttgcgctaacagtacttgcttggggaaactcaatgggtgacttagtatcgaatatcgcattgacaatgaacggtggggatggtgtacaaatcgctctatcgggatgctacgccggtccaatgttcaacacactcgtcgggctaggtatgtcgatgctttttggcgcatggtccaagagtcctgacacatacatgctaccagaagacaaaagcctattctacacacttgggtttctagtactcggtttggtttgggctatggtgatactcccgcgcaacgacatgcaacctagcagaaccttaggtgttggactcattgcaatatatctgatattcgtcactttcaggctgagctgcgccatgggattcataccatgggctgct

SEQ ID NO: 164927 - DNA, 3359 bp, Arabidopsis thaliana landsberg
atgaaacagatggtccagcagctgttacagggacaagcatctagctcaatggaaatggctaagaaattatcttaattgcaccataagctggactgcagctacaatgacctgaatgccaaagtggaggcattgaataccaaactcagatacttggaaggccaatcagcatctacctctgcaccaaaagttacagcacttccagggaagtccatacagaatccaaaagagtatgcaactgctcacgccatcactatttgccatgatcgagaactgccaattcgacctgtccctgatttaatcactgaggacagtgatgttgaagaaggggaggcttctactcagattgaagactctgttgttgaattcaaccgttctgctggttcttgtcatctctttcaatacacctcggaagagaaggccgccataatcgagagaatggtaatacgattcaaacctactccattaccctcacgtgctcttccatggacatttaggaaagcgtggatggagagatacaagtctgttgcagcgaaacagctagacgagattgaagcagtgatgccactaatggaagttctcaacctcattcctgatcctcacaaagatgtgagaaatctcgatctcagagcctctgtcagcttaatgtcagcttatttagtacagaccttgtgacctgactttgatccttgaggatagatctttaagaaaacccttcggcatgctgaaagatctcccagtcatgattaatggagtggaagtgcctacagacttcgtggtgctggatatggaagtagagcataaggatcccttaatactgggaagagccgttttagcgtcagtgggagcagtgatagatgtcagggaagggaaaataagtctcaaccttggaaagcatatcaagttgcagtttggcatcaacaaaactccacaagggtcaaccgaagatgaaagaacctctagaaatgatagagcgatctcaggagaaggatatgagactaaaagagtgaaagaacttagaaagaagtctaataagcagaatgaaactatagagaagctggcccacaccaatgaggaacttaggagtaagctgaatcagatgcagaaggaagctcaacctaaaggcgggattaacactatcccgagaaaagaattcacttcaagatggtctcaagatacagattatcctccagaagagaaggaagcctattttgaagaaagggggattgagtattctgctgcaaacctctccagggaggacgctgaatatgatgatggtatcagagaggattatgctgaccctctctacacttcattttcttcttgataagtgtgaggagtcaagctagagacttaaaacaagctcacttgggaggaagtcccatgactatccttgtaaataatttttactttcttgttatttttgatttgttttggttatgtttatggttctcaggaagaagggagtacgtgaaggtaaagtaaaaattcaaaacttttactcaactgatggcctagagatcgagtatagtggtcgagtatgagtgatgtttaaaaacctaaaaaaattttaatcatcattttactcgaccaacagaagctacaaagtcttccagggagtctcgagtccagccatcactcgacaacaccaccgtttcatctcttccgcgagctcaagttcactcgaccgctcctctccttcctttcaaagccactttacttcgccattacacaccgcctctccatctcattatcactcgatctcttgaatcaccaccgcaactcgtctcaaacccactagttactcgatcgcggctccttcacagcttcatcgctctcaccgccatctctcaacatactcgaccttgcgtagtcactcgatctcgctgcttctcaacgcctctccatcgtttccatcgccgctgctctcatccccacgaaagctcgtcatcgccggttcactcgattaagcaaacaaactcgacctctttcaaaccgtttcaccatctctcgcctctaaaggtcactcgatcgccaagcacaaccaaggaatcactcgaccgcgagttcaccaaaccgaaaaaaaaaaaaaaaaaaaaaaaaaaatttggtacactcgatcggtttactctttatgtttgtgtttttggttttgttggaactaacgtattaacgtttatttttgagttacatttgttttcaggtttcatcatgagtaactacagtggagaattctctatggaccctgactacaatgtggatgaagctgagtcctggtccgctagaccgagagagcaacatgtttaccagagcttcaaggatgaattcgaacgccctgcagcccgacgtaatcagagaagagctgaaatcgccagaggaaagagagcgatgtcaagaagatatgagctgattgatgaggatatcgagactgagtatgagcaagagtcatggcgcagggagacgaagctgttgaacaaacccgacgaggttatagtggaggagtatcagctttcgatcaagaagttggaagaactgtttggtttccctagtggaaagggaaccaaacccaggtttgacagagaggagcttaaggatttgtgggccactatagggaacaatctaccgctaaactcggcgcggtccaagagcaaccaaatccagaatcctgtgatccactactttcagagatcggttgccaatgtcttttactccagggagtctacaggcaccgtgtctaacacggacatggagatgatagattctacgcttacagggattctccgccggacgaacggaaagaatgtcttgagaggcgatctcaacaacgcaccaccagtaatgcctctgttgatccatctgtgtggatacaggaagtgggcattgacgaacgaaaagaagaaggtgagaggagcactatgcgtgggtggcgttgtgacgccaattctggaagcttgtggagtaccgctcaaggaaccagggttagcactgaggatgatggatttagatcatttacgcatatgtgagttcttggagcatgacatggctggcgactttcaccgctacaggtttgagcattggtcgatcaaaatggccaatattcttctcccctgcattgaagctattagaattctcgagggaaagaacattgacttcaagcctgcgcctgaagatatttattttgagggcagtccgccaactgaggagatcactcacgaggaaggagttacaacagaggaggttgatgagactgatgaaacagatgaagtggagtatgacaccagcacccatcattttagtgagcatgtacctcaaacgagggaaagcaagagtttgagtgaatctcacagaaacaacagcaagtt

SEQ ID NO: 164928 - DNA, 820 bp, Arabidopsis thaliana landsberg
ttttgtagaaaaaaaatgtccagttcgacacagatggattcgcaaatcatctcagataaagcggaggctgaacgaattgttaagaacgtagcacgttgccttgccagaaaaggattgaagtttgagaagaggatgatgaccaacgtcaaagatccaagaatcaactttctaaggaaccctgaagatccctttcacggatattacaagcagaagcttagtgattacctttctcagattcaacaaaatggaactatcgttgatgattttggtcatgttccagcaacgaatgttagtacaacagaagtcactgagcaacctccaggtatcatcagaaataatatcgagatgatggcgagttacatttccaaaggagggttggtggttgagaaggtgatgaggtatcttgttgtaagtgacgcaagatacaactttatgggtatttcagacccctttcacccgttttaccagcaaaggcttacccagtactgttctctgaatcaacaagacggagctaatcttgattatgatgctactcttgctgcttacatgcgaaaggctactgaattccgttctcggattcaacaagagggagctaatcttgatgatgatgatgctgatgctggtcaacgcattgttctgccacatcttctagactatagacttcctaaagggatgagtgtcaagaatttagaactatcaagctcacaacacagtttggggcttggtatgggaatgatttttggctagggttcaaggaaagagatggatttgagtttacgaatccaactgatagtaagttcccacgattcactctatgtga

SEQ ID NO: 164929 - DNA, 641 bp, Arabidopsis thaliana landsberg
ttattacaacaactactgtgagtttcagccacgatacttctgcaagaactgtcgtagatactggactcatggtggggctttaagaaacataccagttggtggaagtagtcgtgccaaacgggcaagggtaaatcaaccttcggttgctcggatggtttctgttgagacccaacgaggtaacaatcaacctttctctaatgttcaagaaaacgttcatcttgttggatcttttggtgcttcatcttcatcttctattggtgctgttgggaacctttttggttctttgtatgatattcatggtggtatggtaacaaatttgcatccaactcgaactgttcgaccaaatcatcgcttagctttccatgatggatcatttgagcaagactattacgatgttgggtccaatgatttgattgataaccctttgataaaccaatccatcggtgggtatgttgataatcttacaagttattgcataaatcaagtggatcaacacaagtggaaccaaagcttcaaccacgctatgaacatgaatcataaagccagcagtagtggaagcataggatcttgagacactcagaagaacaatatgagaaacatgtttgtttaggtcttcttaacattcggaagttaatgttcca

SEQ ID NO: 164930 - DNA, 499 bp, Arabidopsis thaliana landsberg
gcgatcattttatttcatctacggacggattttgatggagacggtctgcggcggctggcgcggcagacgaaggatgccgctcaggcgcgccgactgctggcgctggcgtcgatctacgatggaggctcgcgttccgatgccgcccgcctcggtaacgtcacgctgcagattgtccgtgactgggtcatgcggttcaacgaacgcggtccccaaggtctgatcaatggcaaggctcccggcccacaatcgcggttgaacgatcagcagcgtgcggccctggcgcaggccatcgagcgtgggccgacaccctatctcgacggcgtcgttcgctggcgtctgtgcgatctggcgcaatggctgtgggaggagtttcgcgtttcggtgagcgagcagacgctcagccgcgaagtccgggccatgggctatcgcaagctcgctgttcggtccaaacatcacgcgcaagaccctcaagccattgagggttttaaaaaagcttccc

SEQ ID NO: 164931 - DNA, 1582 bp, Arabidopsis thaliana landsberg
ttctcgacatcggcgccggagataacaccgccgtttattcacaaatgcaaaaccatctctcaggtcaagcttattcaccagaaactcctctctttcggaatcctaaccttgaatctcacttcccacctcatttccacctatatctccgtcggttgcttatctcatgccgtatctctcctccgtcgttttcctccatctgacgctggtgtctaccattggaattcactcattcgcagctacggcgacaatggctgcgccaataaatgtctctatttgttcggccttatgcattctctgtcatggacgccggataattacacattccccttcgtcttcaaggcttgcggcgagatatcctccgttcgttgtggagaatctgctcacgcgctttctctggtaactggatttatctccaatgtctttgttgggaatgcgcttgttgctatgtattcccgttgtcgttcattgagtgatgcacggaaggtgttcgacgaaatgtctgtttgggatgttgtatcgtggaactctataatagaaagttatgcaaagttaggcaaacctaaggtggcgcttgaaatgtttagcaggatgaccaatgaattcggatgtagacctgataatattacccttgtgaatgttcttcctccttgtgcttccctaggaactcattcactagggaagcaattgcattgttttgcagtcacaagtgagatgatacagaatatgtttgtagggaattgcttggtggatatgtatgcaaagtgtgggatgatggatgaggcaaacacggtgttttcgaacatgtcagtgaaggacgtagtatcttggaatgctatggttgctgggtattcacagattggaaggtttgaagatgctgttaggttatttgagaagatgcaggaagagaaaataaaaatggatgttgttacttggagtgctgctatttcagggtatgctcaacggggacttggatatgaagctttgggtgtgtgtaggcagatgttgtcttctgggataaaaccaaatgaagtcacgcttatttcggttctttcgggttgtgcttctgttggagcattgatgcatggtaaagagattcattgttatgccatcaaatatcccatagacttgcgtaagaacggtcatggtgatgagaatatggtaatcaatcaactgattgacatgtacgctaagtgcaaaaaggttgatactgcacgtgctatgtttgattcactttcccccaaggaaaggtatgttgtgacttggactgtgatgataggtggatactcccagcacggggatgcaaataaagctctcgaacttttatctgagctgtttgagcaagatcgccgatcgagcccccatgctttgtaccatatcatgtgccctcgtggcatgtgccagtttggctgcactaagaattggcaagcagattcatgcttatgcgttgcgcatccagcagaatgcagtaccgctgttcgtatcaacctgtctaatagacatgtatgcaaaatgtggaagcatcagtgatgcccgccatgaatttgtcaatatgatggcgaaaaatgtagttacctggacctct

SEQ ID NO: 164932 - DNA, 466 bp, Arabidopsis thaliana landsberg
cgagggcggatctgtgatccttaacggcggcgatgcatctcgtggcactggtggaagtgtttctctcagtggtggcttgagtagtgacggcaataccggatccattacaatcatgactcatagtgcaacatctgtcaagtcgacacaagagagtggcagcattgcacttcgcacaggcgactcggccactggatccgctggtagtatttccttgacaacaggctctgcagcctctcaaaatgctgctgttggagatgtcaccattgcagcgggaactggtgcagtcggcggtgctgtccaaatgtcgtccagcgatgcttctctcactttgggacaagacgtcaagctttcttctgttggtgaggcctccgttttcgtgtcgtccggcactgccgccactcctggaacgtcggggtccgtctctattagcacaggcagcaacactgcgggtgcatctggtgacctc

SEQ ID NO: 164933 - DNA, 1721 bp, Arabidopsis thaliana landsberg
tcgtgtttgttgaacctatgcagggtactcaaaagatgtgaagagacaaacctggtggtgaactgggagaaatgccatttcatggttagagaaggcatcgttttggggcacaaaatttctgaggagggaatagaggttgataaggctaaggttgacgtgatgatgcagttacaaccaccaaagactgtcaaggacatcaggagatttcttggacatgcaggattttacagaagattcatcaaagatttctccaagttggcatgaccgctctccaaactactatgcaaggaaaccgagtttgcatttgatgaagaatgtttgacagcctttaagttaatcaaggaagctctggtcacggccccaatagtccaagctctaaactggaatttcccattccagatcatgtgcgatgcttcagattatgcagtaggagcagttttgggccagcggattgataaaaagtttttgtgatctactacgcgagcagaacgatggatgatgcacaggtaaggtatgccactacagagaaggaactgctagctggggtatttgcattcgagaaatttaaaagctacctagtgagctttaaggtgacagtctacactgatcatgctgctctgaggcatatatacgcgaagaaagataccaaacataggatcttattgctccaagagttcgacatggagatagttgataagaagggaattgaaaacggtgtacctgatcatctatctagaatgagaattgaagacgaggtccctattgacgactccatgccagaagaacagctaatagcaattcagcaacttaacgagagtgcttaaattcggaaatcactcgatcaagtatgtgcaattgaagaaaagcttctatggtatgttgatcacgtcaattacttggttagtggtgaagcgcctccgaatctgtcgagctatgagaagaaaaagttcttcaaggacattaaccatttctactgggacgaactttatctctacacactctgcaaagattagatctacaggagatgcgtctcagaagacgaaatcgaaggcatcctactgcactaccatgggtctgcctatggtggccactttgcaacgttcaagacagtgtcaaaaatcctgcaagctggtttttggtggccgacaatgtttaagaatgctcaagaatttatctcgaaatgtgactcatgtcagagaagagggaacatcagcagaaggaatgagatgcataagaatccgatcttagaagttgagatctttgacgtttggggaatcgattttatgggtccgtttccttcttcttacgggaacgattacatattggttgcagtagactatgtgtcaaaatgggtggaagcaatagccagccccaccaatgatgctagagtcgtcctgaagttattcaagagcatcatcttcccaagatttggagttcctagaatagtcattagtgatggaggcacgcactttgtcaacaaagtttttgagagtttactgaggaagaatggggttaaacacaaggtagcgactccttaccacccatagacaagtgcccaggtggaaatctctaacagggagataaaatcgattctagagaaagctgttgggaacaccaggagagattggtctgtaaagctcgatgatgcgttatgggtgtactgaacagctttcaagacccccattggcacaaccctgttcaatcttctttatgggaaatcc

SEQ ID NO: 164934 - DNA, 4106 bp, Arabidopsis thaliana landsberg
tgatactacttaaagaaatggaaacattgatgctaagggctaatgttcatgaagagtgtgaagcatcaatgtttagattcatgggaggcctcaatagagacattatagaccgtttggaggtgatacactatgagaaccttgaagaattgtttcacaaggcagtcatgtttaagaaacagattaagagaaggagtgctaagcctagctacaattcaagaaaacctatctaccaaagagaagagaaatctggttttcaaaaggagtacaagccgtttgtgaagcctaaggttgaagaaataagttcaaaatggaaagaaaaagaagttacgagaactagagatctcaactgtttcaaatgtcacagatttgggcattatgctagtgagtattccaacaaaagaattatggtaattagggacagtggagaggttgagtccgaggatgagaaaccagaagaatctgaatgttgaagaagcacctaagggagtgctacttgtgaatatgagggtcttaagtgtgctaaacaaagcagaagagcaagcgcaaagagagaatttgttccatacaaggtgtttgattaagggaaagttgtgtagtttgattatagatggtggaagctgtaccaatgttgcaagtgagactatggtccagaaacttggtttagaggagtttccgcatcctagaccttataaactgcaatggctaaaagagagtggagaaatggctgttaccagacaatttcaagtgccgttagccattgggaagtatgaggatgagatcttatgtgatattctgcccttagaagccagtcacgttttgttaggaagaccttggcaatctgatcggaaagtgatacatgatgggtttaccaatagacatagctttgaatttagaggaagaaaaactgttttggcacctatggcacctcatgaagtctacttggatcagcttagcatgaaaaagaaaggatctcaagctgttcaatccaaaactttcgagagtaaaccaaaggggagtactaaacctaatcttttgtttgtctttaaagaaaacttattgaatataacagccttggaaccggctttgccgagtagtattaagtttcttttgcaggactatcaagatgtttttcccgaggaaaatccagaaggtttaccacccattagaggcattgagcaccaaattgactttgttccaggagcttctttgccaaacagaccagcttataggaccaatcccgtggagaccaagtaactagaaaatcaagtgaatgagctgatggagagaggccatattcgtgaaagtatgagtccatgtgctgttccggtgttgcttgtacctaagaggatggaagttagcgtatgtgtgttgattgtagagcaatcaacaatatcattgtgaagtatcaacaccctatacctagattagatgacatgttaaacgaattgcatggttctagcatcttttctaaggttgatataaaaagtggatatcatcaaattaggatgaaagaaggtgatgaatggaaaactgcatttaaaactaaacaaggattatatgaatggttagtgatgccattcgggctgacaaatgcacctagtacattcatgagactgatgaatcatgttcttagagcttttataggacgttttgttgttgtttattttgatgacatcctagtttacagcaagagtctagaagagcatgttgaacatttgaaaatggttttagaagtacttaggaaggaaaagctttatgccaatcttaagaaatgtacttttggaacagataaccttgtcttcttaggttttgttgtgagtacagatggagttaaagttgacgaagagaaggtgaaggcaattcgagaatggccaagtcctaaatctgtaggggaagtgaggagcttccatggacttgctggtttctataggaggtttgtgaaggactttagcactctagcagctccactcaccgaagttattaagaaaaatgttggattcaagtgggaacaagctcaagaagatgctttccaggccctaaaagagaagcttactcatgcccctgttttatcacttcctgattttcttaaaacttttgaaattgaatgtgatgcctccggggtaggaattggtgctgtcttaatgcaggataagaagccaatagcttatttcagtgaaaagcttggaggagctactctcaactatcctacctatgacaaagagctttatgctttagtaagggcattacaaacgtggcaacattacctctggcctaaggagtttgtcattcacacagaccatgagtccttgaagcatcttaaaggacaacagaaactcaacaagaggcatgcaaggtgggttgaattcattgagacatttccttatgtcatcaaatataagaaaggtaaggacaatgtagttgctgatgcattgtcaaggaggtatgttcttctctcatctcttgatgctaagttactcggttttgagcatataaaatctctttatgcaaatgattctgattttgaaaagatatattcatcttgtgaaaagtttgcatttggaaaatattatagacatgacgggttcttgttttatgataaccgtttgtgtattcctaattcgtctttgagagagctgtttataagggaagcacatggtggaggcttaatgggacactttggagtctcaaaaactcttaaagtaatgcaagatcactttcactggccgcatatgaaaagagacgtggagagaatatgtgaaaggtgtccaacatgtaaacaagctaaggctaagtcacaaccccacggtttgtatactcctcttcctattccttcgcatccttggaatgatatttctatggactttgtagtaggtttgccaaggaccaggacaggtaaggactcgatttttgtggttgttgatagattttctaaaatggcacatttcatcccttgtcataaaactgatgatgccatacatatagccaatctgttctttagggaagttgttcgtttgcatggcatgcctaagaccatagtatcagatagagacactaagtttcttagttatttttggaaaactctttggtctaagctaggaactaagttgttgttttctactacttgtcatccgcaaactgatgggcaaactgaggtcgttaataggacattgtctacactcttgcgtgcattgattaaaaagaatctaaagacttgggaggactgtctacctcatgttgaatttgcatataatcactctatgcattctgcctctaaattttcgccttttcaaatcgtttatgggttcaatcctactactcctttggatttaatgcctttgcctttgagtgaaagagtcagtctagatggaaagaagaaggcagaattggtgcaacagattcatgagcaggccaagaagaacattgaagagaaaacaaaacagtatgctaagcacgccaacaagagtagaaaggaagtcatcttcaacgagggagacttggtttggattcatctccgaaaagaacgttttcctaaagagagaaagtccaaacttatgtcaaggatagacggaccctttaaagtgctcaagaggatcaacaacaatgcctactctttggatttgcaaggtaagtataatgtgagtaatagttttaatgttgctgaccttattccttttattgcagacaacacagatttgaggtcaaatccttttcaactgggagaggatgatgtgataatgacaagcttggatcatggagctgatgagataatgacaagcttggatcatggagctgatgagataatgacaagcttggatcatggagctaaggagcagtttgaaggagggaaagttatcaaccactcgatcaagcatgctgttgaagacttgagggagcttgaatctaatgactcgatggactactcgacccaacatgaagatgaactgcttggagctacaaaaaaggaagcaatgcatgttcttaatggtccaatgacaagatcgaagactagactactaaatcaagatatcactacacttctacaacacattgagggcagtcttaaacaagatgcttgtcaaaccacgttggttgtgattcaagcggtt

SEQ ID NO: 164935 - DNA, 330 bp, Arabidopsis thaliana landsberg
ctgcgttcaggagaacgttcaccatcttcaacggccgattctgccaaagaaggaatgaagatcctggacaccgaaccggttgatgttatcctgagcgaccagcgcatgcctaaaatgacgggcatcgagttcttccaatccatactcgccacacatcccgaacccatccgcatactgatcaccggttatacagatatcaatgccgtgatcgatgccctcaacgtaggacaggtatacaaatacctctccaaaccctggaatgaagaagatgtaaaaaacttcatcttcaaagcctttgaagtactcgaactgcggaggcaaaacaaagag

SEQ ID NO: 164936 - DNA, 996 bp, Arabidopsis thaliana landsberg
gactcgctcgctgctcaggccatgactcgatctttaaacatagagtcacttatggctgtctacggataccttcttgaactaaatcaagatacagaaagagtcatcattgaaagcaaagaagatgttttgaagaacaatgatctcaaggctttggttgatgtctatttcaaaagtacctgtaagaccttggacttctgcaataccgtcgagaaatgcgtcaagaaagcagaaataagccagcttatcattcgattcgcggtgaaacagtttgagacagacacggcggatacggatcttggagagagtaagaagaagaagtatgtgaaaaccttggaggagctgaacaagtttaaaggcctgggagaccctttcgatggcgagttcgtgacgcagtacgagtccgtatacgagcagcaggctatgcttctggatgagttgcgaacgctgaaagtaaagctcggaaagaaacagagaaatttaaagacatggaggatattgtcaaatgtggttttcgccactgcgtttgtgactgtatttgtcttatcggtggttgcggcagcaatgatggcacctccggtattgagtgcggttgcgtctggattgaccacaccgattgaggttgtgggaatgtggtgtaacaagatgtggaaagagtatgagaaagctgtgaagagacagagaggtttggttttaacaatggagcttggggtgcaagcaaacaatgtaacgatggtaaatataaaattcgaagttgaaaacctgagcataaggatctcatcgattctgaagaccgtgaactttgctgtggacagagaagaaaatgaaatggcgacgagatttgcgatgcaagaaataaagaagaaagtagaagggtttactgaaaaaatcgaggaagttggtgaaagagcggctaattgtagcaaactcatcgcgttggggagactcgtagttctgggacacatccttggtttacacatcgtagaaggaggagctgca

SEQ ID NO: 164937 - DNA, 718 bp, Arabidopsis thaliana landsberg
atgaagagaaagatgaagttatcgttattagaaaacagtgtatcgaggaaaacaacattcaccaaaaggaagaaagggatgacgaagaaactaaccgagctagtcactctatgtggtgttgaagcatgtgcggtcgtctatagtccgttcaactcgatcccggaggcttggccgtcaagggaaggcgttgaagacgtggtgtcaaaatttatggagttgtcggtgttggaccggaccaagaagatggtggatcaagagacttttataagtcaaaggatcgccaaagaaaaagagcagctgcagaagctacgtgatgagaaccataattctcagattcgagagttaatgtttggttgtctcaaaggggagacgaatgtgtataatcttcatggaagaggtgttcttgatttgcatgtcgctctcaacgagtatcactatggtgttattggtagggttcagatccttaaggagcgcgctcagtcttggtcatctgtacctcctccagtcggtgtagctccttgtgctgtgaatgcctctgtcccaagcggttttgatggttgtatgatgcgcgttctaagccgagttcgtcaagagccggttctgttccaataccaggctctttatgatctttatgatccgcttacaaaggcccttagccctttagcatgtcaatgaatatagaaaaatatcaaagtatgaatttggatcctaatgatga

SEQ ID NO: 164938 - DNA, 3543 bp, Arabidopsis thaliana landsberg
  unsure (1)..(3543): unsure at all n locations
ttgtgctttcaagtttcgtcaaatagtgaaaaacgtggtggtcctcttcgtgtagaaagctcttttctcccttttaggaatcttttggcaacttgtgatatgtatgaagttgggagctctggtaatggtttcacgtggggtgggaccagaaacaatcaatggatacagtgtaagcttgatcgctgttttggtaatccagcctggttttctatgtttccaactgctcatcaatggtttttggagaagctaggctcagatgatcagccggttctggttgaatttactcaagacaaaagttttttcaaagaacaattcagatttgataaacgttgggctgaggatccatccttcttgcatatgttaacaaaggcttggaatcatgattctcctatttcatcctcttccttcaatattagagctgaacattgtcgtcaagcgattctagattggaaaactcatttctggtctaattcagcacgtcgtattcgcagtataagaaaagctttgcaagtacaggatgaatctccttctccctgtttttccagaattcgtcatcttaagagtgagcttgccattgcttttagggaagaagagatttattggagacaaaggagtacagagaaatggcttcatgatggagataaaaatacaggggttttccatgcttgtgtaaactctactaggtcagcaaacactcttcatagtctcattgataatagtggagttgatcagttttctgagaaagaaaaaggggaagttgctgttcagttctttactgacctatttaaatcctcggtacctctgatctgatgaatctattaggtcactttcaccctcgagtttcctcgactatgaatgcagatctatgtcaactttgcactacaactgaaataccaaaaacctgcctttctttattagtggagacaatgctccaggattctgattgtctcacagggtttttcttccaagagttgggggaccttgtcaaacatcaaatcatctctgaagttcaaggttttttttctactggtattctccctgcgacttggaatcatacgaatttgtgccttattcccaagattccatctccaaacagaatgactgatttgagacctatcagtctatgctcggtgttgtataagatcatttccaaaattctgatcaaccgattgaagagacatttgccaaacatcatttctccaactcaggctgcctttgtttcataaaggataattacagataacataatgattgctcatgaggttgttcatagtttacattctcatccagaaatctcaaaatcttcagtgttactcaagacggatatgtcgaaggcttatgatcggttagagtggcctttccttgaaggcattttacaggttatgggttttgctccactctggatttcttggataatgggttgtgtaacttcattgactttctcagttctcatcaatggtcatccttatggatttatcaaacctgaaagaggcataagacagggagatcctctctctccctttctttttgtaatttccactgaagctcttattcatctgtttaaccaagctgagataaacggttctattactggcatccaatatcacttatctggtccatctatcaatcatttactctttgtagatgatagtttgtttctttgtcaagcatcaaagattcagtgtgaggaggttcttcattgccttcatacttatgaattgatgtctggtcaacagattaatttggcaaaatctacgattacatttgggtctaaagtcacagaagatttgaaggattggattaaaaatagaacaaacattcagctggaaggtggtacagggaaatatttgggacttcctgaatgtcttagtggatcaaaacaacaacttcttggatttataaaggacagactacaatcgaagctaactggttggtatgctaagactttatcgcagggtggaaaggaagttcttctgaaatctgtggccatggcattacctgtatatgctatgtcatgttttaaactccctaagatcactattaagaagctgacgagtgcgatgatggagtattggtggagtaattctcaatctcaacacaagattcattggattagtcatgaaaagatgacactacaaaagtctaatggtggttttggttttagggatttagaattgttcaatcaagcacttctcgctaagcaggcttggagattgttatataatcctcattgtctcttctcaaggtttttcagaaccagatattacaacaaaacatcctttttgcaaagtaaattaggttctcgaccttcttatggttggcgaagtattctctttggaaaggatctgcttcttaaaggtctcaaacgggttattggtgatggacaagacactttggttggattgacaaatggatctttgatgatatggtaagaagacctattggtcttcactcacttatgaacatctgtcttcgtgcgtctgacttaattgatccttcatctgggttgtggaacatcagtcttcttcgatctcttttccaccaagatgatgtctttcgtatcctttccactaaaccgttgttagcaaagaaggattcttactgttgggctgggaatcgatcaagggatatactttgctacatcttgttatgatctgatttttaatatggagaataaggagaagttcgtggaaccagttaatactcctttcttattttccgttttagcagagtgttggaaagttaaaacagcacctaaaattcaggtttttaagtggaagagtattaaagaagctattgcagtgtcagctaggctactaacaagaggcattaanaattatgatggttgtctgttatgtgatgcagaggaggagacagttaatcatcttttatttttatgtccctatgcaagaaaggtctgggctgttgctaattttcctactccttctggtggttttggagactcaattgtgggaaattttaggtatattttctctttaggacggaatgagcatcttctatctgaagttaggagagtttttccatggattgtttggcttctttggaagaatcggaacaagatgttctttgatgggtctctttaccctcaagacttgctagttagaaaggcctatgaggattctgcagcatggtttgctgctcagtcactgaatattacagagtctccttctccaatacaacatcagaatcactggtctccccctttattgtctgaagtaaaatgtaacattggtttctcatggtcaaagaaacaatgtttatcaggtgcttcttcggtggtcagagatgctatgggaaatgttttgcttcatagtcgtcgttcttatgctcaggtggcttctatttttgaagcaaaggttaggagttgggaatgggcgcttgaaagtatgcacaacttaaaaatttgagaatgtgatatttggtgcatccacacatgaggatatataagctttttacaaacctgttaaatgacccttctcttcttggtcaatattttcccctctgatccaaaattagcagatt

SEQ ID NO: 164939 - DNA, 1607 bp, Arabidopsis thaliana landsberg
gttctgtcttcttcagatccttgtactatactcttcctgcattatttctcttattctttcttctttatctttgtttatctttcaccacgggaatcttctacaacaacttccacatatgtatcttctctcgaaagttcaacgatccttattgtaacacggctggttctaaacccggttatcaaataatttctgaagaaaatgtaactttcgccggagagaccgcaggagatagaattcttgattcagttcctgttcaagaacacaaaacaaagtacaaggttgatctcaattcactcattgaactaaaagccgaggaagaatacagcaaatacatcaaacctacgagtgaagatgagggatatgcgttaagggcagtcatcaagtatctttacctacaaagatcatggctatctccgggagatgaaaacctcaataattcgcgatcgtgtgaaggtaaaggagtttacgtttatgatttaccgtcaaaattcaacagagatttgttggtaggatgcaacgatatacttccaggggttaacttgtgtagctacttcatgaatgaaggctttggagaagctattactaatcttggcaaaggttggtttgcaacacacatgtattcacttgagcctatcttacactctagaattttgaagcatccatgtagggttcataacgagacccaagctaagctcttctatgtgcctttctatggcggtatggatgttttgagatggcatttcaagaacgtttcaagcgatgtgaaagatgttttgccgattgagattgttaaatggctcggatcgaagaaatcatggaggaaaaactccggaaaagatcatgtttttgttctcggaaagatctcttgggattttaggagggttgataagtattcttggggctcaagcttacttgagatgcaagaaatgaaaaaccctacaaagcttctcatcgaacgtaatccatgggaagtcaacgacatcgcgatacctcatcccacatacttccacccgaaaactgacaccgatatcgccatatggcaaaacaaaatacttgggaaacctcgtcggagcctaattagcttcgctggtgcagcaagacccggtaaccctgagagcatccggtcaatattgattgaccaatgcagatcgtctccaaaccaatgccggtttttgaattgtaccgatggaggctgcgataaatcggaatcggttatcgagcttttccgagattcggagttctgccttcaaccgcctggagacagtccaacaaggaaatcgattttcgattccctcatattaggttgtattccggtgatatttgatccgtacagcgcgtattaccagtacacgtggcatttaccggaggatcaccggagatattcggtgtatataaacaaagaagatgtgaagttgaagagagtgaatgtgattgagaagttaatgtcaaagactctaagggaaagagaggacatgaggagttacattgttcatgagcttttgcctggtttggtctatggagattctaatgctaagtttgagagatttcgagatgctttcgatattactatggatagtttattcaagaagattgcaaaaactgtataa

SEQ ID NO: 164940 - DNA, 647 bp, Arabidopsis thaliana landsberg
atggcgccgagaaaaccaaaggttgtttccgtgacgaagaagaagaaagtagtggaagagacaatcaaagtaaccgtcacggaagaaggagatccgtgtgtgaccaccgagacagcgaacgatcaagaaacgcaagatctcactttctccattcccgccggagaaaacgttactaccgttgagattccagtggaggttcgagacgaacggtcacctcccgtcggagaaaacgttaccaccgttaagattccggtggatgatcgagatgaaagttcacctcagccgccggagactccggtggaggttcgagatgaaccttcacctcagccaccggaaactcccgcttccaagagtgaaggcactttgaagaaaacagataaggttgagaagaagcaggagaataagaagaagaagaaaaagaagaagagagacgatttggcgggagatgagtataggagatatgtgtataaggtgatgaagcaagtgcatccggatttaggtataacgtcgaaggcgatgacggtggtgaacatgttcatgggagatatgttcgagaggatagcgcaggaggcagcgaggttaagcgattatacaaagcggaggacgttgtcttcgagggagatcgaagcagcggttaggttggttct

SEQ ID NO: 164941 - DNA, 1755 bp, Arabidopsis thaliana landsberg
ttattatattcttcttatttgtagatggattcatcatcatcattaccagctgaagataacagagattttgatgatgaagaagagtatatgactcctgatttgggtcaaaggggtaaaaggaagcaaacacctgaagctggagattcgtctgaacaaactaagcctaagaagatacttccctcaagatcagatgtgtagaatcatttcaaaagacgattgcccatctgtgacaagagtaattgtcactattgcaaaaaggagctttcatatccaacaaattcagggactaaaaacttgtggaatcatcttgagatttgtaaggaatacaaagcatggaaagatggtcaagatccgaaagagggtcaacaagttattaacaagaaaggaaatcttcaagttacaaaagtttttgagaatgtttttcagagaagcagtgaatgagatgcttgtgataggagagttgccatattctttcattgaaagtatggcttggagacacttttgcaacaacgtacttttgaaataaggcagattctttctttttacatatttctatacttgaatagttgaatgactctctctctcattgtatatactatttaggtaatcttgtgcaatccacactcaagaagaaccgcaacaagaaacattgttgagatgtatgttaagagaaaggctgctctaaggaaatggttccaaggcaacaatcaaagagtctcgcttacataagatatatgggtttctcatgtcataggtaatgttttctgaatttctaaaattaatttgcgatcattaacttgtcttacttaatgtattaacatgacttaatgttgattgctattcacaggtgatagttatatggttataacaacacattatgttgatgcctattggaagttaaagaagctgattataggtttcaagtatgtcacagatcacaaaggtgagacaattgctgttgttttactagaatgcctagctgattgggggatagaaaagatcttttgtgtgactgttgacaatgctactgctaatagtaatgcgttaatagtaaagctgcgtttgaaaagatggagttagaggacaagctgtacaatgaccatttcttggagtctgaaaaggggaaaaaaaggattggacctccttcactggaagattgacgtgcagtagagaggatcaataagtttctggtcattttctaccactctaccttggtagtctcaacctctactactttgaattctcacaagtgttttggtgagatagtgaacataacaacgaatcttcggatacatcgtaatagttttgacagtgatttgaagaaaaaggctaaggatatgtacgaaaattttgataagtattgggatggcttgaagaacataaagatgtggatagtggcgactgtgtttgatcctaggaagaagatgcaatttggaaacttgtgttttgcggatttgtatagtgaaggttctacaaatgctaaggtgctttatgaatctgtctatgatatcttggtggatatgtttaaggagtatactggaaggtatggtaaagctaccgatgtgcaagattctcaatcacagtcatctcagtctactcaagaaaagcaagcagagacagaattgggtgttgaagaagatcctagttatccttctattgataaaaggtacaatgctttactgaatgtgataggagtgaaacaaacaaagaatgagttgtattcatatctgaaggaacatgttagaatccagtggc

SEQ ID NO: 164942 - DNA, 853 bp, Arabidopsis thaliana landsberg
atcatttgggagtagtagttacttaagtcatgtctttcaccacaaacctgcggctgctctctctacttctgtctcctccacagcttcttcatcgtcttcttcaggtggtggtgcatcagctgcttcttcgtcttcagctcgagctatcccgaccgcgcctaaaccgcctcaagagaggcttccgttttcagcttcttttgtaggtggtgggaagtatcctcaatcagctccggttcaagtgccgttagtgtcgtctgcgatgatgaatcgtcataagaaggaattcaagctgactgatgtggtggatgatgatgaggaagaagaggaaggcgaaatgcttccgcctcacgagattgtagctcggtctttggctcagtcgtcgttgttatcttgctctgtgcttgaaggagcaggaaggacacttaaagggagagatctccggcaggtaaggaatgctgttttcagaagaaccggtttcatagattgagtgtttttttttactctcttcttcagaaagacgattctttaatttgttatcccaattgatgaactactttatcccttatttggccacagaaacttgtcaatgtgtatgttcatatgttgtctacgttagacgatttgtttacttcatatcaaagagattgatgtgattgcacatgtttattataattgcttcacatgttgatgttggtgagagagagctttaagagttgttttgaggtttgagtctcacatttatgcatcccttaatgacagtctcggaaaattcttgcattgttcgaatccatgaaagttcttacatatggtttactgaggttgacacttatcctatgatctaaattgattaacg

SEQ ID NO: 164943 - DNA, 1879 bp, Arabidopsis thaliana landsberg
atgaccgaccggtaaattaatcctcatattatcttttaccaatgaaacaggcctccaacgcaccggtaaaagctgtagactaaggtggttaaactatctccgccctgacgtccgccgtggaaacattacacttgaagaacaactcttgatcctcgaacttcattcccgttggggaaataggtatgctaaattaaaataaataaaacagtataacaccttttccaactaaattatacaatatgtagttgatgagtttatttaaatgaattaaatctggttttacataaaattatgcatcaaacatataataagattttttttgtgaattggaaataaaataacatcataactattttaaaatggagaaaataacaaattatgtcgatgttgatggatgaaaagagattaaatgtatgatactgagatatactaatgaataataatgttatagacgccaagaaaataagaatttgattatcactactattagtttagaaccgttaatttatatcttgttattttgatgtagatggtcaaaaatcgcacaatatttaccgggaagaacggacaacgagatcaagaactactggaggactcatatgaggaagaacgctcaagagaagaacccccctatgtctcctacttcctcatcttcaaacagttgctcatcatctatgaccactaccaccaccaatactcaagatacatcgtgccactcgcgtaaatcttcaggggaagtgagctattacgacactggaggttcccgatccactagagagatgaatcaagaaacgaaagacgtgtactcgttggatgatatatggagagagattgatcactcaccagtaaacatatttaaaccggttaaagacatctactcagaacaaagccattgcttaagttacccaaatctagcttcaccatcatgggaaagctcattggattctatatggaacatggatgcagataaaagtaagatatcgtcttactttgcaaatgatcagtttcctttctgtttccaacacagtagatcaccatggtcgtcaggttaaaaattttaagatttaattcattgagataaatctgttttatatatatgttatataacttataaatacaataaaacctaacgactgtaatagttttggttgatgaacacaaaaacagcttaagtctggactctgtaatcatacaatgtgtagtagtagtaagtaaccagcctaagtctatgtctagaatgaataagaataaaagtcttgtgatcccactttcttttatttgtttgtcaatgtataatacaactcaatactctaattctaaagtaaacatttcaaaatttcaatttcttttctctgtttctttttggtgacatctctctttaatatatctaaggtttaaggtactataccaaaataagcaaacttggacaataaaattatgaagaaactcgcttattctgaccgaaaaaatatcattattgaatcttttgatatggcatatactctctcattcagtgatttagtgaagagacattaggtactacgtaccatttatcttaatccaagctaaaacaatattatatagaaatatgaagcaaaaaccacacaaactatttaagaacttacgggtgaatagagtaactccagaaacagaaccctaattagaccatcggtccatcacgacgctgtcaaatccttataatattggttgttggatgcagaccccaacatcctagccaagacgacgtcatttgtcgacatgaccgagcattttgaaaatttacaatttacattgtttgttttccctcccgccagattttgttcataaaaagaaaagaatctgtgtcaagcctcgaatatcctacggtgttggaagctga

SEQ ID NO: 164944 - DNA, 1889 bp, Arabidopsis thaliana landsberg
atgtctgtcaccggaccattcagtcacccaacaaaccttaacccaacagcaccggcgttctttccggcgataaaccaacaccaaaaccaaaacccctcctttattccgacaagattcttcctccctcttccccctcctcctcctcctccgccgccgccgctatacttttcttatttctctctccctcctcctcctcctcctcctcctcatcttccaccgacttcagtaacaccaaccagagccgtgatgttattacaagtcccagctaccgtcactgagacatctctaagacgagacatggaactattcggtgaagtccgtggagtccaaatggaaagagcacatgaaggaatcgtgattttccatttctacaatctaataaactcacaaagagcttttaacgagatacgttaccgtcacatgcaacaacaggaacaacaacaacatttccacttcacgacggcgcgtggactcgtctccggacattctctttgggcccatttcgtgttcctcaactcaatgctgttcctgaaggaacaatcaaggctctcttgtcattatgaacttagaacccaccgtctcttcctcaactctccgtcacattttccaagtttatggtaaagtttcaatttttaacgagataaacaaataaagttgcaaactttatgctaattagtgttacgaaaatcattgtaggagaagtgaagcaggtgagagagacgccgtgtaagagagaacaaagatttgtggagttttttgacgttagagacgctgcaaaagctctccgtgtaatgaacggaaaagttatctccggtaaaccaatggttatccagtttagtcgtcccggtggtttaaccaagaaactcttcttcgcttcacacttccataaaaacttcatctttaacaacgaacaccattattatccaccgccaccaccaccatcacgaatggtgaagtcggatattctaatgtacaagcaacaacagaagaagaagaagaagaagaagtatgtaaagaagaatcttggtgatccttatttcatgataaacgaaaacgctatcaccggcggagagttcagagacggaagaaccaccgtgatgatcaagaacatccctaacaagtacacgtaagtaaaaaaaaagcatgcatctttttcattatagcttagtgattgtgataggcatgtgcttcttgattctcttgttagtccgatattgtcctaaaacgaggaattgcttttgttctgttttatgatttttgggtttgcaaaaagtcaacaagacctaatggataatagtaatgagaacaagctatttgtattcatatgtttactatttttgtgtatattctggtcccatggagattaacaaatatcgactagtcaattttatagtattgtttctatttacagacagaagctgcttttgaagatgttggacacacattgtaaagattgtaaccaaagtgtaatcaaagaagggaacaaaactcctatgtcttcttatgactttgtctacctccccattgatttcaggtaattagttgattacccgttttctatgtgattaatagtatattagtgatgagtgtgctaattaaatttggtgttttgttagcaacaaaagcaatgtgggatatgggtttgtgaacatgacatcaccagaagcagtgtggagactttacaagagctttcacaatcaacattggagagatttcaccaccactagaaagatctgtgaggtcacttatgctcgtatccaggtaaagaaaaacaagaaagatcttcatgaatctcttgtttagtcacgctggaataataaaaagctgttttttttataagggtcttgagtcattaagggaacatttcacgaacgttaggctagcaggag

SEQ ID NO: 164945 - DNA, 480 bp, Arabidopsis thaliana landsberg
  unsure (1)..(480): unsure at all n locations
atgtccctcatcaacgcgaagatcaagccgtttgcggcgcaggctttcaagcagggcaagttcatcgacgtgagcgatgccgacctcaagggcaagtggtccgtggtgttcttctatccggccgatttcacgttcgtgtgcccgaccgagctggnnnnnnnnnnnnnnnnnnnnnnnnnnttccagaagctgggcgtcgagatctactccgtgtccaccgatacgcatttcgcgcacaaggcttggcacgacagctccgcggccgtcggcaagatcaactacaccatgctgggcgatccgacccacgtcnnnnnnnnnnnnnnnnnnnnnnnnnnnnnnnnnnnnnnnnnnnnnnnnnnnngcacgttcgtgatcgacccggaaggcaagatccagatagtcgaagcgcaccccggcaacatcggccgcgacgcgtaaaagctaaagcgcaaggtcaaggccgcccagtatgtcgccgcg

SEQ ID NO: 164946 - DNA, 941 bp, Arabidopsis thaliana landsberg
tggtatgcttgttcaagatcctacaaaagaaccaaaacacgatgatgttgatgagatatttaatcaagcaagacagctaggagctgtggaaggacctcttgagcatccttcgagttctagaagctttacaggaacaggaagattgctttctggagaaagtgtgccaacggctcttcaacagcctgagcctgtgattcacaatattattttctggtctaatggattcactgtagatgatggacctttgaggaagttggatgatccagagaatgcttcttttcttgatgtgagtgtgaattttattttggttaatgcttatgaattggcttatgaatattgtgttgaactgtcttgtattttcgtgtattgcagagcattcgaaagtctgaatgtccgaaagagcttgagcctgttgataaaagagctcctgtacatgttaatcttatgagaagagatgagaagtgccctgtaagttcctattgggatacactaacttgtgcttgatccatcttatgactatggtaccaacacttataacatctttgtttcttcttcttttgtaggagaaagaaaagcttaaggtttcatttcaaggagttggaaggactctaggtggtgcaagctcatcaacagcttcaagccaaagtaacctaactgatgtagcagcggttcaatcaccgttacagagccttgtagtagatgaaactcttccatccacatcgatccagcttagactcgcggatgggacacgcatggtagcaaagttcaacaaccatcacacggttaacgacattcgtggtttcattgagttttctcgaccagggaatccaaacaactatacccttcaggtcatggggttcccaccaaagccacttactgacccttctcagaccattgaacaagccggtctagcaagttctgtagtcattcagaaattctag

SEQ ID NO: 164947 - DNA, 1435 bp, Arabidopsis thaliana landsberg
atgaaagaaagagggtacgaaagatctgcgaaaaagtgtaaggagaagtgggagaacatgaacaagtactacaggagagtgacggaaggtgggcagaaacagcctgagcacagcaagactcgctcatactttgagaaacttggaaatttttacaagaccatttcctcgggagagagggaaaaatgagtgaaagattttaaatttaggtgtttttggcacgcaaaacgggagaacttgtagatgattacctcgagtttaatttttatatctttggtgtagtttataatttaaaactctacggctctgtatttgtagaaggttcgaataaaaaagacaaatacgttggggtgattgggattttgtaacggctaagggagacgaggagaaggatcctcggtcacatcgattatggctgccacgttgttgaacttgtgaggtctgaaattacaaatgctgacacttgccaacactattagctttattccaattactctttcttctctctcattccattctcttcttcaaatgcttcttaatttcgggcattggttattattatttatagggatattcacaaacacaaaagtcgtgtatttagaacaagaaagatatggaacgtggaggcttccatggctaccgcaagctgtccgtgaacaacaccactccttctccaccaggtagtgccattctctataccccctcttttcacaggctctcttcatttcagttgcatgcgaaaccattctctgcaatccctccattgtcatgtctgtactcttttcatgacgaacagttaatgaaatagcttttcaatcttataaaccgcgcatgcagacgtcatcgaagccattatgcactaaaacttccatttttcttatttttgttaggattagcagcgaattttctgatggcagagggcagtatgcgtcctccagaattcaaccagcctaacaaaaccagtaatggtggtgaggaggagtgcacggtgagggagcaagacaggttcatgcctattgccaacgtgatacggatcatgcggaggatcttacctgctcacgccaagatctcagatgactccaaggagacgatccaagagtgtgtttcggagtacatcagcttcataacaggggaggctaatgagcggtgccagcgggaacagcgcaagaccatcactgctgaggacgtcttgtgggcaatgagcaagctcggttttgatgactacatcgaacccctcacgttgtacctccaccgctacagagagttggaaggtgaaagaggggttagctgcagtgctgggtccgttagtatgaccaacggcttggtggtcaagaggcctaatgggaccatgaccgagtatggagcctacgggcctgtgccagggattcacatggcgcagtaccattatcgtcatcagaacgggtttgttttcagtggt

SEQ ID NO: 164948 - DNA, 1214 bp, Arabidopsis thaliana landsberg
  unsure (1)..(1214): unsure at all n locations
atggtgttcgaaacttnnnnnnnnnnnnnnnnnnnnnnnnnnnnnnnnnnnnnnnnnnnnnnnnnnnnccacgtcaaccctcttcttcgtctcggcaagttaattgcttcaaagggtttactcgttaccttcgttacaacggagctttggggcaagaaaatgagacaagccaacaaaatcgttgacggtgaacttaaaccggttggttccggttcaatccggtttgagttctttgatgaagaatgggcagaggatgatgaccggagagctgatttctctttgtacattgctcacctagagagcgttgggatacgagaagtgtctaagcttgtgagaagatacgaggaagcgaacgagcctgtctcgtgtcttatcaataacccgtttatcccatgggtctgccacgtggcggaagagttcaacattccttgtgcggttctctgggttcagtcttgtgcttgtttctctgcttattaccattaccaagatggctctgtttcattccctacggaaacagagcctgagctcgatgtgaagcttccttgtgttcctgtcttgaagaacgacgagattcctagctttctccatccttcttctaggttcacgggttttcgacaagcgattcttgggcaattcaagaatctgagcaagtccttctgtgttctaatcgattcttttgactcattggaacaagaagttatcgattacatgtcaagtctttgtccggttaaaaccgttggaccgcttttcaaagttgctaggacagttacttctgacgtaagcggtgacatttgcaaatcaacagataaatgcctcgagtggttagactcgcagccagtttcctccgttgtttacatctcattcgggaccgttgcttacttgaaacaagaacaaatagacgagatcgcttacggtgtgttaaacgccgacgttacgttcttgtgggtgattagacaacaagagttaggtttcaacaaagagaaacatgttttgccggaagaagttaaagggaaagggaagatcgttgaatggtgttcacaagagaaagtattatctcatccttcagtggcatgtttcgtgactcactgtggatggaactcaacgatggaagctgtgtcttccggagtcccgacggtttgttttcctcaatggggagatcaagtcacggacgccgtttacatgatctatgtttggaagacgggagtgaggctaag

SEQ ID NO: 164949 - DNA, 1572 bp, Arabidopsis thaliana landsberg
aagcctctcggccagggaggctgctttcactactgttctctctagcgttggcataatctgtttaccatcgtaccagatcttcattttgatagttcggttaaggatggagaaagtcttactgattttgtggacagagtaatggctcttccagccagttctcgagtaaacaaattgtccttgaaatggtggtttgatgaagatactgactctgctcagtttgatgaagatactgagcctgaagatacagagcctgctcagtttgatcaaatcaaccgttctctacgtgttgtgctcaagcgtggggtcgcggatttttatttgtgggtacatggcaaacaaggatatacactgccttttgaagttttcacttgtgagacagttactaaactctcactagggtctgggtttgctattgactttctccctgagaatgccctacttccagcgctcaagactctctctctttatcacgttaggttctacgagtttggtcgttgtgcgttcaaaacgcttcttgcttcgtctcccgtgctcgaggaactaaccgtgtgtggtgtcaactgggaactttggaaatggtcccgcactgtttctagttctagccttaagagacttactataatgcgtaaacagtgggatgcttttgatgattctgattttaagagcattagttttgatactcctagtcttgcctacttatattactctgattatgttcctaaagagtatctaagtgttaatctcgactcccttgttgagactaagctctatctttgtccggaagaaaattatatgtggggtaaaggagatgaaaaacgatttaatccaataaatctgcttcatgggctaaaaaatgtcgagactcttaacttgtacactatcatgactgcagaggtaagtttactctattgttttcactcgatctttaaatttttacaactactttttaaaaaatgttttacattttggaacattaggtgacgtataagaatcaaaatcttgctaggtagttcttatgtttctaatactgtagttggttggttttcttatatatatgtttcagatgttttatgtcttccgtgaagcactcccagtgtttcaaaagctgtctcatttatccgttaatctctctaacttctgttggtcttctatgccaatgctgatcaagaaagctccaaatctaaagactctcaacatcgacgtatgtatattgcaaacacaaaagttcattagatactcatatagaaccttgaatctcaagtcttctgcgtcttgtttcagggtcccttgcactacgagagttactatcgttgtgcaggcgatattttttgcgagtgcgtgtcagagtattctttcctagtttcatgtcctctggaagtcctaaagataactgagtactatggtagctttagagaattgatgcaaatgaaacatttcttggagaaattgtcatgtctcgagctagtggaagttcattctcaagcaactggtgaaagaaagctgaaactcatagcagatctggaaaggctacccagagcttcgtccaagtgcaaattcgaggtcgtttcctag

SEQ ID NO: 164950 - DNA, 681 bp, Arabidopsis thaliana landsberg
  unsure (1)..(681): unsure at all n locations
atgacggtaagaaaaattagttttgttaaatctttctttttctttaatgtttgcttgcatgtgttactggtttagcttttattgttcatgaacctaacactcaatctgatccaacttcagactattgagatgagagttcacatggattgtgtgggatgcgaaagcagagttaaaaatgcgcttcaaaagatgagaggtgaaagatctttgatctctcaagcaaattgctttaaacattttgtgttaatcacaaacctagatatataacatatctgactatatcactaatctctgctaaattgatgacaacaggagtggatgcagttgaaatcgacatggtgcagcagaaagtgacggtgactggctatgccgatcagaagaaggttctgaagaaagtgagaaaaaccggcaggcgagctgagctatggcagcttccttataaccctgaccacatgggcggaagcagcagcaacggcggctacttctacaaccctcagggctgcaacggcccaatcaaccacgccgcaccagtcccgacttcgtcttacaattattacaagcatggctacgatagcaaatgactattcgtcttaccgccaccaccctgttcatgcctctatcnnnnnnnnnnnnnnnnnnnnnaagtttagtgatgagaatcctaacgcttgttctatcatg

SEQ ID NO: 164951 - DNA, 1561 bp, Arabidopsis thaliana landsberg
aaattctgctgagcttcatggactttgtggataatgtattggcattgcaggctgattctcccattaagattttttccctcaagtgtaaaactggtgttcatccacgtcgacttgatggttggatatgtaacgtgctgcagcgtggtgttttggacatggatctttacatcgattttgacgaagaatcttttttgcctcgaaaactgttcttcagtgagtcactagtcgagctgaaactaagatgttcattaggtgttaattagtgggtagcgtgggctagactaggtcctgtcttaccaatgctcaaaactctcattattgactcagcttggattcgttgtgatacgattgagacgtttcttcctactttccctgttcttgaggaattatccatgtctattaatgagtggccggattgggatgaaaccgtgacaagtgcaagcctcaggaagctaagtatctttaccattggctgtgaaaacttttcaaatccaaagagcatctcttttgatatcccaagtctggtttactttgagtattatgatatggttgcggaggattatccaaaagttaacttgacaagcgtagttgaggctcgaatcagccttttattagatcaagatcaaatcaagcgaggaagagcgccaaataacgatgaggacgacgttcttctgcgtcttcgaaatgggtggaagcttatgagtggcataagaaatgttcagaaactttacatatctttagatactctccaggtctgtttttattttgttttgatagtatttttttctctgcactcaagtaaacccatctaaattgtggaagtatgagattcaaatttatgttattccgagtgtacaattcttatgctaagccctttctcaggttctaatgcacacttcattgttgttctaaggctcctgcttttatatatcgaaacaatcctggacatattgcagttgtaatgttgagtttggctttgccttgtttcaggtgctttctttatgctgtaaatcgatgccggtgttcaacaacctcaaattgttaagtgttaagactgccgagaatgaaggatgggagggaatgccggttctcttaaggaactgcccacatttagaaacactggtctttgaggtattaacacagatcatttgtcaaacattaacaatgacagagaccattctttgaattcccttactctatacttatctgctttcagggtctaagacattttgtgaccaataaatgtggggatgcttgtgactacgtgtctagggaagacaaaggccgttcgctcgtgtcttgtccggtgaagaagttacagatcaaagggtttcgaggaacaattagagagttagagatgataaagcatttcttgtactcttttaggtgtttggagaaggtagagatttatgctgaagagaagggtcgcactcgcacagaccttgaagtccctgggatgtttgaacttattgcgcggatgctcagactctacaacgagttctatagttgcgatgttcagttcctggtgcgtagttccttggataagaagtggactgcacag

SEQ ID NO: 164952 - DNA, 993 bp, Arabidopsis thaliana landsberg
atggtggatgagctatgggatgagttacaacaataagagttaggaagggaagatccagctctgttttttccgcatgcagcttatgcaactgttaaatcttggaataggcttagcttgattgctaggcctcttaatctttgctctcaaaacctcaacgttgtgattgctgctttaccaagatcatggggtctgacttctagagtttatgaaagagtgctttatacaacttttgttcaatttctctttcagtctgaggttgatcttttgtttgtgctaagatgggaaccatggttttataacacttggtttgtctcggcttagagatgggagataaatcttgcttttgagttcttgtctaatattgacttgtgggtgcaaatgcgtgggattcctcttctctatatatgtgaagaaactgtggtggaaatagctcaaggtttaggcgagattatctctttggattttcatgatgatactgctactcaaatagcatatattagagtgagaatccgatttgatataggttcatccaaagaatcacttttgattttagtgagactacccttataagttttcaatatgagaggctaagaagaatctgcagcagttgcttcaggcttactcatcacagaaatttctgccttatcgtcagcctcaacctctgcctctttttcgtggtcataccaacaatcttacaaggaatagaaaagaagatatgtgtgcacgtgatgaatatcaccgatcatctttgaactctcagtcgcatatgtttgaaaactcatttcatacgcctatagaaccctccaagggttgcagctccttctttgaatcatgaagaattggtggctgcttattttcctcatgcaagagctgcttctttaccaaataatgcagtaatggatcatcagacttcctctagcagacaattggtgtcaaggaattctaacatccaactgttttctggaaatgttattgcatcaaatgctccttgtc

SEQ ID NO: 164953 - DNA, 2787 bp, Arabidopsis thaliana landsberg
ctcgctgctcacttgacattactaaagaaggcagagaattcaagtgagaaaaaactatgggttcttcttcacactacattccaaaagcaaaaaatcttaaaggggaattgaaatcgactttttaagctctcgatctggagattctgatttttgagttcccgttgaagttagggtttctgaatgttccctcgaagatttttttatcttttatttattagttaatattacgcacgaaaccaccagtcatacgccttataagaagagttaaatgattttctagcccatctattaggcggcccattaaataattcgaaccggttatttggtttaaactgaaattaccggtataatcgtggaattgaaatcattcgactttgagttgtctgttagtgcgttattggttaacacgtgagagatatcgatagtctcctctggagtttgttaagttcacacgtgtgaatgaaagctttcgctctcaaagcttggtgctttttcgtctcttgcctctgccaaaatcttttggccgccatcgatctttccgatcacggaacaaccgtacgaattgaaagtatctctgcggcgaagtagaaatgtggacggaggaatctttggatttagtgcttgtgccgacgggtctggtcgtgatggttgcttaccatgtctggctcgtctacgctattcttcaccgccccaagctcactgttatcgctctcaacgctgagtctcgacgacaatgggtcttctctatgatgactgtatgtttttttctcttctcatttctattgttcctcttttggtgacattctgggattttcttggtatttctgattctggagattttggggtctacattagggtttatggcaataaagctgctttgttcgtgattttaggaattgggtattgagagtcttacggctctcctatcctcaattttcatgattctgaagttttcgaagtcaactaaaaactagtaaaccataaatatttggatcttcaaacatcaggtagcaaaattgagcagggtttatgatgagtaaagatgatgagattaggagaagcaaagtcttggagctgtcaagtgatgttagatgtgaatcttcattagtagaatcaatgttataatagacggttggctatcttccttggaagcttgacatttttcaagaactcttcttgttcatggaggatatgcatcacagatccctatagttcacaactctacgcatatttcagctagaatcttggagctagttaatgaggttcattggataggaacagagtcatagacatgagaaacaagaacacagtcgtgtgtctgtccgttaagatccgaattatcggtggtcttggctctcagtattggttcttttgcagtagatgatataagtttatctattgttatttccaggaaccactgaaaaatggtaccttggctgttcagacaatccggaacaacataatggcatcaacccttttagccacaacagcaatcactttatgttccatcattggcgtctttgtaagcaactcgtcatcttcaaaatccacggcaacaaatctcatatacgggagcaaaagccctcgcttagcgtcattcaagaactttgcaatcctgatctgtttcctcatggcctttctctgcaacatccagtcaatcaggtattacgctcacgtaagtttcctagtcacagtgcctgtctcaagagggaaaagagagcactgcgagtacgtgtctagaaacctgaaccgagctagctacttctggtctctcggattacgggctttctacttctccttccctctcttcttatggaccttcgggccaatcccgatgtttgtgtgctgttgtatgatgtcctcgattctatatttcttggacacgaccactagttttaccaggcatcttcatagccaatcgttcagagaaacggctgattcaatggacggcgaaatcgaatcagctgttcatactctgtagattcttctctgacttttgttgtgtattaagagttatatgttaacggtgtcttttgtaatgtgatggaacaactttgtctgcaattatgtatgcgtttgtgttttcatgttacaatgattagaaaacattacaagatgaaaacgcaaacgcctacctaaacgcaaacaaacaatcttaagtatgttcatcactgaagaaagtaatggttttagctttttctgttcttggttttaggtttggataactaagaagaattgttattattcacacaggccttaaaacaaatttgttcttgctttgtttccacaggattgagtaaaatccataaacgaaatgttcaagcctcaaactgtttaaacatgactagatacgcacaaaaaggctcacgctcgataagtacattaatgaaaccttttattaagatttaaggacaaaagttcgattcttcttctaatgccaagagacgttacaaagctggagtggcagtgacggcggaaaataagacaatggggatgtctttaggtgatccgatatcgcctaccaacgcgaagagatcatacaagatctcattgcattagtatccactatggatcatctaaactcattcatggaatctggtacctctaattggctcatttcccccaccaccatggcagcttggaacgtctcttagaatcggagaagacagagagaaaaacctaaagcacctgacggactccggacagattgagcatgcaggaataaataagcgcgacactcaagcaagcaccaaagatttggggttgatccgaagatttcccagctag

SEQ ID NO: 164954 - DNA, 1101 bp, Arabidopsis thaliana landsberg
cttgttaaagcaaccaaattttctatgcttgttttttctaatatatttacttcaccaatcaccaccacaacttccctcactcttcttccaagtgaagttattaaccaaaattacagataggaagaagagtgctgcaatggaggagattgtggtagagagtcttctcagcggtaacagagagtctcaaatagaagcagctatagagctgactaatctaagcaggaagcagacacaatatttggcagaaagagagatcatttctcctttgctatcgatgtgacaatctcaagactgtatcacaacagaggttgctctatctgcattactcagcagtgcctttgccagtgaaaggtttgtgtttcaatctgtgtttaactattcatgtgcggtagtaacaggcaaaataataataattgtgtttattaccgaacttacaggaacaaagtccgaattgtgaaatctggcgcagtaccaacgttgctagaaattctccagtcagaaacgaagatggtagttcttgaattggccatggcatttcttctgattctctcttcctgcaacaaaaacaaggttaagatggcatcaaccaggttggttcagcttttagttggacttattgggctcgatagacttaccatccaggccaaggttgatggcatagcaacactacaaaatctatctactctccatcagattgttcccctggttatagcttcgggagcaccatatgctttgcttcaagtcatcaacttttgcgataaatcttccgaattggctgataaggcagtagctttgcttgaaaacataatttctcattcaccagaatctgtttccagcatcggtggagcaattggggttctggtggaagccattgaagaagggtcagcacagtgtaaagagcatgccgtgggaatactacttggtgtatgcaacaacgacagagagacaaaccgaggaatgatacttagagaaggagtgatgcctggattgcttcaagtgagcgtagacgggacacggagggctaaagaaatggctagagagctactgctactactaaaggactgctctggctatgtcatcaaaaacaaacagtcaaagatt

SEQ ID NO: 164955 - DNA, 3098 bp, Arabidopsis thaliana landsberg
attgctgatatttttgaggttgcggatatatcgtttgtatacactgggctatttattagcaatatattatcttgcttgtaacaacgaaaaaacttgaagactaaagaccttagcttccgactactttaatgcaagagggagctaaagaaacagagaaatcaaagcaaaaaggtaaaagtaaaagatttgagtatttcgttacttagagttaaatttttggaattctttttttaacttagggtttgggaaattaaacttcatatcggtaacgaatttgttatttctaaaaattctgcagttacgcatggcgtttgtggatggatttgcgttaggagtccgattgcgagagcaggatgggtttgcgaaagttgttatggcggtaaaggaaaagttagcgctgagtgccgaagacgatatcgagttaacatatcaatggccacagtggatgatggatcctgactggagacgcgctaacccgatcgatatattggacgatgaggatatgacactgtttatggcaatacgggcagatctagatgaagtgcatctacgggtgaagatactacgagaagggaatggtcgaaacgttaatagttatcggagtaacctgatataggcggtcttacttcggaagaaatttcggataagtactggaatagcgcggaaacaaagctgtttggggtacggcgttaacaagaatgttgctgcgaaacatatcaggtgaaaaccaaaacctatgttgttcgctatattgtagtaaatttatctgttaatatataaatcggataactttgcttatatcagggttgatttacagctcatatacttagtccgataacttatttatatgctactatatatcttatccaggtgacggtgatggactggcagccatgggaaaggacaacatcatgggcgtacagaaaggcaatgaccaacgaatgctttatggggggggggttatcataagagacaacgtcgagattacagttgggacaagcggtgtgccactaacagacacagaaccagactccattccaatctctaaaggaaaagagaaagttactgatgatgatgagagagaacgggatcgtttgtttgagatgtggtgaactcaacaacaggaagaaatgtggcgagagatgtgtgcaacacaaatgaccctaggagcaactcaaattgacgcaacaaacgtgggcgacactggtaaaactgctagagctcttaacttcggaagtggcgacatttccaagggcaatccacgtgaggacttgcaactcactctagcaagagcagaaacacaagaagtttgcacccaagtggtggcactgtcatcaagcgattcaaccttcggaatgccaacctcgctttccacaagcgtatctttctctagcgatgacctaatggacgtcactgactcatccaacaacaacagctcatcgtgcataggttggttatctgatatttaatatgttatcgccgatagcataatactattaccattcgttcacggtttctgacttttgactgtaggtgacgaaacactgtcacacttttattctgaacttgatggcccactcattatggccccattgcccgtcggaataacggataaaggaaaaggtatcatgatagacgaacgaataaccactaaggagataggtgcgggttcaaccaatacaagagtatcggaggtactgaggaatgagttaatggtgaaagatacaccggttccgacggtgttgtacgatagagatgccccaccatattttgacgacccagggaaagaaggtaaagcatacctatatagcaattttgatataaaaaaaactagttagctctgtattatatatagctaatcatgttcgataagtaattgtttaactcgataactaaacatcttcgctaaaagtattaacagctatgttttctcttcctcgcagatgctcttcataaagcactaaaatatgctgataatgagggagatgatatctacattggtcggatttttaaaagcaaagaggactgcgccacgaaactagcaatccacccaattcaccggaagttccatttcatctacacgaaatcaggaccgaacatcgtggcggttgtctgcgtcagcgacacatgtccatggcgggtttatgctactaagctgccagatagcgactggttcgaggtcaggagcaccacccaaacccatacatgtagcgtggatgcaagaggagacttccacaagcaggcgtcgacggtagttattggcaagttgatgcgtactaagtatattggagtaggacgggggcctcgcgccaatgagctgagaagaatgctacgccaagagttcagcctcaacgtttcctattggaaagcatggcgggcacgggaaattgccatggacaatgctttagggtcagccatgggaagttacgccctaatccaaccttacttcaagtgttttttagagacaaatccaaattctttggttgcaatggagaccgaaaaagataactctggcgtagagaggttcaaatacttgttctttgcgcttgatgcttgtgttcaagggtatgcttacatgaggaaagtcattgtaattgatgggactcacctacgaggacgatatggcggatgcttagttgcagctagtgcacaagatgcaaattttcaggtcttcccgattgcatttgggatagtaaacagcaaaaaacgatgaggtgtggacctggttcatgactaagttgacagaagcgttatcagatgatccggagttggtgtttgcgtctgatagacacaactcaattacgccaggatccgtaaggtaacatggtaacacataatgtatctcatactaattaagttagtcactaatataccatgtttaaaaaaaaatcacattctgcctaaacattatgcaggtttaccccatgtcatctcatgctgcttgcgtcatacatctgaaaaggaacattgaagcatactttaaatatgaacaggtaggttatttggtatccagtgcagctagagcttatcgactaactgacttcaataggatatttgctgaagttcgagctaagcatggaccgtgcgcagactacttg

SEQ ID NO: 164956 - DNA, 1460 bp, Arabidopsis thaliana landsberg
tatcctctggttcacggaaaatctgctgctttgagtacatgtagtgtggattttgctatgtaactccttttccaagaaacagtactaggcttattgcggcaactgttttccatttctactttgagctattttgcaggttatgcgagccaaagtgtctggatggaaaacttgtgaaagggaagattgtgctgtgtgattctacgaaaggtttaatagaagctcaaaaattgggagctgttggatcgattgtaaagaaccctgaaccagaccgcgcttttattcgctctttccctgtctctttcttatccaatgatgactacaagtctctcgtctcttacatgaattccacaaagtaatgattttctttatgttttatatgctgcatacttcaaattatccatctttattgttttttctctgtttgtatatgcagaaatccaaaagccactgttctcaaaagtgaggagatctctaatcagagagctcctcttgttgcctctttctcttctcggggtccaagctccatcgtttcagatattctgaaggtatcttagtgcttgttattagtctcttttgattttagctctgagagaaaatcgtggattcatattgcagccggatataacagcaccaggagtggagatccttgctgcctattcacctgacagttcaccgactgaaagcgagtttgacactagacgtgtaaaatactctgttctgtctggaacttcaatggcttgtccacacgttgcaggcgtggccgcctatgtcaagacttttcatcctcaatggtctccttccatgatccaatcagccatcatgacaactggtaagaaaaacttagattgaaattaccaagagaaacaaactcacttgtgccgcaagagacccattgatgatctcctaattttgtagcttggccaatgaatgcttctggttctggctttgtatcaactgagtttgcatatggatctggccatgtggacccgatagatgctattaatcctggactcgtttatgaattgaccaaagcagaccacatcaactttctctgtggtttaaactacacgagtgatcacttaagaatcatctccggagacaacagcacttgcacgaaagaaatttccaagacattaccaagaaacctcaactacccaacaatgtcggctaaagtgtcgggaacaaaaccgttcaacataactttccagagaactgtcactaacgttggtatgcaaaaatctacgtacaatgcaaaggtagtcaagtttcctggctctaaactctccttcaaagtgtcgccgcgtgttttgtctatgaagtcgatgaatgagaagcagtctttcatggtcactgtttcaagcgatagtatcggaacaaaacaacctgtgtcggcaaatctaatttggtccgatggcactcataatgtaagaagccccataattgtttatgctatgagctaa

SEQ ID NO: 164957 - DNA, 1423 bp, Arabidopsis thaliana landsberg
atggcgggaatcccagatcatatccaagaccaacatcttgtggaggaggtatatgctttttatgattttgttacattgaaaaactttattcttaaagagtttttgttactctacttacaggatcaaccctttgatctggaagattggcttccaatcacagcatcaaggaatgccaattggtattattcagctttccacaacgtcactgccattgttggtgctggcgttctcggtcttccttacgccatgtcagagcttggatggtatcttccaactgagatttcaaatacaccaaatttatttgaagatgtacatatgtatatattagactttaccaatgatgttttcaggggacctggggttgtggtgttgatcctgtcatgggtgatcacgttatacaccctctggcaaatgattgagatgcatgagatgtttgaagggcaacggttcgataggtaccatgagctgggtcaggcagcctttggtaaaaagcttggtttgtacatcatcgtgcccctacaactacttgtcgagatcagtgtgtgcatagtctatatggtcactggaggtaaatccctgaagaatgtacatgaccttgctttgggagatggtgacaagtgcacaaagcttagaattcaacacttcattttgatctttgcctcttcacagttcgtgctctcccttcttaagaacttcaactccatttctggtgtctccttggtagctgctgtcatgtctgtcaggtagctccttccttttgctattttcatctcgtgaaaacataacatgactccaagagaagaaattatcaaatgtttgtttccaatgcacagctattctacaattgcttgggtagcctcgctgaggaagggtgccaccaccgggagtgtagagtacggctatagaaaaagaacaacctcagtgccattagccttcttaagtgcactgggtgaaatggcttttgcgtacgcaggtcataacgttgttttggaaattcaagcaacgatcccatcaacaccagagaacccatcaaaacgacccatgtggaagggagcggttgtagcctatatcattgtagctttctgctacttccctgtggcacttgtaggtttcaagacctttggaaacagtgttgaagagagcatcctcgaatcactaacaaaaccaacggcacttgtcattgtggccaacatgtttgtggtcatacatctcttgggaagctaccaggtacaccagaaaacgcctctcattagaagcaaaaaaaaacttgtagttccccgccttaactgatctgctttgtcctcctaggtgtatgcgatgcccgtgtttgacatgatcgaatctgtaatgataaggatatggcacttcagtccaacaagagttctacggtttaccatccgatggacttttgtgggtaagtctc

SEQ ID NO: 164958 - DNA, 1681 bp, Arabidopsis thaliana landsberg
  unsure (1)..(1681): unsure at all n locations
tatttgattagtacctgctgcattcactctccttacatagttaacgtatatgatttgcagcacccctcctgcctgtttagtccctggtgctggacttggacgtctggcccttgaaatttcttgtctaggtatgcaatgcggaagtaattttaattgtatactttatgataataaggtatataacaattatgtgcactggagcaggtttcataagccaaggaaatgaattttcatactacatgatgatatgctcaagttttattctgaattagtaagaatttcttattctcttgaatacattatctttttatattccttacttgtccgtctcaaagagcctctctgtcctccttttctaggttgagatatttggtcacccatgttgtttcagaaaatagaaatcagtttatccacaattcagtatttcacatctttttactttcacaccagccaacctctaaacttcaaactgtttttctaaattgctcttggagagtccacaatttactttcttctctgatgtatctctaattaagttgaggtagtttcttacatttggtccagttttgagttttgctcagcttgttttttgttttcatcagtacacaagtccctggtgagtggacaatatacccctggatacacagcaactgcaattcgctctcggacaatgatcagctacgcccaattgcgattcctgatattcatcctgcaaggtatgccttatcgaacaacaggagaactggcctatggtttttggaatgtgttggtagttttaggtataaaggcttttctgtttttttttgtgaaacataagggaactcaattgaaagggattaggcaacttgtattggtgatttcgtgtagctacaatcatttaaacgtcactttactaaaaaggttaacattttgtgagcagtgcaggaataacagaaggtttctctatgtgtggtggtgattttgttgaagtatacaatgaatcaagtcatgcaggtaagaaacggaggctacttgcttgtttgtttaagccaatacaccactcatctgtttaattgtaaccgttaattcttaatttcaggaatgtgggatgcagttgttacttgctttttcatcgacactgctcataatgtcatcgagtacattgtataccatatccaagatcctaaaagatggaggagtaattaccctgtcacactctttccttcaccgttgacctttttcgttcttctttgatcttttctttgctcctgacatatcttaattaattttccatcaggtttggataaatttaggacctctgttgtatcattttgcggacacatatggccatgaaaatgtaagcattggagttgtcccacaatctcaccataactttggtatcacaataataattttcttgtttctccttaggaaatgtctatcgagctaagtttggaggatgtaaagagggttgcttcacattttgngtttgtgatcgaggtaactacgcgatataaaaatgacattttctttttgatcataaaacatttcatgttcttccacactcagtacttgtccgtaacatttgcagaaagaaagaacaattgaaacaacttacactacaaatccccgggctatgatgcangttagctttntcatgtccctatgatttttcatttatctgttctatattcgggtggtg

SEQ ID NO: 164959 - DNA, 5188 bp, Arabidopsis thaliana landsberg
caactctatcttgaggggctaccaactctgcaggcagatcaattctctcactgattggagaagaaaattgctcatatggttgtcattcaaaacatggtgtggttgaaccttatgtagagtaagttctacattttaatctagttcattacacattcctataattgataaaccaattgtagctgatttcttcttattttcattttccctgacaagtgcacatctgcaacatctacaaaactcaaactcaagatgcagacgtgatgcatcaacactatggactatgcatcgcctcttggttaaaaaatcaagcgaataaatattaaattagaatatcttacctgcttcttaaattctataactgtctgacataaattactttccttttgttagataccgcttgattcaaacagtcatgctgagactctaaaatggttggcatttggtccacgtagttgcgcacagtcatataaaggatatatagtaaatgggcagcggtttcacacaatatcagtagatagaaaaagtcagaatagtggtgcctactatgaggctacagcaatctgcaggtctagcctaaggatacttcacaagtggcggatctggtatcatactatggggcagtaacatacattatcttgttggactacaatgtgttttatgtccctttgttcaggtgtcaatgggcagttaagggtaatggagtgaaagaagatgatggtttcactctcgtgaaccttaatcatagtcaagttagtttttcaaaggacccgtgcatattagcctctctagcaaagcaagtgttttactctagggaagacgagtcatcaagctggcatattgctatgagaggtccttctagaagattcagtcagaaagagtttgacgctggagatgcagacatcagtcctttgcctgcatatatgtgtagttcttcttcatttacatgattagttagacttttttttgaatagatgtctgataggaaattgtttgtttcttagcttattctctgaatagatgtcttagcttattctctgatagtttctctatatattttatatatattaacatttgaaatgggaactgggaactggaaagaaaaagagaggaagaaaacctaaatagaaagatgatgaggtagaatatgtgggaacccgtgaacctgcaccagttgagccagaaacatcaccccaagtacaagctgcagatacagaaccccaagtacaagctgatcctccacttgaactcaatgaagaagaggttcaaggtgaagtgacgcctggcgttgagaaaggtctgattgatgaggagcctgaaggtgagatagaattcattgaagattatgaaaatgttgagagaaagagtaagagacagcgaggaccaacacccatgaaagacattgccaaggatccaaataccagagtacatgtagagttcaatagcatgggagaaccttatggtaaagggtctgtttagatggcatcttacgttggagcattggtacgggaacatgtccctatcacatatgatcgttggacaaagataactgaagaaatcaggacacttctctggaaatctgtccaggtgacttcctaatgcaaaacctcaagatgtttaagttataaaatctgtaggtcttcaatttaacttttttgtttttgttttggtgaactatgattgcaggcaaggtttgagatagatgaagagtaccagaagactacagtgcttacgcagatgggatgtctatggaggtcatggaaattccgtctagtaaccgatattagaaaagccaatactctccaagagaggatgaagctgcgacctaagaatgtttctccatttgagtggcgaaaactagtcaaaatcaaaaccagcaaagagtttaaggtaatcctttgtacttaactaagtttatttcatatatagtatcttacagtaaaacatttccctgttaggttgtgagtcatagttataaggaaagaaggagcaaacagattcctcacaccactagtcgcagaagaatggttagactagcataagatatggtaatcataccacaattatgttgcatctttttctcattgactactttagaatacttatcaactgtaaattttttttgctctgaattagaaaaaggagagtgcaaatccaagtgaagtgtcacggctaaaggtcttgaccaagtcacgaaccagaaaggatagtacaccagtgaatacaaatgcggctgaaaagattgtgagttacaaaatattgtactatgttctgcatgttggaattagatcataacgtttgaagctgtatcttgtgattggcagagagaggcagctgagattgttaaaagtgatacttagacttctgcttgttttgatggccaagattcacttagccagctactaggacctgataatcctggtcgaatgagggcaatgggtagaaacatgaataagaccaaattagcatgtttccaagtgaagaacaagtgtatggctgaaatggaagcgaaacaagctcatctcttgtcgaaggtcaatgagttagaaaatgtaattgaaaaattgaagaaacatgttagatacttctctacttatagtttaaattgattcattataaaactagatttgactttgttttattttttgtaacagagacaagagcctgatgttgcttcaaactcaactgctagagtaagtttttaatttatatccaatgcatgttttaattgtttttggaaactctagtaactatccttttttcattctatagagcgtaaacaagagatcacaaccaaagtgtatcttgattgattggactggtaatggtgataccattgttgatgaggggcgtattattacatctgatccagatgacttagtgaatgattgtcgcttaggcccttcggatgtcaaagttttggttgacagtgctacggtaccagacacatatctttggagacctgcgcttaacatgtgcacaattgaatctgccatcggatagatgattgcttggcctgcctctaagtgtgttaacctagaaaatgagcatgaaacagaagacattgcacaactggtaaagtttattattcaccctcataagtataagaatatttatatatattggaaggatgataatgttgtgtgaatgtgtttgacagagccaaagaactaattcagcgatgaacaaatgcaagctgctcgatttgtcttcagatgacgtggttgttgctaaagggtgttggaagacaaaagatcatgatgccttagtaaatgggctatctatgggaccaaatgcagtgaagatctttgtagatgtggtatgtcaaccagatacatttatctggaggcctacggttgatgtaacataccttgaggactgtctacaatcatttgtatcatggcctgtgaacaaagtcgtcttttaaaacacattaggtgcaataggtcagcaatctccaattcagaattctgcatcaactgagcaatcttcaggaggaaaatcttcaccaacaactcagaaatctgcatcaactcagcaatcttcaggaggaaaatctgcaccaacagctctacaacaatttgcagcaacaactcagaaatcagtggaaacaagtcagaaggctgctgcaacagtctcaaaacaagtcaaaagactttcgtagcatatttataaacgctgatacatgaggtgttatgtcttttgaaaaaaacttatgatttgttatggcttttggtaaaaacttatgggatgtgttatgttttttggaattagaacttctgttatgtatgatgaatgattatgtaaacttttactcttcatgatatggaatcagactttatgtgaaatgatatttatttctatgtgttcatattaatagctagtttgtaattctaaatctatgattaattattctcaaaaaaaaccatataatagctatatgaaaacatatacaatagcaaataaaaaaatgatctatacttctatcatatcactaaaatatttgttttcaaatatggtattatagcacatgtaaatgtaagaactaaataatttattgctttacagaagagctatagtataagcatatattaacgcaaaattgaatagctattgtacaatgatgtacgataacaaaacacctgctgctatatgaaaatacatactagcgttttactttcgctatagtattcgtcaattgtgtagcaattttaaaaatgctatagtagggcttacccctacgatggatgccgatgtcatagcttttgtgaattcgctatgttatatgtatgatagcagatattccgcactaataatgtcaacatttcttatagtgaaaagaagttgaacaagaagctgcataagaaactgaacgagaagttgctgcgcaagaagctgaacattctgctgtgcaagaagctacaaaaatatttacacattttttaaactgaattttgctcagattgactcataacttaggattaataacttaaatgactcttgtaattgatggctgactagaatgactcacatttttaatcaaaagacattttaaccctcatcagttttataaccagaattatacttaaaatgtgactttgattaaaaataaataaaatcattaataaaagaatggattaaataaagaaataaagaatataaaaaaacaaaaagcgaaagtgttttccccgactctcgaaatcgaaacccaaaaattgcatgtctcttcttcttctttgatttcaaatcgaaaccctaacaaatctccggtggtggctcttcgtaacgccgacttctcttctccggtagtggctcctttctccggtggtcgctgctcgactaggagatatctcttctccggtggtggcgttgctgcttcttctctctcaaatgacggatacttcttctccggtggtgactgcgctgtgggtttcggatgcacaaacggcagtgaggagtttgcctcttctccggtttcacctgcggctgtgaacagcggtgggcgttcgtgtccgatggtttagggttcttcggctcctttctccggtggtcgctgctcgtctagaagatatctcttctccggcggtggcgttgctgcttcttctctctcaagcgagggatacttcttctccggtggtgactgcgctgtgggtttcggctgcacaaacggcattgaggagttcgcctcttc

SEQ ID NO: 164960 - DNA, 2127 bp, Arabidopsis thaliana landsberg; identical to SEQ ID NO: 18356

SEQ ID NO: 164961 - DNA, 1536 bp, Arabidopsis thaliana landsberg
atggatcctaaagggaagggaatcgtgatcaacgacaaggagaaggagtccttcgtcaacgagccaagggatgacaagtccaacgactcgggctcgggccacagacgaaaagatgggaagaagaagaagacaagacgcatcaaggagatcgtctactatgacagcgatgagtctacttcctcccaaaaggacgacgaccacaacgaatacgagagaaagaaaccggtcaattcaaacttttcttttgattactctcgtattcctcaaagtactaatgctcatttattatctattccacttggtaaacctcctcattttgatggagaggactacggattttggagtcacaaaatgcgtagtcacttgttctctctccatcctagcatatgggagattgtagaaagtggaatgcactttgatagtacggatagtcccatgtttattaatgaacaaattcataaaaatgcacaagctactactgtgttgctagcctctttgtgcagggacgagtacaataaggtgagcggcttggacaatgccaagcagatatggacaccctcaagatctctcacgaggggacgacatcaccatgctcaccaagatggagttggtggagggcgagcttggacgattcgccatgataaggggagaagagccaactcaaacttacaaccggctcaagacccttatcaacaagataaggagctacggaagcacgcgttggacggatcacgacgtcgtccgcctaatgctcaggtcatttaccgttcttgatcctcatctcgtgaacaatattcgtgagaatcccaggtacacgatgatgacgcccgaagaagtacttggaaaattcgtgagcgggcggatgatgatcaaggaggcaagatacgtcgacgacgcgttgaacggtccactccacgagtctcaacccattgctctaaaggcaacaaggagcaaggagtcgctacctagcaaggtggcgcaaattgaggcggccggtcttaatgaagaagaaatggccctcattatcaagagattcaagacggtgctaaagggtcgcaatggacagccgagcaagactaagaccaaggggaagcgatcatgcttcaaatgcggtaagcatggtcattttattgctaactgtcctgataatgaaagtgaccaggaaaagggaaacaagagggaaaagaagaagcattataagaaggcaaagggcgaggcgcatctaggcaaggagtgggactcggattgctcctcgtccgactccgacaatgaaggactcgccgccaccgccttcaacaaatcaaccctcttccccaacgagcatcacacatgccttatggcaagggagaagaaggtatgtactcgcaactctacctatgcttcttcaagtgaggacgaatctagtgatgaggatgaagtagattattcatgtttgttcaagggcttagatagatctaagatagacaaaattaatgaattaattgatgccttgaatgaaaagaatatacttttagaaaagcaagaggatttgttgta

SEQ ID NO: 164962 - DNA, 720 bp, Arabidopsis thaliana landsberg
ttgcattcacgtcagcttcataatagtatcttcatctaaatctttgtgtgtcttttcttttgcattcacctcgattctctaactgatttccatccctttgggacattgcaggttctatttctgatgtatcattattttgcggcagttgagttttacaatgcaatcagggtcttcatcgctggctatgtgtggatgaccggttttgggaacttctcttattactatatccgaaaggatttctcccttgcacgattcactcaggtcagatcaactattttcgatcaccatagtttgttcagtttaccatgtgatattcttttagagagcactatgtctttcaaagctcaagatttttatgaaagcttttacttaatccagatgatgtggcggcttaacttttttgtggcgttttgttgcattattctcaacaatgactatatgctgtactacatctgtccaatgcacactctattcacgctgatggtctatggagcccttggtatttacagtcagtataacgaaatagcatcagtgatggctctgaagattgcttcatgctttctcgtggttatccttatgtgggagattcctggagtttttgagattttctggagtcctctggcattcttactgggtcagtaacaaatttctctcatttttcataccatttttgtcatgtggctgatctgtagttctgtcttctacacaaatattttggat

SEQ ID NO: 164963 - DNA, 2924 bp, Arabidopsis thaliana landsberg; identical to SEQ ID NO: 29191

SEQ ID NO: 164964 - DNA, 416 bp, Arabidopsis thaliana landsberg
  unsure (1)..(416): unsure at all n locations
cgttatacatgggatgaactgaaacggagcagtcatggccacattgaagtataccgactttcatgtatgggtcgcagtcgaaggcgacgttgagacggtcggtatcaccgattatgcgcatggacagttgggaaattgtggcttcgttgaattgcccgaggaaggcaaagcctttgtcatctggcgatcaggcggcggttgtctgaatcggcgaaggcggcggacgttgtttnnnnnnnnnnnnnnnnnnnnnnnnnnnnnnnnnnnnnnnnnnnnnnnnnnnnnnnnnnnnnnnngaacgaagatgcgaccgaagaaggctggttttttaagaatcagatcgacgacaagtctgaactggactcggttatggatgcgaacgaatacaaggagttcgtgaaggggcgtcaatgatg

SEQ ID NO: 164965 - DNA, 5458 bp, Arabidopsis thaliana landsberg
tccaatcgtttggttcttatgtctcgatctttgccgtttgacagcataaagctactactttgaggtgtcatcactttggatacttcaaaatcgttttatcccttctttgattctgaaatcactgattttgtcgatgtcgatggactgattgtttttgcttccatgtttttttatcctttttttgccatgggactaaactttaggatctaccttgtgtaactcctaataacttttcatttttaatgagatatttacattcttagcaaaaaaaaaaaatgtatccgtttcagtcttcgaattaactattcaaacgttcgaatttgaattgattccggacttcctgggcttcaccttttggcccacttgactctccaatccggctggctttgacttggatgtcacattcatctcgcgagttaaccacctcacttatatccttgctcaaggaaacccgtgggcctttcctcttttgggcctctcctacttacatggcaatgtttgaccggtcccgagcccatggtgcgggatccgacaccaacaattagccccccaagtctttcgaagtgatactccaattcggaatactttaatgctctaaggggcaaagattgcgttaagtgactctctgatttcccaccaaaatcacgttattgcttttattacggaatcacccataattactctcgtgacatctgtcagagttatgaccgcataccaattatttactatttaagcgggaaaaactcttccacattctccacgacttccaaggcggttccgtcatcatcactagcttgcgtaaggtaagttcactttacttatatcttttcacgcttcattttaatttttattttaaaacaaagctcctttcttcttcctctctgtactctctctctggcgaaccctcagaccacccatttttatgatgaattctgaaaatgaaaggcggctctagtaacaacctttgcacccggccaaatgatatcgccggtccccactatcaatccacatgcactctccaatctcttaatcgattgggagagctctgtcggattccgactgaagtaatgaaggacttgcagatatcggagcctaccgaatcgccggaggaccaccgcccagggttcttctgcgtgtccgagatctatttcaagggttgcggcctgacttttcctcttcccgaagccctcgttcgatacctggcagcccttgaaatcgctttgccccaactaacccccaatctcctctggactattctggggattattactattgcggcggaagccgggtatgtcatcggggttctcgaactgaatgaacttcttagtgtgaggagttctttgaagaaagtcggatacttctcggcttatccaaacgccaacagaaacctcatctcgcacctccctaacaaagacgagaactagcatcacccgtggtttttagtcaaaaagagccctgcttcgattggaaatctttcggatttgctcccctaagtggactactaagcctggtagatgttaggtcatgcatatgaactttattttatttcttggcttatctgaccaaatctgttgtttcacttcgcagctttcatcgctcagactctcccgtctgacgaattcattgaatttttcaaaatcgtcctcgaaggggaaaccctctgaaattctttcaccctcgaccgatttatagaggccaatcataaggtcaaaatgagccctcccggacagcttcatcaacttccgccacctcctcccctacctcaaggaacatcagcccggactcttgcttcccggcgaaaggtattatccaagccgatggctgaggcttgcgaggtgaacaaagcgttcctggcgagcgccattgataagaaggaatacagcaaaaccctgctagttgacgatggtagtgccaaaggggccagatcggctgacgcgtttaggtcaacaccccgtcgtgaacgccatagaggtcgttctcctcgaagaaaacgatctccccgtcatgactctccttgctcttctccccgaggtggactgagcagcgaacccattgccgatttagttcgcaagaagagagacagatcaaaggcccggactgaccgttctccccgtggcagctccatgaagggacaaatcaaaggtccagactgaccgttctcctcgatcgtctccttcatcccgatcgatgggtcctcctcctcttgttgtcacatctccctcttcccggcctagtggcgagagggctgaccgaagtgcgactcctcgacaggaggatgtcgagcctcgaattacttctccaaagtctaaaaccgttcttgttcctcagaccatatcgttttcaggttcgacaaatgactttcttttactgacttctgcgccgtccgcaccctgaataacgtacctttttatcccacatctccttacagccatggaaacagagggtaatgtttttcggtgcttcaagacccggaaagacgcgatcttgccaacttttgacaaatggcattccgcagtccgtgaacgctttttactccatgcttatcattcatcgcgggttagtttcatttccatttttctgatctcgctattcctttacgtgctaacttactttcacgggcttatactcaatgtcaggcaaacaacgaacttaatgacatggttgagcactacgaaagattgctgcttactagggagcaggacatggacacttggaagggcaagtgctcttccctcgaaactgacctccgctccctctccgtttctaagcaaaaatttgaggaccgagtcgaccatctctcttcagagctcctgaaatcgaaaggcgagttgcaagatcagtaccaaagaaatgacaaactccaggatgaactctcgggcacagttgcccgagataggctttccgagtccgaatcggctgcttacaacttgaacaatcagttcaccgaacttaaggccaagtacgaagcaatcgccaagcttcgagatgccgagttggctaagtcggcgtcaaaagccagaaaagaagtgaaaggtcgcgggatggagctgatccagggggccattcttttcattcaaacctaaggttttgaattaagctaaacaaatagattataaaataaaagacaagacaagaaagcaataaatgagattgaaggttcagatgattaaaacgtcgggtttagagaaattctcaggagatatcagaatagtagatctagcagtaaattaggagatattatcgaaccattcgaaaacacaaatcactaatataaagtaaccggtggtgtgccgtgctacttgctatgcttaatagtattgatcccaactctcttgtaaatccctagaactaagcaagcattataatcaggtttcataagttcacctaagtaatcaacgctagcacgcatctaaatactaggctcatctaagatagttccagtaatagatacctatggtgggtatacctattaacctaaaatcaagttctagttaattactctagaactagcaataagaacaatcaaagatgaagaattctaaatatattatcctaacagggttttcgatctactaattcatctaaatccctaattgagaatccctaaacccaacaagcgaattactcagacatgattatcaaagaacaaaacatagtctaaataagaaatcaataatgaatatcagaagagaatagagtaagaaatatcttctctaaagggagtctccacagggttttgctcccaaatacaaaagagataaggagattagcctcttccagcttagggtctaaacattgacctaaaaactatatatatacgtcttaaaaacgtgctgggccttcattaaacataggagaaagttctgggccgaatttggaaatcttcaaaacttcaataagttgcatctttcaattgccgtcaggtattggtgtcgctcgacacctacgcgctttttagtttccagatttcttcagcagcataaattctctgttttaatccagaatgatccattatctccaaataatcccaagcatgtaaagacctgaaaagaactagaaaagactctaaaaataacaaatagattctaaaacctatacctaaatcatagctaaaagcagtaaaaatagggttatatcaactcccccagacttagcttttgcttgactattatcagacaagaattggaacttgaaccaatggagcagcttgtagccgaggagcagcttgtaccggaggagcagcttgtagcggaggaagctttgggggaaccaatcggtcctatgactcgttcgaagattagacttctccaccaagccgttaccggacttcttaaccacttgggcaagcatccaaatgaagtcatacaaaccgtttggaactcgatagcagctcaagacaattggtaatgggctaagtgttacttaggtactctttttcccttataagattttgccccaatgggttttccttagtaggtttttaatgaggcttgagtaacacttccaaatcccccattatcaatccggcccaggcccactaagacaaccacgaatttaaaaggccaagggtctatttttgttcaaactttcatttatgatttctccttttacgagttgtcttatagtttgttctaagactaacttttccccttctctgcttctctatttaaactctcgtatttccttattgtaaactcatctatctttttaatctcaaactcttttaagctagatcaaaggtaaatcaaaggccatccgcatgctttgtgtgaccattcgctccacatcctttggtttgagtgatctcatgatctcttagatgcaaagtctatcctctactcaacctcaagagtgtcgatcttagggaattcatattaagtggtaacagagcacattctaaatttgagtactctatcctttcatcacttcatcattttgtttcattctattcatcatttcatcacctcgtttcattttgtccgttcatcttctcaattgtcttttcatcttcgctgtcattttgttttaattttaataaatactttgcttgcgataaaattgcgaaatcaattgcatctgaatctaggacaagtctagtattttataaaatcgtttctggaatttttgagcatgatttgataatttattctgttcggtcttcttactctattcttagtaaaacgtttagtattctccttgaactagtgactagtttagtgttgtttgtttgtagaaaatggtgacgaccgaatcaagttcggataagagtgttaacaagcaagccatcattgatgctatcacgttacaaatggagaaaataattgatgccaagcttaagccaatcaatgatcagcttaaggcgaagggaaagcacccggtgaacaagttatcatctcggaaggagagcaatctcgaaaagagatggatagtcgaatcaaggacccaagaaaggacctag

SEQ ID NO: 164966 - DNA, 1038 bp, Arabidopsis thaliana landsberg
atggcggattcccaaaggttgtccaccgcttccggcgtcaaggacggccaaccaccatggaagaagaagaagctgtcgaacgatacgacttcgaatccgtcacttccatatgatgtaatactgatcatcttagcccgcgtctcgagatcgtattacacaaatctctccttagtctccaaaagcttccgatcaatccttacttcaccggagctttacaaaacccgaaccctcttaggcaaaaccgagaattttctctatgtttgcttacgcttccctgatgaagctaatcctcgctggttcactctctacaggaaacctaatcaaaccctaaccgatcacaccactaagaagaagaagaagaagaagaagaaggaggagaagtcaagtgttaatctgttggctccaatctcaattctcatcctgtggaatggtcagctatcatatctgttgatcattatctctacgccattagtgcagacatcgaaaaggctccgtactctaacgttccttacctagattgtcgaactcacacttggcatgaagctccaagaatgagattggctcacactaatagtgaatttgaaggaatagtgtatttaccaggaagctttgaaagtccagattctttgaactgtgttgaagtgtacaacacaatgactcagacttggaaaccggtgtcacccgaaaaacggatgttcaaattggaaaatttggaaaaaaagatttactacaagagctttcatttagactctagggctgggaaaggtctatctttgagctataaatcgaagcatttgacatgtggattggtagtattggatacggtggattcatatcttcgctcttcttgtatgatagagaatatagcctatttttatcgtaaaggaaattttatttggagaggacttgacggtaagatactggtttacgggaaaatagagggtttagaagggctacctaagttttctagatattctagtgttcaattggcggaatatggcgggaagctggtggttttgtgggacaagtatgtacttg

SEQ ID NO: 164967 - DNA, 3799 bp, Arabidopsis thaliana landsberg
tgtctgatggagatatgtaattaaaccatcaacaccaaaaagtccgaagaaatatataaaattttgctgccattggtcagtccaaacttcaatgggtctgttgtatctcatatgatgtttcctaaacaagaaatcgctatttctcccatagtgaagaaacatccataaattttacaagtagaataatcttcatcattgcattaagacatttggaaacctctgttttgccttctttgttggtctaactttggtgcccaaaagtcaagcttaggaggctcaactaccatttacttgttatcggcaacatgtgaagcagagcttcacgctggaccaaaagggtatggttatattagtatcgccttgtataaatcagagagaaattctagtcatatttctatggaaaaagactggttttcatgaaaattcaagcatataggaacttttacttgcaattctttctgaccaaatcaattcttatcatgtgttgtgcagttcatagatatcacatacaaggtgacaaccaaaggaatgacatcttcatcagaaaagagcatcttgaatgggattagtggttcagcatatccaggggagcttctagctctcatgggaccttctggaagtggcaaaactacactacttaatgcgcttggtggcagatttaatcagcagaacattggtgggtcggttagctataatgataagccatattctaagcacttaaaaaccaggtaataagaagattccaccttggtctgttgatgaatatgtagatgtatatataagtttacagttgacacgggaaagcaacatggcaggatcggatttgtgactcaagatgatgttctgtttcctcacttaactgtaaaagagacactgacctacacagctctgttacgtcttcctaaaactctcacagagcaggagaaagaacaaagagctgctagtgtgatacaagagcttggattggaacggtacattatcatctattatactaccgtctaacaacttaggaacttcctctgatggtcaatctaagtcttaagaaggaacctaattagaagattgtgataattgttgttttaggtgccaagacacaatgattggagggtcatttgtgcgcggtgtctcaggtggggagaggaaaagggtttgtattgggaatgaaatcatgactaatccttcacttcttctccttgatgaacccacctctagtttggactctactaccgctcttaagattgttcagatgctacattgtatagcaaaggtaagaactccactctttacagctccaaatcatgtttctttatggatttgaccatatctaaatttttacttgttggcatgcaggcgggtaaaacaattgtaacaacaatccaccaaccgtctagtaggctctttcacagatttgacaagctggttgtactcagcagaggaagcttgctttactttgggaaagcatcagaagcaatgtcttatttctcttccataggatgttctcctctactcgccatgaacccagcagagttcttgctggacttagttaatggaaacatgaacgatatctccgtaccttcagctcttaaagagaaaatgaagatgtgaaattcttgcagcgagataggatcttccaagccagctcctacagttgtatatgaggtgagaaaaagatctcctttacatatcaagaattcgtttagagctttatgtaagaaatgttaaatgtgatgttgaaacacagtatcttgaggaagcttacaagacacagattgcagttatggaaaagatgaaacttatggctccagttcctcttgatgaagaagttaaactgatgataacttgccccaaacgtgaatggggattaagctggtgggaacagtattgtttactttccttaagaggaattaaagaacggagacatgactatttcagctggttaagagtcactcaagttctatccactgctatcatcttaggtttactctggtggcaatcagacataacatcccaaaggcctacaagatcaggtagaaacatgtttatggtctagaaactagctgtaattggttgtctgccttaaaagttggaactctctctgcatctcaggtagggctactcttctttattgctgtattctggggtttctttccggtattcacagcgatcttcacatttcctcaggagagagcaatgctgagcaaggaacgagagtcaaatatgtatagattaagtgcatattttgtggctagaaccacaagtgacctgccacttgacttgatattacctgtgcttttcctagttgttgtatatttcatggctggattgagattaagagctgaatcttttttcctaagtgtgctcacggtctttctatgcatcgttgcagctcaggtacgtacataaaaacaaaggacatgttgaacagaaaatgctaacaagtaacaactaatgatgatgatgttgttttagggacttggattagcaataggggcgagcttaatggacctgaagaaggccacaactttagcatcggtaaccgtaatgactttcatgctcgctggtggctatttcgtgaaggtaagaatactcagcttcaaatttcaatattataaacatgtatgggtagtgattgacagactttataaatatggcagaaagttccatttttcattgcttggatacgtttcatgtcattcaactaccacacatacaagctccttgtaaaggtacaatatgaagaaatcatggaaagcgtaaacggggaagaaatagagagtgggcttaaggaagtgagtgctcttgtagccatgattattggctaccgtctcgtagcctacttttctcttcgaaggatgaagctccactcttcaacttgagtttagagacaaaaattgttcatttaccttgtattgattgcttgtctacacatgtatcttacttagtttggaatgtataacaaaataacgtactatgatcaaaatttaggtttccaaatacatgatgctatcaatatggtcttggtttggcatgtatcttacttagtttggaatgtataacaaactttgagaaactgattggtcttgttaaagctaccaagtaatgatggtctaatttcaatccttcgtgctatttcattcctctccatatcataaaggaaaaagcgtgcgtgttgattccgtaagagatttgcctttctcatcaaaaccttaccactgtctctagaggcacccaccaccaaccggtctccatggacgaaattcatctgagaaataggcaaaacaaaagtcttcttgttcgaccactgactcttgtcggcatcttcaaggacacaaacatccacaaagccatcacttgcaagacgcatatattgacaagtagcaacttttccttggtagttcatgtgaatggtgcgtgaccagttctcaaagggtaattcaatcaaattgaactcttcagaacttaagtcaaaactcataaggacacatctatttgcatcagtccgagcactataatacaaaacaccatcaatagtcatccctcgtgagtatggatgaaaaggacgatgaggagtgtggtggcttttagtgtttctccatgaagctccaacaccaagtaccaacacttgatgttctgatctcacaactgtctgttccttggtgacctcccaaaataagctaagcactttgtattcatcatgaaaaggatcatgtccaaaccaattccacacattagtcttagatctcattatgggcaattccacaatctgccttgtgctagggttacgaaacttgcactctcg

SEQ ID NO: 164968 - DNA, 2328 bp, Arabidopsis thaliana landsberg
gtgtatgtatgcctaggcaaacaaggagcaacagaaggagcttatcacttgtatgttctggacttgggaaaacttgaacgcaccaaccgaaaaactcagagattagcaatggttgatagagtcatcagagctgatgcagaaggagttttgagagatgaggatgggcaagcctacaatgaaggttgttagagattggatgaccatagactcaacctacctgaggacgtcgatgcgaatcatgcgcgtctcaacgcgcaattagctgccagagacgcagcagggctcggtgtcgatcgacacctttgggagcggaatggagaagcaattggtgtcaagcgacacaaccacgttgtactcttgggaatttcaacaggctagacttgttatatgctaatcagtcagtgatcgtacccccgcctttctagaggaacgactatgagctgaagcctggatactttgcctttgttggccagcaccctttctatggcttgtctcatgagcagccaatggaccatatcgagcgttttgaggacctagttctgagcatcaaagctaatggagtcgcagaggactacctactatgcaagctctttccttattaacttgttggggaagctgcttcttgggtgaaacaactaaaagcaggttaactcaagacttggagaagcatcaagatagcattcttgaacaatttctatgatgatgctaagtctgaggagctgagaaacaagctgtctaccttcacccaagatccagctgaagctttcaaagcagaatgggttagattcaaggagtatcaacgagattgcccgcatcacggtttcagtaaggtacaacttttggatacctttttcagaggagttgattggagataccagatggctctagatgcagcgagcaatggtaacttcaacacacaatatccggctaatgctaccgctttgataaagaaccttgcttgcagcaacagtaccaagaatgccgactttgataggaagaagattgttggagctgtttcaggaaataagatggtacaggtacatccgtacatgctaagctggattcggttcataacttgcttacagggaagaatcgtgttcactttgcagctgaagatgagaccattgagcctgaggctgagtcagaagtcttctacatagatggccaaggttacagaaagttttgggcagccacagggaaactgatgaagctaatttggtgacaagggacatcagagccataatgttgcctaaggtcagcaaagagaagccaaagagagtggacattgctaagtacatccgtactatcattacagatcaaaccactgagaagctcctcgatccaggtagtttcgttcttgattgttctatctttacaaggaggttcagccactccttgtctgatctgggatccagtatcaacctcatgcctaagtctattgtagagagattgagcatgactaactataggccaacaatgatcactctcctcttcatggatctctccaaatgaatccctaaaggaatccttgaggatgttcccgttaaggttggtaattgcttaatcccttctgattttgtggttctggattatgataaggaatccaaatatcatatccttggaagagctttcctagctacagctggtgctaggattgatgtaaagagaggtacagtgtctcttaacatttgtgacttggagatggagttaggcagggatggtacaaagttaattaggcttatcagtagcatgatctccacccaggacacacctcctcagactgctcagaatccccaaatagagccaccaaaaacgctccttttagctcagctcgcaaatgggagttgtagagcaacggtgtcgatcagtttacatgagtatcgatcgacacctgtagctgcccataccagatctttttacacaccgctgataataggtttttaagatcaattaatcctaaagcactatcatgtcgttgtagtactgaaggttgtcaatccaaatgggtgtgatgcaaacagatgagatgtgatcagaagtcactaagtcaagccaagcaataacagttttgaggtttctaacaatcctaagcgaacatgcagaaaacagaaacaataacagaattactaaaatcactcgaccacaacaagctgatgccagaagcaggatgtggtcgagtaacagacaggaaatgaaacagctatactcgactacacaatctgttgccagaaactggatgtggtcgagtatgctggtcgagtaacagacaggaaacgagacaactgtactcgactgcacagtctgttgccacacactgggtttcgtcga

SEQ ID NO: 164969 - DNA, 1053 bp, Arabidopsis thaliana landsberg
ttaggcagagggattacggctaccaaactagcattccttcaggctagagacacacacgtgcaaaagctagaagaaacacaagccgaattgcttagccatattctagacttgaaaaatgtggtcactgacttagctagaaaaaaggtaagtgatgttagcagaggggttaggtgtcagctgctagaatggggttcatcaaaagatgttgttgtcgatgaaggagaattctgctcgtctgatcctttgtacctgattggtcgcattagacttggtcctaacgcagcagttgttgtagtcacatctataattgatagtgattcgccactatggaggcctaccccaaccatgttcacacttggggaagctttgcgactcaaaattcattggcaagcggataaagtgattttggacaacttatcaaaatctccaattataagttcttattcaaagataacccaggtctcaggagtttacttactttattctcaatacttgcaagctaaatttcatatgctaatatttgtgaatcacttatagggtacaatatcagatgagtcagttacaagatgcaaagtttatgattggaattctcatggtgatgttattgctgagggtattttgtgttccactaatccggaccaaatgatcgataacattcctttgggaaaaaatgcagtcattgtgaagattgtcaatgttctgaaggaggcggcttatgtgtggaggccaacacttgacatatttgtgatccctgacgcagtagatcatgaaatcccatggccaattaaaagcttagaaatcatcattcatactgcagagaattcaacaatgataagatcgcctagggtaagttttgatgttgcaatgacgtgtaatttaaatttagtattgagattctgatgagtttgtttttgatgagttagactacaagtaccaactctagttccagcagcaaaggaaaaaagcatacgaagtgcatcctcttggattgttacaattctggtaaaactgttgcagagggccgagtttgctcgacggatcctgcaactcttc

SEQ ID NO: 164970 - DNA, 5637 bp, Arabidopsis thaliana landsberg
atgaagaaagaaactcaaaacctccaatgtatcccactagtgatctctgtcttatctctgtttggcgtctcatcagcaagaaaacctccatatctgtgtaacagagtctgcggaggaatatcaattcctttccctttcggtatcggtggaaaagaatgctatctaaacccgtggtacgaggttgtatgtaacaccacaacctctgttccgttcctctcgaggatcaacagagaattggtgaacatctatcttccagatcctactgagtactactctaacggagttgttcacatcaaaggtcccgtaacttcctcagggtgttctaccggaacatctcaaccacttacaccgcagcctttaaacgttgcaggccaaggcagtccctatttcctcacggacaagaacctcctcatggccgttggttgcaacgtcaaggccgttatgatggatgtcaaatcgcagatcatcggttgcgagtcaagttgcgacgagagaaacagtagcagccaagttgtaagaaacaaaatctgcagtggtaataaatgttgccagacgaggataccggaagggcagccgcaagtaattggagtcaacatagagatccctgaaaacaaaaacacaacagaaggaggatgcaaagttgcatttttgacgagcaacaaatattcaagtttgaatgttacagagccagaaaagtttcatggtcatggatacgcggtggtcgagcttggatggttctttgatacttccgattctcgtgatacacaacccataagttgtaaaaatgcgtcagatacaacaccgtacacttccgatacgaggtgtagttgctcatacggctacttttctggattcagctatagggactgctactgtaactccccaggttataaagggaatccgttccttccaggtggttgtgtaggtaagatattggtgttcttctgaacgttatcatatcttgtggcctgatataagattgtcgctaattatgaaacaaatttgcagacgtggatgaatgtaaactagatataggacgcaaccagtgtaaagatcaaagctgtgtgaatctgcccggttggtttgactgccagcccaagaaaccagagcagctcaagcgggtgattcaaggtaaaattgaactggattttattactatcttgagcgtcttgcaaaacgttctgttatttactgtttggttttttggtggtgcaggtgttcttataggttcagcactgttgcttttcgccttcggaatcttcgggttgtacaagttcgtacagaagcggaggaaactaatccgaatgaggaagttcttcagacgtaatgaaggtatgttgttaaaacaacagttagctagaaaagaaggcaatgtagagatgtcaaagatatttagctcgaacgagttggagaaagctactgataactttaacacgaatagggttcttgggcaaggaggtcaaggtactgtttacaaaggtatgctcgttgatggtagaatcgtcgcagtgaaaaggtcgaaagccatggatgaagacaaggtagaagagtttatcaatgaagttgttgttctagcgcagatcaaccatagaaacattgttaaactcttgggatgttgccttgagacggaagttccagtcctggtttatgagtttgttccgaacggtgacttatgcaagcgtcttcgagatgaatgtgatgattacatcatgacatgggaagtgcgccttcacattgcaatagagattgcaggagcactttcgtacctacactcggctgcatcttttcctatataccacagagatatcaagactaccaacatactactggatgagaaatatcaggttaaggtgtctgatttcggaacttcaagatcggtgaccatagatcaaactcacttgacaactcaagttgcaggtacttttgggtacgtggatccagagtactttcaatcaagtaagtttacggataaaagtgatgtgtacagttttggagttgtccttgtggagctcttaaccggagaaaaaccttcctcccgtgtccggtctgaagaatacaggggccttgcagctcactttgtcgaagccgtgaaagagaacagagtgcttgacatagttgatgatcggatcaaagatgaatgcaacatggaccaagtaatgtcagtggcaaatctagctagaaggtgtttaaaccgaaaagggaagaagaggccaaacatgagagaggtttcaattgagctggagatgattcgttcatcacattatgattcaggaattcatatagaggacgacgatgaggaagatgatcaagccatggaactcaactttaacgacacttgggaggttggtgtgactgctccagcctccatgtttaacaatgcatcccccacgtctgatgctgagcctctggtgcctttacgaacatggtaatgatcaactcaaaacactgcatatgtatactctcatctgatgtaaactttcgataatgaatatttggttttcaccatgtaatataacacacaaattgcattatattttcaagaagaaaaataatgttttagtacaagaacaataaatggggcttcaaccttcaccaataacactctagagaaattaagtttccctttggagatagctttaacatgttgtaattgacacattgcctttgtctttcccggtcaaaccatagcacaaagagtgcctagcgcctaaagtaaccgcaaacagtacagagtaacgctccaattctgcctcgcttttgctagtcatgccttgtttccaacattagcatctatcagcttgacctgagacgtaacaaagatttacagccgcacaattttagccaaataggtcttgatggtcagtatatttctgctccaacattcagcagttgtgttgtctcttcgactttcaacacacaagcagagtactctgttctcaaaacagagcctttcagtggtgaggttgttcttcctgtttttatcctaactccggattttcacttagctagagtagaagtccagaagttgattctggggactttgcaggtcaactttcatatggtctgcagaaaaaatcgatttttgtaatccactgttcattcattaatttaaaaaagaaaccatcagccgtagagttgattttcaatagtattttattgttttgcaacttgcttcacgcttctttctaaacttctcttgactatttcatcagacgagggcaagtatttaacatttttctttaaaagagcagattgatcagaccaaagaaaaatagaaacagaattatgaagacaaaaacttacaacttccgttatattgtagcgtctgtcctaactctgctcatgaatggctcatgagcagcaacacctccaaatagtaattcttcaagctcttgtaacagaacctttggaggaatctcaatcccgttcccatttggaatcggcgggaaggattgctatctcaatagttggtacgaggttgtctgtaacagcaccacttccgggtcctgcaaaactgttcctttcctcactaggatcaacagggaagtggtgaacatatctcttccaaaatctgacttcttcagcccttacggagtagttcacatcaaaggtcctgtgacttcgttgggttgttctagtaatactagtcaaggacttcaaaaaacactaccagatttgaacatcacaggcaggggtagtccatattttctaacagatgagaaccgccttgtggcggttggttgtggtacgaaggcgttaatgaccgatatagaatcggagatcttaggttgtgaatcaagctgcaaagacacaaagagtaatgaagtaggtaactcgctttgtaacggttacaaatgttgccaagcgaggttacccgtagagcgtccgcaagcagtaggtgtcaacatagagagcaataacgatacaagaggagaagggtgcaaagctgcgttcttgacaagtatgaagtatttcccgtcaaatatcaccaaaccagaatggttccaggccgatggctacgctgtagtagaactaggatggtattttgatacttcagattctcgctttaggaaccctttgggttgcacaaacttgacccgttctagtggctcttacttcttaaccgacatttgcctttgccgttacggttacttttccagaatgagttatagaagctgttattgcggcagtggctacagaggaaacccatacatacgaggtggatgcatcggtaagtgcctgtttttcttctgtagtcttgaccaccaatcagaaactcaataattatgatttatgtatgtagacattgatgaatgcgaagtacccaacaagtgtggagaagacacttgtgtgaacatggctggaaggtacagttgcgtgccaaagataaccaagcctgccaaactcgctcatgtgcttcgaggttagtcaaaattgcaccttgtgtatacaagaaaacaaacaagaacaaagaatttagtgtaccttaacttttcctttgttgttgcaggggttcttataggtttgttgggacttctgttttttgttatagggatttttgggttatacaaatttatcagaaagcgaaggcggatcatccgtagcatgaagttcttcaaacgtaatggaggcctattgttgaaacaacagttaacaacaaaggacggcagtgtcgagatgtcaaaaatattcagctcgagagagttggagaaagccactgataacttcagcatagatagagtgcttgggcaaggcggtcaaggcactgtgtacaaaagaatgcttgtagatgggagtattgttgcggttaaaagatccaaagttgtggatgaagacaaaatggaagagtttatcaatgagattgttcttctgtcacaaatcaatcaccgcaacattgtgaaactcttgggatgttgcttggagacagaagttccaatcttggtgtgcgaatatattcccaatggagatctgttcaagcggcttcatgatgaatatgatgattacatgatgacttgggaagtgcgacttcgcatagccgtagagatcgcaggagctctttcgtacatgcactcagctgcatcttttccaatattccatagagatatcaaaactaccaatatactgttggatgagaaatacagagcaaaaatatctgatttcggaacttcaagatcggtagcgactgatcaaactcacttaacaacattagttgcaggaacttttgggtacatggatccagagtacttcctgtcgagccaatacactcacaaaagcgatgtatatagtttcggtgttgtgttggtggagctcataacgggagaaaaaccaatgtcacgtgtccggtctgaagaaggcataggtttggcaacttatttcctcgaggcaatgaaagagaacagagctgttgacataattgatattaggatcaaagacgaaagcaagcaagtaatggcggtagcaaaactcgccagaagatgtcttaatcgaaaagggaataagcggccaaacatgagagaggtttcaataaagctagagaggatccgttcatcacccaaagatttagatgtccataccgaaaacgaagaagaagaagaagaggatcaacttatggaaatcaatagaatatatgattcttga

SEQ ID NO: 164971 - DNA, 1823 bp, Arabidopsis thaliana landsberg
acttttgaatcctcacattcttgtctccctccatcttttgtagttttccctgggtgctataagctctgaaactcttttaggaaggtacattttactgtatttcgaaaacatataacagtgtgccacactatcctcttcttgactgtcattggtgagatttttgaacagattcatccgtgagagaaaagagagatatcccggagctgaggtttcggttgcaaccaagtttgctgcattgccatggcgatttggtcgtgaaagtgttgtcactgcccttaaagattctctttcccggcttgagctttcatctgttgatctctatcaactgcattggtatgcacccctaattcatgttggagtaaacaacactagaaggtaacaatctcactattttcttaattatatttcaggccaggactatggggaaatgaaggttttttcttaagagcagcactgaatctacttttaactagagttcttgtcacttttggtgattatatcaaatccattgacattgtgagttatgtttttaggatatcttgatggtcttggggatgctgttgaacaaggacttgtcaaggctgttggtgtttctaactacagcggtatcatttcaatctgttttttccttctcacggatgcatatcttatgaactttcaaattcattatacttactgttgtgcgatttttcagagaagcggcttcgtgatgcttatgaaagactcaaaaagagaggaattcctctggcctcaaatcaagtcaactacagtctgatatacagagctccagagcagactggtgttaaggctgcttgtgatgagcttggagttactttaattgcatattcccccatcgctcaaggtaatctgcctttatctcctttgcgttgtgttcatgtctatcgttctctagaaaagttgcatcaggctcttatagtattgacgcaaaacaacctggctaatgaacacatacattttccgttatttgctcttttgtcttttttccaggtgctctaactggtaaatacaccccagagaacccaccctcaggtcctcggggtcgcatttatacgcgtgagttcttaacaaaggtaatagctttcgctgcatatatctaagttatttaacacaggcgtgtatgtctgcaaaaccatagttacatctgaataaccctcgagtcttctaagaaacagatttttggattttgataacttgtatatctcactgttataaacctgccgattttctcctctaatcctgcttttttcttagtaagttctgttttgagacaaagtatacacttttatacaaaacacaacaccaatcaatgtacctatacagaaattatcaaaaggtagcataatagtgccaggtttcttcactaactttgacttgtgacgttacagcttcaacccctgttgaatagaatcaaacaaattggggaaaactacagcaaaactcccacacaggttctttcccttttccttatgcactctgtttttctttttccctgtccaaaaacgttaagaaaaatacaaaagagtaattgtgtgatccatattaagctatccaagtgtacaccctcgattttgcatcaaatcatatgccttcttgttttgttgtgttgtgctgtgcagatagcattgaactggttggtggcacaagggaacgtgatacccatcccaggagccaagaacgcagaacaagccaaagagtttgctggagcgataggttggagtctgacagacaatgaagtgagtgagctacggtccctggcctctgagataaaacccgtcgttggtttccctgttgagtatctctga

SEQ ID NO: 164972 - DNA, 369 bp, Arabidopsis thaliana landsberg
  unsure (1)..(369): unsure at all n locations
aatggctcctatctaattatagaagtacaaaaaggttattgccaacttcactttgtgttacggaagaaatggtaaatggattccatattgcacatggaggaatcgcttacagtcttgcagattcagcacttgcatttnnnnnnnnnnnnnnnnnnnnnnnnnnnntaagcactgaaacttccatttcgcacatccgttctacaaaggttggagacactctcacggcaacttgcacggaaattaatcggggaaaaagactaggtatttaccaagtacttgtaacaaatcaagaagataaaaccgttgcgcattttaaaggtagtgtgatgattttggatacagattggggttgataaactcaatgatgcg

SEQ ID NO: 164973 - DNA, 1686 bp, Arabidopsis thaliana landsberg
  unsure (1)..(1686): unsure at all n locations
aattattcttcgaagtcattctctttggtcactttggtgagaatctgatcggaaagagagattatatgggtcattgcttttcgttaccgtcttctcaatcggagattcatgaggataatgagcacggtgatggaaatgtggtgtgttatggagaagagttcggtttagatcaagaccttccggttcatcgactcggttcggtctgctccatacaaggaaccaaagtgcttaaccaagnnnnnnnnnnnnnnnnnnnnnnnnnnnnnnttgacattatttttgctatatattttctataaatcattaccatagatgaccaacaaagtttaggggtagattcaaatgcgcataacgtaaaatctgtttgaagtgttagtctcaattttttgtgtgttacttgtgaaatatatttgaagttctttgatatcaaaaacataatgaaggattttcaattcatataaactttatatataaagaaatgtatgattgcattaaaattacattcatttcacatgacatttctcacgcagattgaaaaatgtatttaaagtttcatatatcttattattgagtagaattaagtgaactgattagatttaaatagtagaaattgtttaattttaatcccgtaggatcatggaacaagagatacagagctatgtggagtgtttgatggacacggcaaaaatgggcacatggtgagcaaaatggtgaggaatagattgccatcggttttgttagcactaaaggaagagctaaaccaagaatctaatgtttgtgaagaagaagcttcaaaatgggaaaaggcttgttttactgcctttagactcattgatagagagcttaatcttcaagtctttaattgctctttcagtggctccactggtgtggttgccatactcaggtacattattttctctgtttccccgcaacttttaaaaagtgtttgaatggtggtaacggaccattcaattctgtggccaacagacaagattagtgtttcttcttctgctgcaaagttttgttttttcttcgtatgcaccaatatagacctaaacttatgaatagtgaacaaaaagccaatgtctagccaaaaaataattattcactttttttttctgctgccaccattcaaagcctaaattttcactagttggagcttactggattttttattattttgttttggtaaaatgttaaattgcttcagggagatgatcttgtgatagcgaaccttggtgattcaagggcagtattggggacaatgactgaagatggtgagatcaaggcagtacagttaacatcagacctaacacctgatgttcctagtatgttttttttactcctttttttggctaaggaaaggttttattgttagatggttgatgatatttatttagcgagttctagcgtttcaggtgaagcagagaggatcaggatgtgcaaaggtcgtgttttcgcaatgaaaacagaaccaagcagccaaagggtgtggttaccaaaccaaaacataccaggattagccatgtcaagagcttttggagatttcaggctcaaagaccatggtgttattgcggttcctgaaatctctcaacaccgaattacttctaaagaccagttccttgtactcgctactgacggggtaatagcacatatccatcattcaaatatagatttttttgtttt

SEQ ID NO: 164974 - DNA, 632 bp, Arabidopsis thaliana landsberg
gaaacgaataaagatgttgacgcagatgcagaattcaaggtcaactggaagcgagatgcagaattcaaagtcaactggaagcgagtagctatcacgagcatgtttggatttggttttgtcggacctgttggccacttttggtttgtttccttctgatctcagatcatttagttatagcttttcctcgtgttacctctcacataaactagtgacactgaatcagatactgataaagaattgtctatggtggtagatcgataaacctgatattgttctatttgcggttgcacaggtacgaaggcttggataaattcataaaactgaagcttcgatatgtaccaaagtcaacacgttttgtagctgccaaagttgcaatggatggtcttatctttggacctatagatctactggtgttcttcacatacatgggattcgccacaggaaagaacacagctgaagtgaaagaaggactcaagagagattttcttccggctctagctcttgaaggcggagcatggccacttcttcagattgcaaacttcagatatgttcccgtgcaataccagttgctttacgtcaacatcttttgcctagtagacagtgccttcctctcatgggtcgagcaacagaag

SEQ ID NO: 164975 - DNA, 652 bp, Arabidopsis thaliana landsberg
ttatacactacaagaaaacaagcgatttgcgaggacaatttgcgatggaaaaaatccctcgcaaattgctacagatttgtgagacatttgcgagggagagaagacacgtcgcttttccgtcgcaaattttgcgagggataattccctcgcaatattgcgtgaaatttgcgaggaacttgcgaggacgacaaaattcctcgcaaagtcattgcaaattgcgagggacttgcaagtacaaatattgttctgtgggaatttttgcgacgaaacttacaaagatcgtgatttcgctggatggttaaaattatatgtaagtaatatttggaaattttgatatcttaatgacttatgttgaaatgataaacttaattaaaatctactttatgtaggttactaacggatgtgaaaatgaacttttactactttggttgtatgagatcgttcaagaaccaagatctaagatcacaaccgcaaaatcattcgtggtcgatgtcaatgcaaacaagacttatgcaaagttcaaaccatttatcctagcatcacaagctttctatcttacccgcgtgtgaggcctaggcgtgaagtgtggttatcggttattaaagttaactccagaggccgtatagtcggcctagttgatgatgttgtgatg

SEQ ID NO: 164976 - DNA, 562 bp, Arabidopsis thaliana landsberg
  unsure (1)..(562): unsure at all n locations
tgcttccggaaatcaaattgcagcgtgaagtcgatgtcgccgcgctgtcaccacttcttcgaggtatgcttctttccgttgcctatgctgacggtgagggtggcatcggattaacagccaccggcgccatgaaccgcaagttcgtgcattgggccgctgtgcactttctctggccagggttcacagctgaggatctctacagcannnnnnnnnnnnnnnnnnnnnnngacatgccaccgctctgggtcgtgcgcgacatgacccgtcatctgaagcttcttcgccggaaaaaggatgtgctgctgccaaccagacgcggccgggagttcctggtgaacccgcaaggcttcttcgatctcgtcgccacggattatctctattcctatatccacgccacggagcgcaaggaggaggtccaagcgcggttacgctggtggcgcatgttcctcaaccttctcaatatcaaggccagagaagggtgcacgccattggagcttgtgaagatcctccacccagacttcgagcccctatctgagaccgaaatgacactggaagcctggga

SEQ ID NO: 164977 - DNA, 764 bp, Arabidopsis thaliana landsberg
tttccgccgggaggcgaatggactgattctattttccagaatctgttttgcatattaaatgctaagctggtgcatccccatttggatattgatgggagtataggaccatggttgctgtggagattgtgaaagcgcaaaaatgactatatctttaaggggaacgagtactcaacgcatgacgttgtatgacgagcgcaggaggactaggtggaatggagactgccaaagcttactcttagcaaaacatctcaggcacttgacccagtgcaatcacgagttaaatggcagccgccacctccaagatgggttaagtgcaacatggacggtgcatggaataagataacttgagctgtggtattggatgggttcttagggaccatcagaacacagtgctttggatgggtgcaaggtctctaccaaaaactgaaaaagttctgacagttgagctggaaggccttagatgggcagttttatctctgtctagacttagctatggaaaggtcatattcgaaactgactctcaacaattggtatctttgatgcagggagaaacatttagtaatcacctagggctgattattgaggatattcaacagttgcttcaaggttttggggagaccaaagtggtgtttatcaaacaagaaggaaatagcatggcggacagaatagctaaggagtctttttcttttgggaatcatgattccaaattatattctgtaatgccagagtgggttaaactctctgtggaaagtgataatgtgtaa

SEQ ID NO: 164978 - DNA, 1278 bp, Arabidopsis thaliana landsberg
aataacaagagagcaatggatcctcccagccaagcgaacggagagagtgccaagatcccggacgaaagcgaagaagaagcttatttgctcttagataaagtgatcccaccagtccatctcaaggaatcagcaggtgatagatcttgttgcatctatagaatccctcacactctcaagcaagtcaacgacaaagcttatgcacctaagatcgtttcaataggtccttaccaccattcgagtgataaacaacatctcaagatgatagaggagcacaagaaacgttatttggagatgttcgtgtcaaagactaaggaaaatggtgtgtatttaagtcacttagtcgatctagtctcgggattggaacagaagataagagactcctactctgagaatcttgaatttagtcaacaaaagctgatcaaggtgatgcttcttgatggttgtttcattcttatgttgttccttgtggtttcacaaaaaattgaatacacaaatctcaaagacccaattttcaagctacgatggatattgccaacacttcgaagcgaccttcttcttctcgaaaaccaggttcctctctttcttcttaaagttcttttagagacatcaaagttagctccatccactagcttaaacatgttggccttcaaattcttcgactactctataaaaaaaccagaagggttctgggagaaacacaacaatcttcgagcaaaacatcttcttgatcttattcgtaagacttttatacccgccccgcctccaccaaccaatccaaggcaatgttgtatcaatattttcaatgttcctagggaatattcaagaacagagacatcaaaaaatatctgtctcggtaagataagttgttcaaaggagacatctgtagcgcaaccatcatcgcctcctcctcttcctcgtcgtccttttcttgggctaattgtctcagcaagaaaactacgacttaggggaataaaattcatgcggaaggagaatgtagagacaccgttagacataagtttcaagagtggtttggttgaaataccactactagtgtttgacgactttatcagcaatcttttgatcaactgcgttgcctttgagcagtttaatatgagctgctccactgagattactagctttgtaattttcatgggttgcttgatcaacacagaagacgatgcgactttcttaatcgagaaagggatcttagagaactattttggaacgggtgaagaagtttctttatttttcaagaacattgggaaagacatctcattc

SEQ ID NO: 164979 - DNA, 868 bp, Arabidopsis thaliana landsberg; identical to SEQ ID NO: 30329

SEQ ID NO: 164980 - DNA, 1974 bp, Arabidopsis thaliana landsberg; identical to SEQ ID NO: 38531

SEQ ID NO: 164981 - DNA, 368 bp, Arabidopsis thaliana landsberg
  unsure (1)..(368): unsure at all n locations
ttcattgccagaatgaaaaccgccgagcacaaagtgtcgcaccttgatgaggtcagtgaccgattcatgtacttgtctcaggcgagacatacgcgcactgactcgaggtcctcgaaggtggtggagctctggatagagacaaggagtaggttgaagagtggttggaacattacgccgatgctgaggcaaatcctaatcgcttcatggccgagctgaaagattacctcaaagctcgagctcccgagtctgctcctctgagtccgggtggtcataggtcggtcgagtnnnnnnnnnnnnnnnnnnnnnttacagatcaagccggatcgctcctccctgccaaggatgaccgaagatttgaagatctctac

SEQ ID NO: 164982 - DNA, 1121 bp, Arabidopsis thaliana landsberg
caactcgcatcgtgtatggctcgccttgctcaagtatctgaaccaacaaagcaatctcatgatacatcagctctattgatgtaactatccatctgtgataatccacaagaccctaatcaacaagttgcgcctactcatcaagaccaaggtatatatatacatgctcatatcgatctttgaatcttttttggttgaaacaatgttaggatatattgaaattatgtgcaaatttcatatcagaactaaatctcaaacttaaaaggttattattatactgtttatttcaatactcatttaccaaaagaaaaaacgattaggctattaccaaaatgtaatttttaacatggagattttgttggtagtatatggtttcagcaccaatattaggtgacgatatatatttatacacataaactatgagcatatacaaagtttacatactatgcacatgtatgagtagaccataccaaagattttctgatttcaacttttgtgatttcaataaaggggacttgaggaggagacattatagaggtgtaaggcaaaggccatggggaaagtgggcagctgaaatccgagacccaaaaaaggcggcacgtgtgtggctcgggacatttgaaaccgctgaatctgcggccttagcttatgatgaagcagccctaaagttcaaaggaagcaaagcaaaaactaattttccggagagggttcagcttggaagtaactctacatattagtcctggtaccaaattccacaaatggaaccacatcgtttaccgctctatctttaatactatcatgatgcgagtagtggtgacatgctaagatctaatttgggcggtgggtatgggagtagctccagatattcaatgtctcatgataatttttgtaccactgctgctacaactttttcgtcttctggtggctttacatgagctcgagaaaaccgtaattttgccaaatactggtccttaggggccagagaatccacatgacttgcgtgatcttcatctggagatttcaaccctcgcctttgtgttgaattaaaggaccaccaccacctcaatatggaattaccctacgctctccagacgcgttttgagtggtatttttcctcttccggg

SEQ ID NO: 164983 - DNA, 578 bp, Arabidopsis thaliana landsberg
tggactgtgacatcgtcgaagccgacaacggcaacgacgcgctggcggcctgcctcgatcgcgagttcgcgctgatcctgctcgatgtgcagatgcccgagatggatggcttcgaggtcgcctcgctgctggccgaaaccccggactgcaagaacgcgccgatcatcttcgtcaccgccgcgtacaaggacgacctgaaccggctcaatggctacgaagtcggtgctgtcgactacatcgccaaaccgatcaacgagttcatcctgctgtcgaaggtcaaggtcttcctcgatctgtaccgtagccgcgcagcgctgaaaacggccgaagccgcagcccgccaccgcgcaacgcacgatgcgctgaccgatctgccgaaccgcctgctgttcaccgaccggctcggcaacggcctgtcacgcgcgcgccgcgacagcagcaagctggcactggtctatctcgatgtcgatcacttcaagccggtcaacgatcgccacggtcacgccgccggcgatttgctgctcaaggcgatcgccgaacgactgcagcgtttgcgcgcgaatccgacaccgtcgcgc

SEQ ID NO: 164984 - DNA, 423 bp, Arabidopsis thaliana landsberg
atggtggccatttctcatatcactccagccttcgctgatgcagttgcaacctcgagtgttcatcaatttccgaggagaggacattcgctatggcttcatcagccacctcgttgctgcctttgaagtacacggaatatatttcttcattgacaaatacgaacaaaggggaaatgaccttacgtacctcttcaaaaggatcgaggagtcgaagatcgtactagcaatcttttctgggaaatatgcacaacccaaatggtgcttgaatgaactagcaacggtgaagaaactagcagaagaaaacaaattaaaagttattcccatattctacaaggtgaaagttggtgatgtgagacatcagaagggagaatttggtcgtaacttttggaatttggcaagaatttcaagtggtgaggagatcaagca

SEQ ID NO: 164985 - DNA, 3979 bp, Arabidopsis thaliana landsberg; identical to SEQ ID NO: 33945
  unsure (1)..(3979): unsure at all n locations

SEQ ID NO: 164986 - DNA, 962 bp, Arabidopsis thaliana landsberg
aggaaaactttggagagatgcagagaagaaatattcatggttcgatgcacctcctaaagtcaagggaagaccggattgctaacaatattttctctcttattcgaggaattacttgagttataagataaagatcccaaaaaatttcttataatttttatggttgaaggtgacaacaaaaaagggtctttgccatatgtacatagaattgacatttggattgcctccacgatctgtcttcgagcttttcactaatccagacaacttaccactcttcagtgacaagtcttggcgccaacttctggttttctttttctcatatcattgtgtgaattaaatgtggtatatgcatattattcttacatagcaagacttggaagtgtactcttttttgttttatgaaggtaaacaaaaaaaggaaggttttgaagagggatggaccgaggcagatagtggaggtagataaagttgtggcctgggatttcctgtggtggtctggaggtatgccgataaatctaattgcggttgaaaatgagaaagatcttagggtaagaagcttctctgtatccttcgcaaaaatcaatgtttttgttttgtattgttgaaacttaacttgggtttctcttgcatgttgtggatagggaaaatataagaaacagaaaatgaagttcatgaaagtgttcaagggtagctataaagtggagccaatttatgtagatttcgagcgcttgtgcaatcagaaggagccaaagagtccagaagaatacaaaaaatgtagcggtgggcaaggaaagattgcatcaaaagtgacaatggaccaaatattttcagccatatcctatttttaatttgccgccgttcttggtacattcgtaggaccaccatcaagaccaccaaaaatctgctcatattgattcaaaatgcaagtatcatgttccgagatgcttgaaacccccaaatctgtc

SEQ ID NO: 164987 - DNA, 4381 bp, Arabidopsis thaliana landsberg; identical to SEQ ID NO: 36878

SEQ ID NO: 164988 - DNA, 989 bp, Arabidopsis thaliana landsberg
atgcttcatcaacaggtgcagaggaagaaggaaaagatcgccaggctagctgaactgcaaaggcagatagacaaagcctctgaagaagttcgtcatcttactcaggatgagcaacaccgaatgcctcagcatcaagaccttcatcaggagggtttcctcaacgaagatgactggtatgacaatttacatcatgggaattttgtttttgatgatgcttctcctctgtcccctgagctgcaggctacaccttggcctccgtcctacaagccgcctcagcttcccatattcgatggccactcagacccgaagcagtttttgatgagctacgaagcaacaatatcttcgtatggtggcaatactgccgttatggccaaatcttttgttatggctgtcaggagtgttgctcagacctggtattcctcccttcgaccaggaacgatcacttcatggcagaagctgaaggacttgttgttaaccagcttccaagggtttcagacgaagccggtcactgctcaagctctattccaatgcacccaggatcacgaagaataccttcaggcgtacgtccggaggttcttgcgtttaagggcacaggcaccaacagtgccaaacgaaattgtcattgaggccatgatcaaggggcttcggccaggaccttcagctcagtactttgctaggaagcctcctcaaactttggagaagctgctccagaagatggacgagtatattcgggccgataatgattttcgtcaaagaagggaggaggctttcaggttttctgagatgaccaggggcttcggaaaaagattctatccgaggcacgttaggtcaatccataactctgctcaaaatgatgataaggggagccagcagcaaaggccacagtgctcctcacaagcttcggggcaacagcaaggctccttccgaccaccagctccaagaggcagaggcgccaggggcttcggcggaagatttggagatcaatcaag

SEQ ID NO: 164989 - DNA, 3227 bp, Arabidopsis thaliana landsberg
  unsure (1)..(3227): unsure at all n locations
gtctacgcacgtggtagctccgtccgggatattcggagatcctcctggatattcagtaggtcagttccgcgaatatctcctcatcagttcttaagttgttattcgcttatctcccttcatcaggtgaccgggcttatcaagcccaagtacccattcgcgtatgtgggctcatcagctgcgtaggtcctctacttggtgggcttggtgggctttgtgggcttgattggtatttttgcaggtagatttctggaggggaatccaggtccaacatttgccccccagcccattgagtgagtaggcgaactcgatgagcgaacatataggtcaagtaagattgcgaaaatattccagatgagatgatagatatgataaaatcagtcggttttgaggataaactcaacaaaaacaatttaatttcaggttcctgaaccgaaatattttgagtacatacgcaagacaaatcgctgttgacgtggacgactgagatggagcgtctcttctgcgcaccgcatctgacggcccagatcaggcgcggggaagagatctctgcaatctcgaaaatcgtggtgattatggctcctttaaataacttcccacatctccacttgatttcacgtcaactcacacgactctcaaggtaacttctcttcatcttatctatttactgcgtttagttttcatttttagagatagaaaagtttcacctttcttctgctatctccatcgttttctttctcttctgctcccttctttttcgatctgccctctttgctttttccttcatctctctcgtctttctccatcgaaatcaagagatgagagacctagaggattcccagaacaagagcaaccacagttacggcgacgacgagagttcgtcaaagacggggtcggcggcgtcaccgccgcaagtacaaaggcgcgttataaccctaagcggaatgggtcaaatccgtctgccgtcgaccagagccgacaagccgaagaagaagaaagctcccaagcaaaagggaggcacgctgatgacaaacaacgacctggtcgacctccagaggagatgccaggttccagtgggggtgactatgatactcccaaggccgtcgctgcatcctaagaacgtgtcggccgggtggtgctgcgcttacgccaatttctttgagaaatgtggcctatttttcccgattccggcgtgcatcctcgagatgctctattgcctcgacctcgcctttcctaagatgtgcccaaacttcgtccgccatgtactagtgttatttactcgggcccggaaaataaacagataattcggctaccatgacctgcttcagctttgccaagtcaagaccaacgctaggagcgaccatgggacgtactacatcagcgctcgtctcggatctctagtcctaggcagtttgaaggcctgtcgggacaccaattggcgatccaagtacttcttcttcagagtagatcatcattcaatcggcagttttgatccagcgaggatgacgagnnnnnnnnnnnnnnnnnnnnnnnnnnnnnnnnnttactgcttttgctgaacgttagtattgatactaatgttatttttcttttgatggtttgcagcaaagaccaagaaagttactctctccgagacggaactcgagttgttaacccttctccgacgtggtcagactgactaggccacttttagtagagatcgtattgtagctgctctccccgtagctccagcagttcccgcaatcgtccttccagcagcactgccagatccgatcgaagaggtccctcggtccgaggcagacctgcctataggtacgagttccattatcatttttttttaatgtacgagtcattgtgacagctgtaagattcgagctgctaactaacaaatgtggtgctttgtttgttcagtttctcctgactccagctccacttcagaactcccgctcattagaagaagaatgaggcgaccaagtcttcgtgttcaacgagccaacgccggggctcctgctcgtgctggtgatctgtcggccgcggtgagcgctgctcgaaacactctagctgtctccagcgcatctgcctctccatctcatccatcgcttactgagatctataccgggacctctactgcagcaggtcagtcagataacattcaggtcgctcaggtatatgagtcatctgcagttgttcgttctgacggtgcaccgtattctccgaagagagcttggacccagccggaggtgaatccagcggctgagttggtcgtgagcgaccagagggtcgcctctcctagagaagagaggatggaacctacggctgctactccggaggcagctgcgtctgcggataggcgatcctcgggcaggtcccatggcggaggacgaggctccagaggtgggggcaagtcttcaaaccggtctcaagaagtgaggcagacgtccaactccggcggaggatctgcgggaagcaggcctttccactggtcttacactcatgaccgtgatcacccgatcgttgaggacgaggctgggttggcgaacctgcttcgccacatcaaggggaggaactaccaggttcctggagtgaagaacatggccgaggcggcggcctatgctgacatgatggccaggtaattatcgataactgtctccttctaatttttatctttatgctagttctgactttctgttttgctttcggtaggcgataactgccacaaacaagctggatgctctctatgagcagcgtctgagctaggtcccctcggtgaatgagcttgaagaaggaaaggccctcatccgggagctgacgtcgagtgtgaaggctggtcaagatcgcgaagtctcgttccaggtatacctcggttttgacttgtttataaataattcgtcgttgatttgatgattctaacctgattgttatttcaggcggagatcgagaggctgaaaatggagctgtccacttcaaaagacctcgagaaaggttttgctgagaagatcgggttcatggagatggagatctgggggttacaagctgacaagcagacgtcgaggagcctaatccattgcttggagcagaagagggaagagctctccaaaaaggtggtggacctgacttcgattgcacaaggggcgaagagggcggttcacgatgctaaggttgagctggctgctgcgtattcgaagctactggctgggatcaaggagaagtgggtcgccgcaaagaagtac

SEQ ID NO: 164990 - DNA, 496 bp, Arabidopsis thaliana landsberg; identical to SEQ ID NO: 72522
  unsure (1)..(496): unsure at all n locations

SEQ ID NO: 164991 - DNA, 4063 bp, Arabidopsis thaliana landsberg
ctcgcctggaatttacctagtttattgacttttagctaatgtagacgacactccatttgctcttccggcagagatcgtggcacaagcggttgcagagaaccgtttcattttgatgggacggccggtgatgccaaggagacaaaacattcgatcgattgtggcttcaatgccgagaatctggggtcagtcagggctggtccatggacggctaatttcggggaatcaatttcaatttatcttcccatctgaagaatccttggatacggtgatgcggcgaggaccatgggcgttcaatgaccgtatgttgatactccagcggtggttccctacaaatcaaccgctcatcaatttcatacctttttggatacagataaggggcatcccttatcactatctcactcatgaagtcattgcacatgttgggagggctcttggaaacttgatggaggttgacttcggtctagagacagcggctcgtgtggattatgttcgggttcaggttaactggaacatcgaagatcctcttcggttccagcgaaattttcaatttgaggccaacgtgaatactctcttacgattccggtttgaaagactaaggggattttgcgaggtatgtgggatgcttactcacgattcaggagcctgccttattcagaatggtggtggcgaggatctctcagatgatgacaatgaggatgctgctctccctcctgcaatcaatcaaaatcatggagtgatcattagggagattgctgatgatgaagagaacggggatgctgcgaaatagtaccaaatgttgaaattcctgagaatgcagaagctatggaggacaacactcccctgcgcaatgaactaccaaccggtgatgaacttgatgaaccccatggagcctactcaattttcaaagaggaaaggaatatgagtgagctatttaatcctattcctatctttgagaatgctacaggagacattccagggaatccatcctaccgacgcttctctgcaatcatccagcctgattcgtccaacatggatgcatctcgtgagcgtcagtctgcaattgctatggagagaggtaaacgcaagcgagatgatgatctagttcaatctgaggtgaaggagactgaaggaatcgtgacaaaggaagcaggtgaaggaagctgttcctccggcaggaacaccaagtgcagaggcgcggtgggccctataccaccacttgctccatgattacaatctgctggaactgtcaaggtctcggcatagacctcacagttcgacgcctcaaggagataacacactgctatctctcggacatcatatgcctttcagaaaccaaacaacaagatgatcgtgttcgtgatgttgcttgtgaattaggttttcccttttatgtaacagttcagcccgtaggccttagtggtggtttagtagtcttatggaagcattcactagaagtctctgttttatttcaattccctaatcttgtagattgccttgtgaaatctaatgaaactagtttctatttttcctttgtgtatggacctcttaatcctagtttcagaaatgacctttgggagaggctagaaaggattggaataaattgacggagagagccttggctaatcttaggggattatacgttataatctagataaagctttttcctttggaacttcatctcctgcagagagacaaaagctgaaacaggaccttaaccaagcttatattgaagaggagattttttggaagcacaagagcagaaataaatggactcatgagggagatcgaaacaccaagtatttccatgcagtgacaaagacaagaagagatcgcaacaaacttgtttccatagaagacaaagatggtactgcgagaagaggagacaaggaagttgcagatgttgccatttcttacttccaagaactgtttagttctacgccagctactactgatctgcattctcagattttctaagactttccgaagtgggttacacaggagatgaatatggacctcacaagacatgttactcctgaggaaataaagacagctgtttttagtattggaccacatgagctccaggacctgatggattttcagcagcgttttatcacgagttctgggatgatatcaaccctacaattattaaggaagttgagagattctttgcagaggtttttctaaatcagcaacacaaccacacaaacatctgcctcataccaaagacggaagcaccaacaagtatgatggagtttaggccaatagccctctacaatgtcagctacaagatcatttcaaagatcttagtgaaccgattaaagaaacacttatctagtgttatctctgataaccagacagcttttatccgtgggagaatgattactgacaacaatatcattgcccatgaagtcttccatgcgcttaaggccaggaaacgccaatcaaaatcctatatggctttaaagacagacatcacctaggcgtatgaccgaatagattggagttttttgaagacaacaacggagcacatgggattcgatgatcgccggatccagcggataatgacatgtgtttcttcggtcagcttttcggtcctcatcaatggctctccccaaggatcaatcataccagagagaggtattcgtcagggagatcctatgtcaccttatttattcattttattcgcggaagtcttgtcccacatgatgaaacaagcagatttaaagcgtcacctccaaggcatcagaatcagtgaccaaggaccagcaatcacccatctcctatttgctgatgactctctcttcttcatgctagcgaatgataaatcctgcaagactatacgcgagatactcagcctttacgagaaggtttcaggtcaagctgtcaacttaaggaaatcatcaatttcttttggtagccgagttaaaccacatgtaatgactcgggtgagacgtattatgcggatccacaacgaaggaggtcaaggcaaatatttaggacttccagaagagataaagaagaaaaaagctgaaatgtttcaatatattgtagaacgtgtgcggtcaaaaacccagggatggagtaagaagttcctctcggcaggaggaaaagaggtgcttctcaaggttgttgctcttgccttaccagtttactccatgaacatcttcaagttttcacaatccatttgtgaagaaataaatggtattcttgctaagttttggtggagtagtggtgaagataaaaaaaaggatgcattgattttcatggaaaagaatgtctttgtcgaaaaaagaaggtggaatgggattcagagattttgagaacttcaatttggctctacttggaaaacagatttggaggatcctaaaaaaccagagtgtctcatggcaaggattctgaaaagaagatatttcaatgaatcaaatattctcaatgctactcagaaaagaaaggcgtcatttgtttggaagtcactactccagggccgtgatttaatcaaacaaggactccgatttgcaattggtgacggctccaatatcagtgcacggatagacccttggttaccggttcaccctctacgacctccacgggtaaagaatggtcaagaagagaagcaactgttgtcagaatgaatgcattcaaggttcaatgtggaaagaggatctcatcagagagaaggttacaaaagatgatgcaaacttaattctgtccctgaaactaagcgcccatgcacctcatgacatgcttggatggcattatactaaggatggactctactctgttaaatctgcttactggttagcaaatcaactttacagagactcaaacgtataaccaccacggggaacttagatttaaagacacggatttggaaacttaaaacagtcccaaaattacaatactttctgtggaaacttctatctggagccttagccactggcgaaacactgaagagacgacacatccggaaccaacctgtctgcaaacgatgctgccaagaagaggaaactacacaacatttattttttgattgtttttatgcacagcaggtctggagagcagc

SEQ ID NO: 164992 - DNA, 3894 bp, Arabidopsis thaliana landsberg
agcctcttggaggttgcagcggataccagctctggcatgcgctgtagcggcaaagatagattcttgggaattattgtagaagcacttgaagcatatgtttctcccacataattatgatcgtaccatgtatacgagattgtagaatttgcgtcaaggaactcgttctgtagatgaatatgcagatgagttttatctcttgataacaaggaatgagatttttgacagttaggttccattggtttctcatttcatagggggttaagactccaaattcagacagcgttattacaatttgatccaactacgattgtaataacaattcaagacaacttcttcttggaatgtaactaactggaatcgtcccacaggagtagctaatgtcaaagctagtaagcaacccacgttatcacgtgaagttgcaagtgcgtctagcgattccaaggttgcggtggaaacacaataacttcggagatcgaatcgacccaatgccttgcggtatttcacctacggagaacatgatcatctaatgacggcatgcccgcaaaagaacacacgtggtttattaattgaagaagtaaaatgggatgacagtggtgatggtgtcgacgagtttgaggaaagtgcagagcttcaagaagatcgtaatgaaggggataccgggaatttgttagtagcgcggatgtgtttggctcccatggctagtgaagatccttggttacgtactaacatctttcaatctacatgtacaataaaatgaaaagtctgtcgttatgtgatcgatgcgggaagccgccgtaatgttgtgtcggaggaagcttgtcgcaaattgggactatcacgggaaaaccatccagcaccttgcacattgacttggttgaaagaaaggacagagatacgcattagtcaacgtggcttggttcctttttctattggtcaatattacaaatataaactcttttgcgatgttgttcctatggatgtcagtcaccttcttttggggcgcccttggcaatacgaccatgacgtttctcacaatggaaagaccaatgtatacagttttgtttttgctaatcgcaagattattctcatcccaaatccctcaggtttttccttgcgacctggccacctcgagcagactattcaggaaacagcggataaggagttaagtagtgtgttgttatgttctctaacgaattttgtgagtgaatttcaggatacgggttttttggtacttcttatggctgccaataagactccctctccgcctacagatttagcactgtggataatagatcttttaaataaatttgcggatgtgtttccacacgagctacctcagggattacctccaccatgggatatacaacaccaaatcgatttagttccaggagcagcacttcctaatcgccctcattactgaatgagtccacaagagcatgaggagttacgccaccaattggaagatcttgtggctgcgtgagagtttgagtccatgtgcagttcccgctcttttaatccctaagaaagacggttcatggagaatgtgtgtagacagtcgcgccgttaacaagattacagttcggtatcgctttcctatcctcgtttagatgatttacttgaccagattgggaaggcaacaattttttcaaaattggatttgaagagtggctatcatcaaatccgtgttcatcccggtgatgaatgcaaaacggcttttaaaactagggaaggattatttgaatggttggtgatgccttttggtctctcaaatgtacctagtactttcatgagagtgatgaatcaagccttgcgaccatttatttgaaattttgtggttatgtattttgatgatattctgatttttagttcgtctttggaggagcatcaagatcatcttcgtcaaattttagtggtgttacaccgtgaagttttttttgtggcacaacaaaagtgtgagtggatcgtgttctttttctcggatatgtagtctcatcaaaaggcttgtctatggatttgactatagtctaggcagtaagatcgtggcccgaaccgagaacaacgtcggatgtgcgtagcttccatggattggcgtcattctatggacggtttgtacctcattttagtgcaatcatggcccctctaaccgattgtatgaaagacactaagctggtatggacgaatgaaactcgaggggcatttgaggagattaaacggacgcttacttcagctccaattttggcgttaccaaactttgaattaccatttgagcttcattgtgatgcttctaaattgaggataggagctgttttgagtcaacaatctaatccggtggcatattttagtgagaagttggcaggagctcgccatcgctatagtgcgtatgatatcgaattttatgcgatagtgaaagctattaagcgttggcgtcactacttggttcaccgtgattttatcttattcacggatcatgatgcattaaaacatcttgatagtcaagataaggtgtcatctggtcatgcatcatagattgctttcttacaacaattcaagttatctatacgacataaagcgggtaaattgaatcgagtggctaatgcgttaagccgacgtcattcgttgttaacaacgatgcatgtggcggtaccagggtttgcttctttttctgaattatataaggcagaccccttttttagtcccattttggcagatgttgcagctagtggaagaacagattactcacttacggacggttttctgttccgtgggatccaattgtgtataccgaattgcagtttgcgattaagggtcattcaagagctccactccgaaggacatgtgggtcgggatcgcactcttcaatttgttttagctacatatttttggccaatgcttcgacgggatgttgagaggtttgtggaacattgtcgtgcttgtcaattagcaaagggtcaagcaaccaacgctgggttatatcttcctcttccaattccaacgcaaccatggactgacttgagtatggattttattttgggtcttcctaggactcaaaaaggtaataattctatttttgttgtagttgatcgcttctctaaaatggcacactttgttccgcgtaagcgcgcaacggatgcggtgcgagtcgctcaattgttcttccaagagatatatcgtcttcatggtttaccgacctccatcgtctcggattgcgacacacgatttctaagtcatttttggcgttcactatggaagatgttgcatacaagtttggatatgagcaccgcctaccaccctcaaacggatggtcaaacagaggtcccaaatcgagcattgggtaatatgttacggtgtaaggttggggataatattcgttcatgggagacgcgcttatgtcaagcagagtttgctcataatcatgcatcaaatccgagctcgagtttcagtccgttttagatcttgtatagtatgttgcctcgtggtcctctcgatttaacttctttacatgacacacgacgaatgcatggtcaggcggtggactttgttaattctttacgagatacacatgaacaggccaagaaactgttggagctttctgctacaaaatacaaaggtaaagttgataccaagcggagagaggtactgtacgaacccggagatctcgtgtgggtggtgttgaccagagatcgcatgccggctcatgagtacaacaagctacgttcaaggaagattggaccagttgaggttcttgagcgtatcaacccaaatgcgtatcgtcttctctttccggagcacattcgcacctccaacgtcttcaatgtcaagtatttatctaagtaccatgtcgagaatgacgtttcagattcagaggcaaatcttctcttacccggggaggaactg

SEQ ID NO: 164993 - DNA, 1111 bp, Arabidopsis thaliana landsberg
atggcttcatgtgaacgttcgttgcttcctattgatataatagaagaaatatgttgtaggattccagtcgaatatttgacgcaattcaaattgacgtgtaaacaatggtttgctctcttgaaggacaagagattcatctacaaatccttggatctaaatcaagaacaagaacgtttcataagaatcgatcgtatcgttcagatcatcgatccagtgaaaggagctcgttcatcttcaccaatcccgcaagagttcgacaatgtagctcaaatctccactatggtccattgtgatggattattgttatgtagatgcaagaacgaacgatcaagaagctacaaactcgcggtttggaacccgtttttgagtcgagtcaaatggatcgaaccaatggatttttattcgagtaatgatttctatggttttggatatgacaatgtatgtcgtgatgagtacaaacttctaaggattttcgatggagagattgaagacgagagtgaaatcgcggggtcttatgaaccgaagattcagatatatgatttcaaatctgattcatggagaattgttgatgatactcgtttggattggtctatagatccaccttgtaaaggtttgtcactcaaaggaaacatgtattggattgctaaatggaaccgtaaacccgacatcttcatccaaagctttaacttctctacagagacatttgagcccttgtgctctcttcccgttaggtatgatgtacataatgttgtagctttatcagctttcaaaggagacaatctttctttgttacaccaaagcaaagaaacatcaaagatcgatgtatgggttactaacaaggttaagaacggagtgagtatcttatggaccaagttatttagtgtgacaagacctgatctcccggtattgctggcttttgagaatctttcttatccggtgcatttcattgataagaataataggatcgtagtatgttgtgaggaagtattggcagataaaagaaacgtagccgtcaacatctacgttattggagaggatgagatcaaaaggcaagatgagatagaacaacaccaactaggtgttagttggccttttatctcccggtatacat

SEQ ID NO: 164994 - DNA, 346 bp, Arabidopsis thaliana landsberg
tgctataacacgtacagatccagttttcgttatcaccgtagagctagacgatatggaatatcgtctcatgggaatcagaattgtatcggcagtaatgctcttcataccctgtatgccgcatggttctcacctacactgatagcatcaggtcgaagtgcgatcacccgaaatggccggcatgctggaagaatgtgtgagcgtaaagctcctggctaaccagttacagtaagactgtcgttatcgcgcatgggttctggtataggatccctcaagtattgcgtatctgtggttcgatcaagtaacatccattattggatggttggtgtatctcattatatagcaaccc

SEQ ID NO: 164995 - DNA, 1350 bp, Arabidopsis thaliana landsberg
  unsure (1)..(1350): unsure at all n locations
atggagaagagtttccaaaggtctgctctccttgtgactttgtctctcttcttcttctccattccgggtttcactctctgttccattcgttctgtttcacggttggttattaacaatccttattcttcctccttgtgactttgtctcttttccttttttaatcgacattattggatttgattgaaacagggtttggaggtgcatgctccaatgacaaagtgagcaacttaacacagttcctcatcaaccactccggctaccctggaacttgcgtgtaccgacacaactccttctttgtcttcttcttgtctcatcttgatcttgcaaaatggtttatcgccgctgtatgtttatgtgtcaacttgtagagaaataggagatggagtgaaagattccttattcatgccgcttaggcaacaagccagcatagcttgtgagaaaattaaacagatgccagagctgagtgaaggttacaacatagtggcagagtctcaaggaaacttggtcgctagaggcctaatcgagttttgcgataatgctccaccagtcatcaactatgtctccttaggaggacctcatgctggcgtctctgcaatccccgaggggtgtgatgtgagttctcttccatttctatttatctgtctttttgtgtcaaccacaatcacaacaacaacaacaatgggattctctgtttacagtcagcattttgcatactcatgaaggcgttttttgcagtgatttacagcgattttgctcaagtaaaccttctagtcttctcttattcctctagtcatgatttaaaaccttaaaccatgattaatacctataatgactctgcaggatcatactgctccaagtggttatgtcaaaaaacctatggtaaactaaaactcttttctttcataatcctcaaaatcatttccaattatatgaaatacttgaattgacaaaacgttatctggtttttaaggaaataaaaaattatttggaacactccaagtatctgccaaagctaaacaacgagagacctggcgagaaaaactccacttttaaagaccgtttcaccagcttgcaaaacttggttctnnnnnnnnnnnnnnnnnnnnnnnnnnnnnnnnnnnnnnnnnntttgagatgatgacaccacaagtcttgaacaatattttcattaatttctttttttttttgcatttcctaaacagttccagaatgatacaatattggttccaagagaaacttcttggttcggatattacccggatggagcttcatcttcaacacctgttttgcctcctcaaaaggtcaaccagaaatcatctctcttcactaaactaaactaagtaactaact

SEQ ID NO: 164996 - DNA, 1626 bp, Arabidopsis thaliana landsberg; identical to SEQ ID NO: 34050

SEQ ID NO: 164997 - DNA, 372 bp, Arabidopsis thaliana landsberg
ttgctgacgtgtccaacactcatcaacggttcatcatcatcagatgcttctttagaagcaagaaagctcgatgaggtcgatcccattaagtgctctccaagttgcatccaaaaccctcatcggcagtctcctccaccaccatttccgccaccgcgtgcgtgtcctcctccgccagctctcccaccgcctccgcctaagaaagtcagttcttagtgcccaccgcctccgccggctaatttcttgtacatcacgggtccgccgggaaatctctaccccgttgatgagcaattcggagcggccgccggaaaaagttgtatggtggtgaagctctccggtctaatcgcgtttggaattatggggttcttgattctt

SEQ ID NO: 164998 - DNA, 653 bp, Arabidopsis thaliana landsberg
tattctactaagtcttacataatatatattcataaatataaatatatatattcataaatttatataattattaatttataatattgatgggatcatatatttacacaagattttaaaaaaattattatctttttaatttatcgatttgtatcaatttttacactagtcccaactcgggactagaaaaatttattaatttatagaggttattaatttatcgagtattaatttttacactagtcccaatacaatctcttagatgtaggattgatagttcatggaaattatcttccgacccaaccatgggattaggatgatggtattttcaagaaaatgatcaaacagtactccttggtgtaaagtgcctccggaggtgtcattctccccttcactcggagctggaagctttaatttggggtatgaagaatatcctttcaagaaggatcgactgtcaaacgtttgaatctgattgcatagaggtagtctcgatggtgcagtctcctaaagaatgcctcgcattctccaatcttctagatgagtttggattgctccgtgatctttttcctctttttcgatctcttctatttctcacttgagtaatactaggacggattgtttagctcgtttttctacattattatttttttaagtct

SEQ ID NO: 164999 - DNA, 548 bp, Arabidopsis thaliana landsberg
aaaaacaagcctctaatgtgttctcaagtggtaaaaacttgggatctttttcatcctcaaagccctcagatagattggtttgagtcaatttggtttcctggcagaattccaaagcattcctttattggatggctcaatactcgtcacaggcttcttaccagagacaggttaagccgatggggtttggcaactccttcttcttgtctcgtctgtaatttggttgatgagtctaggcaacgacttattttttgagtgttcgtacgctgcggaagtttggaattatttctctcagaaggcccatgtttctcctccagttatgttcttggatggagttagatggttgaagaatccttgccgtgacaagaatatagctttgattcttcgtcttgcctatcatgcctcagtttattatatttggaaagagcgcaattcaagacgacataattcctcctccaaaccggcctcagccatcattttggagatcgaagaacattattcggagtcacctagatcgctctatctcgggctcagatgatcactcccccggc

SEQ ID NO: 165000 - DNA, 1349 bp, Arabidopsis thaliana landsberg
aagatcatgtctcactatggatctgacaattggaatcttaaccattctctcggttattacatctcctctttccttaccgacaaattcgagaactataatgaagctagagtcgtgtcttacacggatgttggattgatattggttcatcgagtgtcaagtcagtctttctacgtagctaatcctgtttctaggcaatgcgtagagattcttccttcacagaaactggaacgtttctggattttgggaatagctacaagagttgagaacggcgtcgttttaagttacaaagttgttctgttgaaacctaacttcactttcctcatatattcatctgagacaggcttgtggagtctcaacagtgacacttttcctttcagctatatatctcaagagtttaacaatcccattagcttgaacggaagtctttactggctcgcccacggttccgactatcaagatttcattgtatccatcgatttctatgttgttgatagccgctctgatcgatgccgcgctacgccatttcctgatttagataaagttccgaaattcagaagaacttgcacaacttctcaaggatgtctcatgtatatgaacatattctccataccaaaagttgatggaaatttagaggataagttatgtgtatggaggctagagagctggcaatggcgactagtatccgaaatatctttggattctattaagactggtttcgattatattccgttgggaatagacccttttgatgctaaagcagtctacctttggagtcgcaaatgcttgttatctattaacttacacaatggagacattgtgctccacaaggatgtggaacatagcagctcgggtcgcattctgaattccgttgattgcccgagagatatgacatacatcttagaatcaaactttgcctcgttcgttctcccacagtggatgcatccgttccctagctcggtgaggagagtttaaatctaatatttgtaagactttatttttgctagttaatgttagttccttatgcaagaggaagaacttgtaggatgatgtttagttttcttttgagtgttttccttaccacgttttgtacaaactatgttttcgaatcacataacttctctatttggcctataacgtctataatatcccaagcaagtttttaaaatcgcaaatatgtttgaatgttggcggttgaaaataacagaaattgtttaaatcttgctagttgaaaaaacttgaagtaaaggcatttttgctcttatttgatcagaacaaactttgattatactgtgacagtacaattgtattttaatcacgaactttctcgatttaatcttctctctattcaa

SEQ ID NO: 165001 - DNA, 465 bp, Arabidopsis thaliana landsberg
tcatctgaggagtcagcgtatcttgcgttagctgctttcattgtgaggcctgtcgagctctctgtagtcactgctgtggtcgagtagatggtgtaatcccaacactcgcttggtgtgtaccatggagcaatgctgatccacatgctcgggtttggtagaagacctagcttagctgcataggcttcagacttacgtccggatgatcataagggtctatctgcttacactgcgttgatggatgtttacatctcagcagggagtccagagaaagcaatgaagatattacgagagatgagagagcgagagataatgccttctttggggacatacgatgttctattgtctggtcttgagaaaaccagtgatttccagaaggaagtggcgtcattgaggaaggagcagaagagtcttgttgcttctgcacgtttccgagaaaatgttcatgttgaagacaaaatatgcatg

SEQ ID NO: 165002 - DNA, 959 bp, Arabidopsis thaliana landsberg
atggcgcgactagctgatcttcaaaggaagatcgatgaagctgctgaagaaatgcgtcacctcactcaggatggccaagactaaaggccccaatacagggagcttcgtcaagaaagcccaatcaatgatgatgaatggtacgatgactttcatcatggtaactttgctttcgatgatgcttcttctttggcagcagagttgtaggctaccccatggccaccatcttacaaaccaccttagctccccatgtatgatgggcactcagatctgaagcagttcctgatgagctatgaggcaaccatgtcctcgtatgggggcaatactgctgtcatggcgaagtcctttgtcatggtagtcagaagtgtggctcatacatggcattcttctcttcggccagggacaattaggtcgtggcagaagctaaaggatatgctagtcgctagcttctagggcttctagacaaagccagtcacttcccaagctttgtttcaatgcatgcaagaccatgaggagtacctgcaggcttatgtccgaaggttcctgcgtttgagagctcaagcgcctacactgcccaatgaaattgttattgaggccatgatcaaggcgttcgccaggacctacagcctaatatttttcaaggaagccaccacagactttggaaaaactccttcagaaaatggatgagtacatccgggcagataatgatttccgccaaagaagggaggaagcatacagattttctgaaatggccaggggcttcagaggaaggcttcatcctaggcatgtcaggtcaatccataactccaatgccaactatgtaagggccaacaatactcaaagcaaccatcatagctcacagtcttcgggcatgcaccaaacttcttacagaccaccaactccgagaggcagaggaggaagaagcttcagtggaggaaggtttggcaatcaacccaggaagt

SEQ ID NO: 165003 - DNA, 1318 bp, Arabidopsis thaliana landsberg
tttgcgatttcaacaacaaaaatggcgaaatctgacattgaaactggtggtggtaacgagctgtatccgggaatgaaagagagctcggagcttcgttgggctttcataagaaaagtttacagcattttgtctcttcagttgcttgtcaccgtcggagtctccgccgttgtttacttcgtccgtccgatccccgagttcatcaccgagactcaccgtggccttgccgtctttttcgtcatcctcctccttcctctcctccgttacgtctcctttcacatacttttgtttatccattcatttctaggttccatcatcgtcgcttagggttttgagttgctttatttgtgcggttcactaaaaaagcttgcgacttgatcgatatagtgttcactttagctactctagcttcgttgatgttgtgaaactataatgttccgttgattcatcgtttaaattctactgtgttgttaacgatttgatatatccacttagtttgtagagtgtttcactgagtgatctggatttgatgtgtgttgtagtgttgtggcctctgttggcttttgagaagaagcatccgataaactgcattgtcctgtccatcttcactctctccatttccttctctgtggggatttgctgctctctctcccaaggtatggatacagagatatatcacacttggttggcttgtggtgttgttaaaagacaaaccatttgtcatattttgccttggattgttctctgcttgaaataatcaaccaacactagtgttggtgtgatattgattagatagtactgttttcttaaccataaaagttgaaatttagtatcttgttggctttaacatggtgaatcatgaaaaagaggaacatggcatgagatgctttcatgcttttttgtcaagcaacttattaactctgtttcctataactagagttacaccatttggttagaatctaatttccaagtattgtgaaaacagggaggattgttctggaggctgcaattctcacagctgtgatggtctttggtctaacgatctacaccttctgggcagtgaagagaggacatgatttctccttccttggaccattcctctttggtgctctcctcattatccttgtcttcacccttttgcaggtactaactcagtaactctcaatctattcaaagttttgggatatattatcacaaagctaaacaatgaaatgaatgcagatattccaccctctggggaaagtatcatcgatgatattcagcggaattagcttcaatagtgttctgcggatacattatcttcgacacccatcatctgatc

SEQ ID NO: 165004 - DNA, 721 bp, Arabidopsis thaliana landsberg
gttctaaaggatccaagacatgataagataagtcatattatctctcactgcgatggtttattattgtgcaagaccgaggactatggtagactcgtggtttggaacccttgcactggtcaaatcaagtggatccaagccaataatatgttaatggacgtttatgtgctaggatacgtaaacaacaacaaatcttgcaatagctacaaaatcttgaattttggcattcttccattaaacagttctcatgataataagtctaaaatctatgagttcaactctgattcatggagaattcttgaccacgtctctcccggttacttcgcaatatccaaagccatgactttgaagggaaatgcttattggtttgcttcagattggtatgcttcagataaagaaagaaaattcttacacaaatttgatttcagaagcgagagatttggacgtctatgtattcctattcagaaatattacgctgatcagactgtggctctatcggttgttagagaagagaaacttgccttgttacaacagtggtttgataaagattcgttaaagatgaatatatgggtgaccaaaactaagatcgatgaggacaaagacttgtcttggaccaacttcttggtagtggaatttggtaaagttatattaacaagagatgcgttgaattatatgagtttcttggttgacgaggaggataagatggttgtgtgttcaaatacaa

SEQ ID NO: 165005 - DNA, 698 bp, Arabidopsis thaliana landsberg
gtttgtttcacactgcccaaaagtttatgtggatcataggcgagtattgtgtcttttgttaggaatatgatcagtgggtggtcggcagatatgtggctcgctaaagatggtaattaatcatccgatattcgtatgcgacccgcctaggtagatttgggttatctcaaagatccatgcgattccagagattttccgtctcgcgtccatttaaaaacggtatggatcacttattttgaagaatacctcaaaaatatgatcaacttccatttccatggatagtttggtatattagaaagcacaaaataaaaaagtttttgatagtagggataaagatccgttagagatgttctgattagcggaacaagagtcatactgtgaaagatgtcataagataagctttgaactaaaaatcaggcctcgagtaagagatatctccaatgatactaattttataggatatcagtgttttgtggacgaatcatgaaaagatagggataaatattcaggaacatgatgatattgtacatcatcaaatggagaggcgtcaactatgagaacatccaatatgtttagaagtctcactccgctaaacacaaaagtggaagctctgctttgggcgatgatgtgtataattagtgtcgataaccaagatgtagttttttttacagactgttcagatttggtctttccctaccgaa

SEQ ID NO: 165006 - DNA, 1790 bp, Arabidopsis thaliana landsberg
gggacccaccagacgttgttggttcgtgggtttgaaaggtggttggtagtgctgttggtgggattttggatgatgagtttgtctcagcaaggatgcaacttgagtttcgtgatggagaaggtggggaaccggtggttactatcggagaagaggttctggaggcgatgaacggtttgtgggggcagtatatgatagtaaaagtccttggaaaaagcatgtcgattgcggtgttgaataggaagttgagggaactgtggaaaccaagaggggccatgtatgtgatggatcttcctcgtcagtgttttatgatccgctttgagttggaggaagagtacttggcagccttgactggaggtccatggagagtgtttgggagctagcttaccgtacaagcttgggcgccggaatttgatcctatgaggaatgatatcatcactacacctgtctgggttaggtaatcaacattccggtgaacttgtatcataagtccatcttgatgggtatcgcaaaggggttagggaaaccgattaaggtgaacttaacgaccttataatttgaaaggggaagatttgcaagagtatgtgtagaggtgaatctatctaagcctttaaaagggacgataatggtgaacggtgaaaggtattatgttgcttatgagggactaacgaatatatgttcgggttgtgggatgtatggacatttgattcacatgtgttcccagagagtccatgaggaaagcagagcgatgccatcgaataatgcggaggtacctaaaaaaaatggtgttgagatatataagggtggagtgcatgatgaagatggttttacgacggtaagaagataggcgagtaggatggctgctctagtaaaaaacttggtagttacagcgggaagctcgggtggcaattcgggaagatttcttaagaaaatcccaaaaataaacgttcaagagaatattgccttatctaatagttttggaggattagaggaagatttgattattccggacttgagggaagtgaatattcaatcaggagcagatatgaaaaatttcaacgctagagctcaaagaggaaatggtaaacgtgcagcacaagacataggtggaaggacagttgggtcgttggataatggtaaaagtagggccagagatgggccgaaagtgaaagggatgggctcaggtaaacagaatgggccgaataggccaaaattaaaaaaaagtaaaattaatcgcccgaccagaggtctggtgtatggcccgacacgaagagaaagtgaattggtcttgtcgggaaaaagattgagagtcgagggggtgagcttgagcaaactaggaggtagattcacgagtgaaattggacagcatatggttagggtcaaaacgcatcgtgatggagtggaaggagatcagatttcgcaaccggatccagatggtattgggtcgaatggcggagtactcatgctcgagaatccagaggagaaggtggtggtggtgggtcagatggcagaataatagtctgccccgctagttctaatcttgttttggaatttatcaatgaattgtctattctggaattgtaggggggccaataaacccactttccgcaggtcgatttgttacattctgaagaagtttagcacaaacattctcgctatttttgaaactcacgcaggtggtgatagggcgagaagaatttatcatggcttaagctaagagaattcttatcaagtagacgcagtggatcagagtggtggactgtggttaatgtagagatcgggactaggcgagg

SEQ ID NO: 165007 - DNA, 2977 bp, Arabidopsis thaliana landsberg
  unsure (1)..(2977): unsure at all n locations
atcttttccttttcttttcctcctccatccatattcgattcgaattctctgttgccactactattgttactctcataccttcttctaccataaaacccaccaccatctctatccaaagactcttcctttatcggactctcagaatcttctctactaaaatccctaaacccaccttccaattcttcccctccactaattttctcatccccatcaccaactttcgatacccaattggatctaactctcttcgctgctgctgatgacccgacccgtttcttaacccgccaactcccaacaccaaaagaatccacatttccttctctttcatcatctagggttcctatattctcatacccagaactcaaattcgttagggttcgagtcctcgacgatttactcgtatcttttctattaccactcgtcgtcgtcggtgtccatttcgatttcctcccttgtgaatcatacgccgccgccgccgccgagtggggatgatgctgctgctggtactggtctcagccgatttcgcctaatctaacgcttggtcttgtcaatcgtttcgatcccgcggctgcaatcgccgtcgcttcggctgaagttgacgcaggaatagtaacaacgccgccgtttgtttgctgaccatccactggttgcaattccgccatttttagaagtttttttatttcagattggaaccgccataggcaagtaaggagctagtagagaagatgaaaggtcgaatcttttggcttaggctatttaggtttatctggaggaatcagaagtggatgtgagagaaagaagagagaatcgtcgtcatcaggagaatcgaagaaggaagaagaagagcgatgttcacttactgacacgtgtgtgtttctgcagtcactaacagtatttatacaataattgctcaacaagtccctcaatttccgtcagtttctttttaatgactcagggtaaaatggtcatttgctaatcatcttcatcctcatcagacctgcgattacttttcagaaccctagctttggcagaagattgttcgttgtcatgtacttgaaagaaggatgttcgttgctattgaaagttcaaaaacccttaatcccatttgtcctcaatacaaatctcaatgtgaatcatctcctcacagaatctccaaaccatgcggagatcaaagaattagatgtggtaaagaggctgagacaagagtcatgtgttccattagctttgcatttcttcaaatccattgcaaattctaatcttttcaagcacacgcctttaacattcgaggtaatgattagaaagcttgcaatggatggtcaggttgatagtgttcagtatcttttgcagcaaatgaaacttcaaggttttcattgttctgaagatttgtttatcagtgttattagtgtatataggcaagtgggtttagctgaaagagctgtggagatgttttataggattaaggagtttgggtgtgatccttctgtgaagatatataatcatgttttggatactttacttggtgagaataggattcagatgatttatatggtttatagagatatgaagagagatgggtttgagcctaatgtgtttacgtataatgttcttcttaaggcgttgtgtaagaataataaggtagatggtgcgaagaagctgctcgttgagatgtcgaataaagggtgttgtcctgatgctgtgagttatactacggtgatctcgtcgatgtgtgaggttggtttggttaaggaaggtagagaactcgcggaaagatttgaacctgttgtgagtgtttataatgctttgattaatgggttatgcaaagagcatgattacaaaggggcgtttgaactgatgagagaaatggtggagaaggggatatctcctaatgttatctcgtactctacacttatcaatgtgctttgtaattctggtcagattgagcttgctttctcgtttctgacgcagatgttgaaacgagggtgtcatccaaatatttatacattgagttctcttgtgaagggttgttttctaagaggtacgaccttcgatgctctagacttgtggaaccagatgatcagaggatttgggttacagccgaacgttgtagcgtataatactttggtacaagggttttgttcccatgggaatatagtcaaggctgtgtctgtcttttcacacatggaagaaatcggatgttctccaaacatcagaacctatggctcacttatcaacggttttgccaaaagaggtagcctggatggcgcagtttatatatggaacaagatgctgactagtggatgttgcccaaatgttgtagtgtatacgaacatggtggaagctctttgtaggcactccaagtttaaagaagctgaatctcttatagagattatgtccaaagaaaactgtgctccttctgtgccaacgtttaacgcatttatcaaaggtttatgcgatgcagggaggcttgactgggctgagaaagtgttcagacaaatggagcagcaacacagatgccctcccaacattgtaacatacaacgagttactggatgggctcgcaaaggcaaaccgaatagaagaagcttatggtctaacccgagagatcttcatgagaggtgtggagtggagctcatcgacttacaacacgcttttacatggatcatgcaatgcaggtctcccggggatagctgtgcagctagtaggaagaatgatggtcgatggtaaatctccggatgagatanctatgaatatgataatattagcatattgcaaacaaggcaaagctgagagggcagcccagatgttggatctagtttcatgtggaagaagaaagtggcggcctgatgtaatctcttacacaaacgtgatttggggtctatgcagatctaattgtagggaggatggagtgattcttcttgagaggatgataagtgcagggatcgtcccaagtattgctacatggagtgtattggttaatt

SEQ ID NO: 165008 - DNA, 244 bp, Arabidopsis thaliana landsberg
aaattaaagtcacttctaacctataatcaagcatgctagtaccataatggaaattcagctcgcaggagagaagaaaacgatggggacaatgatgaacgcaacacaacaggaagctatacgaaagattgaagaagctgagaaactcgctcgggcacgtggaaatgcaaatgtgactacagatgcaaacatgggagataagatccaggattcagagtcctcagccaacgaaaaatctcaagcaaaa

SEQ ID NO: 165009 - DNA, 1361 bp, Arabidopsis thaliana landsberg
cttccaaatttagggcaaggctttacaaaaaaacagagacctgatgaagagaggaaacgaagagaacaaccacaagacctcctcatcatcgtctacacaacgtcttagccgccgtaaaatctcagccggagaaaagtccggcaacgtcaatatccctctggatctaacggtggagatactcaagaaactaccggcaaaatctctcttgaggtttcaatgcatctcgaagcaatggttatcaatcatcagcagccgtagagacttcatagactcgatcgtgactcgatctttgactcagccaccaccgcgtgatatcaaactcatctttcaccaccaagttctttatccgggacctcacttcttcatcttctcgtctacttaccctcaaaatacagacaaagattcattaacaaccagagccagctcgtatcactatgtccgtggcttgatttgttgttggtcacactgtcctactacggtagacatatataaccctaccacgaggcagtactataccgtaccggatactaaccggtaccaatacatagaaacttgcttctttggatacgaccctgtcgaaaatcaatacaaagtaatggtcttaccaaaatactatatggaggagtcgccttgtcaagtattcacagtgggagatcccatagagaagccttggagagacatccaaggcattggagttcactttcctttgaaagatgctgtttgcatcaacggtgttatctattaccaggcaactaatgaatatggttccacatatttcttggtgagttttgatgttaggtccgagaaatttaatcatgtcaaggcaccgaaaatactgacggatcatccttgcactttgataaactatcaagggaagttaggacttataatgtgttgcaagaagggcttggaaatttgggttatggaggatgctgagaaaaaacaagattaatggtccaagattatcttttatgagatggagggtttagaaaaatggtatattgacggtgtcactcatggtggtgagattgtttttgtccattgggggttaaaatgttacaatgcattatatgttatctattttaatccaaagcgaaacagtatgagatacgttgaagtcgaaggtgcaatggtggagaatatagaggatggacataaatgttatcttcgtacatgggctgttccgaatcctgtcgagaatacaatgcgtttgtaacttcttttcacaaagtgtactttcttatacaaattaaacttatgttatttttttagtcacgattaataaagcaatgtagctcgtgatacaataaagcggctggtaatcatgtcgagaatataaatatcattgtaggattcgttga

SEQ ID NO: 165010 - DNA, 222 bp, Arabidopsis thaliana landsberg
atggctttggtgagaagtctattgggtgcaaagaagattctaagccgctccaccgcatcggcggcaccaaaagggtttcttgcggtgtacgtaggagagacccataataagagatatttggtgccgctctcatacttgagccaaccttcatttcaagctcttctcaataaatccgaggaagagtttggatttgatcatccaatgggtggcttaacgatccct

SEQ ID NO: 165011 - DNA, 1591 bp, Arabidopsis thaliana landsberg
gcgcctattcacaaactcatagatttgaatgtgaactcgactcattggagtgtttacgtgaaactcctatgtatctgggatcatcctccaacattttatgatgatgttacaacaatgattttggttgatgaaaagatttttatgatatgaagtagagttctttatcatcgattctttcttaatgtgcatgtggattcttctaccagtttttatctgctctgatctttggtttttccttgggctacttagcaacatcagagaatcactgctaccgttccaaaagataactatctttacaattttaggcgtgttctcaaagagggtttctggtatcacatctctcatttttgtgtcatttgctccaccaacacagtcaaatatacttggaaccctctacatatcaagtttaagtgggatacctccgtttggcctatgttagaaataaagaaatatgattgtatagacattattttccctatttaccttgagtttgtagggaactatatatgcgtgttcaggacgttactggtaagtttgtagggaactatacatcatgttttcttatttgtttattttgtcaatgtatttgattgctacggcgtatggtagattaacattttcttttttactaatactattggtggtgttcctattggttatgttcatcttagatcagccttcaacagagttttcaaagatatcactaatttgccattctgttgtgatgataataatgaagcaactacttctactcagccttttgggtttgcaaattctataccatatttatatggtaacgtcattttcaaccttaacaggatccatcttttatattttatcagcttttacaagacatcaagaggctgccaaagttatttactaaaactttgactaatcacaggttcattagaaagatcatgacttacctcgatgtacaaagaaaactcgcggcaacatcaaacaaaatctaccattccattttatgacctccccacaaacaaactccacggatctccccgatatagagatgcatcgatgacaccagctactacatatacgaggaacacatgttagttactgaatatgttggttttagttctatatctttatgtattgtagaactttgttaaatataatcatgactaatctaaaactaaattttttatttcttacaaggaaagaacttagtcatccttattcatgtagaagcaaccaaaaacaaacaacatgatcatcaacatagttttctcatatacaaaattgacaaccagacatcgagaaagcatcaacatctgctactaatccgagtaagaaaatatttatttgacttgattgttccagcttcaaaaatcattgtcttaagtaaaatatttattgtttgttatttatataatcattgtcttaagtttatgttagttattgaaatgtcaacccaaatttgcttgacttgattgttccagctttatcttgatcacggtggtcctacttacatgtgtaagtattgttgtgctttgatatggttgatagatgtattagaaaaacattaaccaaaaacagaacctgttttcgagccttgttgtggacaaggaag

SEQ ID NO: 165012 - DNA, 324 bp, Arabidopsis thaliana landsberg
gaaactcaaggctgctgagcagaaggtatcgctcctaacgggatcaatgatcagttcatgtacatgtctcaaccgcgagctaacgcgcagctgatcgaggtccttgagaaaggcggggttctggcgaccgagaaggatcaggttgaagaatggctgaaagatttcgccgatgctgaggccgacctcaaccgttttgttgccgagctgaaagaagaacttaaagctcctgttcccaaacccactctcgccgatgaggcgggggttaccgattaattcgggtcgcttctgcctgctgagagtagccgcccgtccgaagagcttgac

SEQ ID NO: 165013 - DNA, 851 bp, Arabidopsis thaliana landsberg
atgcattgtaagtgaaggaaagtatcagctgaagggggtatacgagaaaaacctcaatataatcatccgtgcctcatcagccggcgattttcgcagtggtttcgatttggttttccgtggtaaaggttccaatttcgttacattaatgtaccaatgccgtggcgactcctacgggtcaaggtgccgcttctgctacaccaccgccctctcggcggtaacgtcactctaatattatttattacctatcacacatttacgtatgaatgcagaagcacacatacacatgtaaattttcgttacatcgtagaagtacatattatagaaaaaatatatgttatacgttaattattacgtgcaatgttgtaattaattgtggtgtcaatatgcaaatttttctatgatagcttcgtaagagatgttcgagaaacaaagggggaataatatggtacgaccaatgtcttatggagatttcttccatccgcaatgaaggaaagctcgattacaacaacaacttctgaatgtccaacacgaagaatgccagcggatcgcctctggagttcaaacagaaaatggtcgatttcctactaaatttggggttgaaagctaccagtgaagacaacatggacaagtacaaccaggcggtgatgtatgcgatgggggaggaaagagttgggacaaagaagctttatgcgatggtacagtgtacgaaagacttatggttgaagacttgctatgcgtgcttggaatggattatcctcaaggaatcggactgctgcgatggtaaactaggagggagagttttcagtaccagttgtaactataggtatgagctttacccttttattaaacca

SEQ ID NO: 165014 - DNA, 384 bp, Arabidopsis thaliana landsberg
  unsure (1)..(384): unsure at all n locations
caacaaaacagaaacgttgttatccaatcgcagacgcagacgcaaacgctaattacaactggatctctaattttgagccgtttcttagcgcaaaacgcaaagaacggtcgtaatcttaacgcagcggatcattgtaataaagacgaggagatatgcaagagtcaaggaatgtacaactcaaccatgacgtgttgcannnnnnnnnnnnnnnnnnnngcgtacgataacgacaactgtggcgcatgtaagaaccaatgcaagttcacgcagacttgttgtagaggagagtgcgtttacttagcttatgataagaggcattgtggggagtgcaaccatagttgtttggttggtgagttttgtgtatatgggttgtgtaattacgca

SEQ ID NO: 165015 - DNA, 2035 bp, Arabidopsis thaliana landsberg
gcaccaaagatcatgctgtttctctggagagctctttatggaggactgtccactggcaaacaactccgagaaaggaacattgttgtggatgatgcttgcatcaggagtggagagtcagagtctatcttgcacctgttctttatgtgtcattttgcccaataggtgtggaaacaggcccctttctctagatattctcttttgtgtttgctccagcaagagtctgttttggtcctttggcgccatggatctgctggaatttgtgaaaagctaggaatcaaaaagtctttaatgatattgttctctcttatcagaaaagagtggggcaatgctcagcccatacctcaccacaagacaagcaaccttctgtgcctttggcagcgagcaggagtctcctcccaaaccaggattggcgtagtgtctcttgtagaacggatgcggcttggagagaggacatcaaagtggcgggccttggcgggagtattaagggaccaggggcaggagggacctcaacgtgttctgcaatttgcgagaacgtttcatcaactctcatggctgaaagtttagcctgtagaactgcaattctagatgtagtcagcttaggagtggatcatcttctactcgagtctgactgtcaacatttgatcggagccatcaactcttgttcagttcttttggaagttcacggtattttggaagacattctattaagtatcgattatttttctactttaatatgccaatttattcctcggtcatctaatgttgtggttgattctgttgcaaaactatgtctaagtttgtatgaccagaacatcatttgagcaatataattaagtttgtgcaccaaaaaaaaaaagatttatttcactatttaccctcatttagccaatcattctatgatttacgtaagacaaatatttcagccaagatattcgtacaggagccaaaaacccgatcattcttagccagtataaactaggattcaacccaccgtgtacaccgcgggagatagttatgttcggttttcctcttttttatgtatattatagaattattaataatgtttttgttttattatttgggtgtttgttgtatatttagtaggagaatatgttttaacatggtcaaacaggttatttaaaacacattctcttacaaaaacattattaataattactaaggagaaccccgagccaagccgttgggttttattggtaatgttgtgttttgaagttgtatgttgttagtgaatcttatttgtgattattcatgatatatgtagaataagaagtttattagaaattaggtggaaatacaatgcatttgttttttttttaataaggtccatatagcccttttaaatattgggggagggggtaattttttttgttaaccaacatctatgtagaagcgtcattaggaaggtaagtgaatataatataaaatgattaggtgataattttgtttaggtggtactcatatttggtcttgtatgagagaaagtgtattttaaatgttttaattatttttgttgttgtcttatgagattgttgtcttttaatgaagttcaattgtagatgagaaagatgaaaaattaaattaatgtgaaattgtattgatagtttcgtcgttttgtttatgattgtagttgatgtcttctttgtcttcaaaattttgacatgcgtatttaatgttatttgtagaaaatgtaaaaatttgtgtattttttcttttgtaattattttcacctttattttgggtataagtatttagttctgaatataaatatatataactggaagtttttaggcaattcttgtatgaacaaaattcctgcaaagttttgtgtatatattgtgtttttttgagggaattcttttttttcctatcatgttccatttgtctcagagaaggttttggatcttacttctcctgtcttttggttcgactgacgtttgtcttcctctccaccgatttctttaattatatttccttaattgaattagattttaaaagatgactttatgtacttgtt

SEQ ID NO: 165016 - DNA, 1461 bp, Arabidopsis thaliana landsberg
cggttctccctttgcccttgtgaattgcgtatgttgtgatataagtttccaagacatgatttatcattcttttacttacaaagtgagtatgcatcctgtttgtgcgatgaaaccagtaccctcttttatagaccacacaacagacatccccaccctctactttttcccctagcaaagctttcttaccttgcaatgtttgcggcctgattaaagaatctattctcacctatgtttgtgttccatgtgactttgtagtccatcaagattgtatctatttcccgcatatcataaaaatttctcgtcaccaccaccatatcatttttacctcttctcttccatctgcaaaatggtcttgcggagtctgtcgtggagaggttgacaatcattatggtgcttactcttgcatcaagtgtggtgattattttgttcatacaagatgtgcattgagaaaagacgtgtggaatggagaagatctcgagggaatacctgaagagcctgagatggatgttgagccatacgagatgatagccgatggaattatactccatttttctcatgaccatcatctaaaactcgagatcggtagagtttacgatgaaaacaagttttgtcaagcgtgcatccttccaatctatgaggctacttactattcatgtatggatacatgtgacttcatcctacacgaagcatgcaccaatgcccctcgaaagaaacaccatccgttgcatcctcacccgcttacgcttaaggtcgtcagtattggatacgatcattacagaagaagaggaaattactttgaatgtcgtgcttgtaggcgtcaaagttgtggttttgtctatgatagtcagggtttctcacttgatttgtggtgtgcctcggtttccgaaccatttgaatatcaaggccacgagcatcccttattcctagccttagaaccagatgaagaaaaagcgacgatatgtcaaatctgccaagaagatggtgatggaaataactatattagaaaactaaattgcatggaatgcaagtacattatatgtttcaggtgtgctaccttgccatacaaggcaaagtacaagcacgacaaacattttctcacattccgggaaggggaagaaggaagtgatcaattagactggtgtgaggtctgcgcaagaaacatagtatactcacgaaaagatgggttctatgcgtgtgatgactgctgcaccactcttcatgttcattgtttgcttggagaagacatgtatatgttgaaacctagtcacaccataacgtatattaagagggaggttcatatccttcccaacaatacccggtctcgaccattctgccatcatcatgatgaagaccgttgtccacacaaagtagttttcaaatggcaggaccagtacacgatattttgttcttaccgttgtttgacaaagtaaaatgtcttcgtcgaaacgctttgtaatcttc

SEQ ID NO: 165017 - DNA, 273 bp, Arabidopsis thaliana landsberg
atggggcgtggagttagtgcaggtggaggacaaagttctttgggatatctttttgggagcggagaggctccaaagctagcagccgttaacaaaactccagctgaaactgagtcttctgctcatgctccacctactcaagctgctgctccaaacgctgttgatagcatcaaacaagttcctgctggtctcaatagcaactctgcaaacaattacatgcgtgcagaaggacaaaacacaggcaatttatcacggtatgtctttaattctttcgct

SEQ ID NO: 165018 - DNA, 481 bp, Arabidopsis thaliana landsberg
acgttgtttccgagtacgttgataaggcgtctggcaagcgtagcgaccgtgagcaattccagaagatgttcgcggcggcttcccggcgcgagttcgatgtactactcttctggagcttggatcgtctcagccgtgagggagtggtggagacgttgaaccatctgcaacggttgacgggctatggcgtcaactaccgctcgttcacggagcagtaccttgattcgactggcatcttcaaagaggccgttatcggcattctcgcagccgtggcgaagcaagagcgcgtacggttgtctgagcgcacgattgcaggtctagaacgcgccaaggcccaagggcgcattggtgggcgtcctaaggcggaggatgatccatctatggtcaagaagttcgacaagctcaaggcccagggcctatcagtgcggaaaatcaaggcgaaattgggcgtctcacctacgaccgtacagaagctcggcaggct

SEQ ID NO: 165019 - DNA, 1503 bp, Arabidopsis thaliana landsberg
tgatagtagcattgcccctcagctgtgtcgtctcctctactccgatggtatggctaatgtaagtaaaagcaactagaacatcaacattacattcatttctttttcatagccattgatcgatgtaaaatgtgtatgtagggatgtgatggttcgattcttttgcaaggaccaaactcagagaggacagctccacagaatcgagggcttggaggttttgtgataatcgataaaataaagcaagttcttgaatcacgttgtcctggtgtcgtttcttgcgctgatatcctcaaccttgccactagagatgctgttcacatggtaaacatattcatatacttgaatgttcttactaacgtagatttatcgatttatttgaactttattgtttggtgttgttttgataaattcggtgtaataatgattaggccggagcaccgtcttatcctgtgtttacggggagaagggacggtgggacattaaatgcagacgccgtagatctgccgtcaccgtccatctcagtcgatgagtcattggcatatttcaagtccaaaggtcttgacgttttggatatgactactcttctaggtatctcatcatcgtcaatttttttttctatttattttttcctttagaaacaagcatctttcaatccacaaccatacgtatttaaatcaaaataagtttgtaattataagagtatacaccaaatgaattgttgcgttgctttttggccgttgcgtttgaactctgcaaaagtattttataaaaatctgaaaatgttaaaatattaataaataaaaacaactgagattgtagttcaattgtctacctatgtttagttactgtaaacacatttaactactttaaggattacaaatatttgaattaattctcatcgtatgcaatactttaaataatataaaatttacaagatagtttcacatcctagaagaatatccaaaaaatagactagtaatccagaaaggaaaatataatctacaagcaaagtggagctaaatactcttgggtgaatataacaacctctaataattgtgtaattgaacaggagcacactcaatggggaagacacattgtagctacgtagtggacagactatacaacttcaagaacacagggaaaccagatccgaccatgaacacgacattggtgtcacaacttcgatatctttgtcctccaagaacacaaaagggccaaaccgatccactggtttacctaaatccagactcaggctcgagcaacagattcacaagctcatactactctcgtgtcttgtctcataacgctgttttacgggtggaccaagagttgctcaacaacgatgactcgaaggagatcacgcaagagtttgcttccggttttgaagatttcagaaagtcttttgctttggcaatgtcgagaatgggatctatcaatgttttgacgggaacagctggagagattcgtcgagactgcagagttaccaacgctaatgacggggcctaa

SEQ ID NO: 165020 - DNA, 3420 bp, Arabidopsis thaliana landsberg
ataggagattctaggaaaaaaatcactttaatatgtatttgcattgtggcactaatatggtaagattgagcaaatgacggatattatcaagaagcttaaggtctgtgttagatggtaccaacaagtggatgaaactcatgttcaagacaaggaaaatctttcttcttctcttcaatctgcagagaaaagatacagtgataaaggtgaattttagttttctagttacatgtttggttctcacatcgttttgtgtacactgaatatggacttgatttctcattatttctagagttggatgcaaagaccaaagaggaagagctacgagcaactataacagagatgaaggagaacatagaatcacttcaggaaaagctgtccaaggagaagttgagtaaactggtaaggatttatcgctcaaagaatcgtttatcattgtgcaaacttatctcctaaagaatcgtttatcaagtttggtgactcttaattggttatgactactaggatgcaattgaaaatcacagaagagaaaaagattgtagagttgtagctgagaagcttcaggtttctctcagagaagagcttgacaaagttaaagaggaaaaaatggctgcgaagcagaaggtacttaagatttgcttttcgctaatgtgttgtttacttgtttcattctctggtaacttcctcttagctcttggctcaatcttttacatgacgtgttaactggaatgttttctttctttctaggtgacgtctctagaagatatgtacaagaggctgcaagagtacaacacaagtttgcaacaatataacaccaaactccagactgatcttgaagtagctagagaggctcacactcgtgctgaaaaagaaaagtcaagtatactggagaatcttactacactaagaggtcacagtaaatcactacaagatcaattagcatcgagccgggtaaatatccctggtctacaaacgtgattcttgtatttcttaatttgtgattgatttttcattgcatcttacttcgtttatcttccccttttgtgatcaaggtttcacaagatgaagcggtaaaacaaaaggattcattgctgatggaagttaataaccttcgaagcgagctgcaacaagtccgtgatgatcgtgatcgccatgttgtacagtcacaaaagctggctggtgagatactgatgtataaggagagtgttggaaagtcatctcatgagttggacattcttatagccaaatcaggatctttagaggttagtcaaagtcgacgtttcacatccttgccttatattttcaatattctgacaatgtcaatcttatgctgcaggaaacatgttcgttgcaaaaagagcgtattaaaatgttggagcaggaattagcttttgctaaggaaaagcttaaggtattatgcgatcaagtacctttggaattttgattggtgatctgccaactttcagatactctttaagtttgccaattgtttctttacactgacatacgtttatttgctttctacagatggtggatttatctatgtctcatacaatgacagaatttgaggagcagaaacaatgtatgcatgaactgcaagatcgccttgcagacacggttcgtcaactttttgaaggagagttattaaggaaaaagcttcataacaccattcttgtaagaaaatgtcgttttggaaacacttttcagttatagtatgactttctttatggccgctaagcaaagcttttattccaggaactcaaaggaaacatacgcgtgttctgccgagtgcgccccttgctaccagatgatggaggacgccaagaggccagcgttattgcctatcctacatcaactgaatctcttggtagaggcattgatgtggtccaaagtggtaaattcagcaacccaccttattactttgctcaattaggatatgtctgtactagagtttaatacatttttattgccttgtgctacttgggggtctcaggtaacaaacatcctttcactttcgacaaggtcttcgaccacggagcttctcaggaggaagtattctttgaaatatctcaacttgtgcagagcgcattggatggctacaaggttcaatatcttccttgttttgactttcttgtagatagatacctaagatgcaaattctagttagatagaagtagtatttgactcatggttattgtccttatgtagttgaatttattaagaactcctgtttatgtgaagcagactacactttgactgattcctttgttactgcaccaactcttgtttaaatgagacagacatcactttgactgattcttctgtcattgcatctttctcaaatctttgtggacacaggtttgtatttttgcctacggtcagacaggttctggcaaaacctataccatgatgggcaggcctgaaacaccagaacagaaaggactgatccctcgatcactcgaacaaatattcaaaaccagccaaagtcttagtacacaaggctggaaatacaagatgcaggtaaatatttctccaagaatgttctgacttttgttgaatgctttcactgttagcattgttttgatcgaattttaattgtaggtctcaatgttggagatatataatgagtccatcagagacttgttgtctacaagccgaacgattgctatagaatctgtgcgggcagacagtagcacatctggaagacaatatacaatcacacatgatgttaatggaaacactcatgttagcgacctgacaatagtagatgtatgcagcattggacaaatttcctcacttttgcaacaagctgctcagagcaggtttgtctataagttttgggaacttttttcttcaaagagcatggcttttgagaatattgttacactgtcgtttctgtatagttacatcgtaaacctcttatttgtaggtctgttgggaagacgcatatgaatgaacaatcatcaagaagtcatttcgtgtttactcttaggatttctggtgtgaatgaggttaatatcatttgtctttcaggtttatgttttgtgttgtagatttatttctcacttatgaaaacaccaacactctctcctatttcagagcactgaacagcaagtacaaggtgttcttaacctaattgatcttgctggaagtgagcgactttcaaggagcggggcaaccggagaccggttaaaggagacacaggtttttgcttttaaaatacggtcttctaagttattcccataaattttttggactttccctctaatctttgttgtttccttcaacaggctataaacaaaagcttgtctgcattgagtgatgttatatttgcattggcaaagaaagaggatcatgtacctttcagaaactcaaagttaacatatctgctccaggttagataacatttttacttctgaatcg

SEQ ID NO: 165021 - DNA, 866 bp, Arabidopsis thaliana landsberg
acatcaaaagagcttctcaaaatcttttactgtgttgtggggacaaaacgaccgcccatcttctagcatgtccctcgtctctgctttacattctgagctcgaaagagctcgcttacaggtcaatcagttaatccacgaacataaaccggaaaacaacgacattagctacttgatgaagcgttttgccgaagagaaagctgtgtggaaaagcaacgagcaagaagttgttgaggctgcaatcgaatctgttgctggtgagctagaagtggagaggaagctgaggagacggtttgagagcttgaacaagaaattgggcaaagaattggctgaaacaaaatcagctctgatgaaagcagttaaagaaatcgagaacgagaagcgagcgagagtgatggttgagaaagtttgtgatgaactagcaagagacataagcgaagacaaagccgaagttgaagaactgaagagagaatcttttaaagtcaaagaagaagtcgaaaaggaaagagagatgttgcagttagcagatgcattgcgggaagagagagtacagatgaaactatcggaggctaaacaccagctcgaggagaaaaacgcagctgttgataagctaagaaaccagcttcaaacttacctcaaagcaaaaagatgtaaagagaagacccgtgaaccacctcaaactcagctacataacgaagaggctggagattatttaaaccatcacatcagttttggatcatataacatcgaagatggagaagtcgagaatggaaatgaagaaggttcaggcgaaagcgaccttcattccatagaactgaacatagacacccagagctataaatggccttacggtgaagagaacagaagaa

SEQ ID NO: 165022 - DNA, 2184 bp, Arabidopsis thaliana landsberg
atggcgattgaaactcagcttccttgcgacggtgacggtgtgtgtatgcggtgtcaggtgaatcctccgtcagaagagactctcacttgtggcacgtgcgtcactccatggcacgtgccgtgtctcctccccgaatcactcgcttcttccactggagagtgggagtgtcccgattgctccggcgttgccgttccctccgccgctccgggtaccgaaaacgctcgacctgaatcttccggtttagttctcgttgctgcgatccgtgcgattcaggctgatgagactttacccgaagctgagaaagccaaaaaaaggcaaaaactgatgagtgggggtggtgacgatggtgtcgatgaagaagagaagaagaagttagaaatcttttgttctatttgcattcaattgccagaaagacctatcacggttcgttttcattcttcaaatcaatgtgtttttgagtttattcgctaatttatgtgtttgttcttgtgatttgtgttaatgacttgttagatcttgtgattagtacacataaaccctactagaatcgctaatttatgcttgtgacttgtgttaatgacttgttagatcttgtgattaatacacataaaccctactagaatcgctaatttatgtttgtgacatgtgttaattacttgttagatcttgtgattagtgttgataatagtagtagaatcgcgaatttatgcttgtgatctgtgttagtgtcttgttaaatcttgtgattagtacgcataactgtagtagaatggctaatttatgtgtttgttgttgataaggatgattaatatttgaagtagcacactaatggcttatttgcaaccagtcttatgcttgtgattagtgttaatgccttgttgaatcttgtgattagtacacataagtgtagtagaatcgctagtttatttgtaaacttgataatgatgattagtgtatttaagtagcagactaatggatgtattgtacttgtgtgtttgtagacaccgtgtgggcacaatttctgtttgaaatgtttcgagaaatgggcagtaggtcaagggaagctaacttgtatgatatgccgaagcaaaattccgagacatgtggcgaaaaatcctcgcatcaacttagctctagtttctgctattcgtttagcaaatgttaccaaatgttctgttgaggcaactgcagccaaggttcatcatattatccgcaaccaagaccgtcctgacaaagcatttactaccgagcgggcagtaaaaactgggaaagctaatgctgctagcggtaagttttttgtgacaatacctcgtgatcattttggtcccataccagctgcgaatgatgtcactagaaaccaaggtgttttggttggagaatcttgggaggacaggcaagagtgtaggcagtggggagttcatttcccgcatgttgctggcattgccgggcaagcagcggttggagctcagtctgtggccctctctggaggttatgacgatgatgaggatcatggtgaatggtttctctacacaggaaggtttgattttttacattatatttgtcacctgtttcccttcttattgaagtagcctttttccaatttatcttaatatgtgtgaatgtgtgttgcagtggtggaagggatctcagtggaaacaaaagagttaacaagatacagtcgtctgaccaggcgtttaaaaacatgaatgaagctctaagacttagttgcaaaatgggctatcctgtccgagttgtcaggttagcttttctttgtgcaaagttcttatatctttctcactttctgcagactctcttcaactttatgtgaataagaatagattatctttattcatcgatatactctgagtagatagttatcatgactcttcaatcttcaggtcttggaaggagaagcgttctgcatatgcccctgcggaaggagtgagatacgatggggtctacagaattgaaaagtgctggagtaatgttggagtacaggtttgaatatatagctaacattcctattttgtttcttttatgcagagctggattgttttgttcctgacgtacactcttctgtttctctagggtttgcataagatgtcccgttacccccttgttagatgtgacaatgagccaaaaccatggaaaaggtttgatctttgttttttcccggaaagtgtc

SEQ ID NO: 165023 - DNA, 1359 bp, Arabidopsis thaliana landsberg
acggtgaacctttaggcgccggtagcaccggtacgtaacaaaattacatatttgtaacaatatatatatacacacatacattttagaatagtaaattctttatatgaatatatatgatgcttaaatgtgtatatatatatggttatatataggaggagcttgtggtttcgcagtggctaatccaccattatacgggatggtttcagctggaggtccttcagtgttcaacaatggaataggatgtggaacatgttttcaggtttgtatgaatgtatatagggcaagactcaagagcatagtgttacgtatgtaacacagaatttatgcccttttggtcagctttgttaatgctttttaggtaatatattagttagaatagtattttcagaaaagatgatacaattttatatatatatgtagctaagattgttcataaaacgtaaaaaaaaattgtgtaattatattcaataaaatgaccagttcatatgtcttttttaattaatcagaatgaacattaaaaatttgggttggaaaaaaaattgacatagcatgcaagatctgaatgtatgttatatggttacaacaagattttactttcatcaactatatagtatatgttaacatttttatttatcagattctatgcaatgggcatccagcatgctcgaggagaccaataacggtgacgataaccgacgaatgccctggtggtccttgtgcctctgaaccagcccactttgatcttagcggcaaagccatgggtgccttagccagacctggccaaggcgatcgacttcgatcggctggtgttctacgtgtttactacatacggtacttatatacttacataatttttgttttaaaatttttccttttagtatgtatatctaggttttgagttgaattttttttttttgataaatcaaagaaatcaatgttttcatttttgttattatctttacagaaatattatttaattaaaattcaactattttctatgatatacgaatcaaaatattgactattgttttttgatcagcgtggaatgtttatatcgaagaactaacatagctttccgtatggaccctggagcaaatccgtactacatttcatttgttgtcgagtatgaaaacggtgatggagatttggcctatactgaaattcaaccagccggcggaacattcatccccatgcaagaaatgaggtctgctgtatggaaggtcaactctggctctcctctaacaggaccattcaacatcagacttacttctgctgaatctcataatgtagtcgtagcttataatgttattccggcgaattggaaacctgacgaatcttaccgtatcaattgttaacttc

SEQ ID NO: 165024 - DNA, 2562 bp, Arabidopsis thaliana landsberg
tcggaagcagaggagccaaaatcaatggcggccaacaattttgcgacgaagctaagcagaaacaccaatagaattaccgtaatcttggtctacgcattccttgaatggcttctcatgttctttatcttcctcaattcctttttcacttactttatcgtcaaattcgcctctttcttcggtcttaagcaagtatgtcttctctgtccgaagctagatcgaatcttcgagcgaaagccagaaaacagattcacttacaaagagcttttatgtcaaaatcacatcgccgagctcgctagtctgagtttttgcagaactcacgggaaattatccgaatcggcgaacttatgctcagattgctctaatcgcgaagaagaacagagcaacattggtttaggtttttgcacatgttgtcagaagagcttagcggataaaccataccctaattacttgcttctcaagtcatcaatttgggggaaaactttgggtgacagagaagatggaggattgatcttagagatgatcgatgatgataaatttggagatgggtttgagatagatagagaatcttatcccttagggttcttcagagataaagcagaagaaggaaagaagcaagaccagcagcaaaatggtgaagtgatttcagatgttgagagttatggattaagcttgagagaagtgtctgaagaggatgggttaagatctatcatcagcaataattctcctgggaacgaagctaaatcaagagtttcagaggatgaacaaaggaatgatgacacaagcaatgttcccacatatggggaagatcaaatttcaggtagagtaagaacataaatccaaagtctgaaactttaaatgtgttagttttctgggttttatagattcctcattgtgatcaaacaacagggcgtgtagaagaaaaagaagaagaaacaggagtagcagatttgttgtatgaccagtttgagagcaagaatttcactggtaagcaaaaagaatgactcttttgttatcgaaaatctcttcaagcaggccttgtgcacatatgcatacatctttggtttggtttatctaactttgtgaagcactttaagtctgaatatagttgttttctttcataggtagccaaatcgaagaagaagaagaagatagagaagaaacgactaaggagcttgatccggaaactccaacttcagtcagtactttgtttaacaagaaacttcattttcttgctagaaatgagtatgcagctgctgaagatgcaggagatgggaatgtattagtgagtgagatggacggtggcgatcctttaaggactattgaaaggttgagagagacagtgagagcagaacaagaagcactgagagatttatatgcagagctggaagaagaaagaagcgcgtctgcaatatcggctaaccagacaatggcaatgatcacgaggctacaagaagagaaagcgaaagttcagatggaagcgttgcagtatcagagaatgatggaggaacaagccgagtatgatcaagaagccttgcagctattgaatcatttgatggtgaaacgagagaaagagaaggaacaactccagagagaacttgaggtttatcgggcaaaggttttggagtatgaatcgaaagctaagaacaagatcatcgttgtggaaaacgattgtgaggctgatgatgatgataaagaggaggagaataaagaagaggataattcttctgagatggatgtggatttggagaagataacattagattgcgtacaacatatgagcatgcttggtgaatctttatcagagtttgaggaagagaggttagtgattttggatcagcttaaggtgttagaggataggctagtaacaatgcaggacaaggaatctgctgaggatccgggagaattcagcaatagttatgaagaagcgagtaatggacatggaggactaacaatggcatcaatggcaaagagtctgctacctcttctagacgcagcagagaacgaatcagaagacgggtctcaaggactaccagaatcagatgaaaagaactttggttcggacagtgagaaactggagataatcaaacaagttgatagtgtctatgagaggttacaggagctggaaacagatggagagtttctgaaaaactgtatgagttcagcgaagaaaggtgacaaaggaacagatattcttaaagatatattgcaacatctccgcgatctcagaaccattgaactcactaacacaattgaaaaccagacgacacaggaagagtgatgtttattcacaagaattatatatgaactctctctcacaccattgttcagacagatttcaagccggaatcaatgtctttgcactgctcaatggaggatctgagaattacagaaattcttagatgtctcttgtttgtgttttctttttttgtttggtgtaacaaaaggtttcacacacactagtcattgaatttgtatctgtcaatgtaaattctgtgtttcttgtagtttatgagagttttcagttggaaaataattggcacataaaactggttcgttctgcaa

SEQ ID NO: 165025 - DNA, 3875 bp, Arabidopsis thaliana landsberg
  unsure (1)..(3875): unsure at all n locations
atggatagtttccatgggcttttgttggttgcacttgtaactttcgctataattcactttgttcaagctcaggaaggtatgtatctacattttttttcttcgaagatgaacttctctcttttgtcattcctatgatcaacttactagaaaaaagaagaagaaacaatttaactccgatggatttagcataactgaaaacgtttctaggatcgtataggcgatgtaagggttccacgctctgaaagtaaatgttccttgaggcatgaantagccctttcacaagtatataaatagcacttagaaaataccaagaattaggtgttgttccacatgcatagtatcttgaacaagtaacgacattctgtattgtggtttatatattagctaaatcattttgttcaccctttctcaaagcttcttttagacacatatttactatcacattttgaaatttttgtatccgtcctacctgcatctttgttctttcatatgcatatattataataaaaattgttgttcgtgacatttattttgtacaaccatataaatgataggaacttttgagattgcacaatatgtatctctgcggtatgattatagatgtatagttttaccgtatctaaaactattgttcaaaactggatcaaatttaactttgatataactagccactcacctaattgtttttagcttctattgtgttaaacttccatgattctttcttttgatgaatgtggttttatctttatatagggtttatcagtttagattgcgggttatccccgaatgaacaatctccgtataccgagacttcaactggattacagtactcatcagactcaaacgttatccaaactggaaaaattggtaggattcagagaaatcttgaagattactacgcaaagccccagacgacggtcagatactttccagacggaatacgcaactgttataatattacggtgaagcaaggaaccaactatttaatcagagctagagcagtatatgggaattatgatagtcttaacatttatcctaagtttgacttgtacataggcccgaacttctgggcaacaataaacattggagatcatgtaaacggtacaagagaggagatcacttacatcccaaaatcaaacattttagacctatgtcttgttaagacatacgatagtacaccatttatatcgagtttagaaataagacctctgccaaataacagttacatcaccacatctggtccgttgaagctgttttcgaggttttatttttccaattcaaaaaacgttctaaggtgagctagtcttctttagttaaaaggatctaaagcatatttatcattcatttgtgatatatgggcatatggctaataaattaaagattgtggcaatgaataggtacccaaaggatatttatgatagaatatggagtccatacattgagccatattggaatcagatatccaccagtcttacggtgagcaccaatagtttccgtcttcctcaggatgctctcaaaaccgctgcaacaccggtgaatgcaagtgcaccgtttatagatttcgagtatcaaaattcctctagtgataaagtttacatttaccttcactttgctgaggttcaagtgttacgggccaacgagactagagagtttgcaatttctgtgaacggagaagtcattgacgactcctacatgcctttatatctacaatcagaaacggtacaaactccgtctccaattatttgccaagaccaagaatgcatcatagagctttcgaaatcagggaagtctacgcacccacctctgcttaacgccatcgaaggttttgcagctgtagaatttctacagtctgaatcagatgaaaatgatggtacgttattgaatgttatagtactgcatgttttgtatgctaattctaatatattgttcaaatttatggtagtgattgctattaaaaacattagagccgtctatggagtgaataaaatctcatggcaaggtgatccatgtgttcctacgcactttttgtgggatggtctaaattgtagtaacacggataagtctataccaccaagaattacttcattgtgagattttctaactagattacaacatacttttctgactacatgtttcactagttttaattttgtatcttaacttataaaacagagatttgtcttcaagcgggttagggggacctatagactctggaattcaaaatctaacccatctagaaaagttgtaagtatgatcatttttcccacgaagatgaaactcttattcaatgaattttgatctccaaaatatcgaaatttcagggacttgtcaaataatagtttgacgggagcaatcccagaatttctagctaatatgaaatcattgttgatcatgtaagtgttttgatacttttggtcccaatactccatgtgttcactttcaccaatgtatgaaatttttttctccttcactagaaatttgagcaagaacaattttaatgattcaattccacaagctcttctcaatagagaaaaggaaggactgaaattaatgtaagaaaacaactccactacgtacacaaatttcattttgaaaacccctttcctttcgtattcagaattctatacaattgatgcttttttttttggcagtgttgatggacatggaataaatcaatgtctacctggttcatgtgtcccaaagaagaaatttccagtgataattgttgcactggttgctacagcggtggcggttataatcatcgtggtgatgattctcgtttgtgtcttaagaaagaaaaagacatcaagtcatgtggaaggtacatccaaatacttgtgatcaaatcaacatactactatatattattaaggtatcataaatatcattcttttactaactttttctttgtacatctattacaacttcagcaataacgccacgggcgaacttcacacccactatcatgtccgagacatcaatcgagacaaaagagagaaggtttagtcatacagaggttatcgaaatgacaaacaagttcgaaagagctctaggtgaaggagggtttggcatcgtttatcatggttatttaaacggttcacagcaagtagctgtcaaagtactttctgaatcatcagtacaaggctataaagaattcaaggcagaggtatgaatattttcttagaaaatctcaagcattatgttagaccaatgtgcttcattcattgtttttttcattttgatagttaaacacttggctctaaaaaagataattaaacacttcattcattgttgttttgtaggttgaacttcttctaagggttcaccatataaatttggtaagccttgttgggtattgcgatgatcgcaatcacttggctctcgtctacgaatacatgtccaatggagacttaaaacatcatttgtcaggtaaaaacatatgtacattaacattttaatttacttttaaaagacattttaattattacaaacaattcttttgacgattgattttgaggataaattacaggaagaaacaatggttttgttttgagttggagtactcgactacaaatagctgtcgatgctgcactaggtttgtgttaactcataatgattttattaatttatttttcacattctaaacatttcctaggatcactagacatacgtacataaaaggacatttgcaaaatattaataggattggaatacttacatattggatgccgaccatcgatggtgcatagagatgtcaaaagtacgaatatactgttgggtgagcagttcacagccaagatggctgattttgggctttcaaggtctttccaaattggtgatgaaaatcatatttctacggttgttgctggaactcc

SEQ ID NO: 165026 - DNA, 588 bp, Arabidopsis thaliana landsberg
cttaatcgcacgttcttcttggtatatattatgatcataatcatccattaattctcgaaacaaataagaaaaacgaaagaatatgtcttcaccatcttccctaacgcagagaaacccaactagttcgcaagagcaatcggagtctgttccacagctaaggaggcagacatctcaacatgcagccatgtcacagacgctaacctcagctgcaaacctggcaaatctccttccaaccggaacgctcttagctttcacgctcctcatacccgtctttacatccaatggttcatgcgattacccgacccaggttttaaccatagagctcctcacgcttatgtccatctcctgcttacttagctccttcactgacagcgtcaaggctgaagacggaaacgtttattacggatctgctactcgtaaaggcatgtgggttttcgactaccctgaccctgacggtttgggtttacccaatcttactaaataccggataagaattattgactggatccacgccgctttgtcggttcttgtgtttggtgcggtggctctgagggacacgaacgccgtgagttgtttttatccggcgcc

SEQ ID NO: 165027 - DNA, 452 bp, Arabidopsis thaliana landsberg
  unsure (1)..(452): unsure at all n locations
ttcgatcgcgtcatggtgctggagttcatgcccgacggccacggcgtcgtcatcgacgaacaactcaagcccggggtgccgggctatctgaaccagcacttcccggcctctgacatccccgagaacgcccgtgccctgtacctcaagaaattgcagcgtttcattgccaatgcgcataccgatccggtcgatattctgtcgacacagcctcagccggtcgatctgacctggtccgagctgcgtgcagtccacccggtgcatacgcaatacatgcgcaacatgggtannnnnnnnnnnnnnnnnnnnnnnnnnntcgtgggaggacatttgtggggccttattacctgccataacctcgatcccaggccactttcctttgccagcggcagttgtgcgaaccctggcgtcggtgaccgggctgcacatgaccgggctgtcgcacctgcgccagg

SEQ ID NO: 165028 - DNA, 1915 bp, Arabidopsis thaliana landsberg
aacacgaatgtgttgagtgtcaagatagtgtaatctcttaccctgtcttgatagccacatccagaagttcttctcctcagtttgaagttagagttgatgaggtcaactatgaacagaagaagaatctgtatcctccttcttcagattctgtgactgctactgttgcacatgttcttgtagattctcctccatcttctcctgaatctgtccatcaagctatagttgttaatagatttgcaggcaagtcaaaggaagaagcagctgccatcttaatccagtctacgtttaggggccatttggtatgttgtggcttgatcagaacttgtctgcttagtcaatcatgcattatacctttggttgaattttttctatctttgagatacaatgtgagagaacagggtttctttttcaaatgtaacgttttacttctatggtttctccaatgcaggcaagaagagaatcgcaggtgatgagggggcaggaaagacttaagttactgatggaaggatcggttgtacaacggcaagctgcaattactcttaaatgtatgcagacgctctctcgtgtacagtcacaaatccgatctaggagaatcaggatgtcagaagagaatcaggctcgacataagcaacttcttcagaagcatgccaaagagctaggaggcttaaaggtctcactctcttgtttatctcagatgcagttttcatttactactaaaaaaactcctttcaaactacataaattggttgagtgatagtaacattctactgcattactcgtgcttaaattcgctctttactaacctgcagcttttcatgcggttgtttaaatttatcgttgtctcttctgatgtaatctggtaatgcagtatcctgtgatttttttgtttattgctaagactagctctttcttctgtagaatgggggtaattggaactacagcaatcagtcaaaggaacaagttgaagcaggtatgttgcacaagtacgaggcaacaatgagaagggaaagggcattggcttatgcattcacacatcaggtacttccatgtatacctaactcaaatttctctgcataatggcatagaaacttgcaagaacctgaatagttgcccttgttgacaaagcagtccttaaatgtcgcttaagattcctgaggcctgaagtttgatatctatctacataactctagctaacataattggatatggtttaatgcttatgattatatccgactcatctttgcagcaaaacttgaagagctactcgaaaactgcaaatccgatgttcatggatcctagcaacccgacttggggttggagctggttagagaggtggatggctggccggccatgggagagttcagagaaagaacaaaacaccaccaacaacgacaactcctcggttaagaactcgactaaccgtaattcccaaggaggagaaacagcaaaatcttcaaaccgcaacaaactcaatagctcgactaaacccaataccccatcagcatcatccacagccaccagaaacccgagaaagaagcggcccatcccatcgtccataaaatccaaaagcagtgatgatgaggccaagagctcggagaggaaccgtaggcccagcattgctaggccatcggttagtgatgacgagaccctgagtagctcaactgctaggcgtagtagcaatctgattcctacaacaaaatcagcacgaggcaagcccaagtctcaaacctcatcacgagtagcggtgaccacatccacaacagaggaaagcagtatattaccggagaaagcaccagcaaagaaacggctctccacctcggcttcacctgcacccaaacccagacgatcctccgccccgccaaaggtggaaaaaggcgttctcaaggcagagagaacgccgtgaccaaccgaggta

SEQ ID NO: 165029 - DNA, 549 bp, Arabidopsis thaliana landsberg
  unsure (1)..(549): unsure at all n locations
ttgaagcacatcgccgccgattatccggtgccggtgcggatcgtcagcgaaggtgaagccctcgctatttcgctgatcgagaacaacgaaagagaaggactcgacccgttcgacgtgctgcgcgcgtaccggatgctgacagaggaaggccgcagcgtcgattacatcgcagcactgttctccgcctcgccgcttacggtcaagcggcgcatgaagctcgccaacgtgtcgccgaagctgctcgccctgctgcgcgatgacgcgatcacgctcgaccagcttgctgcactcgccctcgcggacgaccacgagacgcaggagcatatctggttcgaggcgaacgagtggcaacgccagcctaactacctgcggagggcgatcacgcgcgcggaaatcgacgcgagccgcagccgnctcgtacgcttcgtcggacttgcggcctacgaggcagcaggcggctatgtgcgccgtgacttgttcagtgacgacgcgaacgctggctacattgccgacgcagaactgctgcaaaagctcgtcgcggaaaaactc

SEQ ID NO: 165030 - DNA, 749 bp, Arabidopsis thaliana landsberg
atgtttgcagttgaaaacatttctatggaattcgaaccggcgatcaacgaatcgtcttcgtcactttcgtcatctcgtagtagctgcggtcactggtatgttcgttacggagtctgcatcgcttgtaaatcgacggtaaacaaacgccatggcagagcattcgattatctcgttcaaggtttgcagctaagccacgaagcagcagcgtttacgaagcgctttactacgcaattctattgtctcaacgagaagaagctaaaccttgtactcgacttggaccacacgcttctccactctattagggtttcacttctttccgaaacagagaagtgtctaatcgaagaagcgtgttcaactacaagggaagatctgtggaagttggacagcgattacttgacaaagctacggccttttgttcacgagtttttgaaggaagccaacgagttgttcacaatgtatgtttatacaatgggtactagagtgtacgtcgaatccttgttgaagctgattgatcccaagagaatctactttggtgatagagtgataacaagagacgagtctccttacgtgaagacgcttgatttggttttggctgaggagcgtggagtggttattgtggatgatacgagtgatgtttggacgcatcacaagagtaacctagttgagattaacgagtaccactattttagagtcaatggcccagaagagtcaaagttctacacggtggagaagagagacgagagtaaaac

SEQ ID NO: 165031 - DNA, 636 bp, Arabidopsis thaliana landsberg
ttaggtcttaactagggtttccattttattggtctcttcttattgatgcagccatttggtcaagtcccagttttcctagacgggggtcttaagttgactggtgagtttaaaactacattttcaactaattaatgatctaatgaattttgatataatttgttttcgtcagaatctcgagctatatctgaatacctagcgactgtccataaatcaagaggcacacaacttctgaattacaaaagctacaaaacaatgggaacacaaagaatgtggatggctatcgaatcttttgagtttgatccactcacatcaacactgacctgggaacaatccatcaagcctatgtacggtctaaagacggactataaggttgtgaatgaaaccgaggcgaagctagagaaggttctagatatatacgaagaacgactcaaaaattctagcttcttggctagtaacagcttcacaatggctgatctttatcaccttcctaatatacaataccttatggacacacatacaaagagaatgtttgaaaaccggccaagcgtgcgccggtgggtggctgagatcacagctagaccggcttggaagagggcatgtgatgtgaaggcttggtaccataagaagaagaattaa

SEQ ID NO: 165032 - DNA, 275 bp, Arabidopsis thaliana landsberg
atgaaacgtcgcagcatcgaacccgaaatcgcttccgaaagcgccgaagaaagcttgtgccgcgccatgttggcgctggacaagctgtccgacatgcgtgccttcttgcgtgatttgtgcacgccggccgagatggaggcgctgatcgaccgttggcgcgtggttccgcatgtgctcgaaggcgtgccgtaccgcgacattcacgagctcaccggcgtgtccatcaccaccatcggtcgtgtggcgcgatttttgaacgatggcaacggcggcta

SEQ ID NO: 165033 - DNA, 4021 bp, Arabidopsis thaliana landsberg
aaaaagattgttcaagaaaagttggaagatccgggatctttcactctatcatgctctcgtacgcaactagctttgagcaactttatatatgatctaggagcttcagtcagcataatgccactttctgttgcaatgaagctgggatttgtccaatataagccatgagacctatccttgatccttgctgataggaccttaagaaaaccttatggcctcctcgaaaatctgcctatcatgattaatggcgtagaagtgcctacagactttgttgtgctggatatggaagtagagcatggggatggcttaatactgggaagaccctttttagcgtcagtgggagaagtgatagatgtcagggaagggaaaataagtctcaaccttggaaagcatatcaagttgcagtttggcatcaacaaaactccacaagggtcaaccgaagatggaaaaacctttggaaatgatagagcgatctcaggagaaggatatgagactgaaagagtgaaagaacttagaaagaggtctgataagcaagatgaaactatagagaagctagcccaaaccattgaggaacttaggagtaagctgaatcagatgcagaaggaagctcaacctaaaggcgggattaacactatcccgagaaaagaattcacttcaagatggtctcaagatacagattatcctccagaagagaaggaagcctattttgaagaaagggggattgagtattctgctgcagacctctccagggaggacgctgaatatgatgatggtattagagaggattatgctgaccctctctacacttcattttcttcttgataagtgtgaggagtcaagctagagacttaaaacaagctcacttgggaggaagtcccatgactatccttgtaaataatttttactttcttgttatttttgatttgttttgtttgtgtttgtggttctcaggaaaaaaaaaaaaaaaaagaagtaacatgaaggtagagtaaaaattcaaaacttttactctactgatggtctagagatcgagtacattggtcgagtttgagtgatgcttaaaaacctaaaaaaattttaatcatcattttactcgaccaacagaagctacaaagtcttccagggagtctttcaagtttacagaggattgcgggatttcctggagtttttctagtgaacagagaatacagagaaggaacaagaagacatcctgggacccgccgctgacgcccatgtcctctatgcaacagaccaaaggacaggaaatctctcctcatctcttctcctccactcgacgtcaacgccatcactcgacctccatttttcttaactcgacctcatcgcctcgttttctcctccacaaccccataaactcgacccatctccaccgacaaaacaaacttcaattcactcgatcccatcgcccctctctccacaaatacttgacctcgccacttcttttcctcaaacactcttctctcaaacactcgaccaacactctttaccttatcctttcttctccatcactcgacttcaacgccatcatcatccgtccaaagcagcactcgacctcaccatctctcttcctcaggcactcgaccgcttctctctcgcctttcacagccacaactcccatcgcctcttcaccaccgtctcgagctaccactcgacgattcctcgccaccaccacctctcaatcgtcttaaagcactcgacctcttcaccacttgaccaagcagccgtttctcctcctccgagtcaatcactcgaatcaccgctcctctaacaacactcgacttcttcttacatcatctcatcaccaatccgcgactctactctcatcattcgctactcgaccttgctgtttggttcactctaccgcagctcctgcataacctcgtcgttttcaccactctctctccatcgcttcactcggccctccataatcactcgaccagctacccagaaaacaaaaaaaatattcaaaaccggctacggtttactcgaccggtttactcgacggtttactcgaccagtttactcgacctgtttttggtttgtgtcgtttgtgtttctggttttgtatgaactaacgtattaacgtttatttttgagttacatttgctttcaggtttcgtaatgattaactacagtggagaattctctatggaccctgattacaatgtggatgaagctgagtcctggtcagggatgaattcgaacgctctacagcccgacgtaatcagagaagagctgaaatcgccagaggaaagagggcgatgtcgagtagatatgagctgattgatgaggacatcgaaactgagtatgagccagagtcatggcgtaaggagacgaagctgctgaacaaacccgacgaggttacagtggaggagtatatcagattctttgagatgaatgacttctagggaacgaggtatccgtgctatgagactttagcccagttgggttactggaggacgtacaacatctgttcgagaagtattatctggagacactcatgtcttacccttaccctgcctataaggaggagacaatcgagtttctttccacgctgcaagtggagatgtatgagggactcacagactttgagctggataccatgggattaggtttcttgacgttctcagtggatgaacagcggtatcagctttcgatcaagaagttggaaaaactgtttggtttccctagtggaaagggaaccaaacccaaatttgacagagaagagcttaaggatttgtgggccactatagggaacaatctaccgctaaactcggcgcggtccaagaacaaccaaattcggagtcctgtgatccgctactttcagcgatcggttgccaacgtcttttactctagggagtctacaggcaccgtgtctaacacggacatggagatgatagattatgcgcttatagggattctccgccggacgaaggggaagaatgtcttgagaggcgatctcaacaacgcaccaccagtaatgcctctgttgatccatctgtgtggatacaggaagtgggcgttgacgaacgggaagaagaaggtgagaggagcactatgcgtgggtggcattgtgacgccaattctcgaagcttgtggagtaccgctcaaggaaccagggttagcatcgaggatgatggacttggatcatttgcgcagatgtgagttcttggagtttgacatggcaggcgactttcaccgctataggttcgagcattcatcgattagaatcgccaacattcttctcccctgcattgatgatactaggattctcgagggcaggaacattgacttcaagcctacgcttgaagatgtttatttggagggcagtccgccaactgaggagatcagtcacaccgaaggagctacaacagaagatgttgatgagacagtcgatatagatgaggcggagtttgccacgagtatgtatcatttcagtgagcgcatacttccagagaaggaaagacagagtttgagcgaagctcacaggaacaacaacaagctgcagaagtggtgcaagaaacaggataagttactcgctaagtgccttagggctatcaggtttctgaaggacaagatcagctgctcctcttccactacagctattccgcagggacatctccctcaggacatgctttcgaggagatatgacgcgcccgagccaagtcggcgcaggcctgagcctagagagcaggagattccgcatgtccctgcgaggtattcatcattcgagccttgtgaatctgggaggaagaggaggaccacactcactcgatctagcagtaggagcgaacgacttctgcagtctcatagtttacgcgaccgcggagctggccgcaacagaaggagagaggtcgagtttcctgagagcggtgctggccgccacagagctgatgatgtcgagtacccacctgctggagctgatacagaacaaggtggttcgtccatggcctgggagcaatcacaggcagccattgacgagcaactccgctccttcttccactga

SEQ ID NO: 165034 - DNA, 1878 bp, Arabidopsis thaliana landsberg
tttgtttttgtagagattgagttgttgaaagagagaatggcgaagttgttgcttggtgaagacatgtctggttctggtgaaggagtttgtcctgctttggctatttctaatgccattaccaatctctatggtagttttatttcgaagttccatactttagtttgatgtttctttgatatcttactttacttatgagtctaacttttgatttcaatgtgatgaaagctgcaatattgggacaacaatggaggctagagccaatccctagtgagaaaaaattaatgtggagaagagaaatcgaagttcttctttctgttagtgatcacattgttgaattggtaccttcctttcagaatttccccaatggaaacaagattgaggtaatttcattttcaagcttaagcatttagtgattgtgttctgtttcattgatgatttggtggattttaaggtgatgaactgcagaccaagatcagatctctttacttgtcttcctgctcttaggaagctagacaatatgcttattgtaagaatctgatccttccttgttgttctgttctcatgaggggtttcaaatgtgagttcttaatagagttctgtttttgacgtctttaggaaatattagatagttttggagaaacagagttctggtacgttgatcaagggattgtagctgcggaatctgcaaggtctaactctttccgtgaagacggagacaaatggtggcttccgctgccgcgtgtgccatccgatggacttaccgaacaaactaggaagaaactggatcatactcgcgaattcaccaaccaaatcttgaaagcttgtatgtcaatcaacagcattgctttagctgaaatggaagttccacaatcataccttgaagcccttccaaaggtaagaaacaacttaatctcagagccaaacttaatctcagagccaaacttaatataatttcctctagctgaattgttcctattttgcagaacggaagatcttgtcttggagattttctatatagaaacatcacatcggataacttctctgcggatcacttgctagaatcaatagatctttcatctgagcttgcggttgtagaaatggcgaaccgagtagaagcatcaatgtacgtttggaggagaagagctcactcgaggcatctgatatctctgtatcgatccacaagtacaagatgggggatgatagtgaaggagatgatgatgcatcaaaccgatggtgacaaaagggaaatatttgcggagagagcagaaagcttattgatccgtctcaagcaacgtttcccgggacttagacaaacagctttagacacaagcaagatccaatacaacaagggtactacatggaaatcaaatcccaaatcattctttcttcttgaaatccggtctaaacagttttcctttttctatgctttaggacatcgggaaatcgattctggaaagctattcaagagttctagagagcttagcattcaacattgttgcacgcatcgatgatttgctcttttgtgatgatcttacaagacattcatcggatcagattcctacaacattaggcaacaacgggaatgacgctcctaagagcattgcagtgccggtttcaaactacacaactccgagctactcgccttcaaaacaggagcttcgatcatcaattacagttccaccatctccctcccggttcaagattcctcacagcagcagtgttaaaagggttttgacagcttatgtaacaaagaacgaaccaagactgaaggatcttcctttagaaagatcaagccgttcttcgtcgagtgagagattgtctctggagaaatgcatgaaggagtcgttgaatgtatcgaaccttgatcctgggatttga

SEQ ID NO: 165035 - DNA, 943 bp, Arabidopsis thaliana landsberg
atggtgaaggctcttgtgatcataaactgcataattctagccataggaaactgtggaggtcctttgattatgcgtctctacttcaacaatggcggtaaaaggatttggttctctacgtttcttgaaactgcaggctttcctgttatcttcattcctctgctcttctcttacattacccggcgcagaagcaacaatgtgggtgatagtacaagtttctttcttatcaaaccgcgtcttcttatcgccgctgttattgtaggcattctctcagggtttgataactacttgtatgcatatggtatagcttatcttccagtttctacagctgctcttatcattgcttcacatttagcttttatagctatcttctcattcttcatggttaaacataagttcactccttttaccatcaatgctgttgtgttgttgactgttggtgctgcggttttgggaatgcataccgaaactgataagccagttcatgagactcacaagcagtacataactggtttcttgatgactgtagcagcagctgttatgtatgctttcatcttgccattagtggaacttgcttaccagaaagctaagcaaaccatgagctatacccttgtgctcgagttccagttgattttgtgtctccttgcttctattgtcagcgtcatcggtatgttcatcgctggtgatttcaaggttagtcactcttttgaatctgaaaacatacaaaagagtttttaacagagacttgagccctttactgtttttgcaggccttaccaaaagaagcaagagagttcaagcttggagaggcattgttctatgtggtggctgtgttttcagccatcatatggcaaggcttcttcttggcccccatcccattaatcttctccacatcgtctcaagtctaaagtattatgatatcagtgcttttgccaattcagagggtt

SEQ ID NO: 165036 - DNA, 1085 bp, Arabidopsis thaliana landsberg; identical to SEQ ID NO: 36077

SEQ ID NO: 165037 - DNA, 2313 bp, Arabidopsis thaliana landsberg
ctccaccaacatcaagcttgggtcaccaccaaaggaatattatgttcaagttgttacatgttagtgatatactttgggttaattgggcacggtgtcccaagtgtcctgtgaaaactgatctcggtgtatgcttctttataacccgtgtttatcgaatgttaagaagttacattttggaatcttagatgtatgtttggttgctgtgtagataccgttatcattatatgacaataaagcttcttcgacgtcgaagaatgttggctgtgaagatgatttctgttcgttcattatgcaatcggagacttgcggtgcaaagaagccatgtagttatcatgtagtgtatggagatggaagtacaagtgatggagattttataaaggataacattactttagaacaagtgactggaaatcttcgaaccgcgccacttgcgcaggaagttgtattcgggtaagtatagcggtacacttttgatgcttctttaacttagtgaatgctgcttcatcataaggattcctctgtgagacagatgtggaaaaaatcaatcagggcagcttggacaaaccgactcagcggttgacggtattatgggcttcggacaatcaaatacctcgatcttttcgcaactagctgccggggggagtacaaagagaatattttcacattgcttggataatatgaatggaggtgggatttttgctgttggtgaagtggaatcaccagtagtgaaaacaactcctatagttcctaatcagtaagtgagaccatctctagtcattcaaatattttatatattgtttcttgtaataactttatccaatgttttttagggtacattacaatgtcattttaaagggaatggatgtggatggtgaccctattgaccttccaccaagtctagctagtactaacggtgatggaggaacgataatcgatagtggtacaactttagcatacttaccacagaatttgtataactcactaatcgaaaaggtgaaactctttttcattacttggctttcttgtttattctcaaaaccctgacatggtaatttttctgtatatagattactgctaaacaacaggtgaaactacacatggtacaggaaacttttgcctgtttcagtttcacttcaaagtaagatgacttgcttccttttcctagcctctatatctcaatcattcttcgtttctcgataccaagggtcgctatatattacttcatcgcggatgacgcaaatcgcgcaaaagtctgacatactagtgcaaagaagcttgagtacatggatctggatcattacatgttgtgagtttttttgttgtactatgtgcgatgctaaactatctttcttgtacttgcagcacagataaagcgtttcccgtggtcaatcttcatttcgaagactcactgaaactgagtgtgtatccgcatgactatcttttctcacttcgtgtaagtcagtcgcttcctactttgatgtgtttagttcaacagaatattcctactttaactgagttttgatcaatagagttttaacaacatagttatagatggtgttattgtcaaccttcatgaattgtctcatgcacaatgtaatgattttcttaaacaggaagacatgtattgctttggttggcaatctggtggaatgacgactcaggacggagctgatgtaatccttttgggaggtaaaattcatatcatactactaaaccatgtattacacttcatgtgtctgacttgagatttggtttcttcatctatagatttggtgctttcaaacaagttagtagtatacgatttggagaatgaggtcattggatgggctgaccacaactgtaagtctctaaaactcaagaactagttaaatgacgatggatgatcaaagaagaagtcaaacacaccaaaaatgttttgtttcgttaggttcgtcaagcatcaaagtcaaagatggatcaggagcggcttaccaactcggagcagaaaatctcatatcggcggcttcttcggttatgaacggaacacttgtaacgttattgtccatactaatttgggttttccattcttttacttcatagttttgctaacaaggagatggtttgggttttgattcatttgatcctttgtgggtgtggtttggctttttgggtcatgtaactttacatagacaacttactcattctttgttgtatactcccaaagatatatatatgtactcttttggtcttaactcttaagtctttgtaatttacgtaaggactaaaaacatctacgtaactattttgtgatgttatgtttggcaaccagaaaag
